United States Patent Application Publication US 2005/0228172 A9 - sequence listing, part 192

SEQ ID NO: 867620 - DNA, 601 bp, Homo sapiens
ttcaaatgtccatgaaaagtagaataggtaaatttggtatatttatataatggaatattacacagcagaaaaaaggtacaaatgactacaacatgtatcaacatggatgactctcaaaaacatggatgaatgatgatcaacagaaataaactactaaaactcaggcagtatgstttcatttatattaagaacaaaaactagccaaactaagtattaaattctaagagatacaggcatacttagtaaactgtaaagaaaagcaggggtatgattaatacaaaattcagatgctgtttctcttgcagggaggagagggcactataatttgagagaggtacacagaggtctttaaggtactggtaatgttctgtttcttatcctgggtaattgctgcacatttcattattttttttaatactctccagataacatttattcatttttatatatgatatattcccccaattaaatgaaaagtcagctttgtaatattgtggccaagactgaatgacacaagacatataaagtgccaagcatctaagaagtgctcaatatgaagtgtctaaatttaaaaaatagaataaaataatgtttacctcag

SEQ ID NO: 867621 - DNA, 601 bp, Homo sapiens
ttcaaatgtccatgaaaagtagaataggtaaatttggtatatttatataatggaatattacacagcagaaaaaaggtacaaatgactacaacatgtatcaacatggatgactctcaaaaacatggatgaatgatgatcaacagaaataaactactaaaactcaggcagtatgctttcatttatattaagaacaaaaactagccaaactaagtaytaaattctaagagatacaggcatacttagtaaactgtaaagaaaagcaggggtatgattaatacaaaattcagatgctgtttctcttgcagggaggagagggcactataatttgagagaggtacacagaggtctttaaggtactggtaatgttctgtttcttatcctgggtaattgctgcacatttcattattttttttaatactctccagataacatttattcatttttatatatgatatattcccccaattaaatgaaaagtcagctttgtaatattgtggccaagactgaatgacacaagacatataaagtgccaagcatctaagaagtgctcaatatgaagtgtctaaatttaaaaaatagaataaaataatgtttacctcag

SEQ ID NO: 867622 - DNA, 655 bp, Homo sapiens
tcagagattcaactgcttcctggtttagtcttgggagagtgtacgtgtcgaggaatttatcgatttcttctagattttctagtttatttgagtagaggtgtttatagtattctctgatggtggtttgtatttctgtgggatcggtggtgatatcccctttgtcggtttttattgcatctatttgattcttctctcttttcttctttattagtcttgctagcggtctatcaattttgttgatcttttcaaaaaaccagctcctggattcactgattttttgaagggttttttgtatctctatttccttcagttctgctcctatcttagttatttcttgccttctgctagcttttgaaagtgtttgctcttgattctctagttcttttaattgtgatgttagggtgtcaattttcagtctttcctgctttcttttgtgggcatttagtgctataaattttccctctacactgctttgaatgtgttccagagattctgrtatgtttgtgtctttgttctcgttggtttcaaagaacatctttatttctgccttcatttctttatgtacccagtagttattcaggagcaggttgttcagttcccatgtagttgagcaattttgagtgagtttcttaatcctgagttctagtttgattgc

SEQ ID NO: 867623 - DNA, 462 bp, Homo sapiens
aagagctgatctcttggcagaaatgctacaagccaggagagagtgggggccaatattcaacattcttaaagaaaagaattttcaacccagaatttcatatccagccaaactaagcttcataagtgaaggagaaataaaatcctttacagacaagcaaatgctgasagattttgtcaccaccaggcctgccctaaaagagctcctgaaggaagcactaaacatggaaaggaacaaccagtaccagccactgcaaacacatgccaagttgtaaaggctgttgaggctaggaagtaactgcatcaactaacgagcaaaataagcagctaacatcataatgacatgatcaaattcacacataacaatattacccttaaatgtaaatgggctaaatgctccaattaaaagacacagactagcaaattggataaacagtcaagacccatcagtgtgctgtattcagga

SEQ ID NO: 867624 - DNA, 462 bp, Homo sapiens
aagagctgatctcttggcagaaatgctacaagccaggagagagtgggggccaatattcaacattcttaaagaaaagaattttcaacccagaatttcatatccagccaaactaagcttcataagtgaaggagaaataaaatcctttacagacaagcaaatgctgagagattttgtcaccaccaggcctgccctaaaagagctcctgaaggaagcactaaacatggaaaggaacaaccagtaccagccactgcaaacacatgccaarttgtaaaggctgttgaggctaggaagtaactgcatcaactaacgagcaaaataagcagctaacatcataatgacatgatcaaattcacacataacaatattacccttaaatgtaaatgggctaaatgctccaattaaaagacacagactagcaaattggataaacagtcaagacccatcagtgtgctgtattcagga

SEQ ID NO: 867625 - DNA, 602 bp, Homo sapiens
ttggtgactcacagtcgggggtagatctaatggatgaatgtaaggatgggcaatttaagccattgtgccaacatggcatatggaatgattctgagagagtgtgatagggccaacccaaggcagagctctagccgagagggtgtgtttgtctttagagccccgactttcttgatgctgtcttctgtatcatctggctatcaacttaaccctgcatgtaattagcctgtgataatggagtcagaagataaatggcttaaaagggtcttggcacagtttatttcatcgtaaaggagaacacctgacagtgggcagaatcttacccccttcatgcgaggaagaaaaatcaaccattggcaatccaaaaatgtctgattgtgcactgctaggtgtgtgtycctgtgggagttacctgggggttacagaaaagtacaaggtacagctctgccctcctggaacttacaacttaggtgtggacaaaaacaccacattgaagctgtaacacttagtacagagccacatgagggaaatgtaaactaaatagcacaggccataagtgccaaaggagtggtgacgaaatgatggtttctcacagctgcttaacg

SEQ ID NO: 867626 - DNA, 642 bp, Homo sapiens
gtccgtggagaaccctcaggtatagtggaactttagatattatctgtttcacagagattttgacacacagattttacattttaagtcatctgacttctaagacatttgtcaaatggctgccttgatataaaaacactataactgctcccaaaacatccctaagaattaagtgtctctaaaggccatgttcatgtactatactgcatttacacagtaaaactcaacgtactggatgacagctacaatttgtagcctggctattattattattwtttttttttggtagaagctgggtctcactgtgttgtccagagtggtcttaaactcttggcctcaagtgatcctcctgcctcagcctcccaaagtgctgagattacaggtatgaaccactgtgcctggcgtcttcactatattttatgtcttctaaaccataattgacttgaattatcaaccagctttgaggaaagaagaggaaaagtagtaagtatataaaaagtagttctcaagaatcagtgtctagtagaactgaaaggcagtgactcagatcccatagtcactgaaatactactaagtcctcctgatttaagatccagccccacagcaggtattagaaggaccttgttaaccttatagacagtgtat

SEQ ID NO: 867627 - DNA, 646 bp, Homo sapiens
cccaaagtccattgtatcattcttatgcctttgcatcctcatagcttagctcccacttatgagtgagaacatacatacgatgtctggttttccattcctgagttactttacttagaataatcgtccccaattccatccaggttgctgcgattgccattatttcattcctttctatggctgagtagtattccatggtatgtatatatatcacaatttatttatccactcattgatcaatcccagtagtgggactgacaaatcaaatgattcctctacttttagttcttgaaggaatctccacactgttttctatagtggttgtactagtttacattcccaccagcagtgtaaagrtgttcctttttcaccacatctacgctaacatctattattttctgattttttttggttatggccatttttaccaggagtaaggtggtatcgctttgtggttttgatttgcattttgctgatcattagtgatgttgagcatttttccaaatgtttgttgtctatttatatatcttctttggagaattgtcttttcatgtccttagcctattttttgatgggattgttttattttcttgctgatttgtttgagttccttttagattctagatattagcctttgtcagatgtatag

SEQ ID NO: 867628 - DNA, 646 bp, Homo sapiens
cccaaagtccattgtatcattcttatgcctttgcatcctcatagcttagctcccacttatgagtgagaacatacatacgatgtctggttttccattcctgagttactttacttagaataatcgtccccaattccatccaggttgctgcgattgccattatttcattcctttctatggctgagtagtattccatggtatgtatatatatcacaatttatttatccactcattgatcaatcccagtagtgggactgacaaatcaaatgattcctctacttttagttcttgaaggaatctccacactgttttctatagtggttgtactagtttacattcccaccagcagtgtaaagatgttcctttttcaccacatctacgctaacatctattattttctgattttttttggttatggccatttttaccaggagtaaggtggtatcgctttgtggttttgatttgcattttgctgatcattagtgatgttgagcatttttccaaatgyttgttgtctatttatatatcttctttggagaattgtcttttcatgtccttagcctattttttgatgggattgttttattttcttgctgatttgtttgagttccttttagattctagatattagcctttgtcagatgtatag

SEQ ID NO: 867629 - DNA, 584 bp, Homo sapiens
gagatgccagtcttaggtttcctcaaagaaatgtgtaaaagaaactgattacttcttttgtatagctaaaaatatatttgttgataaatcaaatattgttttaaaacgttaatatccattttgttccttattaatttgattttctttttgtatatcaagccctttgaataataaagcaatattaataaattatatttttttgttagggaccataatgcaatacttagatttataaaatgtagaaacaaaaaatataaaaaacagaagaaaaacttttttaaagctccataattatttttattataaygtgtgtggagagactattgtctgctcagctttatcatggttacaaagatagttttcctctaatccttgctgtttaagaaaacagttaattgctttaccagaccctctgaagaactgaattctaggtttctgttctttagacgcagtctgaatggtttatgaatttcttttaaaaaataaaattatcagaaattaaaaaatttgctcttgcatctaatttgataaatcattagatataccttatagaagaaaagtaaaagctaaatattatttaatgt

SEQ ID NO: 867630 - DNA, 657 bp, Homo sapiens
agagcaaaggctctgtgggggaggggtaggagtttagtttggacatgctgagttggcatactattggacgtccaagtgcagaaggcaagtcagcagttggatgcatgagtctggagtttgggagcaaggtcaggactagagataagtatttgggagcattagcagagagatggaggatcaaagctcaagcctgggcgaaatcaccgagaagtgaggataccgaaagaagaggaccaagtctgttatgaratgctcaaaaattgaaaggttggggagaatttgaaaaaaaaagtgaaggaaattgaggggaggtttactgaaggatggaagaagagcacaattactccctccattttcaaaactggttaatgttggtaagtttcaaagagtgtttgctctacctaatgaaagtcatctcctcccctgtaggaggcaatagaaattatgcaacactggcaaaaaaaataataataaccttggtctcaaaacatgtaccaaaggtggggggtgccaagatggctaaatagaagcagctagtgcatgctgctctcatggagagaataagtggagcataaacactatctcttcaactggatcatccaggtagacacactgagattaactgaggaagaaaatgacctatggagaacagagaac

SEQ ID NO: 867631 - DNA, 631 bp, Homo sapiens
acaggctggaatataagtaagtgtgctctgttctctttagttggtagaagggaaataggacctgagatgccaccttcttcaaaccaagaccactgatgtttcagggagagggtggggcaagggcaagtaagacagccacaaaactattttcctgccactttgaaggtgactttgtcttgatttggtgtttataatggttataaaccttgggttgatttccagagctcctacaagtttagttcagccagtttctgtcctttttttttttttttttttttttttgagatggagtgttgctctatcacccaggctggagtgcwgtggcgcgatcttggctcaatgcaacctccgcctcccaggttcaagcgattctcctgcctcagcctcccaggcagctgggactacaggcacgcaccaccatacccagctatttttgtatttttagtagagacagggtttcaccatgttggccaggatggtcttgatctcctcactttgtgatccacctgcctcagcctcccaaagtgctgggattacaggcatgagcctccaagcccagtccagtcttttttttttttttttcaatgttttcatgggagaacaagaacttagagctacctagtctgccatt

SEQ ID NO: 867632 - DNA, 584 bp, Homo sapiens
agaaaacactgcattcataaaacaaaaacaaaatgttgtacaaaagaattattcaggaaaacacaaaagaacccataggcattaaaacatgtcaccagaaaagaaaaactcaataaaaaggctgaaagataaaactgagaaaattccctagaaagtagaacagaaggagaaagaggaaaaaaaaaagcaggaaggaaacaaagaaaatcagacgactggttcagaatatctatcatgtaagtaacaaaaacttcagaaagtaagaaaagaaaaatacgaagaggaagaaataaaatacaatggagtcatctagcattcaagaacatgagtttccagcytgaaatgtccaccaagtgtccagaacagtgagatgaaaaggcactcccatcatgaaactgaaaacaggaacacagagatgatcacacaagttgccagaaaagggaaggaggggtaatacattcaagaatcaagaattagaatggctccagggtccccagagcaattttggaagtcttaagacaaagaaaaaaaaagtctccaaaattttgagggggaaacctagacttttataccagccaaactac

SEQ ID NO: 867633 - DNA, 659 bp, Homo sapiens
tcttctgtggataagggggaactgctgtacataggaatcaaagaaaatggggatattaactgggaggaagtggacatgcatgccccctgaaactacaatgaccagcttggctttgtcctagctatgggtacgatcaatgtcaaatctgccttaaaaggatgctagctccaataatattatagctttatttttgttaaaacaggaatcactgtgcgtccccaaataattgacattgctagatacaaagtaggagtcaaatgccatgacacacttcaaagtttggacacttgtaatcataatttggacatttctgaattttcagattctgaagaaccactgcacagtataatgaagggaacggctctgagaccatccttgaaggctggatttcaatggaagrtaaaactttgataccactggttatttagtcagtaaggtgaaaacatgagtgtggcataggaaagatgaatgactggtgtagtacatgtatgagacaggggcgggcgggggagagagagagagagagagagaagactagttcctataaaaaatgataatactgtaacagaatgccataacattttcttagcatcttaacatacttcaaaaattgtaccacattagcatagtagtaaatttttttctagttaaagtgaata

SEQ ID NO: 867634 - DNA, 552 bp, Homo sapiens
tatataacatttttgaaatgacatttcaaaactggaggacatatttgttaatggttgccagggtatagggatggggtgggtgaggaaggtaggagtggttgtaaatgggcaaaataagggatccttgtgatgttggaactgtcagtatcttgactgtggtggtggatacacaaacctatacaggtgataacattttatggaactgtgcaattttcacacatacacacacgtgagtacaaataaagctgggaaaatctgaaaaagatggatggattgtagtaatgtcaatctcctggttgtgataktatactaatgttttgtaaaatgttacattgggagaaactgggtgaagaatacacgagatctagccgtctgatttcttaaaattgcatataaacctagaattatctccatgaaaattgcaaatcgaaaaatgcttagatcagagagggagagttcattcagattacaggacactctggggtgggacgaagagcaagaatgagtgaatgcctctgaattgagccaactgacccagtgaactacctggtc

SEQ ID NO: 867635 - DNA, 654 bp, Homo sapiens
cccagctggggaagtggggcatatggttctacatatcttattttatttctccaaaacatgctaagtggtaggtactattttgatcttcattttatacataaggaagctaagcattggtaaaataacttgtccaatgccacacgactaataggtgggaaaagtaaaatctgggcccaggtttgctgaccccaaggcctttgttcttaaccagaatgtccactgccactcgtggctgtcaataacaagtgactgactttatcatgacacagcttctccaratagcaaggcctgggtcacactgagcctgagctcttcttgtagtgaagggaagacccagagccagatctgaaatgagcccaacttccatgctcaatgttttcattcagtaggtgtttgtcaaatactatgttctcagaaggaagcttgcttttaggaaataagaagtctagcaaggccaggcacagtggctcacacctgtaatcccagcactttaggaggctgaggtgggagggttgcttgatccaaggagttcaagaccagcctgagaaacatagcttaagacccaatcttaaacaaacaaacatacagagtctagtaggatccttgctttctaacatatcttaccatctggttggggaaacaggaacagcacat

SEQ ID NO: 867636 - DNA, 631 bp, Homo sapiens
gtaaataaacccttgcaaaatcatgccagtttgcctgtgacatctgcttccttaactgacagagctctttataaaacagaggtgaaaaactgaaggacaaaaccattgttaaaggaaagtagaatcccaggaccccaaactcactatgccagagaaagttaagcttggcaaatgagtcacataaaaaccgccttccrtttgttcccaaacaaatagctgtaatttcacatgcttactttagctgatgtaaaatgtagatttactgggccccagatgaatgcataattgacttttctctactcatgtgtaaaatgtagatttaccaagcactaaccagaacctcacaagaatgtaaccacttgccttgttgcttacttttttctcttccctcctgcttgctctttcccttttaaataccaaagttcccaaaactctctttggaaaaagcacaggtcacaaattctactatgagctgtgtttgtttttcctgggtgctttctcagccttggcaaaataaacttctaattcattgagatctgcctcagtcactttttggtttgcactttcttctcctctccacctagaaaaagaatcatagatagtgtattcaaagtgtattgtgccctaacgc

SEQ ID NO: 867637 - DNA, 562 bp, Homo sapiens
cctgggactctgctgggatttgatctgcttatttctacctttgtgaaacttcaccttactctggaatactaactctgtatattggtccattctcacactgctataaaggactgcccaagcctgggtcatttgtaaaagamagaggtttaattgactcacagtttcgcatggcctgggaggcctcaagaaacttacaatcatagcagaaggggaagcaaacacatccttcttcacatggcggcaggcgagagaagtgccaagcaaagggggaaaagccttgcaaaaccatcagatctcatgagaactcactatcatgagaacagcagcatgtgggtaatggcccctgtgattcaattacctcctactgggtccctcccatgacatgtggggattatggaaactacaattcaagatgagatttggatggggacacaaccaaactatgtcaccctggaatgctgttccccttcctccatcataatcctcgcatcccccaatttagaccttacctcttccagcattttctccatggttgaccttacccaaagataggactattaac

SEQ ID NO: 867638 - DNA, 659 bp, Homo sapiens
aaacactttgaaaaacatatgaatttgcaaataaatctaagttttataaagaatttttccaagttacaaaatattttacagagtcttatgagtaaaaaaagaataaaatctgtgatatggattgcattttcaaattgaggtaaagatgcagtggctcacaggctgatttgctttaagcagaatttattttctttcagacagtagctttatgagcctatgctgagactgggcaattcagaaatttaagggctgctcagacatgctctctttgaccaggtcagacagcctgtaagtctttgttctcaatggacagtacactgcattacatttatgatccagaagaaggccggcagaggctataaaaaatattctttgcaagaaagtttccaagccattcaactgtataaattacctagatatctcgctctcyacttaaggaaagaacatttccctcccgcaaaacagattactttttcattcctgaatgatttgtttttggatatttatttgctggtttaatttttgaataggtgttaaatttacacagtctaaattttaaaaatatacattgaatgaaacaactttcttcagtctcactccttcatctacctgttccccatcctcaccaaagataaaacatgaaaccatcattgtttctt

SEQ ID NO: 867639 - DNA, 597 bp, Homo sapiens
cactgattatcagggaattgcaaattaaaatcacaataagatatcttttcacacctgttagaaagctattatcaaaaagacaaaggataacaagcgttggcgaggatgtggagaaaagggaatgcttgtacatttgtgggtaaattggcacagctattatggagaacagtatggaagttcctcaaaaaattaaaaatagagccaccatattatctagagatcccacttmtaggaatacatccaaaagaaatgaaattagtatgttgaagagatatttgcactcccaagttcattgcagtattattcacaatagctatgatatggaatgaacccaagtgtccactgatggatgaatgaataaagaagatgtggtataaatatacaatggaatacaatttggccttatgaaaagaaaatcctgccatttgtgacaacatggataaaattggaatacattatgctaagtgaaataagccaggcacagaaagacaaacactgaaagatctcacttacatgtggagtctaagaaagccaaactcatcgaagcagaaagtagaatggtggttgctagggttaaggcagaggagggaaaatgag

SEQ ID NO: 867640 - DNA, 614 bp, Homo sapiens
aatatcctaaaattcataaggaaccaaaaaagagccctgatagccagagcaagactaagcaaaaagaacaaatctgaaggcatcatatcacctgacttcaaactatactacaaggctatagttaccaaaacagcatggtactggtataaaaataggcatgtagaccaatgtcacagaattaagaacmcagaaataaagccaaatacttacagcaaactcatcttcaacaaagcaaatgaaaacatacagtggggaaaggacaccctcttcaacaaatggtcctgggataattgttaagccacacgtagaagaataaaactgaatcttcatctctcaccttctacaaaaatcaactcaatatggatcaaagacttaaatctaaggcctgaaatcataaacattctagaagataatttggaaaaactcttctagatattggcttaggcaaagacttcatgaccaagaacccaaaggcaaatgcaacaaaaccaaaaataaatagatgagacctaattaaactatgaagcttctgcacagcaaaagaaataatcaactgagtaaacagacaacccacagaatgggagaaaatattcacaaactatgcatccaacaat

SEQ ID NO: 867641 - DNA, 644 bp, Homo sapiens
taagagtttgtgcttaacagtcagagaaacctagattaaaatctcagttctgctacttattagctatgtgactctggacaagttacttaacctctctgatccttagtcttatagtcataaaatcgggttaatagtaccttcttcatataactgtcagaaatgatggcatcttgttatataaagtatttggcacacatttgtaaacacttactaaatggtaactgctattaattattatactgtatccaatgttctctttacttctccccaaataaattcccttagcattcatgccatttttttctattaaaatgttttcccttttacctcacgtccttgaagactcaacccaacctcttycactgataatgtatttatatgattatcaaaacaagaacttcaataacactctgtgctactgatttgttctattataccagattataactctatcagattacaaggccttataagtcagaggcaatatcttaaaccacaaatcttacagatttgaaccttgcacattccaactaataagtatgtgaaacaacagacaattgaataagtatcttaaacataagttgtgatgcatcccatatgccacacaaagctaacatttgtatagttctttatattataagcat

SEQ ID NO: 867642 - DNA, 523 bp, Homo sapiens
ccccagtgtgtgatgttcccctccctgtgtccatatgttctcattgttcaactcccacttatgagtgagaacgtgcggtgtttggttttctgttcctgtgttagtttgctgagaatgatggtttccagcttcatccgtgtcctgcaaaggatgtgaactcatccttttttatggctgcatagtattccatggtgtatgtgtgccacattttctttatccagtctrtcattgatgggcatttgagttggttccaatcctttgctattgtgaacagcactgcagtaaacatacttgtgcatgtgtctttatagtagaatgatttatatcctttgggtacatacccagtaatgggattgctgagtcaaatggtatttctggttctagatccttgaggaattgccacactgtcttccacaatggttgaactaagttacactcccaccagtagtgtaaaaagcattcctatttctccacatcctctccagcatctattgtttcctgacgttttaatgattgccattcc

SEQ ID NO: 867643 - DNA, 629 bp, Homo sapiens
tgtactttgtttatgatctgagttgcaaatacttttattccttccttgacatttatcatttgccttaacttatggtgaatttttaccatgcaaatgtttttgattttcatgttgttcagtatgtcaatatattttatattcattacattcattagtggctaaaacttcccaaatgttggtaggaatatggatgtctagattagtgaggctcaaatgctccaggcaagatcaacgcaaaaaatacttttcctagacacattaaaatcaaattgtcaaaatcaaagacaaagtgagaattctgaaagcagcaagagaaaaactactcatcacatggaagggtactcacaaaggctacaagcagatttctcagcagaaactttgctgggcaggagggagtggaatgatgtattyggagtactaaaagaaaaacaaaactgccacataagaataatgagtctgtaaaagctgtactttagaaatgaagagacataaaatcattcccagagaaaagaaagctaagagagtttatttccactagacctgccttaagagaaatgccaaagggagttcttcaagttgaaatgaaaggacccgaagtaacatcatgaaaacacaggaaatcccatagc

SEQ ID NO: 867644 - DNA, 638 bp, Homo sapiens
gttagcctacctcataaattaaaatctgggagcaagaatttttttggtagcaacgttgcatcagtactgacatacaagagatgattctgagagtagcatgggagagaggaagaatacagattctgcaataataactgtatcaggtgatatttttcttcacctgttacatttcaratgatggaactttaagtattgagtggctcaaggacttctggggcacagagattccactttagaagctttctttcttccttgaacactttaggtttaaatgtctccttttaggacaaactcctgtttggagtatggtattttctctattctaagtaagtattaagaatcaataagggcctctgtcctctgttcagtttctgaaggaccatgcaccatggttaaaatacttgtccataatatgtcatgatagtgtggtatgcctgctaacatcactatttcatactttgcagtttctaattctgccctaacaagtaatctttaattcttcttcaagtattaagataaataatattattaaattggtatctagtagttatactaaattcatttttattaagttcattaacagtgcctgtgttcaccaccttactcgtaggtaacaaacatggggcatcttcatttaa

SEQ ID NO: 867645 - DNA, 638 bp, Homo sapiens
gttagcctacctcataaattaaaatctgggagcaagaatttttttggtagcaacgttgcatcagtactgacatacaagagatgattctgagagtagcatgggagagaggaagaatacagattctgcaataataactgtatcaggtgatatttttcttcacctgttacatttcagatgatggaactttaagtattgagtggctcaaggacttstggggcacagagattccactttagaagctttctttcttccttgaacactttaggtttaaatgtctccttttaggacaaactcctgtttggagtatggtattttctctattctaagtaagtattaagaatcaataagggcctctgtcctctgttcagtttctgaaggaccatgcaccatggttaaaatacttgtccataatatgtcatgatagtgtggtatgcctgctaacatcactatttcatactttgcagtttctaattctgccctaacaagtaatctttaattcttcttcaagtattaagataaataatattattaaattggtatctagtagttatactaaattcatttttattaagttcattaacagtgcctgtgttcaccaccttactcgtaggtaacaaacatggggcatcttcatttaa

SEQ ID NO: 867646 - DNA, 577 bp, Homo sapiens
ctaatcttctatgtgtgtgtatggagtgggtgtaaatcctgaatcctttcagtaagaagggtacacctatgaatgccttctcagtacacttggccctctgtacccatgggttctgcatcctgggatttaactaaccatggatcaaaaacttaagaraaaagtttgcactggacatttacggatgtttttttcttgtcattatttcctaagcaatacattataacaattacttacataacatttacgttatactaggcattacaacaaatctagagatgatttaaaatatatgagaggatgtgaatgggttataggcaaacactatgccatttcctatcaggggcttgagcatccatggattttggcgtctgccagaggtcctggaagtaatctcccacgaatactgtgggacaactgtataatagttttttgttgtttttagtttgtttttggagacagggtctgctatatcacccaggctggactgtagtggtgtgattgtagctcagtgcagccttaaactcgcagtctcaagcgatcctcctgtctcagcctccctagtagttaggaccacatg

SEQ ID NO: 867647 - DNA, 577 bp, Homo sapiens
ctaatcttctatgtgtgtgtatggagtgggtgtaaatcctgaatcctttcagtaagaagggtacacctatgaatgccttctcagtacacttggccctctgtacccatgggttctgcatcctgggatttaactaaccatggatcaaaaacttaagagaaaagtttgcactggacatttacggatgtttttttcttgtcattatttcctaagcaatacattataacaattacttacataacatttacgttatactaggcattacaacaaatctagagatgatttaaaatatatgagaggatgtgaatgggttataggcaaacactatgccatttcctatcaggggcttgagcatccatggattttggygtctgccagaggtcctggaagtaatctcccacgaatactgtgggacaactgtataatagttttttgttgtttttagtttgtttttggagacagggtctgctatatcacccaggctggactgtagtggtgtgattgtagctcagtgcagccttaaactcgcagtctcaagcgatcctcctgtctcagcctccctagtagttaggaccacatg

SEQ ID NO: 867648 - DNA, 608 bp, Homo sapiens
gagtcagagtggcagacaggaaaggaaaaattacttgcattccaatcatatggctagagaatcctccagcagaaagtctactctaaactgggttgagtctgcatttagcaaaaggcagcagatttaagtggagacaatgctgagctcatgagataaagagcaagatgaggctataaatggcaaatagagcatgtgatgagaactgggaaagatgtggagaagtttaggaagcattttgtgaggagaaataagacagacaagcggtttaggaaaaggctgccattttccagcactgagtcagaggtggtaactttaagtaactatagaagtcttygggaatccacatcaaggaaagatctgttttcttcttaggaaggagtggctgaagctttgggtatttttgtttgtttgtttcccattttgttttataatttttttttattttactttaagttctgggatacatgtgccgaacatgcagttttgttacataggtatacatgtgccatggtggtttgctgcacccatcaacctgtcatgtaggttgtaagccctgcatgtattaggtctttgtcctaatgctgtccctccccttgccccccatgccc

SEQ ID NO: 867649 - DNA, 669 bp, Homo sapiens
gcctacaaaaccactttttccttctaggtctgtgggcctgtgatgggaggagctgccataaagacctctgacatgccctgagacataccccgttgtcatggggataaacattgggctcctagttacttatgcaaatttctacagctggcttgaatttctcctcagaaaataggattttgttttctattgcattattgggctgcaaattttttaaacttttatgctctgcttcccttataaaactgaatgcctttaacagcacccaagtcacctcttgaatgctttgctgcttagaaatttctcccaccggataccataaatcatgtctctcaggttcaaagttccacaaatctctagggcagggcaaaatgctgccagtctctttgctaaaacataatgagtcactgttgcgccagttccccaaaagtttctcatctccrtctgagaccactcagcctggatttcattaaccatatcactatctggcatttggtcaaagccactaaacaagcctcgagggagttccaacctttcccacattttcctttcttcttctgagccctccaaactgttccaacccctgcctgttactcagtcccagagtcacttccacatttttgggtatctacagcattgccccactctcctggtatcaatttactgtattag

SEQ ID NO: 867650 - DNA, 623 bp, Homo sapiens
gcccagcatgccttagccatttttcctgatgctctcccttttcccggcccctcctgagaggccccagtgtgtgttgttcccctctctttgtctatgtgttcacattgttcaactcccactgataagcgagaacatgtggtgtttggttttctgttcctgtgttagtttgctgaggttaatggcttccagctccatccatgtccataaaaagggacacaatcacatccctttttatggctgcatagtatcccttggtatatacgcaccacatgttctttgtccagtctatcattgatgggcatttgggttgactccatgtctttgctattgtgaatagtgctccagtraacataatgtgtacatgtatctttataacagaatgatttatattcctttgggtatacacccagtaatgggatttctgggtcaaatggtatttctgggtctagagctttgaggaatcaccatactatcttccacaatggttgaactaatttacgttcccaccaacagtgaaaagcgttcctatttctctgcagtctcaccagcatctgatgtttcttgactttttaacaatcaccattctgactggcatgagatagtatctcattatggttttaatt

SEQ ID NO: 867651 - DNA, 623 bp, Homo sapiens
gcccagcatgccttagccatttttcctgatgctctcccttttcccggcccctcctgagaggccccagtgtgtgttgttcccctctctttgtctatgtgttcacattgttcaactcccactgataagcgagaacatgtggtgtttggttttctgttcctgtgttagtttgctgaggttaatggcttccagctccatccatgtccataaaaagggacacaatcacatccctttttatggctgcatagtatcccttggtatatacgcaccacatgttctttgtccagtctatcattgatgggcatttgggttgactccatgtctttgctattgtgaatagtgctccagtgaacataatgtgtacatgtatctttataacagaatgatttatattcctttgggtatayacccagtaatgggatttctgggtcaaatggtatttctgggtctagagctttgaggaatcaccatactatcttccacaatggttgaactaatttacgttcccaccaacagtgaaaagcgttcctatttctctgcagtctcaccagcatctgatgtttcttgactttttaacaatcaccattctgactggcatgagatagtatctcattatggttttaatt

SEQ ID NO: 867652 - DNA, 625 bp, Homo sapiens
ttctcattagttttaaagaacttcttaatttctgccttaatttcattatttacccaggagtcattcaggagcaggttgttcaatttccatgtagttgtgtggttttgagtaagtttcttaaccttgagttctaatttgattgcattgtggtctgagagactattatgatttcagttcttctgccttttctaaggaatgttttacttccagttatgtgatcagttttagagtaagtgccatgtggcacttagaagaatgtatattctgttgtttgggggtggagagatctgtagatatctttcaggtccacttgaaccagagctgagttcaagtcttgaatagctgttaattttctgtctcaatgaactgtctactattgacaatggggtgttaaagtctcccactattagtgtgtgggaatctaagtctctttgtaggtctctaagaacttgtyttatggagtcctcctgtattgagtgcatatacctttaggacagttagctcttcttgttgaattgaaccttttaccattatgtaatctccatctttgtcttttttgatctttgtttaaagtctgttttgtcagaaaccaggattgcaacttggttctattcgcttggtaaat

SEQ ID NO: 867653 - DNA, 645 bp, Homo sapiens
aaactattccaatcaatagaaaaagagggaatcctccctaactcatttgatgaggccagcatcatcctgataccaaagccaggcagagacacaaccaaaaaagagaattttagaccaatatccctgatgaacactgacgcaaaaatcctgaataaaatactggcaaaccgaatccagcagcacatcaaaaagcttatccaccatgatcaagtgggcttcatccctgggatgcaaggctggttcaatatatgcaaatcaataaatgtaatccatcacataaacagaaccaaagacaaaaaccacatgattatatcaatagatgcagaaaaggcctttgacaaaattcaacaacccctcatgctaaaaacgctcaataaattaggtactgatgggacgtatctcaaaataataagagctatctatgacaaacccacagccaatatcatactgaatgggcaaaaactggaagaggagtggagtaggaaaagattggattgatttggacaartatatatgctagcagggatacagttaaaaagttcaatggttatttaggaattacctttggagttagctgtgttcaaaaattagcatattagtttggtatatggaacagattctttcaaatgatgtggtttgccataa

SEQ ID NO: 867654 - DNA, 594 bp, Homo sapiens
gggcagttttgcttatgaagggtctacaaactaagaataggtttaggatgtcagaactgaaaaagatcgggtatggtggcacatgcctgtaatcccagcactttgggaggccgaggcaggcagatcgcttgagcccaggagttcgagaccagtctgggcaacatggcgtaaccctgtctctaccaaaagtacaaaaaaaaaaaaaaaaaaaaattaccgggtgtggtggcccacacctgtagtcccagctagtgaggtgggacctgggggctgaggtgggaggaaagcttcagcttggaggttgaggctgcagtgagccatgattgtgccactgcactccygcctgggcaccaaagtgagacaaagatagaaagaagacagagagagagagagaaaggaaggaaggaaggaaggaaggaaggaaggaaggaaggaaggaaaaaaaggaaaagaaggaaagagagaaaaaagaacaaaagaaaagaaagatcttggaggtcatgtactttgatgttcccttctactaatgaggaaagggggaacaggggaagttaaaacccttggtgaaggtcaaatggcaagtaagcaaaagaa

SEQ ID NO: 867655 - DNA, 407 bp, Homo sapiens
aggaaaaagagacttcttcctgtcttgggatctagatgccaaggaatacaagtctaacagtactagtgacagcagtagcaaagagccattttgtgaattaagcctccaaataagttaaaatcctattggtatcctgaacataagtgggtctgtcttcccaccctaagaamcaaggccatgtcaggagcagacacaactgatatctagtgctaaaagctctcctaagtaccttgcataatgtatctacctggatgaagtgaaatggctggcagtaaacccgtaacactcagggcctagtgttttctacccaaggacaacatagtacacctctttattcctgaagatgccaccaaaaccttggtgaattatcccacattgacatccaagctaatggaggcataaagatg

SEQ ID NO: 867656 - DNA, 407 bp, Homo sapiens
aggaaaaagagacttcttcctgtcttgggatctagatgccaaggaatacaagtctaacagtactagtgacagcagtagcaaagagccattttgtgaattaagcctccaaataagttaaaatcctattggtatcctgaacataagtgggtctgtcttcccaccctaagaaacaaggscatgtcaggagcagacacaactgatatctagtgctaaaagctctcctaagtaccttgcataatgtatctacctggatgaagtgaaatggctggcagtaaacccgtaacactcagggcctagtgttttctacccaaggacaacatagtacacctctttattcctgaagatgccaccaaaaccttggtgaattatcccacattgacatccaagctaatggaggcataaagatg

SEQ ID NO: 867657 - DNA, 606 bp, Homo sapiens
ttacatgaacttagatggtatagcctactacacacctaggctatatggtatagcttgtggctcctaggccacaaacctgtatagcatgttgctgtactgaatactgcaggcaatggtaacacaatggtaagtacttgtgtatctacacatatgtaaacatacaaaaggtayggtaaaaaagcataaaaagataaaaggcataaaaataaaaaataaagtataaaaagcatgaaaaataaaaaaatggtttatcaatataagggacttaacatgaatggagcttataggactagaagttgccctgggtgagtcagagagtaagcggtgagtgaatgcaaaggcctaggacaatactgtacactactgtacttaaacaacaatttctttcttcaataataaattaacctcagctgttactgtaactttttattttatgaactttagattttaaaagttttgactcttttaatacttagcttataacacaaacacactgtacagctatacaaaaatattttctccttatagctgtattctacacacttttttatattaatttttgttttactttttaaacttttttgttaaaaatgaagacacgaacac

SEQ ID NO: 867658 - DNA, 695 bp, Homo sapiens
ggaggtggttatataacctataatctcccacctgagtaagggtagattgaattcacaaagggaaatcctctggggccattcccctttcttcaaatttccagtctctctgttcttctctctcagctcaacagaattgaacagaattttttggtggggtgtaagaggcagattattacctttttaggctattgattttaggatccagacaatctgagtacaagcggcagctctgtcttttcttcactgggcaagtcacttaacctctgggacttgtttctccatctatcaaatagggaaaccatgttgttttattttattttattttattttacttttttgagacagattatcactctgtcacccaggctggagcatagtggcgtgatctcatttcactacaacttctgcctccygggttcaagcaattctcatgcctcagcctcccaagtagctaggactacaggtgcacaccactatgcccagctaatttttgtatttttctagagatgcggtttcaccatgttggccaggctagtctcgaactcctggcctcaagtgatccaccccaatcagcctcccaaagtgctggaattacaggcgtgagccaccgcagctggcagaccatgttgttttagaaagtcttgatagacaacaaggaaaactctttgttcattatttaattaaggataacctta

SEQ ID NO: 867659 - DNA, 659 bp, Homo sapiens
cattgtctgaagatggagtagggtcctagaggcctctgtagttgctgaattatgggactattggtaagagtggtcctggagaagtggttgaatttcccatttaccaactgctctcgtttggatgtttgtccctgcaaacctcacattgaaatttgatccccaatgttggaggtggaaattaatgggaagtgtttggttcatgatccaggagttacctgatgtcctcctcatggtaatgaatgggttcttgctctattagttaccatgagagctggttgtttaaaagaatttggccataccctctgtctcttgcttcttctctcactatgtgatccctgmacatgctggctctactttgccttctgctatgagtagaagcagcctgaagccctcaccagaagcagatgctggtgccatgcttcttgtacagcaggcaggactgtgagccaaataaatctctttttattataaattactcagccacagatatttggtaataacaacactaaacaaactaaaataccaacctctatcaaaagatgctctaatagtccaggtgtgttggctcacacctgtaatcccagcactttgggaggctgagatgagtggattgcttgaggtcaggagtttgagaccatcctggccaacatgatgacatc

SEQ ID NO: 867660 - DNA, 659 bp, Homo sapiens
cattgtctgaagatggagtagggtcctagaggcctctgtagttgctgaattatgggactattggtaagagtggtcctggagaagtggttgaatttcccatttaccaactgctctcgtttggatgtttgtccctgcaaacctcacattgaaatttgatccccaatgttggaggtggaaattaatgggaagtgtttggttcatgatccaggagttacctgatgtcctcctcatggtaatgaatgggttcttgctctattagttaccatgagagctggttgtttaaaagaatttggccataccctctgtctcttgcttcttctctcactatgtgatccctgcacatgctggctctactttgccttctgctatgagtagaagcagcctgaagccctcaccagaagcagatgctggtgccatgcttcttgtacagcaggcaggactgtgagccaaataaatctctttttattataaattacycagccacagatatttggtaataacaacactaaacaaactaaaataccaacctctatcaaaagatgctctaatagtccaggtgtgttggctcacacctgtaatcccagcactttgggaggctgagatgagtggattgcttgaggtcaggagtttgagaccatcctggccaacatgatgacatc

SEQ ID NO: 867661 - DNA, 659 bp, Homo sapiens
ctgccccataggcagcaataaaatagaggtccctttcccctgccagagtgatgtcaagaaaagtcaactaaaacagaaggttttaatatgttttagaatctaaaaacacaacacccaaatgttgaggctttaatagaaaactacttgtcatatccaaattattcaaactgaatgaaaaaggccattaataggtagacayactgagataatagatatgttagaattatctaacaaagactttaagcattcatcataaaaatgcttcaaagagccattataagcacacttaaaacaaattaaaaatacaagtctcagcatagaaatagaggatgtagagaagaaccaaacgaaaattttagaagtgaaaaagacaatagccaaaaaaataaaaaaagaataagctcaacagcatgagggggacacaggaaaaaatcactgggctagaagatataacacaattaaccaattcgaacaacagaaataccaaattgaaaaataaaagtgaacaaaccttcagggacctgtggaaatgtaagaaaatatctaacattcaagtcattggattaccagatggagaggagaaagagaaaaaggctgaagatatactgaaggaaataatggctaataactcatacaatttagcaaaagacataaactga

SEQ ID NO: 867662 - DNA, 529 bp, Homo sapiens
ttcattcaatccaccattgatgggcatttatgtacatgtctatgccactgtgaatatagctgtgatgatacaagtttatgcatctttttggtggaatgatttattttctcttggatatatacccagtaatgggattgctgggtcaaatggtagttctgttttaagtttggtgaaatctccaaaccgctttccacagtggctgaactaatttatattcccacctctgtagcctcaccagcctctgtcagtytttgaatttttgataatatccatctggctggtgtgagatggtatctcattgtggttttcatttgcatttctctaatgatgagtgatgttgagaattttttcatatgcttgtgggctgcatgcatgtcttcttttgagaaataactgttcatgttttttgcccactttttaatggagttacttgccttttttcttgttgcattgtttaaattccttatagattctggatattagacatttattggatacacagcttgtgaatattttatccattctggag

SEQ ID NO: 867663 - DNA, 596 bp, Homo sapiens
ctgtgagctgttagtggcaaacattcctggcagctggggaaacgcacgcccttgccctgagggtagacccaggcagagtaacacagcattcactgtcatctgcttgcatctctttaaaaccttgagagttcctaaaaattcaacggatgtttttgtacttaatttatttcttgtatgtgtctcaaccacagaatctcaaactgctaaagaaacatttccttagcatccagtagccatactgaatccggaagcgtgctctaaatattagtataaacaaattagattttcctctcaaacatgaagcagggggccgggcgcggtggttcacgcctgtaatcccagcactttggaaggccgagagggrcggatcacgaggtcaagagattgagaccatcctggctaacacagtgaaaccccgtctctactaaaaatacaaaaaattagccgggcgtggtggcaggtgcctgtagtcccagctactcaggaggctgaggcaggagaatggcgtgaacccgggaggcggagcttgcagtgatccgagatggtgccactgcatcccagcctgggagacagagcgagactccgtctcaaaacaa

SEQ ID NO: 867664 - DNA, 624 bp, Homo sapiens
gtgaagttttattattatttgtttgacatactctctagcctgaaaatattagtacagcatgggctcttcttttgaaggctttggactgtaggagtttctgtatatgtgtgtgtgaatgtgcatcagtatacatgtatatgttttgtctgttcacaattatattaatattagcctctaaaaatgcagaaggatgattagacaagtatcagatattatgtgataattaaattaaaaagacagcaacaatctaagacactttactagatatagcagaaatcatgacatgtatttatatctattattatgcatgtatataaacatatcagaatttaaaatgagcttaattccaaattttccactgattggcatgaaagtttacacttgctattctttttaaattgtgggctatttgaacaaagttaatactacagtattaagaaattacaaatttatttcagtaamtatttaaccataagagattattgtgcacttattttatttcaggtttatgtcttcctcctatctttcttgtaattggaggtagcataaataccaaatataactgctaaaacagtatttaattctctcattgccatgcaaaatattttataaattctcacagtt

SEQ ID NO: 867665 - DNA, 615 bp, Homo sapiens
gggaggttggagtggcacatggctgtatctagcaggctcctgttgactggtgggcccaagcagtgagtgcctgtgatatgtttggtgctcaggacctgcttacttgctggaccacacttgacaatgtagctccttcccttcgccttcccaggggtgcgggaaacacacaggcatgaagagcgtggcctgggcgggaaattaaaagttaatgttttcactcagttaatagacatttggctcttttttgtgaaatttttctttttttcctcttcacaacactcttttaggtgttatgtagagtgatgggaagagtgactgtgcttttgcttgaagtgcagtgggtatggcrggaactctgcaaaggtgcctcttccatgagggtctagcagattaaaatactttgaattttaattcaaataaatgcccatcaaacattaaatttgtttagaattaggataaacactctccttttaggaaaataaattctataatgtattactattattaaaaaaccttcaaaaacatgtaattagagaagaaaattaaaatatccagggatttttagaaactacaaatattctgatcctccacaatgtcccctactattttgatata

SEQ ID NO: 867666 - DNA, 637 bp, Homo sapiens
ttgtcagaaaagatgcttgatattacttcgtttttttaaatgtcttcagactttgttttgtgaccccttatggtctatccttgagaatgttcaatgtgcctaggaaaagaatgtgttgtctgttgctgttggattaaatattctgtaaatatttatcagatctacttggtctatggtacagattaagtgagatgttctttattttctgtctgtaagatctgtccaatgttgaaagtggggtgttgaagtttccagttattatggtattggagtctacctctctctttagctctaataatgattgctttatatatctgtgtgcttcactgttgggtgcacatatatttaaaattgttatatccccttgcttaactgacccatttattattatatagtgaccttctttgtgtyttcttttagctttcgtcttgaaaactattttgtttgatgtaagtatagttactgctgctcttttttggtttctgttgtcatttaatatttttttccatcccccctccttttttttttagtctatgtgtctttatacgtgaattgtgtatcttgtaggcaacagatcaatggatcttgttttttgtaatccattcaaccactctatgtattttgactggagagttta

SEQ ID NO: 867667 - DNA, 653 bp, Homo sapiens
aaatctctttctcttcataaattacccaatcttggatatttcttcatagaagtatgaaaatagacaaatacagtaaattggtactgcagagagtggggtgctgctgtaaagatacctaaaaatgtagaagcaactttggaactgggtaacaggcagaggttggaacagtttggagggctcagaagaagacaggaaaatgtgggaaagtttggaacttcctagagatttgttgaatggctttgaccraaattctgatactaatatggatgataaagtttaggctgagatggtctcagatggaaatgaggaacttgttgagaactggaggaagggtgattcttgctacaggcaccaaaacatggtgcctgtagtcccaatgttttggccaatttctcccatttggaatgggtgtctttacctaatgcctgcacccccattgtagctaggaagtaactaacttgcttttgattttacaggctcataggcagaagggacttgccttgtctcagataagcctttggactgtggacttttgagttaatgctggaatgagttaagactttgggggactgttgggaagagatcattggttttgaaatgtgaggacatgagatttgagaggtgccaggggtggaattatatggtttggctgt

SEQ ID NO: 867668 - DNA, 663 bp, Homo sapiens
aaatctctttctcttcataaattacccaatcttggatatttcttcatagaagtatgaaaatagacaaatacagtaaattggtactgcagagagtggggtgctgctgtaaagatacctaaaaatgtagaagcaactttggaactgggtaacaggcagaggttggaacagtttggagggctcagaagaagacaggaaaatgtgggaaagtttggaacttcctagagatttgttgaatggctttgaccaaaattctratactaatatggatgataaagtttaggctgagatggtctcagatggaaatgaggaacttgttgagaactggaggaagggtgattcttgctacaggcaccaaaacatggtgcctgtagtcccaatgttttggccaatttctcccatttggaatgggtgtctttacctaatgcctgcacccccattgtagctaggaagtaactaacttgcttttgattttacaggctcataggcagaagggacttgccttgtctcagataagcctttggactgtggacttttgagttaatgctggaatgagttaagactttgggggactgttgggaagagatcattggttttgaaatgtgaggacatgagatttgagaggtgccaggggtggaattatatggtttggctgtgtccccaccc

SEQ ID NO: 867669 - DNA, 640 bp, Homo sapiens
gattcagagaaatgtggctgggagcagtggaaaggaaactagacttgccgccaggaaacctactgtgatgaacctgggcaaattgctcactcccacaagcacgggtttcattactcataacacggagacacagaatggaaaggaacagttgctgagcgcctgcaactggacacattctcatgtatgccatacaagttttacaatgaatctggaaagtgaattttattatcttatttttcaaataatgtactagaataagtgatgtaaaataattcacctaagttcacatggctagtcagaagtaaaagttgggtatttttgaaataagagctcatattctttctgcttccayccagttgtaagaattaattgttattgtgaagattaactgagatactctaagggaacatggacagtgcttgacctattctagatgctcacatagggaaatgcatgcaacactgcagcaataaagtctcagtcaggcagacttggtttgaatcctaattctgctgtttatgagctctgtgacttggggcaatttacttaccctctttgaacctctgtttcctaataccaactcatgaaaaaaaattatgtgataataactgatgtcagtagccgatgtctaaactatcag

SEQ ID NO: 867670 - DNA, 650 bp, Homo sapiens
catcaaagggctcacaaatatccctttccagattctgcaaaacgactgttccaaactgctcaatcataagaaatgttcaactctgtgagataaatgcacacataacaaagaagtttctcagaatgcttctgtcaagttwgtatgagaaaatatatctcttttcaccacagaactcaatgagctcgtaatatccatttgcacatactacaaaaagattgtttccaacatgctcaatgaaaacaaagggccaacaccctgagatgaattcacacatcacaaagaagtttctgagaatgcttctgtctagtttttatgtgaagatatttccttttccaccataggcctcaaagtactccaaatatccacttgcagattcttaaaaagagtgtttccaaactattcaatcaaaagaaagattcaactccgtgagatgattgcacacatcacaaagaggtttctcagaatgtttctctctagtttttatgtgaagatatttcctttcccaacatagtcctcaaatcgctcaaaatatcaacttgcagattctaaaaaggagtgtctcaaaactgctcaatcaaaagaaaaattcaactctgtgagatgaatgcacacatcacgaagaagtttctcagaatgcttctatccagttt

SEQ ID NO: 867671 - DNA, 546 bp, Homo sapiens
tggaaaatgtagaagagatggataaattcctggaaaaatacaaccctactagcttaaaacaggaagaattagataccctgaacagatcaataacaagcagtgagattaaaatggtaatttaaaacttaccaccaacaaaaaaaaatccaacagattcacagyaaaattctaccagaaattcaaagaagtggtaccaaaccttttgacactagataaagaactctccctaattcattctatgaagccagcatcactctaataccaaaaccaggaaaagacacaaccaaaaagaaaactacagacccatatccttgataaacattaatgctaaaatccttaacaaaatattagcttaccaaatccaacatgtcaaaaagataatccaccatgatcaagtgggtttcacaccacagatgcagggatggtttaacacacacaggtcaacaaatgatacaccacataaacagaattgaaaacaaaaatcacatgatcatctcaatagatgcagaaaaaacattcaacaaaatccaacatcgctttataatt

SEQ ID NO: 867672 - DNA, 593 bp, Homo sapiens
agtaagatgtgagcagatattaatgtctttttcacagtctatatttgtacaatttttctcaaatatgaatgcttttctctgcaataaggtgtgagtattagttaaaaattttgccaccttgttctcacttgtaggaattttttccactatgaattatatcacctataatcaagtatgacaaccatttaaagactttgtcacattcttcacatttctaggatttctcagcaatatgatttctcttatggttagaaaagtttgaggtattgtcaaaagcattatcacatctttctgrtttgtagagtttctctccagtatgaattatcttatgtgtgttaagaactgaggactagctaaagcctttgccatatttttcacactcatggggtttctctccaatatgaattttcttatgtttattaagaattgaggactggttaaaggctttgtcacattcttcacatttgtagggtttctctcctgaatgaattattttgttcaataaagttttaggactggttaaaagctttgccacattcttcacagttgtaagcagcttatgttatgtttagtaggagttgaggactggataa

SEQ ID NO: 867673 - DNA, 590 bp, Homo sapiens
tgctgttccccccaacccttctctagagtctaccttgctttgaacatttttggctttgttttgttctttttttgctgtgtttccaactccactgtgattctcatcctggaggtgagaatacatctgacttgtttagccatcagcattctgagcctaagtcatggtttgcattcatcctctggcttctctcactctagattactcatmatgagaccccaggacagtcctctccccaagtccattgcctacctcattggcccctaacataggaacagacacatgggggatcaacataaggaggttctattaaaagattgtagtaccacctcacctataaagtagaaagcacaaggttcatagatctcaaagattcttgcagagtcctgagtatatttatgagacactgctccagctgcaatcctgcattttgataacatcttatgggaactaatagtatcagctgatttgaactctgagatatgctctgatcaccagcagaacaaagtcattagaactttttaatccagggtttatcttatgaagacattcattcaacaatatttatgagtgcccagcactgtgatagattc

SEQ ID NO: 867674 - DNA, 559 bp, Homo sapiens
tggtcagagaatcctggaccaattgaactgggaaagctgaggtctagagttgggagaggatgtgcctaaagtcatacagcaaatgacagaccccaatccaaaatgaccatgatttcctgtggtccagatcaggtgtatcctaggaatttgcattcttcctttattccctggatgatcaagataaaaactagtgtatactaaccaagcctgtgaccgaaacagctttggccctggctacacagattcctccagcccctgtgtgggccagacgccagcgtgttgatgggacccacggcctgagcactgctcagaaactggaaagggactagagagcatgttaataaggtagggatcaaagacaggacacagagytgaacatccacagaccaggaaaacaagggcaggctctagacagctgttttccagaatgggtgctatgatagacttgctgtgaacaccccagggacatgaagcctggggaggatgactgagttggcagaagagcccacagcagacagatagcaaagtacctagcccatgtcctagtatgtaacgggag

SEQ ID NO: 867675 - DNA, 660 bp, Homo sapiens
tacatgttcacccagatatgtttaaaataatgtttgtagcatacttgttctagaaaaagattggaaaccatccaaatattaatagaatagtgaaataaagtgtggtatagttaaacaatgcaatagtatacaacagtgaaaattartgaagtacatagtacagtacatagaccatcatgaacgaacttcacaaacttaatgataagagttgtatgcaagctgcatgaaaattcagagtatgcataagaatctcatagcatgataccatttttatatagttgaacaaaaaatacctaccaatatcttgtttaggggtatatgcatatacatataggaaattttccaaaaaaaagtaggtgaatgatgaatataaaatccagaaaatctatatacaattatgtatgtggaagagaggcaaacttcaatggtgatagccttgtaatctttttatatcaagttttgagctcatgggtgttcctttcattactacttttaacaacttagataactatatatttggttttgcagctaagaaatggtctttaacgatggggttgactcactagggctggcacaggtctggtttctgcatggaagaatgagacttgatgctgggaggggaaaaggatgctgtcctcagaattgacagtatagctggaa

SEQ ID NO: 867676 - DNA, 642 bp, Homo sapiens
caaacttcaatggtgatagycttgtaatctttttatatcaagttttgagctcatgggtgttcctttcattactacttttaacaacttagataactatatatttggttttgcagctaagaaatggtctttaacgatggggttgactcactagggctggcacaggtctggtttctgcatggaagaatgagacttgatgctgggaggggaaaaggatgctgtcctcagaattgacagtatagctggaaggccctgcatgccaagtggatcttactgaggcaaacagacattcccaaatgtgtgaggttaaggagaaagaactgttcctgggctggaaggaatatctgaagttaagtttgcattcatccctaaaacttggcaccacctttgcgagggaaacagactccctgctctagtgggcaagtgcaggttcacagctggatgacctagttcagattgatgagcaatgtgtgcttttacagaccctccatctgcttgcttcaaaggttgatgcctccaggtacacaaattcccaggtgaggggtgggtggcatggacggtagatgtctaagaggcttccagtcgtctattccacaaatattttggacacctaaccaatgccaagcacttctctgggtgccagtg

SEQ ID NO: 867677 - DNA, 642 bp, Homo sapiens
caaacttcaatggtgatagccttgtaatctttttatatcaagttttgagctcatgggtgttcctttcattactacttttaacaacttagataactatatatttggttttgcagctaagaaatggtctttaacgatggggttgactcactagggctggcacaggtctggtttctgcatggaagaatgagacttgatgctgggaggggaaaaggatgctgtcctcagaattgacagtatagctggaaggccctgcatgccragtggatcttactgaggcaaacagacattcccaaatgtgtgaggttaaggagaaagaactgttcctgggctggaaggaatatctgaagttaagtttgcattcatccctaaaacttggcaccacctttgcgagggaaacagactccctgctctagtgggcaagtgcaggttcacagctggatgacctagttcagattgatgagcaatgtgtgcttttacagaccctccatctgcttgcttcaaaggttgatgcctccaggtacacaaattcccaggtgaggggtgggtggcatggacggtagatgtctaagaggcttccagtcgtctattccacaaatattttggacacctaaccaatgccaagcacttctctgggtgccagtg

SEQ ID NO: 867678 - DNA, 648 bp, Homo sapiens
ttatgactttggtcgtgagtgataacaggtaaggaaccatgcctgtgttactcaccgctcagtcctcagcccaggcaccctgcctaacacacagccgatcatcaacaatgtacttattgagtgaatgagtgaccagtgctaatgagttactgaatattgagagaattggttggtacttcataaacaattcttgaacccttcttaaatagcagtcattgtattagatattggggctataagacatggtctagttggggagatatatggttctaataataatttacatttagtagctatgtttttgctgtgtatctctcatgcttttcatgcattgtgatggggatggtgacatgcctctcagcgagagtagcagattgttttatttcagaactatgatcataccatttgtactatttggtcatttttctccattcaataatataaagtaggcagtcgtgtatgtgtgtgtgtgtgtrtgcgtgtgtaatccacataaggctttttgatgactgcatattatttctcatcattgctgtcttctaattcatttgaccagtcctgtaattgatgggcatccaggttgcctctaggttttcacttcttataagcattgcataaatgatatttcttcatgtggacccattgcat

SEQ ID NO: 867679 - DNA, 616 bp, Homo sapiens
acacctgacagagtgggtagctggaggcatatctgccatagatacaaggactttctgccgtgggtgggaagctggactgggaagcccacaagaccttccacctcagacagttgtagaaattcaaaagtcccagcagttttctaaacctggcaggtcacttgaatcacatgggaggccattaaacacaccccaratattctaaatttggatttcaagggaagggcttgaaaggaagagcaaggaacctggataaaactctaaaaccttctttcccttgcaattgaattagccagcctaatttgaaaaccacactgctttgttgaacagaattcccggaaccaccccagacttgaagtatcattcagctatgtcttcacatgggaaatgtgttgtgctatcagaagttgaattgcttgtttcaatgtgtttaagacaatgtacctccgaatctggcaggaatgagtttaaattctgactctgctacttatcatctgagtgatcttgaataagatattcaacttctcagaacctcagatttcttcgctgtaaaataaggatggtaatgacacctttttcctaaatttactgaaattatcaagtgggataatgataacag

SEQ ID NO: 867680 - DNA, 626 bp, Homo sapiens
agacatgtattcatatactccgacccaggggaagatatgtggcattctgcttaacataatcagttccttgctttccacaccaatttgtgcttgatttgtttcttttcttctagaacttttcagagtgagaacctttagcagaaaaaaaaagcttaacaagatagacattttagttcaatagaagaatttttctggtgtgaaaaagtaaattacaaaaaggactttggttctgaaagataattaataaaaaccttyccatgtgatgacaaatctgacatcttgtctaatgtctggcagagaagaaagtgttgagagctgcacagttggaataaaatgttccactttacagcaaggccgggtaggatctgataattatttctaggcaacaaaagttcatagtctaattgttcaattgacacaacaccaggcctggctctgtgactatgcaccatcagtgaggtcttcgtttaggctttcctgatttcacaggtaaatattgccaggaatgtgggtgatcatggaatgactccctcgtggatattttggactacagctgtacttatagaactttcctttccctcttgtaagcttctcatgggctgtggtaggctgagtaatggtcccgt

SEQ ID NO: 867681 - DNA, 628 bp, Homo sapiens
gttttctttttgagaccataattatatttaacaattattgactccttatcctgtgtggcacctttctcattgctttggacaatgtgtagcaaagtcctcactgaatcccaggagtctaataggtatttgtgaatgaggagtgagtgartgaatgaatgatttgactaattcttacctcactaagtcacccatggcccaggagggtactgtgtacctttatgttacaaatcatttaactttaattttgactggtaggtgaagtgtcccaagaatttgtaaagataaaactgtgcctttggggcttctcctactgctcccctcttccctaagagtcagcagctggaaaaggtttatttattttttttattttgtaactgtagaggaatcctgaatgggccctgcaaagtaatctcagagattgagccacacatagacaaagatggagaacacagctcacctgcagagtgctgtttctcatcactaactgtgctttctctcagtcctgactttttatgctgaggattctgggagaaatttcaccttctttacttcctacaggatatccagtttcctggtctgggagctgagagcagaattagccaattggaaggttaacgcataattgtag

SEQ ID NO: 867682 - DNA, 642 bp, Homo sapiens
aatagtttaggaaactctggatttctagaagtagtagcagtgctttgctttattccacttgcaagtagcggttcaattgaataaacttttatacctaaccaaccaatattttaagccagtctcactctcccctctctctcattctcagtttattttgcgtatttcttataatgcaaaacaaaaaccttctgtctctgaaaaacgtgattaatcaagaaaccaatgagtgaagtgtgctatcaaattgaagactctactggcacaaggctaaatctgaatgaaaaacgaaaagaaccaaacagaaccagaaaatgttaaatgcatagattccatttcctgaatcattgtataccaaagatccaggaaatggttagggatgttttagtctcatataaatataggtcagtgttgtacacagtragaaaactagattagtagcatcatcttgtgccctactcatgacatttgcacttcatatttttcctttatctttgcaatatttaagagctttggttaccaatcattgtgaacttttgtgttgcagggggtgtaaacacagcataatcaatcaattgatgtctacactcttcacttttctttaaagttgtctgaaagtgctgtctctttgcctgacagacatag

SEQ ID NO: 867683 - DNA, 616 bp, Homo sapiens
gtgttcagtttcctcatatgtgaaatgaaaatgatggtatcatttcctcctaatgctgacttgaggattaaatgagttaacacacataacgcttaggatggtggtggacgtacaaaacactcaataagaatttgcttttgttattattacttgttcacatcyatgcagcatttgtgcctgcatgctcacacactctagtcttacgcagcttattcaccaacattggttcgggatgacatttgactgttttcaaaagtcaaatccacttttcatggacaaagattttccttcataagtgttattcaaaagattgtgctgtctgccctgaaaacagttcttatggaggagaccaaaagtatttttggtaaatgacagtctgtgtagagtgagtcatgtcactagatgtgtacttggaagggcaaaacagttatttcaatgtacaaattattgcctcattactttatcacataccagaagagagtttgggatggatctaagaagtataacaaaaccactgcaagttgttctgtcatttagcatttaattaaaaataactagagaaacaactatttgaaatgctcagtgtttttcttctttttttttcatgtaacaatat

SEQ ID NO: 867684 - DNA, 616 bp, Homo sapiens
gtgttcagtttcctcatatgtgaaatgaaaatgatggtatcatttcctcctaatgctgacttgaggattaaatgagttaacacacataacgcttaggatggtggtggacgtacaaaacactcaataagaatttgcttttgttattattacttgttcacatctatgcagcatktgtgcctgcatgctcacacactctagtcttacgcagcttattcaccaacattggttcgggatgacatttgactgttttcaaaagtcaaatccacttttcatggacaaagattttccttcataagtgttattcaaaagattgtgctgtctgccctgaaaacagttcttatggaggagaccaaaagtatttttggtaaatgacagtctgtgtagagtgagtcatgtcactagatgtgtacttggaagggcaaaacagttatttcaatgtacaaattattgcctcattactttatcacataccagaagagagtttgggatggatctaagaagtataacaaaaccactgcaagttgttctgtcatttagcatttaattaaaaataactagagaaacaactatttgaaatgctcagtgtttttcttctttttttttcatgtaacaatat

SEQ ID NO: 867685 - DNA, 670 bp, Homo sapiens
agttctactctctgctttctccccatgacaacataactgaggcatgttcccgtgtctgcacgtgtggatctgcctcgtgctcttcaataactgtttattagtatgtcctcccatggatacacctttatttattcagaatacatacttcctttcagcttagtgcaaatgtcatcttcctccaggaagtcttccttgattcttgcagcacaaaatggccacttcctcctccaaactcctaggtccctgtccctttctcaggctctagatgagtcagggtaaggctatgctgctgtaacaaagagatcctgcaatatggaggcttgaagaacagggcagctgtttctctcttaggtcgtagtcctggttggtggggcagctctgcccctgccagtcattccaggagccaggctccttccaagtcattgctctgtatgccctagggcaccctggtcgttgtcagtgtggctgaagtgagccacataggaagscaggagatgcctgatgtcttcaccctgacacggactgtccattcacaagccattggcaagagctttgcatggccatgcctcctgtctgggaggcctgggtgtctgcaatgccatggaagaagagaaaccagctttggtgtacaatcgctagtgtttgctattatacaaaccttgatgcctta

SEQ ID NO: 867686 - DNA, 652 bp, Homo sapiens
gtccgtgagacctttacagtgagagagctgagcccaggcctccaaggggtaggggcagttcacctggaaggaggaagacaggggaaggacttctctttatctgggatgctctatgttccaggcaagatatccagcacaggcagtaatgatctgaaaaagatgggctctgctcacagcctrgtgagggagacagatgtgtaaatcccagcatctctgtctttcccatggctgtagtgtggttcctttgattctccaaatctcatgttgaagtgtgatccccagtgttggaggtggggcctaatgggaggggttttggttattggggtggatccctcatgaatggcttggtgtgtcctaatggtaatcagtgaattcttgctctattagttcctgaaagagctggttactaaagggagcccagtacctccctccctcttctgctccttctctcacatgtgatctctgcacacaacagctccctttcaccttccgccatgagtggaagcggcctgaggccctctccagaagcccaagcagatgtggtcaccatgtttcttgtacagcctgaagagccatgagccaaataaacctctttttttataaatttcccagcctcagtcatccctttctagcaacacaaatggactaagac

SEQ ID NO: 867687 - DNA, 499 bp, Homo sapiens
catctgaaattgctgccataccttggttgcaataatattagctatcattttgtgcacttcttatgtgctaagcactgtttttaacaccatacatacattaactcatttaatgctcataacatcccaatggtctcgttatctttacattaaagaagaagagactgaagaatagagagacaaaatagcttgcccaaggaaaccaatctagtaagcagtggagcagggatttgaactcaggaggtctaaattcagagcccatggtcttaggcactatactgttttggaaaactctggatttggagttaagatgttcaaattctarccaaaattatttcattaataaaataagtttcttagtctgggcaaaatttgtctgattttcttaaacatagcatcctccttttcttattgtaatagactgttaaatgaatctatagctttgttcacacctccttgcatccgtgcccctgggttggcccctcccaccttggcactgagc

SEQ ID NO: 867688 - DNA, 602 bp, Homo sapiens
gaagccttttcctcacttgcagaagacggctccctcttgcataagtttagtacctggccttggtgtctccaataggaacccagaacagaggcatgtggcctgtgtccttgtccctctctgtgctggctcagactctgtccccctctgtgccagataagagagagtttctgtgccagatcagagaggktgtccctctgagctgacagagagagggacaaggcacagagaggaacgtggacctctaagagtttgaactcttctgagggtatcctctgagcaccaagggatatagcaacaatgataatcgcagggttttcttggcttattgatgatgctgggagcttatggaggcttctccctttagaatagaaactgatcgtgtagggctgtagctttccttgaagactgtaggctggctagtggagtctggaccatgggccctaccaggaccctagggctgtgttggtgtgcatttagtagtaaaaaggagctaatgagtggaaatacccagacaagcaagtacacacatccatgctcatatttcccacaagtgtgcacactctgtttccttgatcctaagatgctgctgactgtaacacaca

SEQ ID NO: 867689 - DNA, 564 bp, Homo sapiens
gggttaggacatcaacatatgagtcttgccatggagatacaattcagcctataacagggagaaacagaatctctcccatgagcttccatatctctgcccgtatctcggccaaatccatttattctgttgccagttagactggaggctctgtgacagcaacagtgatggattttgatcttcattcttctttgtagcatttgaagcagggccccacacaactgtgcatgttccataaatgcagatgactaagtactattggcaacgataataatagaaagattgtaatgatacaggatagagcarttgtggataaatccagttatgtatcttgcataaagcaaaagcagattggaaaaaattgaaataaaggggcataaatgtatatccattcattcattaatttattcattcattcatgtactttgttaaacagctgttcattgagcacttattatggtccatttggttagaggcgttgggttcacaatgatgtacaagacccttttccttacagaacttgaattctgaagagagagtgaaaagttaattaattaataacaccag

SEQ ID NO: 867690 - DNA, 601 bp, Homo sapiens
attctgcttagtattttaagggtatgtgtttagttttgctcccgtgcccatcttggtgcattctttccttgctcagttccgaaggataattgcaacctattgtctataccaaagtagttctattacataaagggttggagggggaagaaatataaggggsgaaatttctgtgagaaagcattgccaggcgctgtttcttcagggtttacatagcctcattccaagaaaaaacaaaccaaagtgttgaaaggagctataactgggactaggaggcataaaagtttggtatccacttctatcttactttctttgtctccagcccctcagacagagctgggtagtagagactgtggtgcaaagggcctttctggatgaaatccatgtttctttaaccctcggcagtgtgctgttttctctgtgcatgctcacccgttagcattttaatctagcttcatatggcactattctgcagatggatttgctttcttgcctttgtttgttgtatgagtgagaaacatgagggcattttcatgattgggaaaatgccacgaagttgtaaaaatcaggtgacttcttcttgccaagccccaaggaatgggaa

SEQ ID NO: 867691 - DNA, 623 bp, Homo sapiens
tacatgttggagctctctttattgtgccatagatctctgatgtcatgtctttagtcattattttgtgtcagaaatttttgttcttccggggacatctggcaatatctagagacatgctactggcacctatagaaatgctagtgacttattatgggtagaggctaaagatgctgctaaatatcctacaatgcccaggacagccactgccacaacaaagaattatgcagtccacaatgtccatagtgctaaggagaagaaaccctgtcctagggtcaaggttggatgctgacaagactaatttcaagtgatttcaaacgattgtggggaaaatacccagaagttgacaggagcaatatgtagatatttccttctgtaaattatatttccctaatgctaatgctggagcatttggaaacaygtgtataaatatttgaagcacaaaaccagagagatgctcttatgtatttagcttctagttttaaataatagatactacaataaaccttgattaaaccttgattatctgatatgctctgggtttgtgctttttgtgtgggttacattttctagttaatgaatgtttaaccacaaaatatttttgtttcaagctttgctttgcaaaa

SEQ ID NO: 867692 - DNA, 600 bp, Homo sapiens
tggttgtctacatattcaactgaataaaaatctctatgtttcaaaagtcattttaacatctcttgtgttgcttgcatcataataggcattatgagcatccactaatgaccaggcagaccacctgccctcaaaagatttgttttctagagaaacaaagcaaaatctaggtgctgcaagaaaagtcacagccttggggtttcagtgaagagacagcccaaatgctcttgaagtagtcagaaaagtctacagggtaagagacactccaaatgccactggaaaatggctaacattttgaaaaatagagatagggaagaggtaaacaggaagtgggagatgatgctttctagccaaaggaatatcacaggcaaagagatagmaaagtcctgagtatagttaggtaacatgagcactcctgatagttcacaatctgaccctaatgtgactcatcttccatccattacccccacttccaggctccagccaccttaattcctttctctaatctaatggttcacaaaagagtcatcaacagaactattgctgggccaccgattgctgggccccatccccagatttcagatttaatagtttaagtgatgc

SEQ ID NO: 867693 - DNA, 588 bp, Homo sapiens
tggccagtgataataacaatgcctatcgcatcaaaatgttgtgaagattaagtgaagataatacatgtagaacattcactacaatgcctagtacatcacaaggtacttatggaactatgactttaggtatcccaatttttaatgtaggaaacaaaagattttcagcttgacaatgtttcgtgatgacaaagtaaaaaatgggtatgcagtttatgagtttatgactgggatatcatgagggttaatggaaaggggtaggttgaaaaggttagaaaggagggctggtcctattctcaaggaaatctggtgtctaagaagttttggcttcattgtktagggagattttaagggaaagctgttctcagagtagtgctttaggaatataggttattggggttaaatgacaggaaggaacagagacagaaagcagaaccatcagttaggaagttcttacatgggccctggtctgaattaattagaccttgagacagaccagagatgatggtgggatgcagagtagtaggttgatgaggatattacagagaacaaatctagatgagatgttggctgttgagtgtttattggctg

SEQ ID NO: 867694 - DNA, 624 bp, Homo sapiens
aactatggcattttgaaatatactaggtcaggatttaagaggcctctttgatttcagctctgattccaaagaaaggacataaacagtattggtaggatatgagggcatcttttggagctcaagggcaagaattacagttggttttcacgagggtctgtaaacggtttagttcatagctccattctgcagatatgatgggtcctgctctctgcttccttgaccagctttttttcaatctaatgggttttaactggattgtactttgatataattgctactccaaaagggtagcttcctagctaccttgagcttcttctaaaatttctaggaaaaaaacttataaaaattcaggacaaaagagaattgtatagtaaaaagaatattggaccagagagtagtcagcaatccaggattccaaactttctcaaccatgatcttgctatgtgagtaggaaaaaactgtgtaagtactctaagtcttctttgttctgcccatttgcaggaacatttattccccaaatctatctcaaatatgcytgtgctctctttttcaagtactggaaccgtagacttgtctattgcaattgcaactcatttcctccctctagcctgagctcactgctgg

SEQ ID NO: 867695 - DNA, 675 bp, Homo sapiens
ggtagcttcctagctaccttgagcttcttctaaaatttctaggaaaaaaacttataaaaattcaggacaaaagagaattgtatagtaaaaagaatattggaccagagagtagtcagcaatccaggattccaaactttctcaaccatgatcttgctatgtgagtaggaaaaaactgtgtaagtactctaagtcttctttgttctgcccatttgcaggaacatttattccccaaatctatctcaaatatgcttgtgctctctttttcaagtactggaaccgtagacttgtctattgcaattgcaactcatttcctccctctagcctgagctcactgctggaacatacagtcaatacaggggagaatgaaaatacaagcatgtatgcattttttaatccaaataataagctttatgatgataccttggatagaaatgtgtamtatagcagaaggaagacagtaggtggtgagttggaacattcacttttacacatattaaagtcaaatttcttatgtaaaacctagttgacttgtctaagactcagcaaggaggtcttggctacagctatagatttggaaatcaatggaatgtagctggtggtaaatccacaggagagaatgaaatacccagggagagtatatactgagaggagaaaattcaagcaaataatttcatt

SEQ ID NO: 867696 - DNA, 633 bp, Homo sapiens
ggcaaagtttactgcatacttcttagaaagtgcatctttacgtactggggttataaggtgtatttgaacttctctatatatttatttttattacatttatttttaattttagccaactctatgcactaatttcttcatctctagggtagtkgtattatgccacttgatcttagccaaacagcacagaaacagtgatagagtggtgatattattaatacgcacttcactgagtggttgtgaagattaaaagtgaatattttgcatagcgtgaacctgaccagtacactgtaatgtgctggaacaatatagagggagacgggggtggatgagggtcagggatgtcaaggaagttttgttgtggaggatgtgactagaattgtatttttgaagagagggtgaggactcagatggtagtggagatactgttatcacagttacagggaggccggctaaactgacctctaatcttcccagcaaggaagtcctcacccccttacctaacacttctgccatgttttaaaaggccagagagatttttccctgctaattattcacttgacccgagaagtaagtgcttctctactttcaatctgtgctttctatcactaagataaactagtaatgatttgccaa

SEQ ID NO: 867697 - DNA, 633 bp, Homo sapiens
ggcaaagtttactgcatacttcttagaaagtgcatctttacgtactggggttataaggtgtatttgaacttctctatatatttatttttattacatttatttttaattttagccaactctatgcactaatttcttcatctctagggtagttrtattatgccacttgatcttagccaaacagcacagaaacagtgatagagtggtgatattattaatacgcacttcactgagtggttgtgaagattaaaagtgaatattttgcatagcgtgaacctgaccagtacactgtaatgtgctggaacaatatagagggagacgggggtggatgagggtcagggatgtcaaggaagttttgttgtggaggatgtgactagaattgtatttttgaagagagggtgaggactcagatggtagtggagatactgttatcacagttacagggaggccggctaaactgacctctaatcttcccagcaaggaagtcctcacccccttacctaacacttctgccatgttttaaaaggccagagagatttttccctgctaattattcacttgacccgagaagtaagtgcttctctactttcaatctgtgctttctatcactaagataaactagtaatgatttgccaa

SEQ ID NO: 867698 - DNA, 633 bp, Homo sapiens
ggcaaagtttactgcatacttcttagaaagtgcatctttacgtactggggttataaggtgtatttgaacttctctatatatttatttttattacatttatttttaattttagccaactctatgcactaatttcttcatctctagggtagttgtattatgccacttgatcttagccaaacagcacagaaacagtgatagagtggtgatattattaatacgcacttcactgagtggttgtgaagattaaaagtgaatattttgcatagcgtgaacctgaccastacactgtaatgtgctggaacaatatagagggagacgggggtggatgagggtcagggatgtcaaggaagttttgttgtggaggatgtgactagaattgtatttttgaagagagggtgaggactcagatggtagtggagatactgttatcacagttacagggaggccggctaaactgacctctaatcttcccagcaaggaagtcctcacccccttacctaacacttctgccatgttttaaaaggccagagagatttttccctgctaattattcacttgacccgagaagtaagtgcttctctactttcaatctgtgctttctatcactaagataaactagtaatgatttgccaa

SEQ ID NO: 867699 - DNA, 630 bp, Homo sapiens
ttaataggcatgatatatttatcataatatatcatgaggaagaatccccccctctacaaaaatgacaggaataatattttttctggatgttttcctttgggttgttgggggagaaattttttttctgaagcacattctttgcttgcatgatagagtacttggaattgtttttagaaatacctgcactgtcagttaragttaactcttttcttgctgatgaattaatgttggcataagccttctgctagaaactgttcttggacacaagaaagttttctaattgaaaccctgcttttggctcctcttttattatgagccatttcagtaagtggccccatcatttgtccagttggacaagccagcaatatggaagcctcctcctgtttcactgcttgtagtcagtccatcaccaaagtcccatcaattccaacctcccaaatagatctcaaagatatccactacttcctgtctgctaccaccgctatagcaaaactatcatggtctcttgcctgcgccatgcagttgactccccaggtctatttattcctgcttccttactctttgccctttttcccatcatttctccacatttcagatccttcagtaacttgcctttgctcttaggatggc

SEQ ID NO: 867700 - DNA, 559 bp, Homo sapiens
tagaacaagaaaatgtttctcaccaccttgtcatgaaggggacctaggtgaactcacccacatttcagctacaaaattcaaatgcagacacagcccatctatcagtcctcatgggactttgcagaatccaatataaactacagaggtagtcaaagaaggggttgttcctccatttccccctggcaaatcaccaccattcctggggcctggatgctttagggatcacagtaggattacacttccctgtccttttgaatttggggatggccattgacttgctttcgccaatgcaaattgtttcctctgaggttacatctattcctaccagcctagaytgatcagcctctgccctcagagaagaaatcaatccccccttttccatggagtgagctttccttctgtgacagcactagactgccaaagaagcagagagctgaaatgctcccagcagctctacagctgaggccaggtgctagcctctggaatgaggctggactgggcagggcagttcccggccctgcattccaaacaggatgctcacctgcttgctgctcccaca

SEQ ID NO: 867701 - DNA, 630 bp, Homo sapiens
ataaatacacaactactacaatttgttcacttagtaaatcagcaaaccttgctgaggtgtgtgtgatgaaatggagactaaattgatattatcattgtggaaaaaatggaaatatgtttcagcatctttggatatattttttaaaattaacttttgatcctctaattctcctagatatctattttaaatgcatatatatatatatatatatatatatatatatatatatatatayaccaaactccagaaatgcttaccccataaagatgttcttttcactattcctgatatcaaattaggtgacatggcgtcacatatggccaaattatctgtcaataaaagtctgtaatgtgtgcagatttctagatctctgatgctctctttactttctaaaaaattattatttcttctaccccttcacctttgattggtctctttgtcttaatatctggactttaaatagttgctattaaacctctaaaatcaatcagcccctggctgttctgtcattagaagttaactgccttcccattaatccattaattgtgaagattaattggaaaagctattcaaactcaggctataacttggagcatgtaagccagtgtttgcctccaaatgaaagcttag

SEQ ID NO: 867702 - DNA, 554 bp, Homo sapiens
tgtaatcccagctactctggtggctgagacagaagaatcactttaactcaggaggcggaggttgcagtgagccgagatcgtgccattgcactccagcctgggtgacaaagtgagaccctatctcaaaaaaaaaaaaaaaraaagaaagaaagaaagaaagaaagaaagaaagaaagaaagaaagaaagaaaaaagatgttaaggtctacggtgatgggtttggattattggtattttaagaataacacatttaatgaactacagtcttcattgagaaattaaaaacaaaaatcactctaatttgtcttagttggtaatgatacacaaaacaaagtattttaagaagtaagagtttttataaagatcaggacaacaagctctctatagtagtaagataatattaaaaattgatagaatatttccagctctctatttattatctgtataaccttaagcaagtcctctaacatctctgagtctttctctcttcattagcaaaaaagtaaaactaacaattttaatggaatcttgagtcactatataaaagtactata

SEQ ID NO: 867703 - DNA, 632 bp, Homo sapiens
tagtcagatgggctgaagccaagtgataggagataactacttttgaatagtttgtttcctatagttcctgagaagagggggcatgctattccatgtagggtcacatggaattccacgttgagccacatggagaagcatgtggcccagggccaatcaggtggcagagggagtgaggggaaaaatgtgagcaagagccctcattgtggtttctgtgagaaagaacagctaagacagrgtaagcaggctttggactggctagtttgaatagtttccgctctgagtgtaggagctgcccccggttgtctgggacctggtcctagggaatactggcctgaatgtgagagccctttgagagcttgataaaggaggtggtggggtatgggttttggactggttggcttgcatattataaacacattgccagatgagatgtttgctatctctaggaatcagctaaccctaaaaggggcagtgtctaccaggatgtgcgagcttatagaagttaaagcatcaaaaattaagaaataaaaaaaaaaacccaagattaatacagtatgtagtaggagggctcttaataaagtacttattgcaaaccaaaaaagtttttgatagcacaatacagtgactatggc

SEQ ID NO: 867704 - DNA, 632 bp, Homo sapiens
tagtcagatgggctgaagccaagtgataggagataactacttttgaatagtttgtttcctatagttcctgagaagagggggcatgctattccatgtagggtcacatggaattccacgttgagccacatggagaagcatgtggcccagggccaatcaggtggcagagggagtgaggggaaaaatgtgagcaagagccctcattgtggtttctgtgagaaagaacagctaagacagagtaagcaggctttggactggctagtttgaatagtttccgctctgagtgtaggagctgccccyggttgtctgggacctggtcctagggaatactggcctgaatgtgagagccctttgagagcttgataaaggaggtggtggggtatgggttttggactggttggcttgcatattataaacacattgccagatgagatgtttgctatctctaggaatcagctaaccctaaaaggggcagtgtctaccaggatgtgcgagcttatagaagttaaagcatcaaaaattaagaaataaaaaaaaaaacccaagattaatacagtatgtagtaggagggctcttaataaagtacttattgcaaaccaaaaaagtttttgatagcacaatacagtgactatggc

SEQ ID NO: 867705 - DNA, 568 bp, Homo sapiens
gtgctttatttgggctgtgctttcttggtatatggttctttaagaatatgagaatatagcaacatcagctagtccaggagcaatgctattaacctgaatggtcagtgcagttgcagacctgggagcagttaatcaactaatggatatttctgtagagagaaactatctagtgaggwcatatgagttgtacaacacaagtggtcagcatcatgagtcctccactccagaactaaaatccctttctctgtgttaccttgctgcctatctgcatctaccttttctcctcctgtgccaattcactaccatccaccatcgacttactaaatatattgtttacaaagtgacctaatataactatggaatagaggatgtttatgaagaagacaaacaattttattttaaaatgttttactcatattcatgattcatagtgaagcaagactggtttttaaaacattataatacatttttcattacttatattttatagttttattttaatataagaaaccataataagtataaatcatgactccgaatctcaccacctagataaactcaggaatca

SEQ ID NO: 867706 - DNA, 587 bp, Homo sapiens
ccttccagatctgtgtctcagcagaggcacacaaccactccctctggcaagttcctccctggttttgtgttaatttggtgcaatctctgatgtattctcccactacaaagtcatattgtagagatgaggattcaaataagaatagaaagtatccaattagatagcaggatattcattgatagcacccatttgagcaaacatgcgttttcaaatcacagatatcacaagttctatgcaatctcaaagaacttcaccctgcaaatgaatttgtattgttttatatttggaggaatcccaaggctcagagtagaaacaggaactcttgcyttccatgtgtttgtgtgcttactatatcaaaccaggaggctgtatgtgttttagatggaaatacacacacacacacacacacacacacacacacacacacacacacacacacaccaattttagatattaaattggcaggaactaccattcctccagtagaaaggcatttttcatcaaaagttgtttacactgtactttcccccttagatcacaattgagatcccaactttgtatttcttagttccttaaatataataata

SEQ ID NO: 867707 - DNA, 578 bp, Homo sapiens
tggagtctaccactgacagcagagttgaaatccgggggctttactttccatagaatttgtccctatgtcctcaaatgaattgctttaattaaaataacttagtgaccttttctttgctctcttggctacagaaattttccataaccytcagatttgcccttgggttgttaaaaatattgcactgaaaaagtgccttttgttctcccagaaatatctttttttgcaaacacctcttctttttatgatgactgtctattttagaggaaatctttgattgatacatgttaactccacagacttaacatacttcaagcctgggcaaaagcaaagttctcctaggtttgaatcttttggatctcacaaaatgatggagacttggtgggtctcaaaacgagcaagatgaaataaataagcaattatatgatcacttatttacaagaagatttaggatgatttgcaatcattgcaatatagcaaaactgcattaaaatatcctattttaaatgaacagttcttttagtgtaagagatatcatggttactcaaaataataatgaggatggctagatttagcaggga

SEQ ID NO: 867708 - DNA, 440 bp, Homo sapiens
tgttctctgttgaaaaagctggcttcaatttattgagcaagatgctggtgttatcatctaacataaaacctatcttataataaagtgttgacacatgtaatgagtactgtactgaaaaatggtggtatgtatatggtttgtactgattatgtatcgcttttataccatcaaaaagttgaaaaatcataaagttgaatcatcctaaaatgggtacattctgtactatgtttccaaggcttcrgaagtgttgcatacacattcctagccagctgatagtgctaggagccaacagtagtctcccccgggggccaagaggagggcgaaatctctactatggtatatgatgttctcgtgggccaagtatgagggtgatatttcattgttggcactgggtttctggaatccatcctcttcaccagggagatttaatgaaccaaatg

SEQ ID NO: 867709 - DNA, 633 bp, Homo sapiens
tctaactgcccaaagcaatctacagattcaatgctattcctgtcaaactaccaatgtcatttttcacagaattagaaaaaaaaactattctaaaattcatataaaaccaaaaaagagcctaaatagccaaggcaatactaagccaaaagaacaaacctggaggcatcacattacctgactttaaactatgctacatggytaccataaccaaaaacagcatggtactctacaaaaatggccacgtagaccaatgagacagaatagagacccctgaaataaatccacatacctacaaccaactcatatttgacaaagttgacaaaaataagcaatagggaaaggacaccttagtcaataaatggtgctgggaaaactggctaaccatacgcaggagaatgagactggatgcttatctctcaccatatacaaaaattaactcaagatgcattaaatatttacatttaagacctcaaactataaaaattctaaaagaaaacctaggaaatactctgagacattgacctaggcaaataatttggtttgaagaccctaatagcaaatgcaaaaaaattttaaaaatacacaatttgaacttaattaatctaaagaacatctgcacagcaaaagaaattt

SEQ ID NO: 867710 - DNA, 633 bp, Homo sapiens
tctaactgcccaaagcaatctacagattcaatgctattcctgtcaaactaccaatgtcatttttcacagaattagaaaaaaaaactattctaaaattcatataaaaccaaaaaagagcctaaatagccaaggcaatactaagccaaaagaacaaacctggaggcatcacattacctgactttaaactatgctacatggttaccataaccaaaaacagcatggtactctacaaaaatggccacgtagaccaatgagacagaatagagacccctgaaataaatccacayacctacaaccaactcatatttgacaaagttgacaaaaataagcaatagggaaaggacaccttagtcaataaatggtgctgggaaaactggctaaccatacgcaggagaatgagactggatgcttatctctcaccatatacaaaaattaactcaagatgcattaaatatttacatttaagacctcaaactataaaaattctaaaagaaaacctaggaaatactctgagacattgacctaggcaaataatttggtttgaagaccctaatagcaaatgcaaaaaaattttaaaaatacacaatttgaacttaattaatctaaagaacatctgcacagcaaaagaaattt

SEQ ID NO: 867711 - DNA, 607 bp, Homo sapiens
aaaagaacgtattgcattaaaatgttgtttgttttgaatgctggatatttggtgtcccttaaattttgtgttcaagggaagtctctcacttgctttttatcttagaccaggccctatgctcaccacagagagaataaaggccaaaggatgctataagactgagtcaaagtcacagagataattacctctagtgtaaagtatttttttgatcagttatggatctttccatgcctacattctgcttttatatgaatatataccctgaaatgagtctcatgaccttccatattttccattattcagccaagttatagcttgcatttccaagagaaaaaaaaaaawtcaaaaccccgaacaaacacacaaaaaacaaatgccttcttcctcaagactcatgcatgtcaaagtaaaaaattgtttttttctctaaatgccagcaaattaaggaagttcagttataataaggtccaagatcagaatagctttttaaaaaatatggactctactattcaatttactcaaagaaatttacattttaaaatcatcaacgatttcaagattaattaccttcctttagggagataacaataggcaattatagcctaaa

SEQ ID NO: 867712 - DNA, 607 bp, Homo sapiens
aaaagaacgtattgcattaaaatgttgtttgttttgaatgctggatatttggtgtcccttaaattttgtgttcaagggaagtctctcacttgctttttatcttagaccaggccctatgctcaccacagagagaataaaggccaaaggatgctataagactgagtcaaagtcacagagataattacctctagtgtaaagtatttttttgatcagttatggatctttccatgcctacattctgcttttatatgaatatataccctgaaatgagtctcatgaccttccatattttccattattcagccaagttatagcttgcatttccaagagaaaaaaaaaaaatcaaaaccccgaacaaacacacaaaaaacaaatgccttcttcctcaagactcatgcatgtcaaagtaaaaaattgtttttttctctaaatgccagcaaattaaggaagttcagttataayaaggtccaagatcagaatagctttttaaaaaatatggactctactattcaatttactcaaagaaatttacattttaaaatcatcaacgatttcaagattaattaccttcctttagggagataacaataggcaattatagcctaaa

SEQ ID NO: 867713 - DNA, 611 bp, Homo sapiens
ctttttcttttctttttttaaatagaatgcttcacgaatttgcatgtcatcctttattagtccattttcacgctgctgataaagacacacccgagactgggaagaaaaaagggtttaactggacttaacagttccacatggctggggagccctgagaatcatggcagtaggcaaaaggcacttcttacatggtggagccaagagaaaatgaggaagatgcaaaagcggaaacccctgataaatccaccagatctcgtgagacttattcactaccatgagaacagtatgggggaaaccgccaccatgattcaaatatctcccaccaggtccctcccatacacgtgggaattaagggagtacaattcaagatgagatttgattggggatgcagccaaaccacatcacatccttgtgcagaggccatgctaatcttctctgcatcattctatytttttttttttttttttttttagtatatgtgctgccaaagtgagcaccagatgaggggtacttaacctgtactcctgtctctttgtgcacgtgctggtgcttctccaagatgtatctcgggagtacagctgctgcatccggggccaggtatagctccagat

SEQ ID NO: 867714 - DNA, 602 bp, Homo sapiens
ttaattgttttcaattattctattcacctttctatttctaaataatatgctaatgcttattttctttttttatctttagatatcatctatcaattttctagcatgaagatgaggttcagttctttcatactcactgtcccttgtcaaacattctctctttctctcttctttctcttccctcttcccgagccctctcctttctctctttctctgatttcctaaaaatataatattttgtgtaagtcaacattcagtgtttattatgtttacttttgaatgcatatacacagtgtttataactatcacaatatatgataaatgtacttcctttcttgaaaaatactctccccccrgaaataatagttgcctggtaaaattttgagggaattgtcatttaattttttgcctctttatcaatgatacatctcctgaatctctgacaaaatggcaaaatctcctctcgacatggtctagaccatcagttccattttcttttctggaagacagcctcactgaagcctccatcctgctccaatatggactggttgctctcaaagttctctatacaactgtggtttgagacatctcttcaccttcagact

SEQ ID NO: 867715 - DNA, 666 bp, Homo sapiens
ggatccactttgagccttgactcatgccacgcacccaaacaattcaccggtttcttgaaattcatgacttgaaggaatctcagcatctcacacctgatcctggaggcagccttatggcctcccctcctggaagtgtcaataaggtgacaacacaacctcctctgaaaagcacagaaaggtctattcacatggtgcccaaacatgtcctgagttcatggggacagagaagccaggagagcaggcttagggaaggaaagaagtttattaacttgcacgatgtgcaggtcctaaagagggctggggcagcaacgcayggagacagactccttgattaacttggaaaagcaactaccccaaaaaacagaagaaaggagccaggtgaacctacacatcccaaatcatcctcaggactgatctccttaattctgaagattcaaaaatcaaagcttcttttctgttttatccaagagccctcagatagtagttcttttctcgaaggggagaaatgaagctgaaaacttgttttgttctctcgtactagcctatactttctagttttcagaagccccacaattcatattcttttaaatatctttagaaaataaaatttgttgtgcaggcaggtgatgacacaaacttgacagatgggtaaaagcttcttttgcc

SEQ ID NO: 867716 - DNA, 616 bp, Homo sapiens
tgatacctaatgttgaagaaacatatcagcaaagagcaccgtgccctggctcctcactcagccttcagcccaatacagaggcagccgctggctctccaagagcaccaaccttcaaaggaaaatcctatgagggagaggaggtgtgaattttggcagcactactgttgtatgtgtatgtgtctgtgttttccaaaacacatggggtaaacaagccagtgtaaaaatagactgcagcaaaggaacgggagtggagctgcctcctgcaggtgtgagtgactgtgctgctgattacttcttggaaagcagtctccaggagggactgatcagacagaggagtggggccaaggaggatgcaaaacggaactggctgyacccttgatcaccaaataaacctgtctgtcccccaacctggggcttaacatcagacagcacagcttggatttcataattccccagtgcagaccacagtctccttttcctcctgtgctgggaggggcaggccccacaggcctttttgatttctggtctagaggccctttgttaaatcagatactacagaacaagcagtggaatgcggcatctttcccaaacagaggtcctgaggggttactacctg

SEQ ID NO: 867717 - DNA, 563 bp, Homo sapiens
tagggtctgcatcatttctctatcgcctgcatttcctgtaagctggtagttttactattaccatgaccataatcatcatcactattacattactaccaaatcatcccaatgttattggaaaggtaaaaatgtaggcaatagagtgatagcttctagaagtttcatttctctttcaaataacttttttttttttttgagatggagtctcactctgtcgcccaggctggatggagtgcagtggcatgatctcggctcactgcaacctctgcctcctrggttcacgccattctcctgcctcagcctcccaagtagctgagaatacaggcacctgccaccacgcccggttaatttttttgtatttttagtagagatggggtttcactgtgttaaccaggatggtctcgatctcctgaccttgtgatccacccgcctcggcctcccaaagtgctgggattacaggcgtgagccactgtgccagacctcaaataactttaaaccaaatctttcctccccatgacatagaaaatagacagcaacctcattggtgcttaagtttagaaaga

SEQ ID NO: 867718 - DNA, 596 bp, Homo sapiens
gtgtgtatcagaaagtagtgagaggtgccagggctctgatggtagaaacaggaaaaatcacgcaggatcagtttccaccccagagagaggtagacagagaggccatgagaaactgaggggtcacacgtgatgcccrtacaattttcaaacttaagggtacaaaaatcttatttgtgggagcttccccgaaggtcgtttttctgggctcatcttgagaattctgggcctttagaactggggttggagtcagggattgtcttttctcatgagcatcctgggagactgagtaatggggtcactgggccgcatcagtagagacaaaggggccctcacttgtttgcaaatgtcctcatccacctgtgttgtcttcctgtcttctgtcttgttacatgctcttttctaaaatcccatttagattcctagaattctgatcaagtactgtccgtttgcagcttttcctatggctttcaaattctcttgagtcttttcctctgtctaagcatctctgatgtagcccacgtttttctacctttctaataaatgaggatctgggagattaggaagaaagactctagagaccagcagacatggatatg

SEQ ID NO: 867719 - DNA, 624 bp, Homo sapiens
cttcctctactcgtgtaattccctcagctctctaaattgactcagctccaggtaaagtcggaaacttctcctgcaaacagaccttcagcttctccagtgagggtgtatgttcgggagagaagggtctccctttcccacttccgcagttggggcactcacagccatgttcttgccattgcacgctcacgtgggtgtctcccaggtcctgcgggagcagtccgcttccttcagagggtccgtgggtctattcaggattgctggtttgttcttgcagttgatctggagctaaaattcacaatgcaagcctccrcacactgctctgtctggagctgcaatctagtcctgcctcccatccgccatgatgatccacagtctgtttcttggcaatattcttaatttaatttgttgaggttgtaattcctcctcttcaattcttttatctagtgagtcaccaaattctgcttattattcctttgaagtcctacctattcatcattctaccagcagaatggcttcagtatttagggctgggtttgcataaacccagtatttgtgctgggtttgcagcacaaaaaagggctgcacttttctacttgattgttctgatctcaatctttccctagt

SEQ ID NO: 867720 - DNA, 533 bp, Homo sapiens
cagcacctgtccaccttacacaaactttaagcaaacatttactaaatagctattgtgggataagcattaggctggatgcagagaaacaaacttaaatgtaaaacaatccctttcttcaagaagtacatactccagaggggagggaaaaaacagacaaatatattgcatttaggtcttaaagtttctaaattatgtcgaccattgatgatagatactcagtccatcttggggaatccagggaaagctattctgaaaaagccaggcctgaaatgatttataaagagttaagatactaataaaggaacagtaacataagagataaggaggggacagaacttctgggcaaagtgatcagcaagaggattgtggagcrctgacttttacatttttaaggcaaggagatgagactagaaagcaggatgtgtaagcaggatcaagataatggagaaacattgtaagccatgttgaggaacagcctgtctcctgctgaaagtcacaaagcactgtaatggtattacaattaaaaaaaaaaa

SEQ ID NO: 867721 - DNA, 594 bp, Homo sapiens
tgaacatccctgaaatgccctaaagacatttttccaattttcctagctactaacattcggctccatgttacttatgcacaattctgcagccagcttaaatttctccctagaatatgggtttttcttttctaccacatggtcaggctgcaaattttccaaattgttatgctctgcttcccttttaaacataagctccaatttcaaatcatccctttgtgaatacatatgactatattcttttagaaaaagccaggtcacatctggaatactttgctgcttaaaaatttcttctgccagctaccctaaatcatctctctcaagttcaaagttctgcagatctttagggcaggggcaaaatgccaccagtatctttgmtaaggtatagcaagagtgaactttactccagttcccaataagttcctgatctctatctgagaccacctcagcctagactttattgttcatatcactatgaacgttttgatcaaaaccattcaacaagtctcttagaggttccaaactttcccacatcttcctgtcatcttctgaggcctccaaactgttccaacttctgcctgttaccgagttccaaag

SEQ ID NO: 867722 - DNA, 471 bp, Homo sapiens
cccaataagttcctgatctctatctgagaccacctcagcctagactttattgttcatatcactatgaacgttttgatcaaaaccattcaacaagtctcttagaggttccaaactttcccacatcttcctgtcatcttctgaggcctccaaactgttccaacttctgcctgttaccgagttccaaagttgcttccrtatttttaggtatctttatagaagtgccccactttgctggtaccaatttactgtgttagtccattttcacactactgtgaagaactgcctgacactgggtaatttataaaggaaagagtttaattgactcacagttcagcatggctgaggaggcctcaggaaacttacaatcatggggaaaggcaaaggaaccttcttcacaaggcagcagaagagaaagaacacacaggggaaactgccacttgcaaaccatcagatctcatgagaactccctca

SEQ ID NO: 867723 - DNA, 587 bp, Homo sapiens
aaaatggcaaacttatgctttgtcatgtcaataattacattaaaaataaatggtcaagttttctgattccaaaatagcagyataaagcaagctggtttcactttcccctcaaccctacaaaaccataacaaaacaagacatatatacagcactacgattattaccagcaatatcccggaacttaaatagttaattctcaagaacacagaaaaatggaaaactctgagcagaaggtgagagaactagacatccatatctgtgtggcctttgagattgaagtgggcaaccaattttcctaccatcttgaattcaccaggccagaggcttgtccctgcctcaatctaaggaaaacataatgagcactgaaagaagtaccctaaggacagccagagacaaaggggaaagtgagactaccatcctcaatggtggaaactactctataacttgggggaaggcaatgccaaaattagagttgctgttcagcagcatcacactgtacatggcaggttccacaggtcctctgggtagaaacctttagcaagccttaccactctgcctggatatcccctttgggacctcctttcatt

SEQ ID NO: 867724 - DNA, 698 bp, Homo sapiens
gtgtctataagatgtttttgtaagcctcatgataagcacaatgtaacatttacaatagatttactaaaattaaaatgcaatgattttaaatgtcacttaaccacaaaggaagacaataagaagggaagaaataaagaatttacaaaaccagaaaacaagtaacaatatggcagtagtaactccttattagcaacaataacactgaatgtagctgaattcaattttccaactaaaagaatgtatgaatggataaagaaacaactctatgctgcttacaagaaacccacttcacctataaaaacatacatagactgaaagtgaagagatgaaaaaagatactccatgcaactggaaaccaaaaagaaaaaaaaagcagaagtaaccatacttagataaaacagatcttaaatcaacaacagtaaaaaaaaaaaaaaaagattaaagagatcattatataatgataaaaaattaattcaacaataaaatataacatttctaaatatatacacacctaacaccaaagcacctatatttrtaaaacaaatactactggacctatgaaaaaagatggacagaaatacaataatagtggggaaatttaatcctacactcacaacagtagacacatcatcaagacaaaagaaaagtcaataaagaaacactgaacttaaatcggactgtagaccaaatgaaactaa

SEQ ID NO: 867725 - DNA, 588 bp, Homo sapiens
gcaatgaggtaggctttggtcaggaagatgttgcaatcttgccgaaaggaattgttttcctttgcaatttggcccatctcagtgcatgatgtcctgttttaggaactgtgaaactgaagaagggatttagagggagagggtttattctgttttcttgagagcaagggggttagggtaaccatggagcaataagttttgcaggtcttcatacttaagatgacttagcaagaattggaaggatgaattcggggctcttgagagttagaaatgaaaggatccttggcaactagatgaggaggatgatgaaagatgagtcttggatgactgggggccaagaawgagttgggtttagatgattggttgacaagaagtgatgattcttagccctgatgtgtagtgctgctggggaagtggatttgtgaaaagctaatagattaagctaatgtgctgagtttgaattttctgtgtagcagagtgcagtgaaaaaggcatggccacactgtttactagctctttgatcttaggagagtgacttaccctcttggtgtcctgagctgaaaaatgaagacatgaaagaattctgacttc

SEQ ID NO: 867726 - DNA, 665 bp, Homo sapiens
tttttcaaatgacacatctcgtttacatatattgttcattcattaggaaataatcagcaggaatgttggcagaatattgaatacagacttcatgaaatttctgcatgggactcagattatgtatcttctcctagtctcccagtgccttcttcccagcactgcacgttctggagaggtcagtttgtgggagtatggaaggttggggctcttctttcttagaggggcaagcttagaccaaggagtccaggagctgggaaagagctggaagataaattcctctttcttacttcttcccatagacctttcrgaagcacagtgattccctacacatctgaagtagtcctgatcttgtcaattcagtaatgtaccacttgtatctgctttcagcccctctcaaacccaataaattttcaaccttgttcctgttgccctggggatataactcaggcactattgtacctgaagctttccctcaggctttgttttctaggaaatttgggctaagtatctggttctggacttttcaaaacatttgaaataatatctatgttcccaatcgatgtgacagtatgtttcaatgaacagatcagattgaattcatttctcattgagtgagaataaaacagagcatgctaagccaaaattgaagctcaattatcaggttc

SEQ ID NO: 867727 - DNA, 664 bp, Homo sapiens
gagaaataatgcaaaatgaggcagtgaattttaaacttgggtgatatttcatatgttagctgtactataatatttttccaaagaccttgacaatgagattatgaataaaacaaattgccataagaagtacacttttaatgaaatacttgtaatttttaaaagtcaggtactgtgttcatagattggaagacttaatattgttaagatatcaatactaccagagtgatgwactggttcaacataattcccatcaaaatcttatggtgtattttgcagaaatagaaaaatccatcctgaactgtatatggaatatttgggtaccccaaatagccaaaacaaccatgaaaaaacaaagttggaggtcttacacttcctgatttctaaacatattacaaagctacaataatcaaaacagtaatcaaagctggcatacagacagacagatagaccaatggaatagaataaagattccagaaataaactcttaagtatatggtcaaatgatcttcaacaagagtactaagagcattcagtgaaggaaaacaatctctttaaaaaattgtgctgggaaaactgaaatatctgaattaaaaaagatgaggttgaatccttatcttacagcatacacaaaagtcgactaaaagtggattaaagactcaaatgt

SEQ ID NO: 867728 - DNA, 664 bp, Homo sapiens
gagaaataatgcaaaatgaggcagtgaattttaaacttgggtgatatttcatatgttagctgtactataatatttttccaaagaccttgacaatgagattatgaataaaacaaattgccataagaagtacacttttaatgaaatacttgtaatttttaaaagtcaggtactgtgttcatagattggaagacttaatattgttaagatatcaatactaccagagtgatgaactggttcaacataattcccatcaaaatcttatggtgtattttgcagaratagaaaaatccatcctgaactgtatatggaatatttgggtaccccaaatagccaaaacaaccatgaaaaaacaaagttggaggtcttacacttcctgatttctaaacatattacaaagctacaataatcaaaacagtaatcaaagctggcatacagacagacagatagaccaatggaatagaataaagattccagaaataaactcttaagtatatggtcaaatgatcttcaacaagagtactaagagcattcagtgaaggaaaacaatctctttaaaaaattgtgctgggaaaactgaaatatctgaattaaaaaagatgaggttgaatccttatcttacagcatacacaaaagtcgactaaaagtggattaaagactcaaatgt

SEQ ID NO: 867729 - DNA, 643 bp, Homo sapiens
aaaattcatctgtatactgggtagtgggtaagtatatttatgggccaagccatttagacagcaaatggaaaaacataactccgtatgcctccctgtattccctttttttgcaggaaataaaattgagatatatttccatagtaaatctaaatgtcttctatattaccaggttttaaaaggttatgtacattagatattacatcattgtttgaagtacattagtgcttttgaaaacagctgccttcaatctccattctcataaaaagagcaaccacacagtctgtgctttttataatggctttaaaatgtatattaacttagaaattctgatccacactaatgtttgtgtmccgtaatgtagaatattaatggagaacataaaggacgaaaactctttacaaaatagggcagaaggagaaacttatgcttctcaaagtgtttttggtctcaaaatcgtttttctttggcaatgaatatgttttttataaaagcttcatgaggcaaaattactaataaatgtgcgtatttagtacattatgttagaagagagtagagccattgagtttgagaaacttttctagatgaaggaagttttgacctttgtttttatatggagctgatctgccctctatgacatcacatt

SEQ ID NO: 867730 - DNA, 629 bp, Homo sapiens
ggtatatacctaaggaaggggatttctgggtcacatggtaatcctatgtttaactttttgaaaactttttgtgtctctttttgaagcagttttctcaggctcagggtgcagacattcatgacaggctctttcaatcaacaaatatttattaagtgtctaccaagggacaggccctttgctcagaagttgggggattcaaaggtgagcaagatagtctcttcattgaagggcctcagggtctggcaaaaagaagtagatggggaaaaaataaaacacaaactgggtcatgtgtttccaacaacaaaaaccctccagagacttaccatggcaaccataagaaaacctaaattccttactagagtctycaaggctctgtctatgcaggtgaccttatgcagtcttcatgtgggaaaaactctgcttgctcactgctgtaccttagaacctagaagagtagccccttcatgaatatttgtaaaacataaatcaatacagaaataggtgaatgcccctctgttctcccccttggcctctaagctctagcctttgttctgtgccttgaatgtgccactcattcctttctcagggcctttgcacacgttagtccttctacttggaatgctggtccc

SEQ ID NO: 867731 - DNA, 612 bp, Homo sapiens
gtatattcccaggccactttttgctcttctctagctccacatctgggaggctgacctctattgactgcatcatctggacttccttatgcactggaggcaccagcaagagatgggagggtaggaggaaatctgggtgtttattcttcctacttcatccctgttttgcccttgttctgctgctgtgacaggggacaggttgtccatggctgaagctctcatctaacagcctttcttctatggctcagctttcaagaggccgwggtaaacaccattccaccctttgtcccttcaggctcaggcatgggtggtgatggctttcactgttgctagtctctgggtacctcactatttcttcttgcttcctttaaccctgcccacacagctatatctagtccatttattatgttatttttagataagtccctgtttcctgctctactctgataaaggtgataagtataaaatacatttaaatgagaaatgagcaaatgcgagtttaagttcatttaagcaaaaacaaaactaaaaacaaaaaaacccttaaaaccacaatatcctatcttttcaggagtaaagattactatctattttaatgaattacagtctaaaagg

SEQ ID NO: 867732 - DNA, 620 bp, Homo sapiens
agaagcatttggatttcagtctcgccacaacatgtcaagagagaccttttgtcagttccttaaccccttgatctccatcagcaaaaatgagcataataatgctcacctaaaaaggttttagcgaagatgagatgagaaaaaattttatgaaagtacctggcattgcttggatgtcaaatgaatctgagcatattaccatattaccaaatagctgagacctaataaaaaacccaccctccctaaatgctcatgaaaatgtaactaaaccaagaagaatttaatatgtttcttttatgcccctctgcctgatttcatttgtagraaaaaaaaagcctataaaatttagtgtttttaggaattgtaaagactacttagcttaatgtccgcatttaataggaaaagaaactgagattcagagacgttaacttcaaggttatatggctaataattagcatgctgattccccttacattttgcacacaggatagtctgcactgttattctgaaagatgtgttaaagagctgatccttcctcttgagtctagggtgagaatgactgatgacagcaattcaccttgaatcctttttataactttttgttatgcttccaatgattaaag

SEQ ID NO: 867733 - DNA, 559 bp, Homo sapiens
accctcaacaaactaggcactgaagaacatacctcaaaataataagagccatctatgacaaactcacagccaacatcatactgaacaggcaaaagatggaagcatttcccttgaggaccggaacaagggaacacgatgcccgctctcaccactcctattcaacacagtacttatttccyagccaaagcaatcagtcaagagaaataaaaggcatccgaataagaaaagaagtcaaactgtctctcttcactgacgatatgattctatacccagaaaaccctaaagactctgccaaatgacttgagtagtttcaggatacaagatcaacatagaaaaatcagtagcatgtctatacactataaggttcaacctgaaagccaaatcaagaatacaatcccattttcaattgccaccaaaaaaataaaatacccaggaatacatccaaccaaggaggtaaaagatctctacaggaagaactacaaaacactgctgaaagaaatcacagatgacacaaacaaatagaaaaacattccgtgctcatggattgggagaatcaata

SEQ ID NO: 867734 - DNA, 559 bp, Homo sapiens
accctcaacaaactaggcactgaagaacatacctcaaaataataagagccatctatgacaaactcacagccaacatcatactgaacaggcaaaagatggaagcatttcccttgaggaccggaacaagggaacacgatgcccgctctcaccactcctattcaacacagtacttatttcctagccaaagcaatcagtcaagagaaataaaaggcatccgaataagaaaagaagtcaaactgtctctcttcactgacgatatgattctatacccagaaaaccctaaagactctgccaaatgacttgagtagtttcaggatacaagakcaacatagaaaaatcagtagcatgtctatacactataaggttcaacctgaaagccaaatcaagaatacaatcccattttcaattgccaccaaaaaaataaaatacccaggaatacatccaaccaaggaggtaaaagatctctacaggaagaactacaaaacactgctgaaagaaatcacagatgacacaaacaaatagaaaaacattccgtgctcatggattgggagaatcaata

SEQ ID NO: 867735 - DNA, 559 bp, Homo sapiens
accctcaacaaactaggcactgaagaacatacctcaaaataataagagccatctatgacaaactcacagccaacatcatactgaacaggcaaaagatggaagcatttcccttgaggaccggaacaagggaacacgatgcccgctctcaccactcctattcaacacagtacttatttcctagccaaagcaatcagtcaagagaaataaaaggcatccgaataagaaaagaagtcaaactgtctctcttcactgacgatatgattctatacccagaaaaccctaaagactctgccaaatgacttgagtagtttcaggatacaagatcaacatagaaaaatcagtagcaygtctatacactataaggttcaacctgaaagccaaatcaagaatacaatcccattttcaattgccaccaaaaaaataaaatacccaggaatacatccaaccaaggaggtaaaagatctctacaggaagaactacaaaacactgctgaaagaaatcacagatgacacaaacaaatagaaaaacattccgtgctcatggattgggagaatcaata

SEQ ID NO: 867736 - DNA, 576 bp, Homo sapiens
acaaactatgcatccaacaaaggtctaatatccagaatctataaggaaattaattcaacaagtaaaaaataaataatcccattaaaaagtgggcaaaaggctgggcacggtagctcacacctgtaatcccagcgctttgggaggccaaggmaggcagatcacaaggtcaggagttcgagaccagcctggccaatatggtgaaaccccatctctactaaagatgcaaaaattagccgggtgtggtggcgggtgcctgtagtcccagctactcgagaggctgaggaaggagaatcgcttgaacccaggaggcggaggttgcagtgagccaagatggcgccactgcactccagcctaggtgacagagtgagactccgtctcgaaaaaacaaaacaaataaacaaattttaaaaaaaagtgggcaaaagacatcaacagccacttctcaaaagatatacaagtggccaaaaaacatgaaaaaatgctcaacatcactaatcatcagagaaatgcaaatcaaaaccacaatgagatatcacctcacatcagtgagaatggctattactaaaaagtcaaaaa

SEQ ID NO: 867737 - DNA, 576 bp, Homo sapiens
acaaactatgcatccaacaaaggtctaatatccagaatctataaggaaattaattcaacaagtaaaaaataaataatcccattaaaaagtgggcaaaaggctgggcacggtagctcacacctgtaatcccagcgctttgggaggccaaggaaggcagatcacaaggtcaggagttcgagaccagcctggccaatatggtgaaaccccatctctactaaagatgcaaaaattagccgggtgtggtggcgggygcctgtagtcccagctactcgagaggctgaggaaggagaatcgcttgaacccaggaggcggaggttgcagtgagccaagatggcgccactgcactccagcctaggtgacagagtgagactccgtctcgaaaaaacaaaacaaataaacaaattttaaaaaaaagtgggcaaaagacatcaacagccacttctcaaaagatatacaagtggccaaaaaacatgaaaaaatgctcaacatcactaatcatcagagaaatgcaaatcaaaaccacaatgagatatcacctcacatcagtgagaatggctattactaaaaagtcaaaaa

SEQ ID NO: 867738 - DNA, 576 bp, Homo sapiens
acaaactatgcatccaacaaaggtctaatatccagaatctataaggaaattaattcaacaagtaaaaaataaataatcccattaaaaagtgggcaaaaggctgggcacggtagctcacacctgtaatcccagcgctttgggaggccaaggaaggcagatcacaaggtcaggagttcgagaccagcctggccaatatggtgaaaccccatctctactaaagatgcaaaaattagccgggtgtggtggcgggtgcctgtagtcccagctactcgagaggctgaggaaggagaatcgcttgaacccaggaggcggaggttgcagtgagccaagatggcgccactgcactccagcctaggtracagagtgagactccgtctcgaaaaaacaaaacaaataaacaaattttaaaaaaaagtgggcaaaagacatcaacagccacttctcaaaagatatacaagtggccaaaaaacatgaaaaaatgctcaacatcactaatcatcagagaaatgcaaatcaaaaccacaatgagatatcacctcacatcagtgagaatggctattactaaaaagtcaaaaa

SEQ ID NO: 867739 - DNA, 618 bp, Homo sapiens
atattctgacaagttatattctagatgaaattgcttcttgactctaagcatctaggactctttaaaaaaattattataaaaatgttcaagcattcattagagacaaatgtaaaaaaaaaactttatgaatctatcatccagtttcaacagttaccaacacatagccaatcttgtttcattaatccccctrcacccactctgtttgctggtaatttaaagtaaatcccacacatctatcattttccctgtaaatacttcaaggcatctttaactagtaaggatttttttaaaacataatcacaatgccattactatgcttaacaaaatgacagcaatttcttaacatcatctgaaacccaatcatactcaaatttctccaactgtctcaaagatgtcttttttcagttggttcgttcccatcagaatccacacaagattcacacattgcatttggttatgttcttaaatctcttaatctaaagcatacattgaatccctctccctcttcttttttatgctacttatttgctaagacaattgagtcatttgtcctatagaatatcacacacgttttggatttctgtggtaacgtgtttctctagccttcagaaagtgaaa

SEQ ID NO: 867740 - DNA, 592 bp, Homo sapiens
gcatgtatacaactggagagttaagatgtgtggattctcaagtacctgagcaaataactgaccacagagatacaaagttagaaggcaaaatcagaaggcatttgctagaaagataggaggaaaagttagaaggcatgtgttaattaggtcttctgggaagcagatgctgaaatggagggaggaatgcaaaaggcttattgggrcttaatgttttcaaaagagggagaaagcggccgggcgcagtggctcacgcctgtaatcccagcactttgggaggccaaggcgggtggatcaggaggccaggagatcgagaccatcgatctaacacggtgaaacctcgtctctactaaaaatacaaaaaaaaaaaaaattcagccgggagtggcggtgggtgcctgtagtcccagctactccagaggctgaggcaggataagggtgtgaacccgggaggtggaggttgtagtgagcccagatcgtgccactgcactccagcctgggcaacagagtgagactatgtctcaataaataaataaataaaaataaaaaaacaaaagagggaggaagagtggttgagcagagaaagctccaattc

SEQ ID NO: 867741 - DNA, 621 bp, Homo sapiens
atctatgtattcctacatctttaagacttcaaaataattacttagatagccattcagatcaaacttgaggaaatcgtgaggttattagaaaggtcattgtcatttctttgttcattaattattgctttaagtgtctgtgaactacttaacatttagtagtacagggtaatttggtattttcttgattctttggattctaagtgtcaaaggcctcttaactcatttgttgttcaacataygttgatcttgcgcgtactatgtgccaggttctccgttgggtattaaatgatacaacagcaatcacaaagtcagataggttcctgccctcaagaaactaactacagtattccaaattcaatataaaccttttgcatttaattattgaaactagtcatgttctttaaaggctcaaaatgtggagacaagtgcaataataaaaaatgttaatgctatatgattcattcatattagttttaaaaaatattttctatgtgccaggcaccgtattagatgttgaggatacagtgactagcaaaaaaaaatcctgctcttatggtctagtgggaaaaattaaatagttgaataatttcaatattagacagtagatccagagctacctct

SEQ ID NO: 867742 - DNA, 492 bp, Homo sapiens
ggttggtttatgctggtgtatgtactttccaaagttagtaaacttacacttaaggttatatattttggccaggcgcggtggctcacgcctgtaatcccagcactgggaggctgaggcaggcagatcacgaggtcaagagatggagactatcctggcgaacatggtgaaaccccgtctctactaaaaatacaaaaaattagccgggcgtagtggcgggcgcctgtagtcccagctacttgggaggctgaggcaggagaatggcgtgaacccgggaggcggagcttgcagtgagccgaggtcccgccactgcactccagcctgggcracagagcgagactccgtctcaaaaaaaaaaaaaaaaaaaaaaaaaaaaaaaaaaaaaaattagccaggcgtggtggtctactaaaaatacaaaaattagccaggcgttgtaatctgagctactcaggaggctgaggcaggacaattgcttgaaccccagaagcggag

SEQ ID NO: 867743 - DNA, 633 bp, Homo sapiens
caaaacaacctgacaaaatttgtcaatatgcacttgcacttggtatttgattaaacctcaccagggctgtaggggtaacctctgacctctgctttgagtcaggaaaatgataacttcttcctggaggataaattattttcttaggcctattccaagcctctctcactctctctctctctctctctctctctttttttttttagatggagtctccatctgtcgcccaggctagagtgcagtggtgcaatctcagctcattgcaacctccgcctcccaggttcaagcaattctcctgcctcagcttcccaagtagctgggattacaggcatgtgccaccacatctgtctaatttcatatttttagtaaagacaggatttcaccatgttaaccaggctggtctctcaaactcctgagctcaagtaagccacccacctcggcctcccaaagtgctgggattacatgcatgaggtacagkgcagggcccagccttttgagaattcctgattctcttcaatctgctagtattttcctctttcaaatgagtcacacattgaagagctttccggatttatgatgatgccccatgcaagcctaatatgagagcatcatttcttgtgcatcataacacacatc

SEQ ID NO: 867744 - DNA, 514 bp, Homo sapiens
aggtctcaaggagaaggccacagtgagggtttggggagttgttaagtattcattttacttaataacctcctactttatttttgcaatttctctttgaaagtgaaacacaacagaggtgcgattcaggaaaaagtgggttaaaataatttaggagagtgtggctataaagttgctcttgggtgcttttattatcattatcattagccatattgacaacagattcaaatggactcgctgaaatgactataactatagtatcataaacataggcattttaaatggttcatttttagagaacatttgtcttacatttttaaagtgagttgtgtaatatgtctctggtcagccatttgactgggttgtcaatgtgttactastattaatttattaaatttatttcttaaactattgctgagttcatagatttcctctacaaatgctatgtttgtggttggcacgaagaagaaaatacaatttcttccttgagaatatcactgtttaattgggacacaag

SEQ ID NO: 867745 - DNA, 619 bp, Homo sapiens
gcaaattatatctctgtatatgcatatacatatatgaacatatatgtgttatagagcatatattacagaacttttacatgtatatgtatatgtattaatatatgtgtttatgtgtatttataaaacagtacaactaacagactttaatcyttacatacaaataccatttcagggtcatactgaatcctaggtccactgaggggtttgaatgtttgtaaatgtagttctgattgttgaaataggctgttctagtattcagtctagtgttttctcagtggttgcttttgttacttaaagtatgcttcatactatgctgcatacatttttatgcatatacaatgagattttatcacaattttatgcacaacttaatgcatacataatcagatttaatgctgctgcatgttaacagaattacaactgtttgatttacagctctatctgtagaatgcagaacagtgctcaaacatagtagatgttcaataaaatttgttgaataataaatgagtgcatacattgtttgcatgtgtgtgcatgtatgtgtgattactattttccccattttgaaagatggttgaaactcaggttcaagaggaattataataatacataataattg

SEQ ID NO: 867746 - DNA, 602 bp, Homo sapiens
cttcacgtttaaaaatgatttcttctgcttgatcaagcctgtttttgaaactatcagtgtattttttaaaatttcattcattaaattcctcagctctaagatttatctttggttctttttcatgatatctatctctgttgaatttctcattctgattattatttttttctgattttattgcattgtttgtattcttctgtatctttctgagtttcatattttgaattccttttcagatattctataaatatccttttcttttargtgtattactaaagtcttactatcttgttttagtagtatcatattttcttgttttattatgcttcttgtgtccttatgttaatgtctacacatctagtgaaatagcctattttttctatttgatggagtagcttttgtagggagagacttttttcctgtagaagggtcctaaaatgtcagttgagtatgatgcagtggtttgcttgtgggtttactaagcctggtttccatgcagtttcttcagccataatagtcatctgtaatgcctgtgatttttctcagtggtctaggctgtggattttgtgacagtggtggtgtgattttgcttgtagctgggg

SEQ ID NO: 867747 - DNA, 593 bp, Homo sapiens
acaaatctgttttattattcccaagaaatctaattatatatatgccaaacattggaatgatgaataacactaaaataatccattttaatgacatcaatctgtggaaatagaggacataatttatatccatattgtttttaaattattgattattccttactaaatttgtttggtattacattgcaccatgatataagcatcatggggacagaaatgttacgaaattrgttcttagaagcattcatagcatcaaataatatacctgaaatattgggcataccaataaagcttaaaattatagcttattgcatattccttagaaagcagataaaaatcttagtatagttttgcatgtacaattattgtatatccatcaaagactgggtcaaaagctacttcataatgtttgcattgatttaccccaggtaaaagaatcagtcctcactgagttctctgctgctcctttgcaatgtctgttccttcctgccatctattacagttatttagctctctttgttacatttttttattaatcagcaaaccatgaagttgaatgaaggaaattgcatccattctccatgatggctgaagaa

SEQ ID NO: 867748 - DNA, 667 bp, Homo sapiens
gacattgattgaatgcccaattgatgctgagtacttttggagacagtggaaactcagaagagaacaagttaggaaattttaactcatttggtactgaaattctagtgaggaaggcagagtgcacacgttcttttggaacttaaattctagtsgggaagacaaacacatgagaaaatgatgctgtttctagcactgacctgtgtaatgaatgaaatttatgaccgggcgtggtggcttatgcccgtaatcccagcagtttgggaggctgaggcaggcagatcacctgaggtcaggggtttgagactagcctggccaacatggtgaaaccccatctctactaaaaatacaaaaattagccaggagtggtggtacacaccggtaattccagctactagggaggctgagacgaggatcacttgaacccgggatgcagaggttgcagtgagctgagattgcaccactgcgctccagcagcaatatacaataggtgggtctgggcaaacatttcagaggagttaagtttcagtgggtgaaaatgaagtacacatgtgaaactgagaggagttcagtatagttggagtgaagaacatcaggggcagagatgtgcataattcatctggaaaagtatgtgagaccagatcctgcaggaatctgtgattttgagtat

SEQ ID NO: 867749 - DNA, 667 bp, Homo sapiens
gacattgattgaatgcccaattgatgctgagtacttttggagacagtggaaactcagaagagaacaagttaggaaattttaactcatttggtactgaaattctagtgaggaaggcagagtgcacacgttcttttggaacttaaattctagtcgggaagacaaacacatgagaaaatgatgctgtttctagcactgacctgtgtaatgaatgaaatttatgrccgggcgtggtggcttatgcccgtaatcccagcagtttgggaggctgaggcaggcagatcacctgaggtcaggggtttgagactagcctggccaacatggtgaaaccccatctctactaaaaatacaaaaattagccaggagtggtggtacacaccggtaattccagctactagggaggctgagacgaggatcacttgaacccgggatgcagaggttgcagtgagctgagattgcaccactgcgctccagcagcaatatacaataggtgggtctgggcaaacatttcagaggagttaagtttcagtgggtgaaaatgaagtacacatgtgaaactgagaggagttcagtatagttggagtgaagaacatcaggggcagagatgtgcataattcatctggaaaagtatgtgagaccagatcctgcaggaatctgtgattttgagtat

SEQ ID NO: 867750 - DNA, 605 bp, Homo sapiens
cctggttgattatgaggagttgcaggctgaagcaagtgccctgggtgaccagtggctgctgtgcctgattgttgcagcacaggtgaccacacagactttcgttagttcatggcgtggaaagaagtcttctgaaggccctggtttgcttacagaaagaagatgacaagatcaggtctctaaacttttagactaagtcaagttcagagacgcagggacaatttatggcaaccatacaataaccttaaagccacaaggctgacattgctaaaaatcaaacatgtcatttaactaggcatgttgcagaatggcaaygtaaattgaattcacagccttaggaaatctttggtgtgaaagatactgcattgattaggcagaagtggtgacatcagattggactcaaaattgagaatcttgaactacaaaggttgaccttggagaaaacagcctacatgacaaaacaaaacagaaacaaaacaagtttggctactttaagccatcattaaggaggatgggatatgattttgtatctggtgaatttatccatctgggtgcatatcccaaagagcctatagttaatatgttatctcatgcagctgaccatggcc

SEQ ID NO: 867751 - DNA, 605 bp, Homo sapiens
cctggttgattatgaggagttgcaggctgaagcaagtgccctgggtgaccagtggctgctgtgcctgattgttgcagcacaggtgaccacacagactttcgttagttcatggcgtggaaagaagtcttctgaaggccctggtttgcttacagaaagaagatgacaagatcaggtctctaaacttttagactaagtcaagttcagagacgcagggacaatttatggcaaccatacaataaccttaaagccacaaggctgacattgctaaaaatcaaacatgtcatttaactaggcatgttgcagaatggcaacgtaaattgaattcacagccttaggaaatctttggtgtgaaagatacwgcattgattaggcagaagtggtgacatcagattggactcaaaattgagaatcttgaactacaaaggttgaccttggagaaaacagcctacatgacaaaacaaaacagaaacaaaacaagtttggctactttaagccatcattaaggaggatgggatatgattttgtatctggtgaatttatccatctgggtgcatatcccaaagagcctatagttaatatgttatctcatgcagctgaccatggcc

SEQ ID NO: 867752 - DNA, 605 bp, Homo sapiens
cctggttgattatgaggagttgcaggctgaagcaagtgccctgggtgaccagtggctgctgtgcctgattgttgcagcacaggtgaccacacagactttcgttagttcatggcgtggaaagaagtcttctgaaggccctggtttgcttacagaaagaagatgacaagatcaggtctctaaacttttagactaagtcaagttcagagacgcagggacaatttatggcaaccatacaataaccttaaagccacaaggctgacattgctaaaaatcaaacatgtcatttaactaggcatgttgcagaatggcaacgtaaattgaattcacagccttaggaaatctttggtgtgaaagatactgcattgattaggmagaagtggtgacatcagattggactcaaaattgagaatcttgaactacaaaggttgaccttggagaaaacagcctacatgacaaaacaaaacagaaacaaaacaagtttggctactttaagccatcattaaggaggatgggatatgattttgtatctggtgaatttatccatctgggtgcatatcccaaagagcctatagttaatatgttatctcatgcagctgaccatggcc

SEQ ID NO: 867753 - DNA, 648 bp, Homo sapiens
aaatcctaagcagaccagtaatgagtaataaaattgaattaatattaaagaagtctcctaacaaaaaagaccaggactagatgtattcacagccaaattttaccagatatacaaagaagtgttggtaccaatcttactgaaattattcaaaaaaattcaggaggatggattcctccctaacacattctgtgaaaccagtatcagcctgacaccaaagtcaggcaaggaaacaacaacaacaaaaataaaaccatagatcaatacccctggagaacatagatgcagaaatcctcaagaaaatactagcaaactgaattcaacaacacaccaaaaagataattcatcatgctcaagtgggttttatcccagggattcaaggatggttcaacattcacaaatcaataaatgcaattcaccatataaacagaactaaaaacagaaaccrtatgatcatgtcagcagatgcagaaaaggcatttgataaaatccaacatcctttgatgatggaaaccttcaacaaaacaggcatcaaaaaatgcctcaaaataataagagtcatatacgacaaacccacagccaacattgtacttaatggggaaaagttgaaaacattccccctaagaactggaacaagaaaaagatgtccat

SEQ ID NO: 867754 - DNA, 576 bp, Homo sapiens
aaataaatggtctgtactcttcaaaaatgtcaaggttaaagaaagcaaaagaatgggtgaagataaagaatgaggaattgttctggtttgaaagaaactagagagatgtgacaacgaaaggcaatatgtgtttccggataaagcacattcttggaaggatggaaaaaatttgaatttggactgtggattcattgatggtattgtataaatgttcaattttctgatttagataattgtactgtgattaggtaaaacaatgttcttgttcttaggaaacatacaccaacatgtttagggataaggaagcacaaagccagcaatttattctcaaatgactgagaaaaattatatatctacagagagagacagagagagaragagagacagacagactgacagggagacagggacatggggaagaggagaaaaggcatgaatggtaagggaatgggacaaaatgtaaactgctggggaagctcgatgaagagtatgtcagtaatttttctactagctgctttttgtaactttgacaataaaaatgaaaagtcaagaaagcattgctcacagatctttgag

SEQ ID NO: 867755 - DNA, 601 bp, Homo sapiens
aaatcaatgcaatgcaatatagaactgtagcaaaaaaaaccggtatgtgcaaagtacagaagcagaggacaatgagttctgtcttctcggctccacagattccaaggaagaacagaggcagtgacaagactcaccgaggacctcctgcccaccagaccctgccgagaggctgccatgatggctcaccagaggccgagatgaccctaaggctaaccccactttaagatgaggagcctgaggctcgtgttagtttggttcctggcatgacgctgtggcagggctggggagctcatctctctgacccagagctcacggggatgagctccagttggaatgaatgagtcaggtactttttgatagttggaagttaacgctttatcactgcattaccgattgtttaggagctcaggcccttccaggtggagcaccctytaagcaaagtgtaaagtgttctgaaccacagtggcgccacttcatggaggatcgattgtatttgagggttggagggtgagaacagcaaaaaataataattcaaccagttggttattatgaacatcattttcatatttttaaaaatatgctatatcatggaattcaatgt

SEQ ID NO: 867756 - DNA, 633 bp, Homo sapiens
ctgacaccatccctcctccatctccctaccctggctaatatgtttggtaagatggcaacctctctccaaagcctttctttcctctcagtttcagaaagctccaatttggtgactgttcattatccccccatttagacaattttcaacacacagtggaaccttcaaatagtgtgagcaatgttgtcaatcttcctgcatgctgcctctgtcaggctttaagaggtaaattgactgcacagtgggagaggaattaggaacacagtttctattaatagtaaagggcccctgaagttcagtcatgggaagggggcattagagtcacctgtataccaagggctaggctaagtgtcttccggttaggactttcctcacagggggagtattcccagctgcaggatacgatgcggtgcatggaaaagggaacagtcatacattgagtgccagttgtgtgcaaagcactttaataatkttatctcatttcatcatcagaacaacaccaagagttagaagcagtattcacattttgtggttgaaaatagagaggtaaattccccagttcccacagctcatacatgatggagccaggatttgaaatgtggccttgtctagctcccatagtcccactgttagcta

SEQ ID NO: 867757 - DNA, 613 bp, Homo sapiens
tcttggaaacaaaaaagactgttaatcagtcctctctacagcttctcagcttcaaaattggaagctatgtcgaagtgctcctggaaaagctgctttctagcagttctgcctgctagaaagggccccttctagcaggcagaacagagaggacttgtactggagagaaaaagttacctagcatatggtgggcatgtgcgtggaattccccagtgagctctggaatgggcacgggcctgtaccttggggctctcgaataagaagcctgggccctaccaacgtctggcttctgctgctcaagaaacagatgctaggccttcctgcattgccaagagcagagrcctttggggactcaagtttgtttggcttgaatgtgttggtggagaaatgagaaggtaggagtgagggcatcttttaacattatcccatgattgtagagcttcatcctctccagccttaattatgacagtagcctcctacctggtctccctgatttcagcccttcttctccctaacagacctttctcacagctcccaggttgtgaatcccttgccggatgctccagctgccacttacccaagcacatgatgctgttgaatgtcgttgtgttttgca

SEQ ID NO: 867758 - DNA, 618 bp, Homo sapiens
tggcatttgtactgattatggcctgacagctcttgagtttccaatgataacagccatctgacttgatcggagttctatggattttcactaaaatagaatcatcgccttggtgatggatagaaaaagtaaagcaatacatcctgataaatgctgtgccttcctccttcgtctcyctggcggtgaccttgtgcaatccataagagggcaaggctgagagccccggccaccgccgccgtgtgtcagaacttggaaatttaagtagctttgaaacccgtcaatggggtgaagggggaatggcctgagaaagcaatggatcatgcttagagggctcagagggaaatagggtacgctgaaggtcaacgtgcagacatgtcctgaaggaacagctcaagtcctcattctcattcacgggaggctgcggccctgtgaggtgagatcagtagaagagtacaataaaacaggaattttcagagcatgtaatttcttcttggaagtgaaaggcactggagaatggtgcagaataagcactagccttagagagaggatgccctgccccagtctctttctctgagtagcagagagctggctgtgctaggaaactcttcgcctctctaacac

SEQ ID NO: 867759 - DNA, 570 bp, Homo sapiens
tatgtttactcttcgccggtgttgctgccagaagcttaaagctggatctaatcacttccttgctgaaaccattgatgcttctctgtcgacttcaagatgtgttcagttgggacattgccgtctgtttccttcttcmgttctcctttcccttctactccagtccttacaagtgacatcttctgttcctgcatgctaaaatgcccgtgacttctctaatgcagctctctgccttggtgcctttgcgtatccatctctactgaggaactgggatgacttcagcatccggggtagatgcctggcatgaaccagaaaggatatcagattagatctgtaggtgatggtgagaatggatacaggactgtttcagtcaagtacctacctctaaacaggagggcactgtggattttaggattggagatcattggtacctgtgccatcctggggaggtgggaagaaccagttcacagatctagttttgagcaaaggaacatggggttttagcaggtcatttagtgtaagcccactagaaggaggcatgtggtgtggggtccaggacaggctgtgagtaca

SEQ ID NO: 867760 - DNA, 569 bp, Homo sapiens
tattacataacataacatagcgtaatataataatatagtaaatataagtatagtgaatataattactttgattacataagtatgattagtaataaatgatagatataaaatagtgttaatataatacaaaatactatagtataatacaatataatgtgtatgtttctttttaaaaccttttcagtatacgttgaaggaaacaaagacccaagtttaatasggaaatgatttttgtaataaagtgaacaaactggataggttctcttgagctggttacagctgttttctgactgaattttaattataaaagatctagccagcttctatacacactctccctgcacaaatgttaactctggttcagacaccttttctgcacccagttattctcactcataatttctttctccttgggtttttgttttattttggaacggctttttaaccttcagaagtacattttgtctggaggaccagagtatcgatgtgatcctacctgtagattcttggcaagagagaaaatgttcttattaatgcagaaagtcctacccagaaggaagaaaacgtct

SEQ ID NO: 867761 - DNA, 677 bp, Homo sapiens
aacattcagagtgctgagaatgctgctgcaagtggaatttacttatcagaaggtcagttaattccactaaactctgatgtcatatctagcttgtacaggaggcaaacaaacaaatgctaaacagtagtgcagaaccttggagttaactgtgtgcacatttaaacctcacctccaaccccactgtgtgtacagtaattatttccagtgaaatcactgctttctttccgtgaatgactaactggtgatgatattgtctggtatgatagtaactgcataagacctataggcacatagttcatcaccaatttgtgctttgtgcaatatttgcttcgggggaaaaataaaagaatcaccaaatatgttacaaactctggatttaaaaaaaaaaaacagctctaagaaaatttttawtttttttagtgtgttctcgctatcttggagttatttctagtcatcgggatcttgcatgatttaaacaaggcccttaggtgaccatcaatttatatctaaattattagtgtgcttgttatagtgggtgaatgttctttcagttcatttgctcattcaccaccaggattctacaccaggaactatgctaggttctagtgttatagggaggttaatatatgggagtatatattgaaacacattgtattagttgattttcacactgctct

SEQ ID NO: 867762 - DNA, 664 bp, Homo sapiens
cacaggaaacaagttatacatagatttttttttcatttaaaaaaacactcatgtggccattcaaagctacatctctcttctcttcagctgcaagtaggcaaagtcagcacctctcacctgcccacgtgtccaggaagcatctaccacagaggaaatggcagtgcccaggtatgatgggaactcttgatgacaggagagcctgtcccattacatcactgaacagaaaagctcaaagacaagaccaagagtgaatcttagcagacagtcaagaaggatgagaaatgagggcatccataggcatttgctcatcatgaaattctgaygcatcacttaaaatccagggacacatgaatagaagcaataaaagctattttaattaaatttgagctataattctgggtttcttgttttgttttggtacttgcatggttcaacagtatattagacaaatgtgcatttgagaaatcctgatcaaggaggacaagttagaagaaaaaaaaaaaaaaaccctgagtattcatctgtcttcccacaaagtcttcctgaagctattcttgcaaaaccttctgcccactggcactgtatgcgtatgattaactgcacttgagcccaacagcttgcatgtatagttaatttgctccaaatttccatgctgcattataac

SEQ ID NO: 867763 - DNA, 608 bp, Homo sapiens
tcctgatgacccagcttcctttaaactttttctaaagttatactgattcttcacaagggatgtattggtcaaggttctccagagaaacagctccaacaggatagacaggcatgtatactggaggacattcgttatgggaattggctactaatttttcataatggatgtattgggcaaggttctccagagaaacagctccaacaggatagacaggcatgtatatcggaggacatycattatgggaattggctcaggcgatggtgaaggccaaggagtcctacaatctgctatgagcaagctggagaatgggaaagtgagtggcacaattcagttcaagtctgaaggcctgagagccaggagggccaatggtgcagctcccagcccagggccgaggtctgaaaccagggatgggatactggagtaagtccagggatccaaaggcccacaaaccaggagcactgatgtctgagggcagcacaagacagatgtcccaggcctgaagagagaaggaactcgccctttctctgcctttttgttttatccaggccctcaggggatcggatggggaccacctactttggggaagagtgttctttttactcaggcaa

SEQ ID NO: 867764 - DNA, 608 bp, Homo sapiens
tcctgatgacccagcttcctttaaactttttctaaagttatactgattcttcacaagggatgtattggtcaaggttctccagagaaacagctccaacaggatagacaggcatgtatactggaggacattcgttatgggaattggctactaatttttcataatggatgtattgggcaaggttctccagagaaacagctccaacaggatagacaggcatgtatatcggaggacatccattatgggaattggctcaggcgatggtgaaggccaaggagtcctacaatctgctatragcaagctggagaatgggaaagtgagtggcacaattcagttcaagtctgaaggcctgagagccaggagggccaatggtgcagctcccagcccagggccgaggtctgaaaccagggatgggatactggagtaagtccagggatccaaaggcccacaaaccaggagcactgatgtctgagggcagcacaagacagatgtcccaggcctgaagagagaaggaactcgccctttctctgcctttttgttttatccaggccctcaggggatcggatggggaccacctactttggggaagagtgttctttttactcaggcaa

SEQ ID NO: 867765 - DNA, 608 bp, Homo sapiens
tcctgatgacccagcttcctttaaactttttctaaagttatactgattcttcacaagggatgtattggtcaaggttctccagagaaacagctccaacaggatagacaggcatgtatactggaggacattcgttatgggaattggctactaatttttcataatggatgtattgggcaaggttctccagagaaacagctccaacaggatagacaggcatgtatatcggaggacatccattatgggaattggctcaggcgatggtgaaggccaaggagtcctacaatctgctatgagcaagctggagaatgggaaagtgagtggcrcaattcagttcaagtctgaaggcctgagagccaggagggccaatggtgcagctcccagcccagggccgaggtctgaaaccagggatgggatactggagtaagtccagggatccaaaggcccacaaaccaggagcactgatgtctgagggcagcacaagacagatgtcccaggcctgaagagagaaggaactcgccctttctctgcctttttgttttatccaggccctcaggggatcggatggggaccacctactttggggaagagtgttctttttactcaggcaa

SEQ ID NO: 867766 - DNA, 606 bp, Homo sapiens
tgttctggagtctcagtctggtttccctggcaggatgcaaggacacagggctcccagatggcatcgtcacaccacggcccccatggcaagaggatgccaaaaattccagggctcgacttccagaaagggacttgactcagacactgcggtttggaattaacctgctccattcaaccaactggggaacaaacaagattccacatgtgagggcactgactgggctgaatgccctgtggaaagcgggcaaacatgagtggaacttcttagtaaacaaaggacggcccttggcagcctgcacggtaccagtgttttctaaaatggcattttattgcctacataatgcaatttcatgacaaattctgggccgccttcccacaccccatattaagttatttctttttattatgctcattttrttgatgatgtcatgacacggcccatcaacccttaattaaaaccacggctacaatgttaggccccctttaaaccatgaaaaccagggttttggagaagtcctttaggagagtttgctgctgggacggacaaggaccctgcttgctccagggcagtcattgtgggtttccagaaaaaaggcaagaggttctc

SEQ ID NO: 867767 - DNA, 606 bp, Homo sapiens
tgttctggagtctcagtctggtttccctggcaggatgcaaggacacagggctcccagatggcatcgtcacaccacggcccccatggcaagaggatgccaaaaattccagggctcgacttccagaaagggacttgactcagacactgcggtttggaattaacctgctccattcaaccaactggggaacaaacaagattccacatgtgagggcactgactgggctgaatgccctgtggaaagcgggcaaacatgagtggaacttcttagtaaacaaaggacggcccttggcagcctgcacggtaccagtgttttctaaaatggcattttattgcctacataatgcaatttcatgacaaattctgggccgccttcccacaccccatattaagttatttctttttattatgctcattttattgatgaygtcatgacacggcccatcaacccttaattaaaaccacggctacaatgttaggccccctttaaaccatgaaaaccagggttttggagaagtcctttaggagagtttgctgctgggacggacaaggaccctgcttgctccagggcagtcattgtgggtttccagaaaaaaggcaagaggttctc

SEQ ID NO: 867768 - DNA, 644 bp, Homo sapiens
aaccatgaaaaccagggttttggagaagtcctttaggagagtttgctgctgggacggacaaggaccctgcttgctccagggcagtcattgtgggtttccagaaaaaaggcaagaggttctcagaggtgctggggtatggggggattccaggttgttaggggttgaactgtgtcctccggaaaaaggtgcattgaagtcctaaccccccagtgcctctgaaggtgaccttatccgagggtggttgcagatgtaattagttacgatgaggtcatactggagtagggcgggcccctaattgaatatgactggtgtccttataaaaagacggtcatggaaactcacagagacgcacggggggaacaccacgtgaagatgaagaaataactcagggtgattcttctgcaaaccgagggacaccacaggtctccagcgaccactggaagctrggaggagcctggggaaaaccctcccttaccttcctccgaaggaaccagccctatggacaccttaattttggactttcggcctccaacactgtgagacaacatgtttccattgctttaagacacccagttgtggtgttttgttatggaagccccgggacactcacacacagggtttgactgcgtcttcctgagtttaat

SEQ ID NO: 867769 - DNA, 613 bp, Homo sapiens
taagcaactaataaatgcctggtcagtctcttctactgatacattctgaaaaaaaaaaagaatatcttatatactctccataaaaatatcctatatactgtctcctactaatacattctgaaaaaaaaaaactatcttatataccctccatcatagttgcaaattgctgcagatttttctagatatgtcaacacaccggggttatctgacctygcattacatttttttaaatgttgtcttaatttatctgaataaaacagctttcccaccccgcccctaaaaacatgtaatagacaaacagtacctcagcagaactgatagggttacacttaactttttgcacatggatgctaaaagtttttttctaaataaaggctaaagttaagtgacgaatagaaacaacaggatataagaaatgaataagaaaagaatggaccaaaagccatggaagaatgaaaggttggaggttaggaaagaagggcagtttagaaacatcagcatgctctggtgcctcctgtcactttatgttatgtgtggtcctggagtacacatggagccccatcagagtcgtgatgataattcccatccaaggttgccataccattttgtcttt

SEQ ID NO: 867770 - DNA, 587 bp, Homo sapiens
tatacaactggagagttaagatgtgtggattctcaagtacctgagcaaataactgaccacagagatacaaagttagaaggcaaaatcagaaggcatttgctagaaagataggaggaaaagttagaaggcatgtgttaattaggtcttctgggaagcagatgctgaaatggagggaggaatgcaaaaggcttattgggrcttaatgttttcaaaagagggagaaagcggccgggcgcagtggctcacgcctgtaatcccagcactttgggaggccaaggcgggtggatcaggaggccaggagatcgagaccatcgatctaacacggtgaaacctcgtctctactaaaaatacaaaaaaaaaaaaaattcagccgggagtggcggtgggtgcctgtagtcccagctactccagaggctgaggcaggataagggtgtgaacccgggaggtggaggttgtagtgagcccagatcgtgccactgcactccagcctgggcaacagagtgagactatgtctcaataaataaataaataaaaataaaaaaacaaaagagggaggaagagtggttgagcagagaaagctccaattc

SEQ ID NO: 867771 - DNA, 545 bp, Homo sapiens
acacacacagacacacagacacacacacacacacacacacacacttgattatttgagcccaagagtttgagaccagccttggcaacatgaaaagagactgtctctacaaaaaatgtttaaattaaccgggtgtggtggtaagcacctgttgtcccagctgcttgagagggtgaggtgggagaatcactcgagcctaggaggtttaggttgcaatgagctgtgatcatatcactgccttccagcctgggtgacagaggaagactctaccaatattagtttgttctcatgctgctgataaagacacacccgaaactgggaacaaaaagaggtttaattggacttacagttccacatggctggggaggtctcacaatcatggcggtggcaagaggaaaatgaggaagaarccaaagtggcaacccctgataaacccatcacatcttgtaggacttattcactatcacgatatagcaagggaaagaccggcccccatgattcagttacctctcactgggtctctctcacaacatgtgggaattctggga

SEQ ID NO: 867772 - DNA, 657 bp, Homo sapiens
tgtggtttatgtaacatctttgcctgagggagtataacttactgtataaatcattattttgtattttataaatgtttttgccttatgactcagttcctgcaacagccaaatagcacaagagctgcccaacatttcattaatctttaaaatattattacactcagtccagatatgataaaagtgttgccagagttcgaagtaacttgatcaagattttaaggacatttctaatccccaaatttaccatgtaatcaacaaatacttatttcattaggtcctggagagagaaataaacaaataggttctattccctgtcctctagaattttacagttcagtccggagccatgacatattcrtgtaaaaatctatccccttgaacccatgcagaaaaggaagagctatgtaaccattagccatgtgcttacaaggggctatttctgcttctgacaccaaatttctgctgagtccagggaaacttcccacttcctctctatatcctggctcaccacatacttatctagcataatgactgccttgaaggggattgggtttcttagaggaaaaaaacttacgatggtattaaatatgaaaacttgaatgttaattgtttttttttttaataaaggttaccacttcaaaaattaggtcatttcac

SEQ ID NO: 867773 - DNA, 565 bp, Homo sapiens
caagtgattttcctgcctcagcctcctgagtagctgggattacaggcatgtggcatcacacccagctaatttatttttatttttatttttttatttttagtagagttgggatttcaccatgttggtcaggctggtctcaaattcctgacctyagatgatctgcccgcctcagcctcccaaagtgttgggattacaggcatgagccaaagcgcccagcctttatttttaattctcataaggcaacttttaattcatgttttattcaggtttagggtggcacagtatagaaaagagtaatagaaaatcaaaggtttgggattctggctcttcttttgatatgttctatgaccttgggccatgtatttaatcttaaatgactagaggttctgatctgtaaaatgggaggatcatcccagatgagggtcatcaagtaggtttcaactcaagtccactactactggctacctggagttctgtgttgagaattctgaggctgagccatgatcagttagtgataactgccgtggttgcaggataggggagcacaggttcaaggcattttcca

SEQ ID NO: 867774 - DNA, 565 bp, Homo sapiens
caagtgattttcctgcctcagcctcctgagtagctgggattacaggcatgtggcatcacacccagctaatttatttttatttttatttttttatttttagtagagttgggatttcaccatgttggtcaggctggtctcaaattcctgacctcagatgatctgcccgcctcagcctcccaaagtgttgggattacaggcatgagccamagcgcccagcctttatttttaattctcataaggcaacttttaattcatgttttattcaggtttagggtggcacagtatagaaaagagtaatagaaaatcaaaggtttgggattctggctcttcttttgatatgttctatgaccttgggccatgtatttaatcttaaatgactagaggttctgatctgtaaaatgggaggatcatcccagatgagggtcatcaagtaggtttcaactcaagtccactactactggctacctggagttctgtgttgagaattctgaggctgagccatgatcagttagtgataactgccgtggttgcaggataggggagcacaggttcaaggcattttcca

SEQ ID NO: 867775 - DNA, 565 bp, Homo sapiens
caagtgattttcctgcctcagcctcctgagtagctgggattacaggcatgtggcatcacacccagctaatttatttttatttttatttttttatttttagtagagttgggatttcaccatgttggtcaggctggtctcaaattcctgacctcagatgatctgcccgcctcagcctcccaaagtgttgggattacaggcatgagccaawgcgcccagcctttatttttaattctcataaggcaacttttaattcatgttttattcaggtttagggtggcacagtatagaaaagagtaatagaaaatcaaaggtttgggattctggctcttcttttgatatgttctatgaccttgggccatgtatttaatcttaaatgactagaggttctgatctgtaaaatgggaggatcatcccagatgagggtcatcaagtaggtttcaactcaagtccactactactggctacctggagttctgtgttgagaattctgaggctgagccatgatcagttagtgataactgccgtggttgcaggataggggagcacaggttcaaggcattttcca

SEQ ID NO: 867776 - DNA, 640 bp, Homo sapiens
taaggcaggcctggtggtgacaaaatctctcagcatttgcttgtctggaaaggattttatttctccttcacttataaagcttagtttggctggatataaaattctggcttgaaaattattttctttaagaatgatgaatattggccccactctcttctgacttgtagagtttctgcagagatccactgttagtctgatgggcttccctttgtgggtaacccgacctttctctctggctgcacttaacattttttccttcatttcaactttggtgaatctgatgattatgtgtcttggggttgctattcttgaggagtatctttgtggtgttctctgtatttcctgaattttaatgttgacctgtcttgctaggttggggamgttctcctggataatatcctgaggagtgttttccaacttggttccaatttccccctcactttcagatacaccaatcaaacgtaggtttggtcttttcacatagttccatatttcctggaggctttgttcatttcttttcattcttttttctctaatcttgtcttcacagtttatttcactaagttgatcttcaatctctaatatcctttcttctgcttgatcgattcagctattgaaattgtgtatgcttcgtgaagtt

SEQ ID NO: 867777 - DNA, 610 bp, Homo sapiens
tcagccatcatcataaaacaagtggaatttgcacacaaacacattcagactcaatttatctcttggcagctcactgacaagtcatatttaggatttacataagaaaattgagttaggtcagtttaatgctttaaaaggttgctaatataattgaggttatagtctgcacaatttcttacctctggttatagtctgcacaatttcttacctctggtttcactgtgctctgaacagtgatttgcaaacacgtgcctgtggaatagtacttgtacatggtaaaattttcactggtccttcacaaaaaatatgaaagtaagagtgttccaactatcctgccttgggggaaaaaawgtcctttactccaaaattatatcactcttgttttttgttgtgatataaaattttcttaatcttttgaaatggtggcaagagcagatggtagaattgtgattcattggccttatttagcaaaacaaaaaagttgagaaagttatgagattatgttcattttcctcttctttccattctgtattctccaggcatttttttcaacaggttttatttttttagagtagttttgcactggcagtaagattgagtagaaggcaca

SEQ ID NO: 867778 - DNA, 622 bp, Homo sapiens
attgttgttcttgctccttttatgtagggagaacctttctcatgtagggtgtataatatgcattttcctcactccacttcatcccattttatttttgttaagttatagggttgcagtgaagtaagtgtatgatatctatgtgtaatacacattactaagcttgatagggtggcttttctgaataaggacaaaaatcatttgtttataaatatttttcatccttccacatcttctgcctcagtatcctgagtagctgggattacaggtgtgtgccaccatgcccagatgctttttgtatttttagtggtgatggagttttgccatgctggccaggctgatctcgaactactgatcttaagtgatccacccacctcggcctcccaaagtgttaggcatgagccactgtgcccagcctgactttgacctgtaactttttttcagcttcacgtatgtgtaggaggagctgaagcagctgggcygattcatttagtcttttgtgggtataatagcatgatggagtgtagacgcctgggacatgcagattaaggctattggaggtcagagtttctcaaaagcaaattttgtacagaaaattaataacaacaatgaaacagaaaggtta

SEQ ID NO: 867779 - DNA, 631 bp, Homo sapiens
gggaggatgggtgggaagatggaaatctctcatttttttgtctttatgaacctgggaccaaaaaaaaaacgaggaactttacctataaattagattgtgttgtgattcataaaccatgctaattttataatttaaaacattggaattagttatgattttaaaaatttttaaatagaactcaaaaagaaatgttttcctcatatgattgatgttttaagtgtggccattgtttccaagcaaaaatgacatttattcaattgtattaaatgagatttcttagtaggctatttttacttgattctatgtcagtaacatgtgaaataagcattagaggtgtgattaaattattggagagaaaatagtwatgtgaatatttgttttcttggacacatttgaattactatatttttcccaagcacactttgaagtacattttaaaaaataatttaacatcagggttgcactacctctctatcttgtaattccatgttacattggagctttttaaacacttatttgactctctcttctggaaactctttcttcagttgtttttcatcttattattctctcttgttcctccttattccaagggtcactctatcattggctctttggctgattcatatat

SEQ ID NO: 867780 - DNA, 631 bp, Homo sapiens
gggaggatgggtgggaagatggaaatctctcatttttttgtctttatgaacctgggaccaaaaaaaaaacgaggaactttacctataaattagattgtgttgtgattcataaaccatgctaattttataatttaaaacattggaattagttatgattttaaaaatttttaaatagaactcaaaaagaaatgttttcctcatatgattgatgttttaagtgtggccattgtttccaagcaaaaatgacatttattcaattgtattaaatgagatttcttagtaggctatttttacttgattctatgtcagtaacatgtgaaataagcattagaggtgtgattaaattattggagagaaaatagttatgtgaatatttgttttcttggacacatttgaattacyatatttttcccaagcacactttgaagtacattttaaaaaataatttaacatcagggttgcactacctctctatcttgtaattccatgttacattggagctttttaaacacttatttgactctctcttctggaaactctttcttcagttgtttttcatcttattattctctcttgttcctccttattccaagggtcactctatcattggctctttggctgattcatatat

SEQ ID NO: 867781 - DNA, 631 bp, Homo sapiens
gggaggatgggtgggaagatggaaatctctcatttttttgtctttatgaacctgggaccaaaaaaaaaacgaggaactttacctataaattagattgtgttgtgattcataaaccatgctaattttataatttaaaacattggaattagttatgattttaaaaatttttaaatagaactcaaaaagaaatgttttcctcatatgattgatgttttaagtgtggccattgtttccaagcaaaaatgacatttattcaattgtattaaatgagatttcttagtaggctatttttacttgattctatgtcagtaacatgtgaaataagcattagaggtgtgattaaattattggagagaaaatagttatgtgaatatttgttttcttggacacatttgaattactatatttttcccaagcacactttgaagtacattttaaaaaataatttaacatsagggttgcactacctctctatcttgtaattccatgttacattggagctttttaaacacttatttgactctctcttctggaaactctttcttcagttgtttttcatcttattattctctcttgttcctccttattccaagggtcactctatcattggctctttggctgattcatatat

SEQ ID NO: 867782 - DNA, 555 bp, Homo sapiens
atcacttgaggccaggagtttgagaccagcctggccaacatggggaaaccacgtctctactaaaaatacaaaaattagccaggcgtggtggtgcatgcctgtaatcccagccactcaggaggctgaggcaggagaatcgcttgaacctgggagatggaggttgcagtgagccgagatggtgccactgcactctagcctgggcaagagagtgagtgagactttgtctcaaaaaawaataataataataataataaaataaaaataaaaaatatataaaagtgcatataaaatgtggaagagtctgtgtcaagcagtggtgggaggtgtgtgaattggcataaggttttcagaggacaatgtgttactaataatcaacatatttaatgtgtatcctctgatgcattcttagatacatcattgaaccttggtagaaaataacaaaacataggtcttaagacttttagttaataataaaatagagaaaacctggaaatataatcaaatctgaacattaattggtcaaagcttgtgacgcatatcgtttactaggcaaat

SEQ ID NO: 867783 - DNA, 587 bp, Homo sapiens
agtcctctgtgtttaaacaagaatatgtgagtcggacagtgtgctctttgactgaaaacctgattcagagaagttggcttattcctttgcctttgaccacagctttgttggaggtcagcagcatcctaagagccagggagcaggccaggcacagtggctcacgcctgtaatyccagcactttgggaagccagggcaggtggatcacttgacgtcaggagttcaagaccagcctggccaacatggcgaaacctcatctctactaaaaatacaaagcaattagccaggcatggtggcaaatgcccataatcccagctactcaggaagctgaggcatgagaatcgcttgaacctgggaggtggaggttgcagtgagccaagatcatgccactgcactccagcctgggtgaagtgagactctgtcaaaaaaaaaaaaaaaaaaaaaaaaaaaaagccagggagcagaatgtggtcccagaaaagaactaacaactttacttgcgtacaaaatctaggtggttattccatatggtggaaaagagcattggattaggaggtagaaggtttgaatttgaatcatagctctacag

SEQ ID NO: 867784 - DNA, 672 bp, Homo sapiens
tatcattagtttgaagctatttagtgtgtttatatgtgtgatataaattttgacttaatgaaaggctcatccactaatagcagccacaaatattacacaaaatatatgttaagtgtctattaatcttcagtactacactaggtacaattgaagatatggagtggtagaatatatactttctatacacaagatatgaaaaatctcaatgttcaaaaaagcaatttcagaacaaacaagtagaaaacmaacaagtatgagcatgacaagtattcttgtattaagcatgtgtgactgactcaatttctaatggtaagattctcagaaaaaagagaatgttagtggcattgtaagatagttgcctcttttttaaaaaacgagcaaatttgtctgcatgatctatgaataatatagcataaaattttagcatgtatttaaaaatgaataagttgaagggaatgtttatagattcatgaatccaaagtcttaaatatgagtctgactataatccttttaagcttaataaacatgaacaagttattcagtttcattagttttaattcctttatgtataatataattttattttattcctcaaaacattatattaaaatgagatcaaatatttaaaaatattttgtacatgtttaaatcatgtatcattgtttaaaaata

SEQ ID NO: 867785 - DNA, 632 bp, Homo sapiens
gactagtacatggtgtctttgcagatgtaattatgttaaaaatctagagatgagataatcctagaattagtggatgggccctaaatccaatgaaatgtgtccttataaaagacagaagcagaaaagacagaggagaagaaagacaaaggaagaagcttgtaaagacagaggtagaaatgaattgtactgccagaggccatggaacagctacagtgaccagaagctggaaggggcaagtgagaattctcccctggtgcacacagaggagtcccaccagcatcttgacttcagacttctaacctccacaattgtgagaaaatacatttgtgttgttttaagtcacccagttggtggtaatttgtatagaagccttaggraacgaatacaaagtccaaataaaaatctgtctccctcaaatctttctattctttgctctggccaagagggagtagatccttcacccttctcgtaaactatatgcaacgtcattatgcacgaactgaaatgtattcacactttaccatgtcagcttgaagttctcaatccctacaataaatctgaccattaagggtttgaacacatagttgagaaaagccagaaagagccctgggatcacttttccgaatgctttc

SEQ ID NO: 867786 - DNA, 601 bp, Homo sapiens
ccatattgctaaaaggcaaggttagatgaacacttgtacagttatcataaaatttttatcaagaagctgcagtacctttaataatgtattattttaccttcttgcaagaactcctctatatgcttttaaaatgttgttttcattatcctggaagagttggttgtagaaaggaatccttctctaactacatggtgtcaaatgtattatcaaggagtcatgattagtataaactaattttatccctcctctttatacatcatccaattcattgtattaacaaaagcatccacttttctgcctacatcaacttaatagcatattgagggaaacacaaaattgcatattcaaatcaccctgagaggcttgaagaaattataatgcatgagctaaggtttcttatgaagatctagcattaacaggcatgtatcttgtttcactaaaaagaraattccttctaacaccttaatgaatgaaattttgtagattgctaaatatataatctgccaagaacctaacaatctacttttgatagcatttagtatgaaggatggtaaaagtcgcatgacattacatgatcaagttgagttagtagcttaaactt

SEQ ID NO: 867787 - DNA, 678 bp, Homo sapiens
ggattcatcacctgctgattatagagctcttgggccttgaataaacagaagcagtagccaggcagtggtcaccgtgggccttgggtgagacccagtgctgtgcttgcatcaggtatgacccagcacagtcctggtggtggtgaccatagaggtacttgtgtcacccctagccctagctcctggaagttcagcacagagacagagactccttttgtctgggacaaagtaagggaagagaagaagagtctttgcctgataatccaaagaattatcccagatcttacctgagatcacctaggcagtacctataagagtccacaagagccatagttgttcatgggcttgtgttgtgccctaatacagatacagctgctgtgtctaaagacttaaatcacaaaaccaaagtaccttcaagtgttttggaaatccttgccaagaaggrtggatacaaacaagcccagactgtgacgactacaagtaatacataattctttaatgcctagcactgaaaaacatccacaagcatcagagtcatccagaaaagcataacctaaacaaacaaattaaataaggcactagtgactagtcccatagagatacagatgtgtgaccttccaaacagagaattcaagatagttgttttgaggaaactaaagaaattcaaggtaacatagagaa

SEQ ID NO: 867788 - DNA, 602 bp, Homo sapiens
ttgatcctgtcatcatgatgctctttggttattttgtgcactagttgatgcagcttctttgcagtgtcattggtcttcatattttggtgtgtttttgcagtggctggtaccagtttttcttttccatatttagtgagtggttctttcaggagctcttgcaaggcaggcctgatggtaacaaaattcctcagcatttgcttgtttggaaaggattttatttctccttcacttatgaagcttagtttggctggatatgaaattctgcrttgaaaattcttttcttttctttttttttttttcttttttttttttgaggccaagtctcactctgtcacagaggctggagtgcagtggcttgattccggctcactgcaacctccacctcctgggttcaagtgattctcctgcctcagcctcccgagtagctgggattacaggcatgtgccaccatgcccagctaattttgtatatttagtagagacggggtttcaccgtgttacccagactgatcttgaactcctgacctctggtgatctacccacgtcagtctcccaaagtgctgggattacaggcatgagccaccatgcccagccaaaaattct

SEQ ID NO: 867789 - DNA, 614 bp, Homo sapiens
caatggactgtgaagttgtgataatcttttttaagactattttttaaatagcacttttaggttcacagtaaaatttagagaaaagtacagagatttctcacatttcccctacccttcacctccacagcttccaccttaatcaatgttccccatcggagtggtacacttgttataatttataaacctacactggtacagcataaccaccccaagtccatagtttatgttagggttcactgttggtgttacgtcatggcctttttagataaatagaaaaccatttcattgctttcaaataaagagaaaaaagtaacttcctggaagtatttttaattttttgagagtaaaatgmcaataaggcattaaatttctcactgttcctgcagttcaggttggagaaatacatgataattatgtatgccgtttgatgactcagtgataaatatacttaaaaggaaagtggaaacgtctctagagtaaagaatggcttagagaaactattttaaccttgtatttatattggaatcaacataacaatgctactctgccagtagtataaaccatttaaactggacttcaaattaattttttaaaaatattaatagctaaatagt

SEQ ID NO: 867790 - DNA, 614 bp, Homo sapiens
ctttttttgcagatgacatgatcctatatctaaaaacttcatcatctctgcccaaaagcttcttaagctgataagcaacttcagtaaagtctcaggatacaaaatcaacttgcaaaaatcactagccttcctatataccaacaccatgcaggcagagacccaaatcatgaattaactcccattcataattgctacaaaaagaataaaatacctaggaatacagctaacaagggacgtgaaggacctcttcaaggagcactacaaagaamtgctcaaagaaatcagagatgacacaaacaaatgcagaaacattccatgttcatggataggaagaatcaatattgtgaaaaaggccatactgcccaaagtaatttatagattcaatgctattcccatcaaactaacattggcattcttcaaagaattagaaaaaactatttgaaatgcatatagaaccaaaaaacagcccgggtagccaagagaatcctgagcaaaaagaacatagctgaaggcatcacactacctgacttcaaattatactataaggctacagtaagaaaaacagcatggcactggtacaagaacagacacatagaccaataaaaccacacaac

SEQ ID NO: 867791 - DNA, 636 bp, Homo sapiens
tctggtgtctctacctatagactttgttagataaacactgatgattcttccactgcctttgcttcatgttgctgatctccacgcagaccaagcaccttcctcctgttcactcatttttttcttcaggcactgtggtaggcagaaaagaaatggcccctaaagatgcccacatcctctctcctggaacctgaaaatatgcaatgctcagtagcaaagggaaggtaaagtcacagatggaattaaggttgctaattaaccaactttaagataaggactattctagattctaggttatccaagtaggatgaatgtgatcacaagggttcttaaatgtggaaaggggaggcagaagagttwgtctcagagtgaggcagtatgaggtgactagactggccatcactggctttggaggtggtaggggaccaggagcctagaaatgctagcagcttcaagaagctgaaaaaggcgagtaaatgaatccatccctcgaacctccagaaagaaatctgccctgctaacacctcagttttagtctagtgagacccatttcagacttttgacactgagaactgtgagataacaaatttgtgttgtttcaagctgcccaacttggggtcacttgttacagcagccaat

SEQ ID NO: 867792 - DNA, 560 bp, Homo sapiens
aagaggtatccactgttttcatcgtgatgaaacttccccccaaaacatcatcaggacaaatctctaagcgcttgaaggcaagaattatattttatttagagttttattcctagggcctattactctgtgtagactcaagaaatactcagtgaatgtagacaaatggacacatgaatgagagacatacatgtgataaaacagtcaaattctaaatagcctccagcaytgatcaggagcaggcatttttagcacgtgtcattatggccagacaaaatctggaataaatctcactttcttacaccaaagaggctaacactgagaactggagtgagactgataacaaaaggtgggaactcttccttttagctaacatcttgaatttgtgctgagctttgcggagaactaggattcattcaaaaaatgtactttgcctttactccatcatctctttgaaatctctagtgatgttcagaatgggagaatttgagagagttaaagtctatgcaaaatctatgattccaaagcagggaaaaattccttttagacttggtgtggttggg

SEQ ID NO: 867793 - DNA, 666 bp, Homo sapiens
ggtaagaaaaggaagacatacagttataatcttaaatatggtatgaatatttaacatgggctcaaggctgtttagagaagggagtatgagataacgaaaaaaggagaagggatcaggactggaagactggaggaagctggaaaaagaaagatttggaagagtgtgaatgtaggaggcttgaagaaccagtgctccacaggaaaaatataagcttcacgtcacagtgtgtggcccagagacttgttaacatcctctctcagctgtggcttcctctatgaagcctttcctcttgacccaagcaaaaataatctatttcttcttaatatcacctgtgatctactgtgtacttccaaacatcccattggctgtaatcatttatgtgtgttttctcttctttgatctccttgtcatctttgttattatgatttggtaagctctgcatgtatctcartgtatgcatatagaagtcaccatataatatttatcaaatgaattcataaggttaagtcttctttctttaaggccactctgctgccataaagggaatttacaaattaaagagtggagattgtatttgaaggttttgaaacacttatttgcagtatcccaaaagagcagaggtactctcctgggaagtaaataatggaattatggaagcaggttggg

SEQ ID NO: 867794 - DNA, 613 bp, Homo sapiens
aaatgccatttctcttctgtgagttacttgtttatatgcttcgttcatttttctgttgggttattggtcgtattttcctcaattttagtagctgcttgtattttagtggtaacaatcttttctaatctaaatttctaatattttaaatccgtattttgattttgtatatggtgatattttcagcaarggattttttgtataattgaacctaattattttaaattgcttatgaattttgagtcatagttagtaaggtcttatttataatgtataaaggatctatccaagtctactctcaggattgaaagctttcagtttttacatacagatcttcaataatttggagtttatgctggtaaataaagtgaagtgcagatttaattgtatctttctccaaatgtgtcaacaccattaattaagaagtccaacttttcctacagatgtgagataccatttttatcatataccaaatgtccaagtgcattggaatcaattctgtgctatgtttcacttgtgcactaatggcatactcacagaaacaatttctagcatctgtctatctaactatctgacaggactggtcatcatccccaccaccaatactctccttttt

SEQ ID NO: 867795 - DNA, 612 bp, Homo sapiens
acctgacaagtgctacttttccctatcattttatttctgccctgtcttagacacaattaaaatagtgtttaacttctggatgctatgcagtccatttcaatttgtcactttttctttaacaaaatattacacagtttttatatatgcccattttaaatgttttcaaatcatgtaaagtgagtcattattttataaaccacattgttgttttatatatatatatatatatatatatwttttttttttttttttaacagaatattggcttgcttcttccaaatggtagaaaagttagaagaatggctgggatgagtacaaagtcttacaatatacagccatatcatttttagttgatttaacagattttagagataatgaactgaccagcatcactgaaatccattaaaaatacaaagactacctacagtattgttcttcttttacaaaggaactatacagtgaggtttagaaatgtgttcagtaatacaaaatcagatcctaggaatgcttcagagaagagttcatgaaccacatattaggtcataatcagttattttctctttcgggatatctgttaaacagccttgcttttataaggacattcactataat

SEQ ID NO: 867796 - DNA, 642 bp, Homo sapiens
tgatcacgagatgtgcagaaatgcaagagacccaaggagaattgtctcccaacagcagcagacaaaagaaagctacagacactgagataaacacaaagaataggctgtaagtactgacagcagaagccatgaggtagagagaaagaaaggaatgaaagctattgcattagcggcaggagaaataagcaagaaaggacataccatcatcatgccaatggaagtgtgttgatatctataaacatgagctkcaatcatattctctcattaaatagatagtgcagtacttctgaagaagttatcagtgaatgtgggatcattttgtttgacagtggaaatttctcacactatccactaacctaccctgtcaccatagtcaagcaagtcaagctagaatctctgactgtgtcagcctccggggttttgtagaaaatttgtattatggagatgtgggctaaatactggaggtgattcacttcagaaagctaagcattgggaaaccatctctatcacagtaaccatttatgttaaagaaactgattttgcactgtttttagcctcctgtattttatttctttccatcttaatctaacattcttttctagacaagagatgtttattgttatttgtcagtggcaatagcca

SEQ ID NO: 867797 - DNA, 545 bp, Homo sapiens
gtatgtgaattatatatcaataaaattattgtagaaaattcaacggcattctacaaaatgtctgaccagtattctttaaaactcaaagtcatccaaaacaagaaaggtcagagaaactgtcacaaaccagaggaggctaagaaaacaccatgctcaaatgtcatgtggtgtcttggatggaatcctgtaacagaaaagaggcatttgggaaaaactaatgactcctgtataaaaggtggagtttagtcaataataatgtaccagtgaggcatctttacttgtgacaaatgygcccccagtaaggtaagatggtaacaacatggaaactgggcgaggtgtatgcaggaactcttggtattattattgcaacttttctataaatctaaagctacctctaaaataaaatgtttatttaaatttcaaggaaaggaatccctaccctagctcagtgtttcccaactcctcttatttttaggagttagctatagaagaccacgagcctcctttgtggaggggccaatgaaaggttgttaggggtgaatgct

SEQ ID NO: 867798 - DNA, 613 bp, Homo sapiens
gagccattactgcttcagaattacatatgcaaccagctagtggccattttaagatgagggaggggagtgcatagagacggtaagaaaaaaaggcagaaatgtctgttgaacaatggcaaagagtcagacaagtttatttgtttgttagagctgggagatctcaactccctcgggcagaagcctgttagcctcatcgctgcaaggtttttccagttagaggcataaatgaatacttacgggttcttgaacatattatacacaatatgtaaaagcagacccatgtataataatgtgtggaaatgtcttggccatatttctgatgccagaaggtcttgtagccaaagtaggagtaagtgtggcatctgagacacattccaagagcccccattcagtttggtatcacccagacattttggtacaagcaagcccttttcaacccatacactcaacttmcagacctcaaatctctccacctttactcattgtccccattctaagatctaaaccagccttcctagttgtcacttttgcctgaggctaatgtgacttcacattccatgagtctgaatatatgaattttaagaaattacatgagtgacgtgaatatctttgt

SEQ ID NO: 867799 - DNA, 559 bp, Homo sapiens
ccataatgttcacttctttaatgacaggatagatgttgctgttctgacgactggagtattcagactgatgagaaccactggtgattctcagcagtcccaacatcacatgcttcctgtcctgatgacctgtgagtcaccactccaccacctccctatatgggtgagaggttacatcagtcccagtctatagatggaacaacacaggcccaattgagcagatgtgctttcatgagtctgtctcatactatctattgccaggaaacagggtacagttggagacatattgttgcrtcatctgaaggcctcatattacaagacacgactatgaagctaggcttcactctatcacaggagtgggagcctcagactttagcccctggttccaattctgacacctgcttagtatagaaatacttaggtccaggagtcagaggtttgagttctagacttagaattaccacttagcaatcactttcatcatgtcgctcacctgctaaaaatcttcctatggctccctattgcccttaaaataaaatcctaacccctcatcatggaattc

SEQ ID NO: 867800 - DNA, 652 bp, Homo sapiens
tctgtcttgctggggttccaggcactactgggatatgaaaaaatactcctgcagctagctcagtgtctgcccacacagctgcccagttttgtgcttgaaacccagggccctggtggtgtaggcacacgaggggatcttctgatctgcagattgcaaaaaccgtgggaaaagcatagtaacccggccaggtagcacagtccctcacagcttcccttagtttggggagggaggtacctggctccttgcacttcctgggtgaagcaacaccccaccctgcttctgctcaccctccatggctacacccactgtgtaaccagtcccattgagatgaactkggtacctcagttgaaaatgcagaaatcaccagccttctacattggtctcactgggagctgcagacctatttagccatcttggcccctccctctgcattagagtcttttaaaagcagaatcaatcaagcagaagaaagaattagtgagcttgaagaaaggctgtttgaaaatatacagtcagagaagacaaaagaaaaaataagaaacaatgaagcatgtctatggaatccagaaatagtctcaaaaaaacaaatctaagagttattggccttaaagaagaggtagagaaagaaatgaggatagaaagtttactcaaa

SEQ ID NO: 867801 - DNA, 677 bp, Homo sapiens
cagttaaaaccactatcattgcaggtgactgtgggcatatctaacattacacccctgaagagcaacatcagagacttcacactgctagagggatgaaatgggaaggagaaatagattttactaaagtaattcaatcaatcattaaagaagtaaacaagcaaataataaaaatccccagagaggctggcacttagggttgttacagtatattatcccaaatgtacagtttccaacaacaaaaaaagatacatgcaaagaaataataaagtacaataataataatataataaaacatgacctgtatactggggtaaggaggggagaggtggcaacaaaaattgactatgaacgtgatcarttgtcagtttaacagaaacaggtttcaaagtggcaattataaacatgctcataaaaactaaaggaaaccattattaaagaaataaaagtagatgcttggttcagcagctcatgtctataatcctaacactctgggaagctggagaaggaggactgcttgaggaaatgagttagagatcagcctaggcaacatagtgagaccctgtctcaaaaaaaaaaaaaaaaaaattaaaatttgctgggcttagtggcatgcacttggagtcctagctactcaggaggctgaggtaggaaaattgctttagcataggagttcaagg

SEQ ID NO: 867802 - DNA, 537 bp, Homo sapiens
acctcgatttccatcagacggcaaacctcctctctcatttttaggcttggccatgaaaaagatggtttggacaggaccgtggtaagtccatcactacattcatacccctgtttttttttttttttttttttaaatcagccaggaaagcttttctatggcaactgaatttatccagtccttatatgcatctatcacaggttataacatgtccaaatttggagtcaagaattatagcaaagagacaggtaagaaraaaaaatccccagggaggctttcttttgtgggaggcaggccgccacagtgctgagtattagaaacctttcagccaagcaggtgaactagaattggcagagtccagcaatagctcttagtctaattaagagatttcttcagtgacatttaaaaagtgtaaattcagttaataggtaataggcaacaaacagtaataagaacattcaggaattcagtcaggcggttagtttaaagaagagaagtgaataagccataggagctaagatatttattattttatttcat

SEQ ID NO: 867803 - DNA, 580 bp, Homo sapiens
tccgactgcatgtatgcttttgaagcagctttaagttttaaaagggaaaggcttccatctactggatactttgagtaataaagactatgagaatccacatgacagatttccttttgtgccggcaatgcataacctggcatgttcacttagaggttttgtaattcttttaaaatacattttgttggaagracgtagttgttactgaatacgttcagcttttacaaaatacaaagcccacaatatatcacaaaagagagacaaaaggaatatataatttgcccttcttttcatttggaaacaattggatggaacagttaaatacccaacaaagacattctatttgttaagaaaatccacaataagcatagctttaactggaatatgaagatggttgaaacagaatggggtgtttcagtcacctcactttttttcttttctaaaaattgtattacttttaatgagcaaatctcatcttcattagagtctgcctattttgagttcagctacttctatttaatgacacatatttttgctaatatattgcattatatagtcagataagaacacgggtcttttcctg

SEQ ID NO: 867804 - DNA, 573 bp, Homo sapiens
aacgcttaaaagtttaccctttctgttggtaatcagatctatttatagattcacagtcttcttggccctttaataggatgaccagcaagaaagccttattttaggtgacttacgtaaatgcggacatttttctgttcattttatttccaaaattcttggggactcagtagctaatttttatcccagggtttctgaatatgtgtatgtgtaaggagaatatgtcaccctttattkgatggctaccttaaagtatgttgggctaggcaactcacctgtgaacaaagtgagctatttttattacttgaaaatattgtatttttttaacttcatatttctaataaactaaaattcattctaattttattacttaaatgtgtattggcagaaacagctgcaacaaactatatgccagtttggcatttattcaattctctcaggattttggttgtcactgtttttgttatccaccaaataaattaaattgtttattttgctatgttctttacttttggggggaagggatttcagatatcagataacaataatttttgaatctcacagtcattaatcaag

SEQ ID NO: 867805 - DNA, 573 bp, Homo sapiens
aacgcttaaaagtttaccctttctgttggtaatcagatctatttatagattcacagtcttcttggccctttaataggatgaccagcaagaaagccttattttaggtgacttacgtaaatgcggacatttttctgttcattttatttccaaaattcttggggactcagtagctaatttttatcccagggtttctgaatatgtgtatgtgtaaggagaatatgtcaccctttattggatggctaccttaaagtatgttgggctaggcaactcacctgtgaacaaagtgagctatttttattacttgaaaatattgtayttttttaacttcatatttctaataaactaaaattcattctaattttattacttaaatgtgtattggcagaaacagctgcaacaaactatatgccagtttggcatttattcaattctctcaggattttggttgtcactgtttttgttatccaccaaataaattaaattgtttattttgctatgttctttacttttggggggaagggatttcagatatcagataacaataatttttgaatctcacagtcattaatcaag

SEQ ID NO: 867806 - DNA, 573 bp, Homo sapiens
aacgcttaaaagtttaccctttctgttggtaatcagatctatttatagattcacagtcttcttggccctttaataggatgaccagcaagaaagccttattttaggtgacttacgtaaatgcggacatttttctgttcattttatttccaaaattcttggggactcagtagctaatttttatcccagggtttctgaatatgtgtatgtgtaaggagaatatgtcaccctttattggatggctaccttaaagtatgttgggctaggcaactcacctgtgaacaaagtgagctatttttattacttgaaaatattgtatttttttaacttcatatttctaataaactaaaattcattcyaattttattacttaaatgtgtattggcagaaacagctgcaacaaactatatgccagtttggcatttattcaattctctcaggattttggttgtcactgtttttgttatccaccaaataaattaaattgtttattttgctatgttctttacttttggggggaagggatttcagatatcagataacaataatttttgaatctcacagtcattaatcaag

SEQ ID NO: 867807 - DNA, 573 bp, Homo sapiens
aacgcttaaaagtttaccctttctgttggtaatcagatctatttatagattcacagtcttcttggccctttaataggatgaccagcaagaaagccttattttaggtgacttacgtaaatgcggacatttttctgttcattttatttccaaaattcttggggactcagtagctaatttttatcccagggtttctgaatatgtgtatgtgtaaggagaatatgtcaccctttattggatggctaccttaaagtatgttgggctaggcaactcacctgtgaacaaagtgagctatttttattacttgaaaatattgtatttttttaacttcatatttctaataaactaaaattcattctaattttattacttaaatgtgtattggcasaaacagctgcaacaaactatatgccagtttggcatttattcaattctctcaggattttggttgtcactgtttttgttatccaccaaataaattaaattgtttattttgctatgttctttacttttggggggaagggatttcagatatcagataacaataatttttgaatctcacagtcattaatcaag

SEQ ID NO: 867808 - DNA, 647 bp, Homo sapiens
cattaggcttcactgttgaaacagagtaagcagatcttcgttggcaaatagctcatgaaaaatatgtctatgtcttcaaaagcgtagtttaaaaagaagaatttctacaaaaaccccgaaattttcacttgatttcttaatcaatacaaaacctaggtaacccaatacaaatttagaattaaaacaaatgtggatcaggcaggattcttagttgcaaacatcagaagccacttctaacagattcctgcagaaaaatagtttgttaaaagaatagtggcatagtggaaataaccctgatgtccatttaaataaaatacactgtgatgtagtgataccatgaaatctgacaatgaaaaaagaacaaaacaccaatacaaacaacaacatgaatatatcccacagatgtaatattgaatcaaagaatctatgcagcatgtattgagtatgaactgtatatttccatctatataaagttcagaaaaaggcaaaacaaacctatggtgctggtctcrggatagtggttacatttcagtggtaagggtggtaaaaggggctataaggagggatttggggtgctggctacataggtgtgctcactttggaaaattcattgacctgagtacttttgatatgtgctttttttcctc

SEQ ID NO: 867809 - DNA, 558 bp, Homo sapiens
acatattattatatgttcgataaatgtttgatgaattaagaaacatggaagcatatgaactaaagaggcccccaaagatgtatctactgaaacataactctgtcagcactcctttacaaacaacgaagactgcattcattgggactaagattgaagtgttatatatgggccaggcaaggtggctcatgcctgtagtcccagcacgttgagaggctgaggtggaggtcaggagttcgagactagcctagccaacatagagaaaccctgtctctactaaaagtagaaaaatcagtckggcatggtgccaggcgcctgtaacctcagctactcagtagactgaggcaggaaaattgcttgaacctgggaggcggaggttgcagtgagccgagatctcaccactgcattccagcctggctgacagaacaagactgcctcaaacaaaacaaaaacaaacagaaaaccccaaatgttatatatgtaacttgttaagtcccacacttcataaagtgagaggtgtcacatttatagaaatagctggaatctcaatgctccaaagcc

SEQ ID NO: 867810 - DNA, 676 bp, Homo sapiens
taactgtttccacctcaatccatttgtcttaggtacagtagatcgcaagatttctagtaaattaatttaggtgagagcaaaatccattgttcataaatttttccctcagggaaaaatgcttttcaaatcaccatctgcttatctgccactttgtgtttgctactcttcaaatccaacaggagggcagagggctcagagctaggtaggtgtttgacagctgtcatggaccaggacatatgaaggtsctctccaatgcttagagccaacacggtcccacttgttcaatgtggatcacttgcaataatagcactactcactttccacccaaggtgtccaagaatatagctctaaaagattatctttctttccaaaaatacaagcatatttaagatggaaaccctttttgccttccttttcttctgagtacaactttataagtaggatgatgtcagaactgccaaggaaaacaaatcaatttcttctggttttttaaaaatgaacaagaaatgctgagtgaatcaaaggcaatgaggcagggttcactaaatgcaccagcatcaggagggaggtcgagttaagattctgtctgactgtcggagtttactaaaaaaatttaagtaccattaccggagacaaaatattgtatgtgtgcattagctcttggctagatagtcaa

SEQ ID NO: 867811 - DNA, 644 bp, Homo sapiens
tcttatctctatttttgtttacttggtgacatactacttttcgttcagtgccatactacttttctcaaatgttacctccttgggaaagccttttcctaaatatttctcagtcaccatccctatactgcgttgcaatagaatgtagcataaatctctmttatagaacctgtttcatttgaatgtaattacaatgaatctacacaaaggttatagaatacctactatgccccaaattataccattaaagaaataaaagtcacaatctctaccatcacaaaaattactatccagcttttttcaacccaaatcctcatctgaaacagagaaaacagaaaggtatttgagtatttcctcaattctcccaaggaggatacataactagcaccattacatacaacagatgtcttagggctttagggtttcatctacttgggaaaccccagttgatcaaatactggtaaaattacattacagtagcaataaatgctatgatagagataattcaaaggtgagatgaaaaagcagaaatatctaattgagtatgtgtttatctctcctcaaccatgtcttaatcctgtttctatgcttatttagcatctagatcagtgccaattatgttgtggtcattgaatacattttattat

SEQ ID NO: 867812 - DNA, 608 bp, Homo sapiens
ctaagttgcttctaaggaatatgagattataggttgtttcaatatgttgagtgatttccttttttttctttaatctgtaaagaataaatgtgtaaattcgtgagagtgatatttttatgccttgaatgccattgtttacaatgaaatagaatcggccatttaaatattatattttccttgatagggttctgtattctaatcctgctggacccccttattactcttggtcaagtaacttctctaggtctgtttccccaaaggaagaaagttgaacttagaaaatgatttccaggatcctttccattctaacactccaaaatttcttccatgacttcagacaaggtgttattagaatctccttcaagactggttatgctaagaggcactacatactagactgaaaataaaaatgccatcagccaataaatgaagtcataattaaggktttacacatgcagtgtgctatcgaccaggaagtccaagctagagttcaggaaaatttacatagattttactgttaagagagattctgtgagaatgaacatgggtatatccctctcttttcagtaacttcacaaagctgacctatttgaagtagggtgatttaa

SEQ ID NO: 867813 - DNA, 613 bp, Homo sapiens
ttacctttgacataaatttagatcttaggatccaaggtaaataatgaatttcagctgaattgtgacaagctttatttcaattgtgcatctttatcagagatctaagctaaacacagaattataaactttatagttggaagagggagatccataacatttacgagactttctctggtgcacaggcgaagttgggatgaaaaactgggtctctagatcagttgactcaaaacagagatgatcatcagaatcacctggaaaactttctacmagagtatatttccaggaaccctacccacttccactttaacaatattggggtggatctcttgctaacatattattatttttttagtttctagttagttccaatgaccagtttattttaaaactcaatgttttgcagtttttgcttttaatttttgttaaagaaatgggccttctctcaccttattctccatgaaaataattcacatcccaacaaatagcacaaaatacacaataaaatagacacattataagagaagcaatcaaaaagcagagcacattgtcactacttagtttggaagcaatttcattggttagagaacattctggccaaactgaataacactac

SEQ ID NO: 867814 - DNA, 613 bp, Homo sapiens
ttacctttgacataaatttagatcttaggatccaaggtaaataatgaatttcagctgaattgtgacaagctttatttcaattgtgcatctttatcagagatctaagctaaacacagaattataaactttatagttggaagagggagatccataacatttacgagactttctctggtgcacaggcgaagttgggatgaaaaactgggtctctagatcagttgactcaaaacagagatgatcatcagaatcacctggaaaactttctacaagagtatatttccaggaaccctacccacttccactttaacaatattggggtggatctcttgctaacatattattatttttttagtttctagttagttccaatgaccagtttattttaaaactcaatgttttgcagtttttgcttttaatttttgttaaagraatgggccttctctcaccttattctccatgaaaataattcacatcccaacaaatagcacaaaatacacaataaaatagacacattataagagaagcaatcaaaaagcagagcacattgtcactacttagtttggaagcaatttcattggttagagaacattctggccaaactgaataacactac

SEQ ID NO: 867815 - DNA, 690 bp, Homo sapiens
aagaaagtcttgggataaaataagtagataaagaaataaagacaaagaacaagagctagtcctgaaacagtttaagagaaaagtagacactccatccatcagtagcttttcctggataggctcatctttctttaacaagttgacacatttgcaaactgcaggctgaaattttaaacgtctaagctgcttttccttcttctaatagaaaaggtacaaaaaatggtttttgcttcctttactgctgtgccttaataaacatttggctcaaggttttaaccaagccaaatgttgactaaaagcctcctcataaaaggctttaatacatttttgcttgtgttttctttacatgtatttcaatttgatgacaaataatttcttccccatttccctcatttgctgctgcatgttggactaattaaaaagcaggctctttggaagctggaatgagagaaaatggaagagtgggcaggtgggtcaagattgaatgtccytggctctggcaatacataggattctcttcagtgaaacattctccatctagctcagattcaaggaaggcaccgaagaagcccttcagcctttcctacttcaggtcagagttctttttatatttggcatacaaccgagagacatcagaattctatacaaaatggaaagttttattcttcccagcaattccactgcattctg

SEQ ID NO: 867816 - DNA, 612 bp, Homo sapiens
tagcttgtttccaccagatacattcatattaatagccatcaagctatactactttcaaattatatttatgacaataaatgattcctacaaattttagagaagactatcaaaagcaaaagaaataaatacaaaaattaactgggaacaaataagcaacccctggaggattcatctctatgaccctacagtccgaaactaaagaataatacatcctgatggacggctatggaatgaaataaaattctctattaccagttcactagaagaatttttttcccccaggtttgatctctttatttagtttatcctccaggttaaaagaaaattattcactattactcaccaayaactcagtaaataaaaattttgcaaattcagccatttcaacatgccagggaatatctaaaggtgtatatatacaaatatttatatataaattttgcatatgtatataaaagaaatatatatataatatatatgaatataaacattcaggtaggatatttatatttatatataaggatatataaataaaaaatgtatttatatttctttttcaaatgcacagctcttatatacatatttctttttcaaaagcatggctacataaat

SEQ ID NO: 867817 - DNA, 576 bp, Homo sapiens
catgattgcttgattgactgattttgatgttgaaaatcatgtaaaattcatatatattcaaaatgtgattcaaaatagatatccaaagacacatcccagaaaatcagtgtttttctataagctacattaaaagtttttctaaatcttcatttctaagaaaaaataaataatacaagaatgtatataaataagaatgctacctctggaattaatagcacctgcatctgtctacctctttagcaggctttagttttctttctataaatactcgtcatcacataaactataacgyatttatttatttctacatctcccatgaaaacgtgagctccatgaaggcagggacttttgttgttatggtagtcgtcatggtgattgtttaccactgcatcccagggactgggagagtgcctgtcatgtactaagcattcaacagatatctgttgaattaattattcataattacttaattcacaattttaacatgagcataagaactaagatcagaccaaataagccttttcaaaatattaatgaaattttatattattattatctactacccttttaaacttt

SEQ ID NO: 867818 - DNA, 572 bp, Homo sapiens
gaattcactttaactatcacactgataaagatcatttatcataggcttgtcttctgcatgaccctgtatttggagggtgtgagagactacaagacagaagtggtcaggacctcaaaagatggcacgtgagccgctgcttcaaaaaattaaccagacataccagaaaaatatgatgatgtttatggtctgataggcatctctgtgatctgtaatttatgtatcctatctctgtgcaaccaatggatttaatgggtcagcaagcttcaggaaaaccctaaatggatttgggttcagyaaacagccggtcatcacttctaccccatgcttctaccccacttctacccaccgtgctgaactgcgaagccaaggacttgcttaaactatcaaatccagtttcctcatagaacttttggcccttctatttgtaggtccatctttgcctttggttgctgacatcacattcccagggactgttttctcttgtataaacatatatccatgtaaatccttaaaattcatggcctttgggtttttccttgtcagtcaatctgaatgtccccttcctcagatcc

SEQ ID NO: 867819 - DNA, 601 bp, Homo sapiens
ataaactagaagattccttttgggacaacagtgaaatatgttaaatcaagctattccaatgcaatgtaaacaaacaatatatatcatctcagaaattcaattaaaccatgaatcatcttgtcattaccgttactccagtttactgttaacatggcataaatgtattttaagctgttaaacaggggcatgctattctttgaggaatctgaattttatgaactgtcacaagagcaataataaagatgragagtatcagctaagaatatccataattaacaaatcaatatgttctagttatctgcagtgtggttagctccatcaagagcaagataaaggatcaagaatgagaataaagagtgaattaagcagcttaagatccagtcaaaaagacaaaatattcattaataataaaaaaatcagagtcaagtcctgttgcaatttgactcatgtaaaagttgaactcatgttcaaacgtaacctccaaagttgtaggtgggcctagtggtaggtgtttgggtcatgggggtggatccttcacgaataacttggtgccctcccagagctaatgattttacaggatatcttgttttttaaaagagtc

SEQ ID NO: 867820 - DNA, 601 bp, Homo sapiens
ataaactagaagattccttttgggacaacagtgaaatatgttaaatcaagctattccaatgcaatgtaaacaaacaatatatatcatctcagaaattcaattaaaccatgaatcatcttgtcattaccgttactccagtttactgttaacatggcataaatgtattttaagctgttaaacaggggcatgctattctttgaggaatctgaattttatgaactgtcacaagagcaataataaagatggagagtatcagctaagaatatccataattaacaaatcaatatgttctagttatctgcagtgtggttagctccatcaagagcaagataaaggatcaagaatgagaataaagagtgaattaagcagcttaagatccartcaaaaagacaaaatattcattaataataaaaaaatcagagtcaagtcctgttgcaatttgactcatgtaaaagttgaactcatgttcaaacgtaacctccaaagttgtaggtgggcctagtggtaggtgtttgggtcatgggggtggatccttcacgaataacttggtgccctcccagagctaatgattttacaggatatcttgttttttaaaagagtc

SEQ ID NO: 867821 - DNA, 583 bp, Homo sapiens
caatgcaatgtaaacaaacaatatatatcatctcagaaattcaattaaaccatgaatcatcttgtcattaccgttactccagtttactgttaacatggcataaatgtattttaagctgttaaacaggggcatgctattctttgaggaatctgaattttatgaactgtcacaagagcaataataaagatggagagtatcagctaagaatatccataattaacaaatcaatatgttctagttatctgcagtgtggttagctccatcaagagcaagataaaggatcaagaatgagaataaagagtgaattaagcagcttaagatccagtcaaaaagacaaaatattcattaataataaaaaaatcagagtcaagtcctgttgcaatttgactcatgtaaaagttgaactcatgttcaaacgtaacctccaaagttgtargtgggcctagtggtaggtgtttgggtcatgggggtggatccttcacgaataacttggtgccctcccagagctaatgattttacaggatatcttgttttttaaaagagtctgggacctcacccttctctctcttgctccctctctcac

SEQ ID NO: 867822 - DNA, 703 bp, Homo sapiens
aaggattctgaggctcaaatgagatggtacagaaaacataaatgtgcctggcacagggtgacagccaataaatggcagctgttggccattaaagacaaggcccattaatttgtaagttagtgcctactacaaagagcatagattagaattcacacctggattaattaattttcatcttctatgtcctaaaactcattcctccttgcaaactgggtgagactatgtagatgccccagcaaattacccagacggaagatgatgagcaagtagcatctctttacttaaaaagaatcatattttctttccaagaaaatcttcataaaccttagcccatttacataaccaagccatctctcaattggtcttgtttgagtttactatcccatgtcttcttacttttttaaaagaggtaagaataggctttgaacacagaatctggtaatagtctcaaaattatggtgctaaatttccttggcttatcaacattaaataagggaaaggaaaatctactaggagcatcgtgacttgsttgacacacatatgagcacgaaaggtagggtaatatttttaactatatttagcgatgttatagcttggggtcagttcagaagcagaaagggtaaaaacaaagcgagtaatggtgacatgcaatattgtcctcattatcagaagataaaaccatcatactctaatgggctgatac

SEQ ID NO: 867823 - DNA, 604 bp, Homo sapiens
caggcacagagcatggacctaggttaagtaacaagcaaatcacagagtaaatggacaaataaatgaaggtagctgccctgttagaactccttctacacttagaaccagaatatctgagttcaaatcccagctcagcttctattgatgctatgccctcaagcaagcgtttgatctccccaaatcctcaggttccttatctataaaatggtgttcacaactgtatcagcttcrccagacagcagtaaggacagaatgacatgatatagcagaaagggcatttaaactctaaagctctttccaagtattaaatatcacaaaattcaacccctacctttaagcagcttgcaatctggatctgtgctgtccactatgggagccactagccacatgtggctattgagcacttgaaatacggctgatgcaaattgacacacactgtaagtataaaatgcacactagggagtgtgtgtattttaacattaaaaactgtaaaactatattgttaatatgttttatagggaacacatggtgaaatgataatattttgatatattgggtcaaataaaatacactattaaaatgtctcctgtttctttttactttt

SEQ ID NO: 867824 - DNA, 608 bp, Homo sapiens
tgacgatggcagtaatttattgatacgcaaatactggccaatcagtgtgccttgaaatgcaaactgattatgtgtatgtgtctttcagtctccacaggtcggaagagcaaatataaacattctgaacttaagcaggcttcaggatcatccaatccaacatctcattttttttaaatgagtaacctcaggtccagagaagactgggacttaaccaagatcacacagcccacaaatgacccagagtattttccattagaccacagtggggtttttagagcttttcaaagcttttttatgaagactgccaaaataatatctcatgataattctgagacatgacaaccgtgtccatgtttggcaggtgagaaaactgaggccctcaatgagtaaccacatacaattagttgcctctttgargccagagccttaaccctttgccccatgctctgcctcccaccctaggcttcctctccagatccacaggatggtccagtaacacatagcatcccccttccctgatacccccacctcctcttgctcagtacacgcctctgagcattcttcagcctaattaaataatggaaccacactgatccttccctccaagg

SEQ ID NO: 867825 - DNA, 525 bp, Homo sapiens
cacttggaccatagtagtctgaattgagatgtgaggtaagggtaaaatacacactggatttcaaagacttcgttcagagaaaacaaaaagaatgtaaaatagctggttaaaattgaaggcatgttgaaatgataatgttttagacatactgtgtaaaataaaacattattaaaattaattgcacctgtttctttttacttttgttaatgtggctactagaaaacatgaatacacacatgtggctcattatatttctattagacagtgctgacccatagaggggtctaacctggaaagcagacagacttggggacaacccattcaagtggacmtggagtggcaggggtggtatctccctctaagccttagtctcatgtgtctttctccattgtctgtacatttggtcctttaatctgtccaacccaataatgaactatttctatctctcctctgccaaccaatccaaatccagtcacttcagaatgcaactcaagggcacccttccccacaccttcctgtccatgc

SEQ ID NO: 867826 - DNA, 581 bp, Homo sapiens
cacattccttggcttgcggcccctcctccatcttcaaagtcattaatgtagtatcatcaaatctctctggtttctgtttctgtcatcacgtccccctctgtaacttggactctcttgcctctctcttctaaggaccattgtgattatattgggcccagccagataacccaggaaatctcacctgaaaatccttaactgaatcacatctgcaaaatcctatttgccatgtagggaacatatttacaagttcaggggatcccattgtggatatctctgaggggctactattcagccttccacagtgacccatgcatttgtttatccaattgatctttaattccattctggtgagatttagccagtagccagatggcctttcccaagtaatattcctccatrttgcctacagtcatatagcttttcttttgaaacacatacatttccacatatgagagctgattatagggaaataatccaaatgaagataagctttatgcacaaagatggttatgaaggattatggattttgttataagaaaaaaattggaaacatctgaatgtgcaatggtataaggaaatgt

SEQ ID NO: 867827 - DNA, 782 bp, Homo sapiens
tcaggaaataattcaagcatgagccaacagtgaaaggaagcaagttgatttgagcaacagcatacaacaaaatggctgctccacagacagggcagggctatcccacaggcagagtagcactggtggattgctggctaggtatatttacccctactcctaattagatgctaaataagaggtgggtaattcatgaactttccggaaaaggggcgagcagttcccagaagcatataaagtcatttctgggcattgccatggcatttataaaccrtcactgtgctggtgggagtatcttgtaacatgcaaatgtattataattcctagtccttgctggttgtggacagtttccttcctacatcagcagggtcaggaaaacaagccctgctgatctcctggctcagttaggttagggtctaggggagtgccgtagtgaagaccccaggcactgacccattcccagaacctcctcctccaggctcattccctactcattcatttgcccatctcctgtgtttgtttggtatctatttcagctcctcttcctggttacaacatccagataatggctctccccactcagctcaatccctggggctcctgctgttcaccatccttgaagggagtgaacccacccatcaccaaatgcctcagaagagatgcatcagtagctgcttcccaagaggcagggagcgagtgctcagagaaaactctgggtaggggtgaggatgatgccaaaggtcagctctgctcccactgtgctcatgactctctgggcagtcatg

SEQ ID NO: 867828 - DNA, 546 bp, Homo sapiens
ataataagcagatattgtcattttttcgccatccagaaagtcaacaagcaaaatgccttgagcatcccaaaaaactgttgccatgacctttgctcttgaccagtctcttttgctttgattaggccacttcatcttttggtagtcattgttttctttgtgccatgtcttcaggatggtactgataaagccatattgctctgataggggctacaattatttaaagaaattcttcaggatctggattgcacttatttaaatttccactgaagctctgctcttttctgcagttgatctgggtgcaatggttttggcactcatcaagtggaaagtttgctcaactttaatytttcaatcagaattgtggaagctgaaccaattgagatatctatggtgttggctatcttttctgttaattgttggtcctcttcgattagggcacaaacaagattaagtttttccttgcaaattgatgtggatggtctgctgcagtgggcttcatcttcaacatcatctcatctcttcttaaaatgagttagccatttgtaa

SEQ ID NO: 867829 - DNA, 601 bp, Homo sapiens
ggtttttaaacaatagaactgaaatcaggcataatgaggccaacattttggttttaccatgttgaagaacatggatctttccaagaggaaacatagaccattccccagacttcctctgctaaaatatcttatgaggaatcattattcatttagttttgttttaaaaatcagttaattatttttaattgataaaaattatatatgtttatcatgtacaacaaaatttttgcaatatgtatatattgtggaatggctaaatcaaactaattaatacatgcattgcctcatgtacttattattttttgttgtgtgaatacttaaaatatactcctggcaattttcaagaatacagtacattattaactgtagtcayggtgttggatgctagagtctgttgaacttattcctcctgtctaactgaaattttataacctttgcccaacatctcctcaaaccattcccactccccagcccctggtaaccaccattttactctctacttatatgagttccatgtttttagattccatatataagatcatgtggtatttgtctttctgttcctggcttattttgcttaacacaatgtcttccaagttca

SEQ ID NO: 867830 - DNA, 571 bp, Homo sapiens
cacagaggcggtttcccccatgctagtcttgtgatagtgaataagtctcatgagatctgatggttttattagggtttctgcttttgcatcttcctcatttttctcttgtccccgccatataacaagtgccttttgcctcctgtygtgattctgaggcctccccagccatgtggaactgtaagtccaattaaatctctttttcttcccagtcttgggtaggtctttatcagcagtgtgaaaatggactaatacagtaaattggtactggtagagtggggcgttgctgagaagatacccgaaaatgtagaagcgactttggaactgggtaacaggcagaggctggaacagtttggagggctcagaagaagataggaaaaatgtgggaaagtttgaaaactcctagagatttgttgaatggctttgacaaaaatgctgatagtgatatgaacaataaggtccatactgaggtggtctcagatagagatgaggaacttgggaaatggatcaaaagtgactcttgctatgttttagcaaagtgactggagcattttgcccctgccctagagatttg

SEQ ID NO: 867831 - DNA, 571 bp, Homo sapiens
cacagaggcggtttcccccatgctagtcttgtgatagtgaataagtctcatgagatctgatggttttattagggtttctgcttttgcatcttcctcatttttctcttgtccccgccatataacaagtgccttttgcctcctgtcgtgattctgaggcctccccagccatgtggaactgtaagtccaattaaatctctttttcttcccagtcttgggtaggtctttatcagcagtgtgaaaatggactaatacagtaaattggtactggtagastggggcgttgctgagaagatacccgaaaatgtagaagcgactttggaactgggtaacaggcagaggctggaacagtttggagggctcagaagaagataggaaaaatgtgggaaagtttgaaaactcctagagatttgttgaatggctttgacaaaaatgctgatagtgatatgaacaataaggtccatactgaggtggtctcagatagagatgaggaacttgggaaatggatcaaaagtgactcttgctatgttttagcaaagtgactggagcattttgcccctgccctagagatttg

SEQ ID NO: 867832 - DNA, 648 bp, Homo sapiens
aacttatctctagaaactaatattctttattcctggtgtcttgatatttcatgactacatgccctaatatataggtcttttaaaatcatgtttttttggttatgctgtgggtccttccaatctgtaaattcatgactttatgttctggaaattttcttgaattatttgacaaatttgtcccctgtttttttcctgttctttctgtaaaacttctattcaaacgttgaactgcttcggaagatcatcctactcccatattttctctattatttctaaacactttgtcctcatattctgctttattggagattttctcagtgtaatattaaacttttcttaatttgtttttgtaattatctttcatcatgtgttttgaaaattttcaggactttctttctgtctttatgtctctgaatcttctttctctgtgtttttctcatttaataacattttgttctttcctttttggctataacaattgtagaytgcaaaaaggttcattcttctgccttcattatttctgtgtcatccacattcttattttttgttttcttttgctttgtttttctttggtctctgctttatgtgagagatgtgcctcaaatggtctccatttatatgtaggattgaaggctgaatgtttgagaa

SEQ ID NO: 867833 - DNA, 633 bp, Homo sapiens
tactgaaggtccactttggaacctcctgagaagcatactcaagttaataatgggatattaatgaagtcttatagtgactttaatgataaggtgggcaggataagactttgggcagtgatatgatctgaaaatacaatatttgttctgagccagctcagtcaggtccaactagccatccactgtgtttaggaatctaagtaatttggagtcagggcgaggctgggacttcttagaagagatactacaaaacagagtaacggggaagatcacgattgaagctacaaatggacaacaaatatrcatataatcaagcacattaaatatttaactgacaagattaattcagcgttgcttggcccatctcatacacagtgtgtttggcctgcattaccaggtggtttttcacatttcttccatctgttttttactcagttgtaaacaccatcttaatcctaaagaaccagagtgttatgaaaagatatcaatcatttaccaaaggtgaagttcacagtgtacctctttaaagtgctggctttccatgaagagataagattcccattaaagtaagttgtagaggagctttgtcaagtgttagtattactatattcactttatgatgaaaagaaagcatct

SEQ ID NO: 867834 - DNA, 575 bp, Homo sapiens
tatatgcaaaaactcaccatatattagcacattgagtggataatgcatcctgaccaagagggtttaatctaatgaatgcaagattggtttaatattcaaaaactagttaataaaatttaccacattgaaagactgtaggagtaaaatcatgtgatcatctcatagattcacaaaagaaaatcacttgacaaagttcaacaccaattcataagaaaaacatacacaaacacactgaaaagtaggaatagaaggaarcttaatgaagcacacctatgaaaatcttatggctaatattatacttactggagaccaaaagatttcccctaagttcaggaaaaaagcaaggatgtgtgatttcatcattttgattccatatttattgaaggttgtagccaatacaaaaagcaaaatatagaagaggcatcaagattggaaagaaggaagtaaaattgtctctattcacagaaaaagtgagctaaaaaaataaaatagacaacattaaattgtatttatattgctatggttatcttattccttactctactagaatataagtttcacaaatgaaaaagaaa

SEQ ID NO: 867835 - DNA, 575 bp, Homo sapiens
tatatgcaaaaactcaccatatattagcacattgagtggataatgcatcctgaccaagagggtttaatctaatgaatgcaagattggtttaatattcaaaaactagttaataaaatttaccacattgaaagactgtaggagtaaaatcatgtgatcatctcatagattcacaaaagaaaatcacttgacaaagttcaacaccaattcataagaaaaacatacacaaacacactgaaaagtaggaatagaaggaaacttaatgaagcacacctatgaaaatcttatggctaatattatacttactggagaccaaaagatttcccctaagttcaggaaaaaagcaaggatgtgtgatytcatcattttgattccatatttattgaaggttgtagccaatacaaaaagcaaaatatagaagaggcatcaagattggaaagaaggaagtaaaattgtctctattcacagaaaaagtgagctaaaaaaataaaatagacaacattaaattgtatttatattgctatggttatcttattccttactctactagaatataagtttcacaaatgaaaaagaaa

SEQ ID NO: 867836 - DNA, 584 bp, Homo sapiens
ttatagttatctttagtccacattatgaaatttattaaatgaatatgagcaacattgttccattgttttcgtctctgaaatgaattgtgtgtggactgcttgggatcaccagtactccaaagaccacatttttacaaaaagatttgtgtagaaaatgaggttsgtccttaaaatagccctaaaactcacaaggacagttgctacttaaaacctgatcatatgatgtttagccctgattgggaggtagtataacataatggatactgtggtctgtggagtgaaactgcctggaattcagagccaggtgataaaacttattagctatatcatatagacaaatgccttaatttgtttacatttcagttctcattttctgcttctctatctggaaataataacatcttcgatttcaccaggttgttttgagaattaaacaagaaaatggaagtgaaacatttatcacagttaaacttagttatcactcaataaatgttaagtataattattaatattgataaatttacttgagctctgaaatctcactggtattaggcattgccttaagaacaacagatatttaagat

SEQ ID NO: 867837 - DNA, 584 bp, Homo sapiens
ttatagttatctttagtccacattatgaaatttattaaatgaatatgagcaacattgttccattgttttcgtctctgaaatgaattgtgtgtggactgcttgggatcaccagtactccaaagaccacatttttacaaaaagatttgtgtagaaaatgaggttcgtccttaaaatagccctaaaactcacaaggacagttgctacttaaaacctgatcatatgatgtttagccctgattgggaggtagtataacataatggatactgtggtctgtggagtgaaactgcctggaattcagagccaggtgataaaacttattagctatatcatatagacaaatgccttaatttgtttacatttcagttctcattttctgcttctctatctggaaataataacatcttckatttcaccaggttgttttgagaattaaacaagaaaatggaagtgaaacatttatcacagttaaacttagttatcactcaataaatgttaagtataattattaatattgataaatttacttgagctctgaaatctcactggtattaggcattgccttaagaacaacagatatttaagat

SEQ ID NO: 867838 - DNA, 629 bp, Homo sapiens
aaagctttcattttagtgtttgtcatatgattagggtttagaattggcaatgtgtgtgagaaacctataagtgtgctggcttaagcaagataaaggattctttccatctcacatacagtctggggataggcagtccagaacttttatggcagcttgtattaataatttatgatcccaggttccctccatcctgtggctctgtcatgtgtcattttcattcctaaggacagtgtccatgatgacttctggagctccagacatcaatttgctttcctactatcagaaagaagaaggaaggagagaggatatgcctyctgactataaggatacttcctatagaattcaaataatgcttttatgaagttctttctgacaccacatatgtggtgtctttgcatatcaattatctggcaccaactggatgaccagcaattcaactcaatcctgtcattttttacctggagttagtgtgcaattccacaagttaaagggctctgtcccacaagactgttcctacttcagatgccagccacatacgatgtgcccaggctgccaacagttctgctccactgacttcaaatttgggaattctcacaacgcctctcagttttgataatttgttttagcaa

SEQ ID NO: 867839 - DNA, 588 bp, Homo sapiens
gaagatctgccttcagtgtgggcgggtacatctaatctgttgggagcacagacagaacaaaaatagagaaaaggcaaatatgttgatctatctgctggagctgagatacactattcctctcctgtccttggacgagaactccaggctcccaggccttcggactccaggacttatatcagcaggcttctgggttctcaggcctttggccttggaatgagaattacwtcatctgcttctctcattctaaggcctttggactacactgatccatgctgacagcatcccggggtctccagcttgcagatagcctatcatgggacttctcagcctccatgagtacatgagccaattcccctaacaaatcccatctcttatctaactgtctatctatctatctacccacccacccgtccatctgtctggtggttctgtctgtctagagaactctgactaatacagatttcttaatttgctgcatcttctttatttttatgtgttccttgaatcttagtgtaacaggggtaccagtttgatctcatgccaggtttaatcatatcttggcatgactgggaaactgttggattggtc

SEQ ID NO: 867840 - DNA, 584 bp, Homo sapiens
tcgaagacaggtcttttgaaataacacagacaaaataaataataataaagaacaaaaaagaatgaagaagatttataggacaccattaagcaaacaaatattcatattatgggcattccaggagataaaaagggaaaagttgagtaaaatgtatttaatgaaataatagcagaaaacctcccaagtcttgggagaatgatggacatctaggcccaggaagctcaaagaacctcaaacagattcaacccaaacagatcctctccaagacacattataataaaattgacaaaakttaaaaaagaagaaaaagtttttaaaagcagcaagagaaaacggtcaagtcacatgtaacagaatctccatcagaataacagcagatttcttagaagaaatcttacaggctttgcaaactactcatctgacaggggattaatatctagaatatacaaggaactggaaacatcttaacaggaaaaaaacaaaccatctgatttaaaaatgggcaaatagccaggtacagtggctcacatctgtaatctcatcactttgggaggccaaggcgggaggatcacttgagcccagga

SEQ ID NO: 867841 - DNA, 631 bp, Homo sapiens
aaaagacataaaaatggccaacaagtatatgaaaaggtgctcagcatcattaatcatcagggaaatgcaaatcaaaaccacaatgagctatcacctcacactgctagaagaactattatcaaaaagacaggcgatagcaaggtcatggcaagggtgtgaagaaaagggaaccctgtgcactattcataggaaggtagattagtacagccattgtggaaaacagtatggaggctcctaaaaaaattaaaaatgaaattactatgacccagggattctcttctgggtatatacccaaaggaacagaatcgccaccttgaaaagatatctggactcccatgtccattgcagtattactcacagtagccaagatatggaaacaaccgaggtgcccatcagtggaccaatgaaagaaactctggtatatacagtcgtgcactgcataacaacatttcagtaaatgatggaccacatatatgaccgtggkctcataagattataataccatatctttactgtactttttctatgtttagataacacaaatattcaccattgtgttctgactgcctagagtattcagaatagtcacatgctgcacagatttgcagcctagcagcaataggttacacca

SEQ ID NO: 867842 - DNA, 600 bp, Homo sapiens
cccagcaaaatgaatgatagaagatctaaaaatcacatcatcatgaaattctgaactcaaattataaaagcatctggacaaaataggtcgcatacaaaggagttggaacaggaatgagaatgtattttcctaaaacaggaaactagggagtcaatagagcaatgcctttaaaactgagtggaaattatcttcaatctagaattctaaacctagtgagaccatcagtttaaaaagatatrcaagaattcagacatgcccgttttggggaagctactgggagataagtgccagcaaaaccatggaagaagattacatgggatttgggaaataaggaatccaacatggtagactctgaatttaaaaatccagaatgcctgcaatgcagccatcccacgagcaaccagcacagattggaacaagaggatagatggctcagaatgaggtcttcaaggaacaacaacaaaatggaactcatttctgtgagtgcataatgattatttctgataggatagcagacatgttggagcatttggaaaaaattaatcacaagtatatggaaagccagacaagtgggaaaacaaggaaatcattaactgaagg

SEQ ID NO: 867843 - DNA, 608 bp, Homo sapiens
tgggggcattacctccttggcattttcagcctgccccaagcaagggtccatcacacctctgtgactagtgaaagcctgcaggcagagagtcacaggtgcttgcagttagaagctgttgattgtatgggaacagtgagtgctgcaaggatagggtggggcactgaggacacttgcagagtttatcattattgaacacctgcatgattcaggcacttagagaatagtttctctaattcccacaacagggttatgcagtgaatattattagggaagaarcaagctcagagaggttgtgacttgctcagagtcatgcagggcaaggtacagaatcaattaagttatttgaactacaaagatttctttttctcttcctcttgctacctcccagttaaactcaatgctttctaaataaactcaccaaaaaaagtaaaatgatgacatctgagaggtaacaacaattcagtaagatcagctttaaaacagcataactatttaggtccaatcacataatcaacaagtattgaaatctgtaagagaaagagaaagtcagcatggggaggagggcatctaccagggcagaagtaccaataccagctgactgaagccag

SEQ ID NO: 867844 - DNA, 691 bp, Homo sapiens
aatttaggccttataaggtggctcatgtctattatcccagtgctttgggaggcagaggggaggatcacttgaggccagatcaaaaccaacctgggcaatatagcaagaccccatctctaaaaaaaaaaaaaatacaactattggctgggtgtggtggcacatgcctacagttccagctacctgggaggctgaagcaggaggaccccttgagcccaggagcytgaagtcaccgtgagctatgttcatgccacctcactccagcctggacaacagagtgagagtttgtcttaaaaacaaaagaaaaaaccgccaatgggaaagttttataacctctttgtgccctcacccccattcttttttgaaatttgtataaatttagagagtacaagggtagcttttatacctggatctattgcatagtggtgaagtcgggcttttagtgtaagtatcactttaatagtgtacattgtatccattaagtaatttctcatccctcacccacctcccacccgtcggagcctccaatgtctgttattccatgctctatgtccacgcccaggttgtacacattctttagctccacttataagtgagaacattgtgtccccttattctcatcagcaacatggtacccagcgcccttctcctgctggtgtagtgtaaactgagtaagcactttgcagacttgaag

SEQ ID NO: 867845 - DNA, 572 bp, Homo sapiens
cacaaaacctggatcatccctaagaccttagttcagttatctggcttaagaatcctctctcttactattcccacccggtctctgctcagacattgaatgagagtgagatttctaccttccaaggtagttcactccaattagaaacatttttaccctgtttaccgaaaaatgccagtgaygactctgtgtccctaagctatccggatcacaggtcacatatctgttccttggaccacacagaatacatgccgtctccaaagctgtttcccaggccacacacaccagcatttagcccctctcatctacccactgcagttccttttctgactggtgcatagagctgagcccagcccttcaagtatgatcagactgaccacagcatgacaggtgcattaccaccctccagtaatgctgggcatggtttccgcttgaaaaagagtgcccaccctaaaagatctcaagtcaaaagctggttttccataatagtggtaatgaacttcaatgtgacacttctacggccaagactgatgcagccagttcactgcccaacagttgctgactgaggaagctga

SEQ ID NO: 867846 - DNA, 660 bp, Homo sapiens
gggctggtggcaggacatttaaggttgcattatagttctgtgtgattttaaattcacaatgtgaggccctggtccacaacccaaaggactgaagaaggactgaagggaatcagatcttgttacacacataactcagctcaggccaatgtwtgtcatatagaacatgagctgggttacacaataagaagaacatgaaggaggagtcgcttttaaggccttggggggttcttccattatgggaggggccatgcaagaagcctgggcgcttttttccaagttattaggggatccacatttagttcttggcctgaagagaagtctgggacatcaggaagagtgcctgagaatttaaagataaaaagaggaaaaaatgctcaaccccaagtctctggagtaggccaacgcatctaagccacatgccgtaaagtcctgcgagcctatggaaatgtttcaggtaccacgtgcaaggttgcagctgtacaagggaaatctgggtgttccacactgggttctatctactttatgttgcttaacaagtacctcctatctgttttacataatagatttccatgaaaaattccatttgaagaaagtattcaatcaaaaagcctctaaaagtttacttgactagacaataagggcgataagaatgcagcatct

SEQ ID NO: 867847 - DNA, 553 bp, Homo sapiens
agggcttagcatggaggtagctggaataaggttccaaaatgcttttgaaaatgttcattttttcctgttagtctttttggctagaagcttttttttttttttttttttttttttaagctttgctaggcattattcacagacatgttgctgagttattttctcatatggttttccctaaagatggaaaataatttttaaaagtctttgagatagaaagagtatactgtgagttttaaatatttgtwgcagagaaaaggctgccttttttttttttcctaaatgtatgcctgtttttatacatcttttgggcatatgcgttttgttgctttggagtaaagcattataagtcctcatttgatacaaacttttaacagggtcttcattaaagcttttccttaagttagatgaaatccatattagctgtataaaagaatagatttttaaatgtcaatttcataatttttgcacttcagtttttaaatttaaaattcaaatttttaaaactgcacttcagtttaaaatttaaattttaaatttaaacgttttttccctg

SEQ ID NO: 867848 - DNA, 553 bp, Homo sapiens
agggcttagcatggaggtagctggaataaggttccaaaatgcttttgaaaatgttcattttttcctgttagtctttttggctagaagcttttttttttttttttttttttttttaagctttgctaggcattattcacagacatgttgctgagttattttctcatatggttttccctaaagatggaaaataatttttaaaagtctttgagatagaaagagtatactgtgagttttaaatatttgtagcagaraaaaggctgccttttttttttttcctaaatgtatgcctgtttttatacatcttttgggcatatgcgttttgttgctttggagtaaagcattataagtcctcatttgatacaaacttttaacagggtcttcattaaagcttttccttaagttagatgaaatccatattagctgtataaaagaatagatttttaaatgtcaatttcataatttttgcacttcagtttttaaatttaaaattcaaatttttaaaactgcacttcagtttaaaatttaaattttaaatttaaacgttttttccctg

SEQ ID NO: 867849 - DNA, 588 bp, Homo sapiens
tgaatttattctattccaaaatattaaatcctctatagaataataaaggcagggattgggggaactaggagtactaaggttttggtgaatgggaaaatgtaaaaaattttaatggtgtggtcagggaagacctctgctgagagtgggctacaagagtgtatctgtatcctggcacctgctgagcactttcacattttttgtttcctggcatctctagaatggttattgcacttacttaargcctcagttctatttctacttgagttcaacatcctttgccaacaactattgtatttacctgtttggatttgtagagtaatattcaatgtcagtggcagttctttttgttaaactcagcataattcatagatttacagaatgtcagttctcattgcacacaaaatatttctataatgtttgttgattaataaaatattagatgactaaataaataatgaaatattgttaactagcattttgaatacttgatggcttaaagttagttttttaactttaacttgccttattaggaaacttattcagttattcctgttcatgtgaaacttcagccaatcatacaagcccagg

SEQ ID NO: 867850 - DNA, 590 bp, Homo sapiens
cctgtccctgcaaaggacacaaactcatccttttttatggctgcatagtattccatggtgtatacatgccacgttttctttatccagtctatcactgattggcatttggattggttctaagtctttgctattgtgaatagtgctgcaataaacataygtgtgaatgtgtctttatagcagcatgatttataatcctttgggtatatacccagcaatgggatggctgggccaaatggtatttctagttctagatcctcgaggaattgccacactgtcttccacaatggttgaactaatttacgctcccaccaacagtgtaaaagcattcctgtttctccacatcctctccagcatctgttgtttcctgactttttaatgatctgcattctaattggcatgagatgatatctgattgtggttttgatttgcatttctctaatgaccagtgatgatgagctttctttcatatgtttcttggccacataaatgtcttctttggagaagtgtctgttcatattcttctcccactttttgatggggttgttcaggtaaatttaagttctttgtagattctggatattaacccttac

SEQ ID NO: 867851 - DNA, 590 bp, Homo sapiens
cctgtccctgcaaaggacacaaactcatccttttttatggctgcatagtattccatggtgtatacatgccacgttttctttatccagtctatcactgattggcatttggattggttctaagtctttgctattgtgaatagtgctgcaataaacatacgtgtgaatgtgtctttatagcagcatgatttataatcctttgggtatatacccagcaatgggatggctgggccaaatggtatttctagttctagatcctcgaggaattgccacactgtcttccacaatggttgaactaatttacgctcccaccaacagtgtaaaagcattcctgtttctccacatcctctccagcatctgttgtttcctgactttttaatgatcygcattctaattggcatgagatgatatctgattgtggttttgatttgcatttctctaatgaccagtgatgatgagctttctttcatatgtttcttggccacataaatgtcttctttggagaagtgtctgttcatattcttctcccactttttgatggggttgttcaggtaaatttaagttctttgtagattctggatattaacccttac

SEQ ID NO: 867852 - DNA, 646 bp, Homo sapiens
atcatgctcctattaagacacatgcacacgtatgtttactgcggcactgttcacagtagcaaatacttggaaacaacccaaatgtccatcaatgatagattggattaagaaaatgtggcactttatacaccatggaatactatgcagccatcaaaaaggatgagttcatgtcctttgtagggacatggatgaagctggaaaccatcgttctcagtaaactatcccaaggacaaaaaaccaaacaccacatgttctctctcataggtgggaattgaacagtgagaacacttggacacaggaaggggaacatcacacaccggggcctgtcatggggttgggggaggggggagggatagcattaggagatatacctaatgtaaatgacaagttaatgggtgcagcacaccagcatggcacaggtatacatatgtaacaaaccckcacgttatgcacatgtaccctagaacttatagtataataattaaaaacaaaaaagttccatttccagaccatctctttgtgaatgcatatgactgtgggcttttagaagcagccatgttggatgctttgctgcttagaaatttcttctgccagataccctaaatcattgctctcaagttcaaagttccacagatccctagagcag

SEQ ID NO: 867853 - DNA, 622 bp, Homo sapiens
cacacttgtggataattaacatggttaagagagtagttctacgaatgattaaagctcaggtaccctggtctaaagtaaataccattacggggcaatatccctggttgacctcccaccgagagggccatctggctcaaaggttagttaatggagatagggtaaacaggcttaactgggaaagcctccattgtccctagcatttaccctatgacctaatgctctaaggtaagaaccagctgccttcagcctgtacaattattacaagctatgtaacattttagccttccaaaatgtttgtgattattccctataactttccctaatatttccctttgatatttctgccaccatcmtgagtgaatcccaacagaggtccaatataatcaacctgccaccaggtagctggctgataaccctaaggaatggtgccacatcgagggctcagtgttggtctctgctgctggcaaattgggcactcagcagtggctgtagctaggtcagccttggagagtggaagtccatgttgatgagcccatgtgtaacctccattcctgccagcatggccacttccctcatgggcccattgggcgatgacaggggtggctggggaaagaggatgcgt

SEQ ID NO: 867854 - DNA, 603 bp, Homo sapiens
ctggacccctcgcccatgtctgagtccagggtagcaggggtagttccatcccagtcaacatctatacagaagtaacagctgctatggcttgaagccgagtctacagttctacccatgagggcctctttttctccccaatcccctcacacaggtgaccagtgctgtgggtctggtggagtggccactggccactggtcccaggcgaacacaaagtatttattcctctctaacaccaggcatatattggagggggtttggtgggtgtagaacagagtggttcttccagatgcaaagcagtaagaccctgtctacagaaagtcatttcacaaacctccacaccctttcatgataaaaacgctcagtgaactatgaatacaaagaaactaccctaacatagtaaaagctatctatgaaaatcccacagtcaacatcayacataatcttaaagaccaaagatatgtttttgtaatatcaggaacatagcaacaatgtacactttcactgcttctattcaaaacagtattgaaagtcctagccatagcaataaggcaagagaaataaataaacaggataacaattagaaataaaaagtaaaactatctc

SEQ ID NO: 867855 - DNA, 643 bp, Homo sapiens
ggggaagggaaatggggttctggccttttctatgtcctagaagttgcttcagtctggtaagggcttgcagcagtggagtggggagttgtgagcaataatggctgctggcctctgtgtttgcccttccataatcaaaagtagcaatcaacaaccagaaygcagatgctaacacttggaggacagagtgcttatcgcccatgattgttcccacaagcttggtacaagctgcttcaggaacacatgcaaagcttcttgccgtgaagctggggcatggggattgggtagccactgctgagctaagagctgaaattgaccaaaattaagtaaaaattatagtttaagccttcatttggaggttacaagcctcctttgatagagtctagagttccaaaatagttatatcaggcagattctgccagtgtgattattttctaggtggggagatgaattcccagtgcttcctactccactttcttcccagaaccctctcttgtaatagttttttacttaaaatctattttgtctatactttttttccatatatttactttttattgaatttgttaacgttacagagttcttgcactgccaaaccatgcctgagaattcaaacaaatggtacaatggacagcctcatccaccc

SEQ ID NO: 867856 - DNA, 643 bp, Homo sapiens
ggggaagggaaatggggttctggccttttctatgtcctagaagttgcttcagtctggtaagggcttgcagcagtggagtggggagttgtgagcaataatggctgctggcctctgtgtttgcccttccataatcaaaagtagcaatcaacaaccagaatgcagatgctaacacttggaggacagagtgcttatygcccatgattgttcccacaagcttggtacaagctgcttcaggaacacatgcaaagcttcttgccgtgaagctggggcatggggattgggtagccactgctgagctaagagctgaaattgaccaaaattaagtaaaaattatagtttaagccttcatttggaggttacaagcctcctttgatagagtctagagttccaaaatagttatatcaggcagattctgccagtgtgattattttctaggtggggagatgaattcccagtgcttcctactccactttcttcccagaaccctctcttgtaatagttttttacttaaaatctattttgtctatactttttttccatatatttactttttattgaatttgttaacgttacagagttcttgcactgccaaaccatgcctgagaattcaaacaaatggtacaatggacagcctcatccaccc

SEQ ID NO: 867857 - DNA, 666 bp, Homo sapiens
cacagaagtaacccctatcttaatggaacttaaaatctagttgattaaaccattacttacaaaagtacaatctaacttcaggattgtaattaattataaatgcatttatttgtttactgcctgacttctttgctagcctataaactacacaaagatgagggttatgtctcctccatttcacacactggcaaagcatatagcagaatacatcatatatttgttaaatgtattgattagtgttacaacagacaattgcatgtgctatggaagcatttggcagagagatctaatctaatcttggaaggtgaggatcctggccatcactaacttggaatttctgatactgatgatataaggttgagttatgtctttgtgaaacaggtctctatacagcatataaacaactaccagcatgcacaggggttycgtagggactatttaaaatacttaagggaacaaacggttttcaagctcagtctagtatttcagaaattccatttacataaacaattggtgcactaattgcaaatcattcttatttctctcctaaagcaggatcccctaaggatctttattaggcattctattagcctagtttgagttacagtatttacttaaaagtaataacagtgaagttcttgaaaaatatttggtaattcagacatt

SEQ ID NO: 867858 - DNA, 694 bp, Homo sapiens
gttggggaccattggcctactgtattcagcacagtgacatgctgcacaggtgtgtagcccaggagcaataggctgtacgatatagcctaggtatgtagtaggctacgctgtctaggtttgtataaagtacactctttggtgtctgcacagccacaraatcacctaatgatgcatttcttggaatatattaccattaaatgagatttacctgtattagtgtcatctcaggtttattgtctagtaattttaaaagtatttgtatattctttcccagacacatcatcatactctggtgcatatctctattttattccctagacccactcttaatttttctgcattctgctttgttccttaggaggctcacctgaattggatacttcagagatctcccttaccctcatgcttttattggggttcagctaatggagggggtggcagaagataggtgagagaagagtgtgtttatcccccacctctgcccctgcagggtcagcacaggcagactgtgtccctttgctgaagatcacagcttctgtctggtgccttcttggcaagctggcactgtctctagtcaggtgactgcttggccccttactacttacactcttctgtctggtttctttgtgactttcctgctgtgctgtaagtagtccctttattagaatccatccacattacccagttatataaa

SEQ ID NO: 867859 - DNA, 611 bp, Homo sapiens
taatacttattattataacttgtggcatactttgatattttaaaatcacttctatttccatttttgaaatactgactcactaaatttatttcaagactcactaataagttatgatctgcagtttgaaaatcacttccattgaaagagcagccacctggaaggtcagccatggttgccttgtaggggaaggcatgggtgagaatcttccatctgtttgcacctaatctttggaagatcaagagcttgaaattagcaagggcagrtgaagttgtccatggttacctgtgtttcctagctactcttcagaaagacattgtgtctcagaaccttgagtagaatcatttagacaactccatcaccgtacaagaagaaactgaggattgggaaaggaagaaggcttcctaccacatcctacatgtgtgagcttaatgttccttaaaacaaatattctagtcaactccacccctgaacatgaagtagagacaaagaaaactggggcaggaatcagagattccagttcttatgatttggccaacctgctttgaaactcagtttcctcatctgtaaaatgaggaatcggccataatgctattcaagaccagtgccagccc

SEQ ID NO: 867860 - DNA, 398 bp, Homo sapiens
ttcttagcaatgttgttagtgccttagatttattcatctattcagtcattcaacaaatattaatgcctactatagtcaagccattgcattgggcattacaattgattttattatttttgaaatgtttaataagtaaattctatagagaagaagctatttaacaatagcrtatagtataaataaaataaactatttttaaaagttgtaggactatattagtctgatcaagctgccataacaaaataccacagactgggtagtttaaacaacagaaatgtatcttcttacagttctgaaaactgagagtccaagtccgaggtgttagcagggttgatgtcttgtgaggctcctctttggtttaaagacagtccttcttactgtatcctcacatagcctat

SEQ ID NO: 867861 - DNA, 617 bp, Homo sapiens
acctgtgggaattagactgagtagatgaggtctcttgattttttttttatttgtgtgatataccagaggtgatcacatttcacaggcactcagaaaatcattctgaacatatggcaaaggtaacaatatcaatagtaaagcaaccctttagtgttacacatagcatttttgtctgggaatttgggagagaggtggctatcatttcaaaaagtcagctttactggtatatgtaagactttgaaagggatcgatgtaaaaatgaaatgaagagaacacctaaaagatactattgtgaaaataacaataaataggcacctatggacctgatatggagtgtaaatgtttagtcttaggtagttctgactaatcatagaccattaattgaatgatatcatacagattattaatccttaaagaattaaaatgggttcagtcattttagtctccaaactaggcatcgtttattkttgatgtttaaaagttaattaattagtgttatttaatcattctctgatacagtaggtgctctagtgtgtttttttaaaaatgggggcagagggacactctttcttgctgaatgaggctccaacacagacaggataactgcccaaatctgt

SEQ ID NO: 867862 - DNA, 638 bp, Homo sapiens
tcattcatggaaggagtggctgctgaaaggctttgtccttttgcttgaacttccacacaccaggtcaccccaggaagctcttaaccacatccattctcccactgccttcattccctagactttaaaaaccaagtataggctcagttaaaaatttaaatcaaccagagagttagtttatctactactgccaaaacttaaggcacatcattgaaagggcagkaagtacagtgagaaatctagtcacagtaatagacatcatgatatcacggcccaaactgccgaaagcctcctggtgccacaactgtgggttggcttctcttctcttggagtaagatttttaaatttgcctgttgtcttctctactcagtagccactgctctttttgggtagccacctttctctcttaggccagagtgaaccatccctcttttcaagattgtttgcctattttgtctttacagaagcttagaatttgcagcttttacttggccatgtggtccagatccaagtaagcaagtctcatcagacacttgtactaaaatctgaagctctctcaatctagtttcggttgctgaaaatactagcagaatttccagagaagagaaatgcgataaaggatagagaggctgaaatgtgcc

SEQ ID NO: 867863 - DNA, 608 bp, Homo sapiens
ccacgcccggcatgtcagacactttaaggtcattatttttactgtaatccctaattaataatttcctattttttaaaggctttcattaatcattgaattatttcatgtttcagataggtgtaaacctattatttcatgtttggatactttggtaaaacaaatttaagcaatttctttaaattcaggtctttggaatagattgtttttgaagtacagtaaccaaaagctaatttaagttaatctaaatttaaaaatcagtattaaccaagaaatttagttccaattttccaaagttggaaaaatctacaaaagaaaataaccacaaaagcttttttctcagggttcaatgcttaggtaaattatgcaaaataacaacgcatgctaatgtaagaaatatgcttttaaaaatgtttttcaaactacaggtcataatccactggtagatcataaaaccaattcagtragtcacaaatagcatcccttttgaaaaatgaaagacaattttaaaaagataattatcagaatactttgtagctggtagttatatttttgcaaaatttttgtctcaactctttatgtgaatacacacacacacgtatatttattgg

SEQ ID NO: 867864 - DNA, 603 bp, Homo sapiens
gaggttaaaaatagcttgattttgcagcaaaagcttggtactgcacatccaaaacaaagtgtaccagattaggcccccagagctgggctttttcactctctccagtctcttatttttctcttagtctgcttgcccaacctcaaaaattcttgacgtgaaaccaagtaacttcatgcttattttttaaatctcagtaaatgtgaggaacatttaccataggaataatgacaaccagcatgtacttatgtatcagttcatggttcataaagcatttgtataaatatcacatgccaatcatcacaatacacagaaattactattaacttcatataaatattcataatcagaatcagaaagattgagtaacttgcccaaagtttcacagctagttggtggcagatctgggactataacctaagcacactgaataactgaatgtrgagagaagacacttattcagtgtcttttcaatattccatgatgatttctgcatcaacagtaagtcctaacatgataatttatttatttaacaatcaagcaacaaaaccctattcgttaattcatccattcaatattttctgagccctttctgagtaccttttc

SEQ ID NO: 867865 - DNA, 647 bp, Homo sapiens
tgttcactttcatgaaaatggataaatactatgtggcagagttacagaatggaatattatgcaacagcaaaaatgtatgatctaggtgtacaagatacaatacagcttaatgataaaaatataaccttaagtggggaaaaacagaaagtctcagaagactacatacactatcatgtcattttttaaccaaaggaaaaaaaaacaagcaaaactaaataacatactcttcargaatacatacatatgtggtaaacatattttagatggttaaaaatgcaaactctagtaggaaagtagagggttggatcagagaaaaacatacagggctgtttcattgatgttgagaatggtttagtacctaggatgggtggtagggtcatgagttttcattttattattatgctgcaaaacttccatatatgttatatatattatcgtgtatttatcaaatattatatgacaataaataattaaaaacggatacgagaagaatacttagaattatgttttcttatcatttcagattttttatattacaaagttgcattttatatttgagcagcaggcagccaagaatatgtgtacggtatactgaagtttacaaaggcctttcttataacatcttttgaaaatcttgtatagtagtt

SEQ ID NO: 867866 - DNA, 603 bp, Homo sapiens
ggtgactgggattaaagagttgccactcctattctctgagttcccaaacaaaagacccttaatagtaacagctaatcctggaaaggtcctaatcatggtttcctccaccctgataactagcctgtgtctttcctcttccatcatcagaaatataaaaataaaatttccatatgcattgaaggcttcatttagaaaatgagattaatgctcattcctactcaacacacacagctctcttgaacataatatgaactaataactagaggattctaagtgcttagaataaacaattggctaacatgaggcttacarttctccaatactttttttttcagggatatttgatgtgtagcggctggagtatactaaatgcatataactatattttaaatagtactatcaacattgggtttttctattttggcattaacactagtaagatagcaaatgtaattgtcataacgtattacatagataggaatgaaagaggcaagacatttagttaacactcttctcatatcagtgatacataacttctgatttcagtgatacataagtacaatatcacataaattctaaaatcagattttgttgagccatgct

SEQ ID NO: 867867 - DNA, 603 bp, Homo sapiens
ggtgactgggattaaagagttgccactcctattctctgagttcccaaacaaaagacccttaatagtaacagctaatcctggaaaggtcctaatcatggtttcctccaccctgataactagcctgtgtctttcctcttccatcatcagaaatataaaaataaaatttccatatgcattgaaggcttcatttagaaaatgagattaatgctcattcctactcaacacacacagctctcttgaacataatatgaactaataactagaggattctaagtgcttagaataaacaattggctaacatgaggcttacagttctccaatactttttttttcagggatatttgatgtgtagcggctggagtatactaaatgcatataactatattttaaatagtactatcaacattgggtttttctattttggcattaacactagtaagatagcaaatgtaattgtcataaygtattacatagataggaatgaaagaggcaagacatttagttaacactcttctcatatcagtgatacataacttctgatttcagtgatacataagtacaatatcacataaattctaaaatcagattttgttgagccatgct

SEQ ID NO: 867868 - DNA, 571 bp, Homo sapiens
ggttggggcctggctgtaagacccagccatgcaaacctgctgcctggatctgagaaccaactccaagcatctgccttcaatgctgatgacctgattgtttttctctctgttctgcaaaaacgttctatgctttcccaccatggtgtccaggtgttccycatttcctgcagatgatgttctgcctccaactttctgcatatgtcactttcccctttttcaaggcctggttccagtgccccctgcttgggcagcacatcacctattgtctcagctctccgcattggctctctcgtcaaaacagcgatcgcatttccagtgctagatgccttccctgtgccatctcaatcctcaaacccgctttgacagcactgaaccacaatttaaaaaatgaattcagacaatgaaatgcctttacttaccaccttacaattgaggttcctgaccacatctccaacctcatcccttaccaggctccaaagacactggcctcctccctgttccctgaacacagcaagtttgctcctgtgttagaacctttgtacttctgttcttttggcctaaatccttccgc

SEQ ID NO: 867869 - DNA, 571 bp, Homo sapiens
ggttggggcctggctgtaagacccagccatgcaaacctgctgcctggatctgagaaccaactccaagcatctgccttcaatgctgatgacctgattgtttttctctctgttctgcaaaaacgttctatgctttcccaccatggtgtccaggtgttccccatttcctgcagatgatgttctgcctccaactttctgcatatgtcactttcccctttttcaaggcctggttccagtgccccctgcttgggcagcacatcacctattgtctcagctctccgcattggctctctcgtcaaaacagcgatcgcatttccagtgctagatgccttccctgtgccatctcaatcctcraacccgctttgacagcactgaaccacaatttaaaaaatgaattcagacaatgaaatgcctttacttaccaccttacaattgaggttcctgaccacatctccaacctcatcccttaccaggctccaaagacactggcctcctccctgttccctgaacacagcaagtttgctcctgtgttagaacctttgtacttctgttcttttggcctaaatccttccgc

SEQ ID NO: 867870 - DNA, 748 bp, Homo sapiens
atggggaggaaactacaggttttccagacacagatcttgttccaatatgtccaaatagtaattatgttactgaggtttgaggggaatgtgttacaattggatgacttgcaaactcattttcatatactctttccctttcccttctctgtcttttgctcatttttggttatagaaaaaatcaattgaagatatgaaaaaaatgttttttaaaaaggtatttctacacttctatttcatcttgtaataatgcagagatatgactggggagttgatctgataattcatacaatatgactcctcattgcaaacctttcatccattcaaccccttattaacaatatttttgtgacatgcagaatgctagattctggagaggcagagataaataaggtgaaccttccttctgttctacttttaaagaatcccctagtctattggatttgatagatttattgtgaaagagtataaaaaagtaaaagattaaggcatrtagaaggtacaaggccagggaagggggccgtatattctaatatgggattagggaaaagtagagaaattccttggcttcctgttcctattttgtccagcaccgctatctcccacctgagattcctacgacatatttccaatggaagccaagaagtatgggagcgttggaagtacatcctgcccaatgaccctctcaccccatccccaccaataatcagaagaaaacagaagaagcaaataattgatctgatagcaaata

SEQ ID NO: 867871 - DNA, 625 bp, Homo sapiens
ctgctgtgatccttgatatagtttggctgtgtccccacccaaatctcatcttgaattgtagttcctgtagtccccacgtgtcatggaagggatccagtgggaagtagtttaatcatgggggtggttacccccatgctgctcttggcacttcttgcttggcatttctccttgctgctgccatgtgaagaaggtcatgtttgcttccccttccaccgtgattataagtttcctgaagccttacaagccatgctgaacagtgagtcaactaaacctctttctttataaattacccagtcttgggtatgtctttattagcagcmtgagaatggactaatacagtaaattggtactgggggtaccaaaaagatacccaaaaatgtagaagtgactttggaactgggtaacaggcagaggttagaagagtttggagggatcagaagacaggaagatgtgggaaagtttggaagttcctagagacttgtttaatggctttgaacaaaatgctgatagtgatacggacaacaaagtccaggctgaggtggtctcagagatggggaacctgttgtgaactggagtaaaggtcactcttgctatgcaaagagagtggcagcattttttgcctgcc

SEQ ID NO: 867872 - DNA, 683 bp, Homo sapiens
gtagccagaaaaccaggtgaagtaagccaaggaagagtttagagtaatgagaagtcgaaagtgtcaaatactccatagagttaaaattaaatgaaagaaaatactagatttgccaagtgggagggaatttgtacctttttatagacatatgagcggtatgctagtcatagaagccagattccagtgaatggaggctgaaaaagtaaaagcagcagtaatctggtaacaaaggggaaaaggaactatggcagaatcaatgrgaagtttcctttttaaagagtagggtaactatatctaagcaaagtaatgttatgaaagagtccatggtaagtcgggtagtttccctgaagatctcaggcaagcaaagcctggtaggaactgtagttatgtgtgccctgttcctaacttgttggtggcagtggtcataaatctgaaagaaaaataaatagaacaaaaaggaaatttggtctgccagtcaacgggggtaaacattttgttccacacagccaaactacatagacataaacagaagtccttctgttgttttttataatcaaaaggatttattttttgattctgctcctatgtttgctttgaactcttttctttagtaagcagtgttgtcttaaatattactactcagcctgtgcttgagacttcttgatcagacttgcttctaattt

SEQ ID NO: 867873 - DNA, 619 bp, Homo sapiens
atacaaagcctccttgctctcccaattttaactctgctcatagaattgcctaaactcagtcccttactggcacacaataagcaatacacattatgttaaataattgaatcaaatagattttgatccagaagaaacatatagcataagcctaaaggactttagggaacataacttaatgtacattttggatttgtaaaatagggctcatcatagttatctatctcagtctctatgagaattaatacaggcaatatgagttgatatatgtaacagtctttggcacacgtcttttattaatagactttatttttaaggaaagttttttttttcttttttttgagatggagtctcactctgtcatccmggctggagcagtggcaagatctcagctcactgcaatctccacctcccaggttcaagtgattctcctgccttagcctcctgagtagctgggattataggcacctgccaccacgcctggctaatttttgtatttttagtagagacaggctttcaccatgttgcccaggctggtcttgaactcctgacctccagtgatccacccaccctggcctcccaaagtgctgggattacaggtgtgagccaccgcacccagccc

SEQ ID NO: 867874 - DNA, 654 bp, Homo sapiens
agcttgcagacatccttattactcctcataatttgcattggcccatccactttttgatgtcatgattttacttagctacctcatcctattagcatttacagataaatgcggcctttcagattagaaggtctttggcaaatttatcttgtggaaactagctaagaaaggtagagtgggtgtcacaaaatgctgcaacaatttcccacttctacatctaacaatgagggtttttaagaaagtcaaaaaagttctagagatggacggcagtgatgattgcacagcaatgtgaatagttaaaatggtttcatattaaatatattttacagcaatacaaaatagagttaagattaatctgaatgagaaattagggactgactctaagaamctacttgcctcacaaaatgcaactatactacagaaaagatgcgaaaatatctgagagattaagcagaaaaaccaaacattcttcccaactcattggagcaaacacttaggagttctttgccattggagttcattcaaattcaaattaatcatgtaaagtagccaaaagataatattaaagtaaggcaaaatttattaaatattctttattctctcctctatattttttaactggccatttttatttgtccaggttgttatttttttaag

SEQ ID NO: 867875 - DNA, 609 bp, Homo sapiens
cacacaaattaaattgtgttcataatgaatggttcaaggtattctttttagaaaatatatttaaattttgatggttctaatatgaatgtagcaatattttgatgagtattcatatcttggtgaagtactgtgagaaaagtttataaaaagagttttagttaatttgtcagcttgtattttgtgttatgaccttcacatttgaagaaactgtgacaattgctgactaaaatctgtacagtgttgtaattttattgtcagtagaaattacacgagttgtttacatattttgaggcaagatattctttgcttgagggtcaaagctttgattatgactgaattcttgttagtttgcagatgctttcactttctgtttagkaaaatatatatatatgtatttttgtcaggagtgaaaaactgtattttgttcatactgaattatttgctgctcttgtggagtgaatgcctcctggaatgagtcatcaaattaaattgataagaactgttttctctgaaagcagttttgccactgattcttctgtggggaacagtccatgtttaattgacacacaatgtatccattaggattttgatcttgaaggtatttttgta

SEQ ID NO: 867876 - DNA, 592 bp, Homo sapiens
gttgaagtttggaattttcaagttttcagtcattggcagtatagcatacaaattgcactaagaaatatcccactaagtgggataattttaaatataaatattacttcaaacagaaaactaataatgtttatttctcatgtgtgttcaatggaaatgatgaccaggtatctgtattaccaaaactaaattatcaagtatacattaaaaaggcattgggggtgggtggataacaattcaactaaattcggcgtgtcttgctgcctgtcagacattccrttttctagtagacaacagagtttttgtcttgactatctttcttgcttggtgttggcattttgttccacgtacactaaaaagaacagagaggagtgaccaaacatgtgatcacaggacactctttcaataacccaaagaggacacacattctgaagacaagtatgaaatgagaaaacttccttggaggtcctccttcgtctgttgctgacacctatttttatcccttgtaatcgctatcctttactgcagttctccaattcatcattctcctgtctattctgtcaaatttagcccttcagtttctagtcaccatttt

SEQ ID NO: 867877 - DNA, 592 bp, Homo sapiens
gttgaagtttggaattttcaagttttcagtcattggcagtatagcatacaaattgcactaagaaatatcccactaagtgggataattttaaatataaatattacttcaaacagaaaactaataatgtttatttctcatgtgtgttcaatggaaatgatgaccaggtatctgtattaccaaaactaaattatcaagtatacattaaaaaggcattgggggtgggtggataacaattcaactaaattcggcgtgtcttgctgcctgtcagacattccattttctagtagacaacagagtttttgtcttgactatctttcttgcttggtgttggcattttgttycacgtacactaaaaagaacagagaggagtgaccaaacatgtgatcacaggacactctttcaataacccaaagaggacacacattctgaagacaagtatgaaatgagaaaacttccttggaggtcctccttcgtctgttgctgacacctatttttatcccttgtaatcgctatcctttactgcagttctccaattcatcattctcctgtctattctgtcaaatttagcccttcagtttctagtcaccatttt

SEQ ID NO: 867878 - DNA, 592 bp, Homo sapiens
gttgaagtttggaattttcaagttttcagtcattggcagtatagcatacaaattgcactaagaaatatcccactaagtgggataattttaaatataaatattacttcaaacagaaaactaataatgtttatttctcatgtgtgttcaatggaaatgatgaccaggtatctgtattaccaaaactaaattatcaagtatacattaaaaaggcattgggggtgggtggataacaattcaactaaattcggcgtgtcttgctgcctgtcagacattccattttctagtagacaacagagtttttgtcttgactatctttcttgcttggtgttggcattttgttccacgtacactaamaagaacagagaggagtgaccaaacatgtgatcacaggacactctttcaataacccaaagaggacacacattctgaagacaagtatgaaatgagaaaacttccttggaggtcctccttcgtctgttgctgacacctatttttatcccttgtaatcgctatcctttactgcagttctccaattcatcattctcctgtctattctgtcaaatttagcccttcagtttctagtcaccatttt

SEQ ID NO: 867879 - DNA, 621 bp, Homo sapiens
tctctgccatagtgtttgatgtttagatcaaagagcatctctatttttactttctactttatgtagtatatggaaattttgtgagtaaaattagttttataatgagaaaaatgaaaacatatttccattttgtgaaaatgaagcatttgtgagtgaacatttaaagacaaaattgtagaaaagatcaatgtgaaaattcatgggggaagactgcttygttattttgctccacccatatccatttgtgccctgaaagtgactgaaaacactttaggtatttttaagtgagggaatttaatgctgataattggttacataggattgaagagctaagaaggcaaatatgggctagaaagataaatggcaattaatatcgtcacaaagtcactagcactctaaagctggtggtaaaagggaagagttgatggtatttgagcctagcagctaggatagtccagcagagggtggatctttcaggcccagtctatttattgctacaaagtgtcaggaatatggctttggaaaaactaaaaatctcaccatctcgtggcaagtatagaaccagtcacccaacaaatgacatggcctatgagagcaaaatgtaaggtatgaggaagagac

SEQ ID NO: 867880 - DNA, 597 bp, Homo sapiens
accatgcaatcaaagttaataccaacatgttgtcatgttggtaagtcatgctgatagaacgcatccttgatatgatatgatgagaattgtaatttacctttacaatcttccttccaaatatgtgtaacccctgtctaccgcaaactgtagaatgttccacaaaattcctgaccagcatgactcacaactgttaaatttgttcggttaaaaacaaggaaaacctgagaaactgtgacagccaagaagagcctgaggagacttgctgactaaatgtaatgtggtatactagacaatatctttaaatagaaaaaaagaacactggggaaaaactaaggaatstgaatagagtatggacttaataatgtatcaatattaatcagcagatgtgacaaatatactaccataagatgttaatggtaggagaaatagtgtagattatgtaggaattctctgtactatttttgcagctttttataaaaaaactattataaaatgaaaagtttgttaaaaatgaagtttgtcaaatatattaataaaaaatttgtcataacatattcataaatattaaataaatgtaaacaaagaaaaaatattttt

SEQ ID NO: 867881 - DNA, 662 bp, Homo sapiens
ttttattggcttgttctgactgtggttgatttgttttaattattgtaatagttttttttatgttttactataatatcactatcagatataaaacttgaaaacatttttggtggcttgtctattcatttgtttaatggagtagtttgttaagcacatgcttttgtttttagtaaaatctaaattatcaatttttctttcattattattttttctgtcttaactaaaaaaatttaccracttctaggccatgaagatattctctttaatatttttaaaagcattgtatttttaccattcacttttatttatgtgattcatcttgaattaattttgagtattgtgcaatgtaggggcagatgttcattattttctataagtatatccagttgttctagaattctttgttaaaaggtggtcatttcccatgaatagatttggtgactttgctgacaatgattttataacagtgcacatatttctggactgtttatttatctatttatttaactggtcttattttaattccacactctcttggcttctgtaacatttgaattatacttgaaatatggtggtataagttctctttcttcttcattttgaagttgttttggaaattattcccactttgcatatctgtataaacataggaattgcattaa

SEQ ID NO: 867882 - DNA, 611 bp, Homo sapiens
cttgctaggtttccccactcagtctattttcattagctcgtactgtttttgcccaatcacatttctacgtggccatccctgctttatcaaaccaaagcatgaagtcagattgtttcccctgtttcttcaggcttctttctgaaggctcctatgccatayaaaattatgattaaataaatttgttatgttttttcttgctaacctgcctttttgttgtaggaatggaggttgcgaccctgatgataatgctgatcatgcttgcattatggaacagaatatttaactcttagagttctttgttaactcagtagacaaagatgaaaatttttctattgttattatgccaaaaataaggaaaaggaatagatacattgaaatgataatgctttgtgtgactcttgtatttctgcatccacatattacgttctaataatatgaggccaacgttcctgtaatcatgattatagtgggtaaaatcattcatgtccctccaaaatatatgttgaagtcttaaacactcattcttttgaattttatttagaaatagagtctttcagatgcaagcaagttaaaatcagatccttaggccaggcgctaatccaagataactg

SEQ ID NO: 867883 - DNA, 615 bp, Homo sapiens
gtcagtcctcttcaattagggcataaacaagattaattttttctcacaaattgatgtgtatggtctgctactacagacttcatttcaacatcatctcatcccttcttaaaatgagttatccatttgtaaactgtcattttatttggagcatcatcaccataaacatctcwtaaagcatcaatgatctcaccattcttctacccaagcttcacgataaaattgatgtttgttttgcttcaattttagcagaatttgttttgctctgataggagctcttttcaaactgatgcattatccttcttagtttctccccaacctaaatcttgttcaaatatgtttacaagtttattttggtgcaaagtacttttcaaatccatgcatagttttttatttataatacacattgtccatatgaacttttaaaagactcccttctatatcttttatattattctccacactgtttattgtaacacatattaacaagggctgtgctttagagcagagttctcccactgccccttgaaccttcttttactatgctgacactaagttatcaaccctgtccctctaaacttaactgttttgaggtaagttattcagagaaaatttaaa

SEQ ID NO: 867884 - DNA, 571 bp, Homo sapiens
tgtcacttatccgtttgatcttgaccctttttggaggaatcatttaatgcatcttgctgtccacttgttattttccacataccaataacaagtttaggataaaggctgagaacaaagattttagaaacctagagaacagatttagataccaagttatgctatttaataactgtaaaatcattttaaaaatacctatatctcctggagttattatagatattgaattttataccatgtatatgaaactcttagcacaatgctttgtacatagaaagcaatcaaatgycagtgatggatgacaacaaggatgttgcctgtgatgatgaggaagatgatggtgaagttaatggaggtgtcattttatagaaccctggatatttgagaacaagtaatacatgatttagtcagtgcaaattatatataatataaatatatatgtacacacatatatgtacacccatgcatactttaaataaatgtatatatactttaaatatatatactttatatatactttatatatatatttaaatatatatactttatatatatatatttaaatatatatata

SEQ ID NO: 867885 - DNA, 601 bp, Homo sapiens
atgtagatagtttacaataatgggacacttcacaactttctgtcacttgtttaaaaagtcaataacacccaaatgattctgacgagacacagtgctcttctccaaaactggcagaccttcgaatgtgagggaccaaaatattatgaatgtttttctagtataactactgtgtcagttgtcctcaggaaaacaaaaacaaaaaccaaaaacaaacttcaccacrgcttagtgtcttaaaatatctaactattctttcttatgattctgtcagttggctgggtggtttcttgctgtattcacctggacacacatagctgctttcacgtggagaatcaactggattggaaggtccaagatagcctcactcacatactactaggctatattggcttccctgtctgttaatttcagggcaatgttccaagcaggtgagggagaaggctgcaagatgtcttaaaacctatgctccataactcatacaccattactaatgccacgttattctagtggtcaaaatgagtgacatggacagcccagatctaagaaggtagagaaatagactccctctttggatgggagatgtggtaaagcatagttgcaa

SEQ ID NO: 867886 - DNA, 687 bp, Homo sapiens
agcaaacttcttttaaaaaacacactacatgacagtgaagcacatctttaaagcataagagaaaaatctcttagctcgaaatctgtagcaagtaaaaatatattttaaaaacaaagtctggcccagcacggtggctcatgcctataatcctagtgctttgggaggccgwggcaggcagatcacttgaggtcaggagttcaaaactagcctgaccaatttacatacatatacatatatatacacacatatatgcatatatatgtgtatatatatgtatataaattagcagggtgtggtggtgggcgcctataattctagctacttgggaggctgaggcaggagaatcgcttgaatgcgggagacggaggttgcagttaaccgagattgtgccattgcactccagcctgtgcaacaacagtgaaactccatctaaaaaaaagaaaaacaacaacaaaaaaaaaaccccaaaactatatgaacttcttttcagacatgcgaaagctaaaataatatattacccttagacctactatacaagaaattttaaaagaattatttcagcaagaagaaaaataccagatggaaatatggatttatacaaaggaatgaagaacaatggaaataagtgggtatctataaaagtttgttaaaatatcttttaaaatcttcttttaattataagtgacc

SEQ ID NO: 867887 - DNA, 687 bp, Homo sapiens
agcaaacttcttttaaaaaacacactacatgacagtgaagcacatctttaaagcataagagaaaaatctcttagctcgaaatctgtagcaagtaaaaatatattttaaaaacaaagtctggcccagcacggtggctcatgcctataatcctagtgctttgggaggccgaggcaggcagatcacttgaggtcaggagttcaaaactagcctgaccaatttacatacatatacatatatatacacacatatatgcatatatatgtgtatatatatgtatataaattagcagggtgtggtggtgggcgcctataattctagctacttgggaggctgaggcaggagaatcgcttgaatgcgggagrcggaggttgcagttaaccgagattgtgccattgcactccagcctgtgcaacaacagtgaaactccatctaaaaaaaagaaaaacaacaacaaaaaaaaaaccccaaaactatatgaacttcttttcagacatgcgaaagctaaaataatatattacccttagacctactatacaagaaattttaaaagaattatttcagcaagaagaaaaataccagatggaaatatggatttatacaaaggaatgaagaacaatggaaataagtgggtatctataaaagtttgttaaaatatcttttaaaatcttcttttaattataagtgacc

SEQ ID NO: 867888 - DNA, 687 bp, Homo sapiens
agcaaacttcttttaaaaaacacactacatgacagtgaagcacatctttaaagcataagagaaaaatctcttagctcgaaatctgtagcaagtaaaaatatattttaaaaacaaagtctggcccagcacggtggctcatgcctataatcctagtgctttgggaggccgaggcaggcagatcacttgaggtcaggagttcaaaactagcctgaccaatttacatacatatacatatatatacacacatatatgcatatatatgtgtatatatatgtatataaattagcagggtgtggtggtgggcgcctataattctagctacttgggaggctgaggcaggagaatcgcttgaatgcgggagacggaggttgcagttaaccgagattgtgccattgcactccagcctgtgcaacaacagtgaaactccatctaaaaaaaagaaaaacaacaacaamaaaaaaaccccaaaactatatgaacttcttttcagacatgcgaaagctaaaataatatattacccttagacctactatacaagaaattttaaaagaattatttcagcaagaagaaaaataccagatggaaatatggatttatacaaaggaatgaagaacaatggaaataagtgggtatctataaaagtttgttaaaatatcttttaaaatcttcttttaattataagtgacc

SEQ ID NO: 867889 - DNA, 685 bp, Homo sapiens
tctgaacttttatgctctgtttcccttttgaaactgaatgcctttaacggcacctgagtcacctcttgaaagctttgctgcctagaaagttcttctgccagctaccctaaatcatctctctcaagttcaaagttccacaaatctctagggcaggggtaaaatgccaccagtctctttgctaaaacataacaagagtcacttttgctccagttcccaacaagttccttattcccgtctgagaccacctcagcctggactttattgtccttactactatcagcattttgggtgaagccattcaacaagtctctaggaagttccataccttcctacattttcctgtcttcttttgagctctccaaactgttccaaccgttgcctgttccccagttccaaagttgtttccacatttttgggcatcttttcagcagtrccccactctcctggtaccaatttactgtatttgtttgttttcacgctgctaataaagacatacctgagactgggcaatttacaaaaggaagaggtttattgaacttaccattccacgtggctggggaggcctcacaatcatggcagaaggtaaaaggcatgtctcacatggcagcagacaagcgagagcttgtgcagggaaactcccatttttaaaaccttcagatctcataagtctcattcactatcatga

SEQ ID NO: 867890 - DNA, 577 bp, Homo sapiens
ctggtggcatccccactactgggtttctcctaatgatcttttgatgaaggggcagtagcattaggggcttttttgcaagcatagagagaatgagggcagcttcactccagtgccctggcagaaaagtgggtgaatcactgccctgtttgagcttgcagatccaccagcttcttcyttaacttgaatcaaactgatttgctggccagatgtggtgcctcacacccgtaagcccagcgctttgggaggccaaggcatgaggataatttgaggctgggaactcaagaccagcctgggcaatacagcaaaaagttgtctctacaaaaataaaaattaaaaaaaaaactacccaggtgtggtggcatacacctgcagtcccagctactcaggaggctgaggtggaagaattgcttgggttcaggaggttgaggctgcagtgagccttgattgcaccactgcattccagcctgggcaacagaacaagactctgcctaaaaataaataaataaataaataaaatttaaaaatatatctatttattgatttgcagcaatctgtccacacggtggcaggagtgaag

SEQ ID NO: 867891 - DNA, 624 bp, Homo sapiens
ttcatcttcttgcacctggtaaactcttttttatcttttaagacatagctttatggcacctatgtaggaagtttcttgacttctccaccagatagaacaaatttttctttctctgagctacatatacctgtatctttatatagcttcactattgctttcattgcagcttgcatctgcctctcttacaagactctgagcaccttggaggcagaaattataccttactgtctctataatgactcctagctcagtgtttagaatgtattagtcaagcaatatttattgaatgagtgaatgaatgtcatgactgtaatattcaattatcccaagtccttctttgctggaatattctctcrgagtcctttctatgcttgctttctctactttctggacttttggcccatcataaccttttatttaatgccttctgcttctagcaaatcaataaaattacttgacctaaagtctctaacacccttctgagtgatgaatcattaaatggttctttgttttccccctggttttagttggccttcaggtatcatttctcatacgaagcccctttatctttttacttccttcattgattctaggacatcattctccctgagtactcattctaaa

SEQ ID NO: 867892 - DNA, 645 bp, Homo sapiens
ctggtttccactactgcccccaagcagtctgatatcaatgtaatcattttctttagcttgttactgtttccccctgtccctggaagcttttaaacatctctttatacctggttttctgatctttccaaatttcaatttggaaaccctacatcccgtgtttttggagttttattcttatactatttctttgattgttagatggcatctttcccttcatacacccttatggaattctctcattttctttggatttgtttctttgctttgttctctttcagcttggaagattttctcaaatttgtaatcatctatggctgtaagagtatttctaagaacaagacactaaaacaactgcaaatgctgtgtcctgattaggcagcacataccgtctggtgagctgaaccatagggtgatcgaaggtgatctggccttttcattggtggkatcgcaatagtcaatattcgtaggtgttcgctcttggtttctccagtttctctagcgaacaatctattggtttcctgcctgggagatttatgccaggcttgactttctggacataaggcagaagaatagagagaggttaccacattgcagaaaccacatttttgtggaagagaacaaataaatgcttttgataaaccaaag

SEQ ID NO: 867893 - DNA, 604 bp, Homo sapiens
tcatcaaatgtaaaacttatgtgcgtcaaaaggyattatcaagaaagtgaaaatacaatccacagatattgcaaatcgtatctctggagagaatttaatatccagaatatataaagaacttttattttacaactggacaacaaaaagacaacttacctgaaataaaactggaattaaatagacatttctccaaagaagacatacaaatggccaaaaagcacatggaaagatgctcaacattattaatcactggaaaaatgcaaggcaaactaccatgagataccatgcactaggatggctatcatatgaaaaattaattaaaaaaaagaaaataattattagcaaggatatgaagaaattgaaaccgttacacattgctggtaggagtgtaaaatgtcagctgctgtgaaaaatagtttggtggtttctcaaaaagttaaacatagagttaccatttgacctaggaatttcagccccacatatatccctgaaaaaaactgaaaagagctacttaaatacatgcacaaacactttcatagactcactattcacagtagccaaacgtggaaacaattcaaacgtccatcaatggaagaatggataa

SEQ ID NO: 867894 - DNA, 604 bp, Homo sapiens
tcatcaaatgtaaaacttatgtgcgtcaaaaggtattatcaagaaagtgaaaatacaatccacagatattgcaaatcgtatctctggagagaatttaatatccagaatatataaagaacttttattttacaactggacaacaaaaagacaacttacctgaaataaaactggaattaartagacatttctccaaagaagacatacaaatggccaaaaagcacatggaaagatgctcaacattattaatcactggaaaaatgcaaggcaaactaccatgagataccatgcactaggatggctatcatatgaaaaattaattaaaaaaaagaaaataattattagcaaggatatgaagaaattgaaaccgttacacattgctggtaggagtgtaaaatgtcagctgctgtgaaaaatagtttggtggtttctcaaaaagttaaacatagagttaccatttgacctaggaatttcagccccacatatatccctgaaaaaaactgaaaagagctacttaaatacatgcacaaacactttcatagactcactattcacagtagccaaacgtggaaacaattcaaacgtccatcaatggaagaatggataa

SEQ ID NO: 867895 - DNA, 598 bp, Homo sapiens
tgcgaatgagaatgataataatccctttctcacagtattatttgaggatgaatggaaataatatataagaaaatgccatttggaccatgggatactctccacatgtaagttactcatgttcttgttcaagttttgggcattttgtttacgttgttaaggtcgtttgctctgtgccatttacccagaagtgaaattgcttgcaagactctaagtcttgctgacttagaatctgaccttctttctgttgctttacctcttttggtcttagattaaaaaccatagtctgagcaaggagtccatgcataatagagagtcctatacggtcaygactatcctgggctgctggggactcaagaggaatatataatttggcctgtgtggcctcatgggttttataaggtgcacacttagaaaaatcgagcccaagaaaagccaatggacaattccaagcaactccatagctggaccatatttattgagggcctgacgtgccgaactgtgccagctgcttccacatcatcatgttatttaacaattctgagtagagcatgctcttattttacagctggaaaatctaaaatctggagaggctgaatga

SEQ ID NO: 867896 - DNA, 678 bp, Homo sapiens
ttgactatctagccaagagctaatgcacacatacaatattttgtctccggtaatggtacttaaatttttttagtaaactccgacagtcagacagaatcttaactcgacctccctcctgatgctggtgcatttagtgaaccctgcctcattgcctttgattcactcagcatttcttgttcatttttaaaaaaccagaagaaattgatttgttttccttggcagttctgacatcatcctacttataaagttgtactcagaagaaaaggaaggcaaaaagggtttccatcttaaatatgcttgtatttttggaaagaaagataatcttttagagctatattcttggacaccttgggtggaaagtgagtagtgctattattgcaagtgatccacattgaacaagtgggaccgtgttggctctaagcattggagagsaccttcatatgtcctggtccatgacagctgtcaaacacctacctagctctgagccctctgccctcctgttggatttgaagagtagcaaacacaaagtggcagataagcagatggtgatttgaaaagcatttttccctgagggaaaaatttatgaacaatggattttgctctcacctaaattaatttactagaaatcttgcgatctactgtacctaagacaaatggattgaggtggaaacagttatt

SEQ ID NO: 867897 - DNA, 615 bp, Homo sapiens
cttctctttatatgttattaattccaaatctctatttctagcctttcatgtgtctttcttagactcttgccctccaacacctcccatcactcaactaactcctactcatccctcaggattcacttcaggcatcacctcttccaggaagcctttcctaatttccctgtttggtatttctctgtgttgcagtatattatagtcacctcgatcaaagcagttatcacactgtatagaaactatctgtttatacagctctttctcaagactgtaaaagctttgaggcagtaactatgctacatttatctttgtcactggcatataaaagttattcaataaaggkttgctaaagtaataaaagaatggtggctgctgatcattgcagactccctgtacactggactatttggtgaggtaacacggcggtacaccattctagaatttctttctcataaatgtataggctgggagggcatttgagagcctcatttttaataaatgtttcttcctgcaataatgcatacctcgattacatttactgttcaactcaaattataaatattttatatgtattattgatatatatgtctttatgtttttctgtataataataagaat

SEQ ID NO: 867898 - DNA, 586 bp, Homo sapiens
tcttcataatgtagacgggcctcatccaatctgccgaaggccttaagaataaagactgaactttcctgaaaaagaaagaaattgcagtcctcaagactgtaacatagaaggcctgcctgagttaccagcctttgcactcaactctggttggagttggcttgatttgcagattttggacttgtcagaccccagaatagcatgagccactttgtttaaatctctctttctgtatctgtacacscataccctgttggttctgtttctctggagaactcacatgcacttgccctctcattgccacctttctttcatgttacagatgctttcaaccttgtcctcacccagcttagagctcttggtctctggtctcttccacctccttccacctgtatctggttggttgacaagcctgccggtgttttctctgctccctgtcttccatccagccctgtcttgtcattctccagtcagtttcttttaatccacatctagacaattccagtggcctccttagcttgtcacttgtgctctctccccatccatctccctatgcctgcctctacccgtctctctctccataatatgg

SEQ ID NO: 867899 - DNA, 586 bp, Homo sapiens
tcttcataatgtagacgggcctcatccaatctgccgaaggccttaagaataaagactgaactttcctgaaaaagaaagaaattgcagtcctcaagactgtaacatagaaggcctgcctgagttaccagcctttgcactcaactctggttggagttggcttgatttgcagattttggacttgtcagaccccagaatagcatgagccactttgtttaaatctctctttctgtatctgtacacccataccctgttggttctgtttctctggagaactcacatgcacttgccctctcattgccacctttctttcatgttacagatgctttcaaccttgtcctcacccascttagagctcttggtctctggtctcttccacctccttccacctgtatctggttggttgacaagcctgccggtgttttctctgctccctgtcttccatccagccctgtcttgtcattctccagtcagtttcttttaatccacatctagacaattccagtggcctccttagcttgtcacttgtgctctctccccatccatctccctatgcctgcctctacccgtctctctctccataatatgg

SEQ ID NO: 867900 - DNA, 586 bp, Homo sapiens
tcttcataatgtagacgggcctcatccaatctgccgaaggccttaagaataaagactgaactttcctgaaaaagaaagaaattgcagtcctcaagactgtaacatagaaggcctgcctgagttaccagcctttgcactcaactctggttggagttggcttgatttgcagattttggacttgtcagaccccagaatagcatgagccactttgtttaaatctctctttctgtatctgtacacccataccctgttggttctgtttctctggagaactcacatgcacttgccctctcattgccacctttctttcatgttacagatgctttcaaccttgtcctcacccagcttagagctcttggtctctggtctcttccacctccttccacctgtatctggttggttgacaagcctgccrgtgttttctctgctccctgtcttccatccagccctgtcttgtcattctccagtcagtttcttttaatccacatctagacaattccagtggcctccttagcttgtcacttgtgctctctccccatccatctccctatgcctgcctctacccgtctctctctccataatatgg

SEQ ID NO: 867901 - DNA, 771 bp, Homo sapiens
cctctgttcatttcagcatactcatatgtcgtgtttaacattgcctattgtttttatttagaattacatattagggagtactataatttcttttctgcttaaggctcccaatgatccttacctggccttgtttgccctccccagttccytaggaagctctatgcttcttgagcaggaatttcatcccaccagtcttgggccccctgaagcacccccttagctccacatacacatgtgctaagtgggaagacgttgttttgtagcagtgttacatggcaactggaggccctgtgtgggatgggattctgacttggggaaaggtagagtgttgggggaaaaaaaggccttattccagaactgggaggagaaggagaatgtaggcctgcataatgggtcaaggtccataatactcagcccaagggaaggctgacccccaagccacttattgagatagggcccagcatcccaccatcccctactgagggggaccccctgaggggtacacgcccatatttggggtgtgacagtgtatatgttttaaaaggaggcaggctttgatctgcctgtcattatttcttctgagaaaatcaagtctgtgccagctcttccttcttccctcccttcctcccctttctgacccccacttcccatccatacacacctttgcaaaacacatgcagagtctctgacactgttctagcccacaaagaatagaagaccaggaggcagtatttcagaaccacagggaagacggaatctttcttctatcta

SEQ ID NO: 867902 - DNA, 771 bp, Homo sapiens
cctctgttcatttcagcatactcatatgtcgtgtttaacattgcctattgtttttatttagaattacatattagggagtactataatttcttttctgcttaaggctcccaatgatccttacctggccttgtttgccctccccagttccttaggaagctctatgcttcttgagcaggaatttcatcccaccagtcttgggccccctgaagcacccccttagctccacatacacatgtgctaagtgggaagacgttgttttgtagcagtrttacatggcaactggaggccctgtgtgggatgggattctgacttggggaaaggtagagtgttgggggaaaaaaaggccttattccagaactgggaggagaaggagaatgtaggcctgcataatgggtcaaggtccataatactcagcccaagggaaggctgacccccaagccacttattgagatagggcccagcatcccaccatcccctactgagggggaccccctgaggggtacacgcccatatttggggtgtgacagtgtatatgttttaaaaggaggcaggctttgatctgcctgtcattatttcttctgagaaaatcaagtctgtgccagctcttccttcttccctcccttcctcccctttctgacccccacttcccatccatacacacctttgcaaaacacatgcagagtctctgacactgttctagcccacaaagaatagaagaccaggaggcagtatttcagaaccacagggaagacggaatctttcttctatcta

SEQ ID NO: 867903 - DNA, 592 bp, Homo sapiens
ttggcagtgggcactgagtgatgctacatccagtatggctcaaaaggtaagttctacagcttcgcaggcatgccctactcattcatgcttgggcttagcaaccttcccatgcccacctcaccccttacatgcatttgatgtgatcttcactgttgagatggaaaccwctgtcgtcagcctgtagacatgcatgtctctgctgcaaccttgtcctttcatccctagtctcaggctaggtgacaaggcaagaacaaggtacccctgagtggctttcagcacatccctgctcttctcagcctcgtttgtcagctgtgaaataaaggtgttagactggctaacctcgaagcttcatcattcctcaagtctccacacaattatagatgaatgcattcttccatttatggtctcttcattccagatatatactcatacactggcccccactcacctcaatcgaacaaaacatggagcttgcctggggacatcctagctccaacttcccctcatgaggtcaacaattctgctcacacagaggagagacttcatttccaggtcactgcttaagtcctgtgagatcacaaagatgaataaa

SEQ ID NO: 867904 - DNA, 592 bp, Homo sapiens
ttggcagtgggcactgagtgatgctacatccagtatggctcaaaaggtaagttctacagcttcgcaggcatgccctactcattcatgcttgggcttagcaaccttcccatgcccacctcaccccttacatgcatttgatgtgatcttcactgttgagatggaaacctmtgtcgtcagcctgtagacatgcatgtctctgctgcaaccttgtcctttcatccctagtctcaggctaggtgacaaggcaagaacaaggtacccctgagtggctttcagcacatccctgctcttctcagcctcgtttgtcagctgtgaaataaaggtgttagactggctaacctcgaagcttcatcattcctcaagtctccacacaattatagatgaatgcattcttccatttatggtctcttcattccagatatatactcatacactggcccccactcacctcaatcgaacaaaacatggagcttgcctggggacatcctagctccaacttcccctcatgaggtcaacaattctgctcacacagaggagagacttcatttccaggtcactgcttaagtcctgtgagatcacaaagatgaataaa

SEQ ID NO: 867905 - DNA, 592 bp, Homo sapiens
ttggcagtgggcactgagtgatgctacatccagtatggctcaaaaggtaagttctacagcttcgcaggcatgccctactcattcatgcttgggcttagcaaccttcccatgcccacctcaccccttacatgcatttgatgtgatcttcactgttgagatggaaacctctgtcgtcagcctgtagacatgcatgtctctgctgcaaccttgtcctttcatccctagtctcargctaggtgacaaggcaagaacaaggtacccctgagtggctttcagcacatccctgctcttctcagcctcgtttgtcagctgtgaaataaaggtgttagactggctaacctcgaagcttcatcattcctcaagtctccacacaattatagatgaatgcattcttccatttatggtctcttcattccagatatatactcatacactggcccccactcacctcaatcgaacaaaacatggagcttgcctggggacatcctagctccaacttcccctcatgaggtcaacaattctgctcacacagaggagagacttcatttccaggtcactgcttaagtcctgtgagatcacaaagatgaataaa

SEQ ID NO: 867906 - DNA, 566 bp, Homo sapiens
atgtgtatctggcttccctcaaagttctgtgcatgaaactcagccacattttgcaagacacagtttgtttattctcattgctgtgtagtattcctttataagaatatattacaatttctatatctactcgactatcagtgctcatttggggtttttccagcttggcttttatgacgagagctgctatgattaagcttctacttgtcttttggtgaacaggcatatgtgtttctgtagggtgtacccctagaagcttytgtagatatcatcaaatatttaatgaagtacttacagcagagtccctgttgcaccaagtcctcattatcaatcacttgctattgtctgtctgtttcatttttgcctaccaggaggctgagtggtggtgtcttattgtggtttaaatttgcctctccctgctgcaatgaagtggcacacattttcctaagtttcttgaccgtttgcatacccgagcaagcgttttgccccttctctctgcatctgtctatgccttttgcccaagaaccaggcacagagggcctggctgtcagttcccccctcagtaacct

SEQ ID NO: 867907 - DNA, 653 bp, Homo sapiens
tctacttgccctctccgtggttgatgttgagactagggagaggaagttactttctcaagagtatcagctggttaatggcagaacttacttagaacctgacttctatgcccatagtccaagctcttttcagtctgcctgttccaacctgtgctgtgcttgcctttgtaaaatccaaagctcagtagggagcagggagctgccgacaggaatgctgggtgcctgctagaccctccagccatgacagccatcacagagcatgcatatgattaatgcttatatagtcctcattccccaaggacactgtttgtgtgctacagagtcttctgaaaaagggcatatgatttcaaaggattattttatcaaaggattgtttttatcctcattcttttggaaaaaccraatgcccaatgctccaaccagtgttacctttcttgcattttgctcttgaagatctgggccttccttgaaggagtagcatagggaagagagaacaaacccttgtgtttgcctttaagtcagctagagatgttttcagcctgatggaaaattaaactgggttaggtcttctagagcccgcctgtgtaattgagcgggtgacgtgtccagcctccctaactcggaaaaaacttactgttcacacttcattcatacgt

SEQ ID NO: 867908 - DNA, 476 bp, Homo sapiens
aaaggggatttctaaacatggaaagaaggaaggctagaaaagtcctagcatgctggattggaattagaagtgtcagtatgtacatatatacatacatttttttcttaactccttcgtccgaaagcagtggaactccagtarcaatgagtgcatggtgagtactcagaccttggtttctttttttctttttcttttttttttgagacagggtcttgttctgtcactcagactggagtacagtggtatgatcttggctcactgtaacctctgcctccaggttcaagcgattcttttgcctcagcctcccaaataggtgggattacaggcatgggccaccacacctggctaatttttgtatttttagtagagatggggttttaccatgttggccaggctggtctcgaactcctgacctcaagtggtctggctgccttggcctcccaaagtgctgggattacagagatcttggtttctaa

SEQ ID NO: 867909 - DNA, 476 bp, Homo sapiens
aaaggggatttctaaacatggaaagaaggaaggctagaaaagtcctagcatgctggattggaattagaagtgtcagtatgtacatatatacatacatttttttcttaactccttcgtccgaaagcagtggaactccagtagcaatgagtgcatggtgagtactcagaccttggtttctttttttctttttcttttttttttgagacagggtcttgttctgtcactcagactggagtrcagtggtatgatcttggctcactgtaacctctgcctccaggttcaagcgattcttttgcctcagcctcccaaataggtgggattacaggcatgggccaccacacctggctaatttttgtatttttagtagagatggggttttaccatgttggccaggctggtctcgaactcctgacctcaagtggtctggctgccttggcctcccaaagtgctgggattacagagatcttggtttctaa

SEQ ID NO: 867910 - DNA, 476 bp, Homo sapiens
aaaggggatttctaaacatggaaagaaggaaggctagaaaagtcctagcatgctggattggaattagaagtgtcagtatgtacatatatacatacatttttttcttaactccttcgtccgaaagcagtggaactccagtagcaatgagtgcatggtgagtactcagaccttggtttctttttttctttttcttttttttttgagacagggtcttgttctgtcactcagactggagtacagtggtatgatcttggctcactgtaacctctgcctccaggttcaagygattcttttgcctcagcctcccaaataggtgggattacaggcatgggccaccacacctggctaatttttgtatttttagtagagatggggttttaccatgttggccaggctggtctcgaactcctgacctcaagtggtctggctgccttggcctcccaaagtgctgggattacagagatcttggtttctaa

SEQ ID NO: 867911 - DNA, 707 bp, Homo sapiens
acctaaatttgttaaaagatgtacttaacattacctcatcaaaactcaaagctatataggaatagcatattttatctatcagattgcaaaatgaagaaaaaagggcaagctgcacaatagtgtgtattctatactaacttatatataaaaagtggaggcattgtagaattagaataaattcagaacmacatgggtttgaactatgcagattcacttatatacagattttcttgtgcctctgccacccctgacacagcaagaccaacccctcctcttcctcctcctcctcagcctactgtatgtgacgatgaggatgaagatcttgatgatgatcctcttccgcttactgaatagtaaatatattttatcttccttgtgattttcttagtagcattttctcttctctagcttactagttgtaagactacagtatataatacatataacacatacacatgattacaaaatatgtgctaatgggctgtttatgttattggtaagtcttctggtgaacaataggctatcggtagttaagttttgtcaaaagttatgtgcagattttcaactgagcaggagattgattcccctaacccccacactgctcaagggtcaaccgcatttatacttacatctatttgtataagaaattctggaaagataatacaacagactaacaatggtttcccttaagggttgtgacatgaact

SEQ ID NO: 867912 - DNA, 707 bp, Homo sapiens
acctaaatttgttaaaagatgtacttaacattacctcatcaaaactcaaagctatataggaatagcatattttatctatcagattgcaaaatgaagaaaaaagggcaagctgcacaatagtgtgtattctatactaacttatatataaaaagtggaggcattgtagaattagaataaattcagaacaacatgggtttgaactatgcagattcacttatatacagattttcttgtgcctctgccacccctgacacagcaagaccaacccctcctcttcctcctcctcctcagcctactgtatgtgacgatgaggatgaagaycttgatgatgatcctcttccgcttactgaatagtaaatatattttatcttccttgtgattttcttagtagcattttctcttctctagcttactagttgtaagactacagtatataatacatataacacatacacatgattacaaaatatgtgctaatgggctgtttatgttattggtaagtcttctggtgaacaataggctatcggtagttaagttttgtcaaaagttatgtgcagattttcaactgagcaggagattgattcccctaacccccacactgctcaagggtcaaccgcatttatacttacatctatttgtataagaaattctggaaagataatacaacagactaacaatggtttcccttaagggttgtgacatgaact

SEQ ID NO: 867913 - DNA, 707 bp, Homo sapiens
acctaaatttgttaaaagatgtacttaacattacctcatcaaaactcaaagctatataggaatagcatattttatctatcagattgcaaaatgaagaaaaaagggcaagctgcacaatagtgtgtattctatactaacttatatataaaaagtggaggcattgtagaattagaataaattcagaacaacatgggtttgaactatgcagattcacttatatacagattttcttgtgcctctgccacccctgacacagcaagaccaacccctcctcttcctcctcctcctcagcctactgtatgtgacgatgaggatgaagatcttgatgatgatcctcttccgcttactgaatagtaaatatattttatcttccttgtgattttcttagtagcattttctcttctctagcttactagttgtaagactacagtatataatacatataacacatacayatgattacaaaatatgtgctaatgggctgtttatgttattggtaagtcttctggtgaacaataggctatcggtagttaagttttgtcaaaagttatgtgcagattttcaactgagcaggagattgattcccctaacccccacactgctcaagggtcaaccgcatttatacttacatctatttgtataagaaattctggaaagataatacaacagactaacaatggtttcccttaagggttgtgacatgaact

SEQ ID NO: 867914 - DNA, 571 bp, Homo sapiens
agccaaggaatatgggtgaacctagaaggtggaaaagagaaggaaacagaatctctcctaagagcctctagaaggaacgcacccttgctgacaccttgattttagctcagggaggcccatattggatatgggcctaatctaggcaggataataaatatgtcttgctttaagctaccaagtttgaggtgatttgctatagtagtgatggaaaactaatayaggtaccatttctcagattttacaaatgagaaaactaggcacacagagagacttttcttgtcatatgtcttacagctactacgagaactttttatagggaaagtagttgatttgttgaatataatatattcaataaccattctatgggaatagcctgggaaagattaggacatcaaatagctggccttggaaataaattttcttctctctgtagccagcctgcactaccctcatggagggtcaaaagcttcaaaatttctttttcagtgatctagtgtcctgatgagtaggaagtgacttttttttaggacccaagaacatcttaggggcaagtaaaaagtagaaagtcaag

SEQ ID NO: 867915 - DNA, 634 bp, Homo sapiens
taagagggggtcgggggcctgaccaggtgaacttatgatcgtctaatgttgtccaacctcattaacattttcacagccttgctaaaacttgaaagttgtccagtaggatcattaccattcaagttttctcctcctaatgagcctgaattttccctgccatagcttatgcctgatacttttcagctgttgtccctattgactaatgaacataattggtcccgggctattttccagcctgctcctttcagaacctgcactgtctccactggagccagtctcttctcaagatcacctttgcctctttccattttgtcctgcattttcacctctggcacatagcaatgtcctcagcttctgacttaagctgttttcttccgacttgctctagcctcttggcctggcctggtctcactctgtcattaagttaggctccacaactctattttgtaacctaytatacattcctctgtggacacaacatgataaatcttgatcaggtgcctcagccaacccataatagccttttaacctagactgtgactgaaaagctatgcacacgcaatggaaactgggaagtgatgtggctaccttgctaattaaggaatgacgcccaaaggtgatagaattgagtgag

SEQ ID NO: 867916 - DNA, 634 bp, Homo sapiens
taagagggggtcgggggcctgaccaggtgaacttatgatcgtctaatgttgtccaacctcattaacattttcacagccttgctaaaacttgaaagttgtccagtaggatcattaccattcaagttttctcctcctaatgagcctgaattttccctgccatagcttatgcctgatacttttcagctgttgtccctattgactaatgaacataattggtcccgggctattttccagcctgctcctttcagaacctgcactgtctccactggagccagtctcttctcaagatcacctttgcctctttccattttgtcctgcattttcacctctggcacatagcaatgtcctcagcttctgacttaagctgttttcttccgacttgctctagcctcttggcctggcctggtctcactctgtcattaagttaggctccacaactctattttgtaacctactatacattyctctgtggacacaacatgataaatcttgatcaggtgcctcagccaacccataatagccttttaacctagactgtgactgaaaagctatgcacacgcaatggaaactgggaagtgatgtggctaccttgctaattaaggaatgacgcccaaaggtgatagaattgagtgag

SEQ ID NO: 867917 - DNA, 610 bp, Homo sapiens
ttgcctttagaacctgggttcactgtgcttcccagagtgaacagtttagatcagaaattgttggatgaaatagtcttacatcagaagctatctctttcaggatgagtcattttaaaacaatgtttaaagagaaaactttacaatattttcagagaaatattttgtgctttcaccgctatctgacatccccttatgaatgctgtcctgccacagatgactgggaatgtgtctggtcctagggttaaactttaaaaaaggaagtctccaaagtatcacatttttgagagtgttaaggtgctttaggaatacctgaagactgattaaagagaggacactgaggaattaaccaacagatgctgaaaatacaaaggccatcatgaatggctaaaaactgcagcatcacccctcagagagsaatcgtcctgtatttagcataacaccacattatttggttgtttgtgctgaggagttgaaagctatcatgtgccaggaaaatactcagcatggagcagtaattatggatcagctgataataaaggatgtattggattgactgctaattagattattagctgcaaaaacaaatacctgctattaaccataaataagc

SEQ ID NO: 867918 - DNA, 550 bp, Homo sapiens
taactagaatccagacctagcggatttcagggggtgagatacaaagttcaattcatgaggaggtgctgtatatatatatatatatatatatatatatatatatatatatatatcaaaatgactgtatgattttgccaatttacacatagaaactttggaartatgggtgacagtggatcacttaatcaccaaagacaaaatggacagggttactgttatggacaatagagcttaaggaggagtcaggatggtctatctcacagtcatcttcaggactggctagttaatcatggcgtctctagagatgaaatagttggatagcttaataaagttttccctgatctgtataattgaaaaagctgtaggtttcatgaacagaaatttgacttgaatcacagagagtaaaagtacatcaatcaattttcagacttgaatcagttcactgacccagagctttgcaaatgaaggagtggccaggttctactacactgcaaaaatgtacactattaatcttccatctagcctccccaaagggacctacaaccattta

SEQ ID NO: 867919 - DNA, 585 bp, Homo sapiens
acatgctttcttacctccattctttatctctctaactcttacataaagttataatttatatattaaacttatggcatatggattcatagaagcctatagtagccctaacatgaagcttgtaattctgcattaattataaattcttattaccattttatcttcctccatagcaacaatagcaactacaataatacatagaatctgtaaggaatagatgtgaggagaatttgactgattgattcttcttttgcaaatcttttcatactggtttctggtagcaggctatacactayatactaaaataataatttattaatactgtaaaaatgaaatctgtgtatattttgaaatgccaccttctggtgtgatatatgcatgtttctatgtatgcacatgtatataataatatagaatgtggtgaccctcaaggcaatgaaaggcattttaaatctgaatgagaaatagatggtttcttcttaattctattgcattctgtttcttgttctggagaattgttgttgtcaaaactgattaagaatccaatagcatggacatcttatattcaatagatttatcatttgcaaa

SEQ ID NO: 867920 - DNA, 577 bp, Homo sapiens
ttgttgattttatcccttgctgtgcagaagctttttaacttgacatgatcccatttgtccattttcgctttggtacttgtgctcttggagtattgctcaagaaatctttacccagaccaatgttctggagacttcctcagtgttttgtcttagtaactttatagtttgaaattttagatttaagcatttaattcatgtagatttgatttttgtatatggtgaaaagcttctagtttcattcttctgcatatggatatccagttttcccaacactgttcattgcatgccagtaacatgctgttttggttactataacactgyagtataatttgaagtcaggtgatatgattcctctagttttgttctttttgcttagggtaactgagtattctggttcttttgtggttccatataatttgaggattttttttctatttctgtaattgtcattgatattgtgatagggattgcattgaatctgtagattgctttgggtagtaggacattttaataatattgattctttcaatccacgaacgtgggatatctatctgtttcccctccaatttcttgcatc

SEQ ID NO: 867921 - DNA, 624 bp, Homo sapiens
ttgtcttttgctctcttctactgtggttgagctggtattcaagttgcaaaacagagtcctctttacgctcccctttcttctcctcaagtggaaggaaggagtctctcctggagctgcaagctgtgctagttggggttgtgggaggggtgataaaagcactcccttgagcaccccagctggtttctcatgagatcacatacaccccaagatcactggctccaaacaagcatagcaccagaacttgcccaggagttgcagtcctgtggcctagactgcctttcaagtttatttaagacaccagagtacgttagcttgtggtcgtggggctagctggaactcagattctgactgctaagatagaggattctcctctgtctagggctggtctaagtggtctctctgtgagaacaaccaactcttccctgtgttgctttccactgtgacragggagcactgcatttgaatgcaaagtcccacagtcactgtgctctctctactataagcacatagattctctctctgtgccatgtggtcactgccagtggctggggcaggggtgttgttggcaattcaagattatcttttccaccatcttcagtgcctttttccttgatatgatgttca

SEQ ID NO: 867922 - DNA, 623 bp, Homo sapiens
ttgtggtcgtggggctagctggaactcagattctgactgctaagatagaggattctcctctgtctagggctggtctaagtggtctctctgtgagaacaaccaactcttccctgtgttgctttccactgtgacgagggagcactgcatttgaatgcaaagtcccacagtcactgtgctctctctactataagcacatagattctctctctgtgccatgtggtcactgccagtggctggggcaggggtgttgttggcaattcaagattatcttttccaccatcttcagtgcctttttccttgatatgatgttcaaaccagctactgtgattgatcgcttgatttttggttcttatgaaggtgcttccttgtttgcatagttgttcaattcaatggtcctgcagaagtgattattgctggagggttccatttagccatcttgctctgtattctcctaatattatcytcttttttaaaattttacatttattttaactttatgttatacatttcatctttagtaacatttttagtatatggcatactgatatcaacatataagttttcagtctttaaatttagtaccttagaactatttccactatttcttctcttctttccaaccc

SEQ ID NO: 867923 - DNA, 648 bp, Homo sapiens
cagctatgcatcaacaaactggataacccagaagaaataattaaattccttgaaatggaaactaccaagattgaatcataaaaaatagaaaatatgacatatcaataaggatatgtcagagatgactgaatcatttatccaaaacttcccaattaacaggacttgacagcttcactagagaattctgccaaacactttaagaagaatcaatgccaatcctcaaagtcttctgaaaaattgaaaaggaaggaacactttgaaactaattttgaagggcagtattactctgataacaaaggcagacagagaaactacaagaaaagtaaatgcaggacaatatccctggtgaacatagatgcaaaacttctcagtaaaatacaagcaaattgaatttaatagcrcattaaaaagaccatatgccatgatttattcctaggatgcaagcatagaacaacataagcaaattaataaatgtgacacaccaccttaacagaatgaaacataaaatttatatgattatctcaatagatgcagaaaaagcatttgacacaattcaacattctttcatgtttaaaagctctcaaaaattaggtgtataaagaatgtgtcttaacataataaaagccatatatgacaagcccacatcat

SEQ ID NO: 867924 - DNA, 643 bp, Homo sapiens
aaaaaatgggcagtggacctaaacagacatttctacaaagcagaaatacagatggtcaataggtgtatgaaaaggtgctcaacattactaattatcacagaaatgcaaatcaaaacaatgacatatcacttcatgccttttatattgtctattatcataaaagacaagataatatgttgataaagatgtggaaaaaagagagcccttgtacactgttagtggaaatgtaaattagtatagccattatggaaaacagtatgaagattttcaaacaattaaaaatatcatataactcagcaatcctatctctaggtacataatcaaaggaaacaaaatcagtatctcaaaayggcatctctactatgttaatttcaacatatggaaacaaatgtccatcaatacatgaatgtatgaagaaaatctggtatataaatacaatggaatattattcagccttaagaaaggagaaaaattctttcatttgcacacgtgggtgtacttaaagttcatttttctaagtgaaataagccaaagaaagacaaatactgcaagatctcacttatacgtggaatctaaaaaattcaaactcataaaaacaaagaatagaacggtagtttctggggcttaggaggtcagggaaatg

SEQ ID NO: 867925 - DNA, 666 bp, Homo sapiens
agcaaaatttttttaaatattggcaaactgaatcccaaaatatatccaaatgatcgtatattgtgaccaatgatatttctaccaagagtgcaatttggttttatatttgaaaataaagtaatgtaatttaccacattaaccaataaaaagaaaaacataattatcacaatagatttttttaaaaaccttttgtcaaactttagcatacatcctagggaaaaaaaaagaaaaaagtgctcagcaaaccacagttacttttgcgccaatctaatagtgaaaaaggagmatcttcagcttaattatgatcatttatggaaaatctacagctaaaattatacttaattgtgaaagactgaataatttttcctaaattcaagaatagacaaaggctttgtgctctttccacttaaatttgacaatatggtgaaggttctagaaagttcaatgaaaaaggaaaacaaaacaaaacaaaaatgcctagtgtttaaaagggaaaactgttcactgatgacatcattatgtacaaaatcaatacaatttactaaaagctactagaatgatacaagatcaatgtacaaaaacaattttattagtatttacaagcaaagaacaaatgtaacatgaattttacaaaataatgttgtattattatcaatatatttttta

SEQ ID NO: 867926 - DNA, 666 bp, Homo sapiens
agcaaaatttttttaaatattggcaaactgaatcccaaaatatatccaaatgatcgtatattgtgaccaatgatatttctaccaagagtgcaatttggttttatatttgaaaataaagtaatgtaatttaccacattaaccaataaaaagaaaaacataattatcacaatagatttttttaaaaaccttttgtcaaactttagcatacatcctagggaaaaaaaaagaaaaaagtgctcagcaaaccacagttacttttgcgccaatctaatagtgaaaaaggagaatcttcagcttaattatgatcatttatggaaaatctacagctaaaattatacttaattgtgaaagactgaataatttttcctaaattcaagaatagacaaaggctttgtgctctttccacttaaatttgacaatatggtgaaggttctagaaagttcaatgaaaaaggaaaacaaaacaaaacaaaaatgcctagtgtttaaaagggaaaactgttcaytgatgacatcattatgtacaaaatcaatacaatttactaaaagctactagaatgatacaagatcaatgtacaaaaacaattttattagtatttacaagcaaagaacaaatgtaacatgaattttacaaaataatgttgtattattatcaatatatttttta

SEQ ID NO: 867927 - DNA, 697 bp, Homo sapiens
tccttcacattccttgtaaattgtattcctaggtattttattatcttcgtagcaattgtgaatgggagtttgctcatgatttggccctctgtttgtctattattggagtataggaatgcttgtgatttttgcacattgattttactcccacacaataacactgggagactttaacaacccactgtcaatattagacagatcaatgagacagaaaattaacaagtatattcaggacttgaactcagctctggaccaagcagacctaatagaaatatacagaactctccaccccaaatcaatagaatatacattctactcagtaccacgtagcacttattctaaaattgaccacgtcattggaagtaaaacactcctcagcaaattcaaaagaagggaaatcataacaaacagcttytcagaccacagtgcaatcaaattagaactcaggattaagacacttgctcaaaaactgcacaactacatggaaactgaacaacctgctcattcatgactactgggtaaatagcaaaattaaggcagaaataaataagttctttgaaaccagtgagaacaaagacacaatgtaccagaatctctgggacacatctaaagcaggattaagagggaaactcttagcactaaatgcccacaggagaaagcaggaaagatctaaaattgacaccctaacatcacagtt

SEQ ID NO: 867928 - DNA, 639 bp, Homo sapiens
taacaaggctacattgctttctggagcctgtagtggaaaacccatcttcttgcctcttccagcatctagaggctccctttattcattggctttatagctcctttccattttcaaagccagcagtggccacacaagtatttgttagattccatcactctgattctgactcttgtttcctctttcacatataaggaaagagtgactaaattggccacacacagataatgcatgagaatcctcccacctggagacktctaacttgatcacagttgtaaagtctcttttaccatgtaaggtagcacatttacaggttccagggattcgtatgtggacaccttgtgtgtttgagggagggggcattttcctgtgaaccacatgcaaagatgaaattttgattatcttcacatataataatttgaattttagaaaaaaaatttaaaaactccatctatgtctccagcaacatttccagtggaaaaaaaagcattataaaataaatagcattgcttttctctgaaagttaataaatagatgatcagaaggcacttcaccattttttcacacaagaaaaaaagtcaaaatagagagattgcttatcatgcacagaatctcattaaagcacgtcaggagaaggaaaac

SEQ ID NO: 867929 - DNA, 656 bp, Homo sapiens
atgagaacagcatggaggaaactactcccatgattcaattacctccacctggtcctgcccttgacacatggggattatggggatgacaaatcaaggtgggatttcaatggggacacagagccaaaacatttcagtcatgttgtaacccattcttctctccactcttattcaggaaaacactgatgtgattttggtcactctgaattagttttcatttccatgagttttatatgaatggaatcatgcagtatgtatttttttgggggaggtctgatttattttactcaacacagtgatttttgagaatcatacattctgttgtctgtatcaacagataattycttttaattgctgaaaatattgcatcttaatgatatagcacaatttgcttattcactcacctgctaacggattttaaaattttttccaatttaggactctttcagataaagcatctctgaagatttgtttacaaatctgtatgtaaatgaactttaatttctctttattgtatatctaggagtggaaatgctgagttgtatttaacttttcaaagaaaaacctgacaaattattttctaaaagttgtaccaattattaacttcttatgaatattaaataagagttttaattatttcaaaaccttgctaacactta

SEQ ID NO: 867930 - DNA, 619 bp, Homo sapiens
ggtctgtggtattttgttgtagcagcaaggatgaactaagacacacaaggatgataacaatggaaaaaaagtaacaagattgtgttggtgagagtgacagtgagctggtaactacaatcttagaacactaagaacgaatgacctggaaggtgtagctaattgcaataaggaggggaaagttggggatcacctgttgatgtgagtgcaaaagctgtttattgtttttttaagagcagaggagggagggacgagcatggtcttgaaacagcaaaaaacaaaaaacaaaaaaacaaaaaggactctaccttatctccatgcccagtgtggacagctggggagctaggaaatagccaccacttgagagggccatggaggaagcagatcttgggcagagcatgttttagtaaaataagcagtgaaggaaatattccaagaagggattttgatwatgattgaacatgaataaagtgtcagtgaggccatagtgaagtgtttcaggagtcagggagaagcaggagatgaggtcagtgtgagctgttgagagctgtataaggcatgagattagttgggtgtcctggctgggcttggtggtactggatgcaatcaggcataaagggca

SEQ ID NO: 867931 - DNA, 619 bp, Homo sapiens
ggtctgtggtattttgttgtagcagcaaggatgaactaagacacacaaggatgataacaatggaaaaaaagtaacaagattgtgttggtgagagtgacagtgagctggtaactacaatcttagaacactaagaacgaatgacctggaaggtgtagctaattgcaataaggaggggaaagttggggatcacctgttgatgtgagtgcaaaagctgtttattgtttttttaagagcagaggagggagggacgagcatggtcttgaaacagcaaaaaacaaaaaacaaaaaaacaaaaaggactctaccttatctccatgcccagtgtggacagctggggagctaggaaatagccaccacttgagagggccatggaggaagcagatcttgggcagagcatgttttagtaaaataagcagtgaaggaaatattccaagaagggattttgattatgattgaacatgaataaagtgtcagtgargccatagtgaagtgtttcaggagtcagggagaagcaggagatgaggtcagtgtgagctgttgagagctgtataaggcatgagattagttgggtgtcctggctgggcttggtggtactggatgcaatcaggcataaagggca

SEQ ID NO: 867932 - DNA, 658 bp, Homo sapiens
ggctaaccctcctctttctctaggttggaatattttgattatatttgtcttttctccatttatatttgcctaacacagagaaattcatttaataatcatacaataggtaattaacatttcaccaatattatcaagtrtatgattgcatctaatgtattccacaattctagttaataattatgtaccaaaataggtcaaaataaaataaaataaaataaacagcaaggcacattgcatgtgtgattcctaagataattgtatcccattatatttagtttttaagtttcttatttgaaaatttaatttaatgaagaagatgtatgatgttggaatgctacctatgtcaccatctggctccccatagctgcctgtcagtactagaagctcaaagtggagccatatgggccatttctaaaataagtttttgccttttagacagaatggtggctcaactttgaggctcaatttttgtggctcataggataaaggatcaattaccacctataagcttttctgcacaatttatataaataaaagattattactgccaaatgtatctggtcttcatgacttacaaatggaaacagaaagaattggggaccataacttgaaagatggcttcacagattcacagaataaaaattatgtatgctttttt

SEQ ID NO: 867933 - DNA, 617 bp, Homo sapiens
atgccttttggctgtggggcatatatatatatatatatatatatatatatatatatatatatatatatatcagaatttctttatttctttatccactcattgattgatgggcatttgtgctggttccacatttttggaattgtgaattgtgctgctctaaacatgtgtgtgcaagtatctttttcgtataatgacttcttttcctctgggtagatactcagtagtgggattgctggatcaaatggtggttctacttttagctccttaaggaatctccgcactgttttccatagtggctgtactagtttacattcccaccagcagtgtaraagtcttccctgttcactgcatccatgccaacatctactatttttttattatggccacttttgcaggagtaaggtggtatcacattgtggttttcatttgcatttccctgatcgttagtgatgttgaacgttttttcatatgtttgttggctgtttgtgtatcttcttttgagaattgtctattcatgtccttagcctactttttgatggaattgcttgttttttttttcttgctgatttgtttgaatttattgtagattctggatattagtcctttgtcaaatgtat

SEQ ID NO: 867934 - DNA, 609 bp, Homo sapiens
acttaggtttaattctaacagtaatgtacacatagtgttggcaaatggtcaacagcaggtgtaaggatgaattgttttattagccaataagaactgaggcactgggaccatcctggaaaatatttgagaatgagagttggcttcacaggtctggtaaaatctcaaggacaggcaatagaggaaaccatatgaaataaaaaaatggaggagaaaagttattttaaacattttcctattcaaagcattaggaactaattagcacctgatacctccacccaacaaggggataaatgccaggcttttttcaatttatctttttatgttcagtgaagatgtataagttggcacagaawgccttgagggtttcataaacagcaaaacagctcatcaccaagcggagctatgtgactaggttccaacaccagtatgtttctgtgatgtaggggttggctttttgcctcgttagtaaaataagataatcagtagttattgctgacagaactcatggagaggtagaaagaccatggatacttttgtaaatgtcttagaacaatacaagttctggtatgaatatcaacattgtccattgccaagagtgaggtgaaagcc

SEQ ID NO: 867935 - DNA, 577 bp, Homo sapiens
ctagctttttgaggggccactaaatgcgttcaataggactacactgtaacaagcacttttgtgaagttttaattcctgcatattcaacaaatgttgaataaatgagatgaggcaatttgttcaaggatatatccagtgaataaaaaagctaaattttgctgtccayaccatttactttatttttacctcattagagataataaagacagtaactgtctgctcttgaatcatatgagagaacttccttgaaaaaaattattctaatgatgatgttcatgtataaccatgtattattaaccacgtaaatagtaacccacactaattcaaaatctctttcaattgttcttttaagtaaatctcattgctcattcactcactattctccacctttccattttttgtcctttaaactcctagcttctccccgctcagctactctcttcaagaatgctctcctattgctcttcctgtcactgtctccttacctaacccttacacttctctcatagtaagcactcaaccatttgctgaatgaacactgatagaatacttaccaagttttcttttttggaattac

SEQ ID NO: 867936 - DNA, 625 bp, Homo sapiens
cccctttggttattctctagaaacttatttctgcagaagtgccttctgattgacaaaagctcacttttatattcacaatctcactctgtcaaggtctagtctgaaatcaccctcagagaatattgtgcagtaacttttaaaaagcccaaatcctgtcgatttttgcatttaatttattgttttccttggtcagagctttgctttgtacataaccaaatcccagttttgagtgcctatcgcatactgctaagccatgatgttggaaggcatttttttaatttagagcttgaaattcccttagtttactttcaagttcctagtcctttggaaatttatataaaatttcccggcccctcccarcctcctattttctgctccctttggaagcagttaattaattttatttctcaaagatgctttgtttccttaagtagttcagtctggctagtcttcctctgggtatcacttttcaccagcattttatgcaaactcattcagaaatagctcattgtgggccagttttctctgtttggaaggacaattgcttatgaggtcaaggtccttatgcatcactcagttattcaacagtcttccatgagtccctgatttggaccatgtcctcagg

SEQ ID NO: 867937 - DNA, 575 bp, Homo sapiens
cccagtgacttacctaatttagttcaggcagaggtatgtacttcccaaacagcttgttatctaacttaagcctgtgtatcttaaagccctggtgagcacaccatatatagtaacagagaaaacctagattgtatagtttgttgttttttttttttttttttagatgtgctttgaattctggtccttcaatttattagtgacccaagtttcagtctttgcgtttatataacagcaaaatgaattcctatttcaaagggttattatgwaggttaaatataatatacaagaataatccagaagaatgtgctatatattaggcatttgctgttggtaaatttccatttttcttcagggcaaaggaaaaaaaaatgcaaagtgaaaagcttatatctttgatgtcttttcatctctcttttctcatctttagtgtataatctgccatttctctagctcctctcttgccatcattttgtgagcactcaggtttaaatttttgttcatacaaagttgtagaaacaagtacatgattgtagcatgtgtgttccttgctcagttagacccaggcaagcccgggc

SEQ ID NO: 867938 - DNA, 462 bp, Homo sapiens
cctgcaattttagtatattggcatcagggggcagtggagttgcatatgttctgagcagtctagcctgcatttccactgatgacattagtgtgagtccctaagctaaacattggacaaaaatatgatatgcttacttaaaaaaaatgtgatacaaactgaagaaaattggccttacagaaaatacaaacaaatcatataattttcatgtgttctttagcataatgaagctaaaacatgrtcttaatgttaaactagcaaaaagactttatttcccactttctgattctcctagaaccattctcattaacatccctttttcttaattgcatttttcaagtaagggagttctctctctcttgtaatctagacacggttagtcttcctggttatctaaaatgtcctgaatttaaacttttctctttagcttcttgcaaaaattattctcttattcctaaaatattg

SEQ ID NO: 867939 - DNA, 628 bp, Homo sapiens
attagcttactatggctctaataaaaaccattgagaaactggagaattttcttgatgaggaaccttaaagtcgaactccaggtttggaagcttcagtgccttttgatttgaagatggtaattgagctaagtgctgatgaggtaaatgatgagagctgccatatttgtatgtcccttcatttcctgaggcattagggagattttctgcatatttctagaactgagtggtttttggcagtacatrtgcaggtgtggcaatagctcaggattgtctattattctgaaaagccattgacatttgctgaatgacaacacacaaaagacgcataatatctatgcatatgtcatgctgatctcttgaaatgttaggtactctgggcatcaatttactgggcatcaaatttacatcaaattcacataaacccaaggccattcttttaagaggaaataggagaaaggaaacccggaaagtaattcttttttgctctttgcaacagatatgtgaaaggggcctaaaaggtgattttcaacaaggtatacgtgaatgagtcttgagcctttctgtctgggaatggaggagcatttgctgagtgtttattctgagtgcactgggcggatgtgagaaggga

SEQ ID NO: 867940 - DNA, 628 bp, Homo sapiens
attagcttactatggctctaataaaaaccattgagaaactggagaattttcttgatgaggaaccttaaagtcgaactccaggtttggaagcttcagtgccttttgatttgaagatggtaattgagctaagtgctgatgaggtaaatgatgagagctgccatatttgtatgtcccttcatttcctgaggcattagggagattttctgcatatttctagaactgagtggtttttggcagtacatatgcaggtgtggcaatagctcaggattgtctattattctgaaaagccattgacatttgctgaatgacaacacacaaaagaygcataatatctatgcatatgtcatgctgatctcttgaaatgttaggtactctgggcatcaatttactgggcatcaaatttacatcaaattcacataaacccaaggccattcttttaagaggaaataggagaaaggaaacccggaaagtaattcttttttgctctttgcaacagatatgtgaaaggggcctaaaaggtgattttcaacaaggtatacgtgaatgagtcttgagcctttctgtctgggaatggaggagcatttgctgagtgtttattctgagtgcactgggcggatgtgagaaggga

SEQ ID NO: 867941 - DNA, 665 bp, Homo sapiens
acaaaagagttacaatctgatgaagagcgattcctgctttgactttatttggtttctatccacttttccaacataccttataaaatacatgcaaaaaactggttttagaaagcgttccctaaaattagtgtgtacggaaacttcaggtatacttctgctttcctccgcaaaaccacccctttttaaaaatcgaaagtgaaattagtttttttttctgttagtgactaatcattggagacaaccatgtttagtatttgagcattggttaaatgctaaagaaaaatcgccgttaaagcagttttctttttcactgtctttttcttttcgcggggaacccagctgttcctgcgagggccacctcctcaggaagaccccgcagctctcccgcggcgcttctgcaggaggcagcgacagtttcgagaacccgggccttcccctcccagtgcctccsggggttccggcgtttcaggcgctgctgttttccgggaagggcaggcgcgctgggccttggggagctgcgctcggcgggcggacgcgggtgagtggggagtcccttccccggctgccactcccgccgctggcagtcccgggctggagagccgggggtggaaagggaggtgggagccctcagcgccgacggaagtgggacagcgccggagttgaga

SEQ ID NO: 867942 - DNA, 690 bp, Homo sapiens
taatttgttacacagccatagaaagtaatacagtgagtattcagggaatcagggaagtattgagtggagtgtccttgtttctatttacctgcccagacaccagacactgggaattcttcttggggaatgtcagcaatgcaccctggcatgggggaygaaggagagtgggatcttagcagaaggaatgagaatccactgttctgagtattctgtttgcctctctgaattcactttctaccgttctcagcttgctctatgtcctggaaggctgacctctatggactgcctcaattgggctcccctggattccttcctggtggtcagtgggctagctgtggcagcatccagtcattgaaggccagaagtcctgtgggaagcctttccctgctgctaagccaggcccacaactctctaattgcctcatcagttttaggagtggtaagggctccccactattgctagcctttggatgcttcaccatttcttcttggtttctattgactctgttctcaccctgaaaatagttctcaatcacccctttgaatatattgtctgtttcttctaggatcttgactgacacattcactggggcttgcattggtgctctccagtgcatgtgtgccactaagaagtgaattgccttggtttgagagttgcaaattattactatttctactactacttctgctt

SEQ ID NO: 867943 - DNA, 601 bp, Homo sapiens
tttgtctctgtctctctgcgtttctgtctctatttttccttctgtttatagaaggaagagaggtttctattaataggtatcacattgtcactgtctcccatcaccttttcatttcactaaaaacatttctcctgcctgggcawaattaggttcagagcagcatttaccactgttctttaatttacctaatgaaagacaaaattactatttatgtgcagtttatgtaaatttttgcagtccttaagcacgaaattataaaatggtatgacccttccattaaaaagacttaagcagttctagcctgcacagagcctagatgatcagaggtcccttctctcagtcttgaacagacttgcaaggggttgatcctaagtcacactttctaaaaggccgttggtaaggtctaggatgaagcaatgctgaaaaatcatgtcttatgagccaggggagtctgtagcctggaaaacaaatgactaaagtgggaatgtagtggttgtcttgtgttaatgagaggtgaagccagctggacttcctgggttgagtggggacttggagaacttttctgtagctagctagaggtttgtaaaacgcaccaatcagt

SEQ ID NO: 867944 - DNA, 570 bp, Homo sapiens
aaagcttgttacaaggcttgccatgttggacagcttgcctacctcttttttttttttgtttatctctttctcttcttcttccctatccttttctttctgggatccctgggctcttcatacccatcccttkgctgagcagctctccatgctggagtactctaaataaagactttgctacaaggcccataatgttccttatctctcttctcatggaaatttgtcaggtgactctcttaggtccttgttctttgctgggtttaataccataaaccactgtgatttagggtgttaatggttatcagtcatcaaatgccttgtttcatcatcctttgcatttgaagaatacttttcaatgttttgctgcaaaggaaggtgtggtggatgtggcagtgcattgccctggttctctattccacatggaagaattcattctccagctgctcagtgttggctgctgatggctcacagctgcatccctctccaagaaccacaagggctgccttgcccaagtttgtgtccttttcctgggggccaagcacgttcaatgactagtgaaataggagtacaaag

SEQ ID NO: 867945 - DNA, 597 bp, Homo sapiens
tttctaataaagcattaattcattcttccattattcatgcaatacataaattttgagcactgacatgtggtaagcactgtgccagttagtggacatgccaagagaaaaaacacatggtttgggcctcttcatatatttttgtacttatcttccacaggtagaacaatgttccttttgcattcgacagatattttggagctcacaatttgtttttcagcttctcacagcaacgacctctgaagaacagggcctaagcttactaatatgaacacatgatatcaattttgtgttccagtaatgacagaagtcctgatgccaaaggcagcattgttttcattctcttgctttaaaactgagtaataatataatgattaggaattactgttagcaacmcagataagagttagtcattcacacttccacagtggaacaactgttgggaagctatagctttatgctgaatgattttgagttctaattactgaatctgaatagctgtctttaaatgtcagtaatggtagaaaaaggttctttactcttaagaaccagtggggaatgagcagtacaaaatgttcttgttaaaatttctcttctctt

SEQ ID NO: 867946 - DNA, 597 bp, Homo sapiens
gatcaaggtgtcagcagggttggtttcttctgaggctgtctggctcccatgcccccgttctaactgctttgccaaactcttttctttctacctgcttttttggaaagggcgtttttttttaaacttcctgtttagtcttttcccattggtaatgggagaaaaaaaattgaaaakactattagctacttggtttggaaagaaaggaagctgataagttagggatcacttttcatatttgtaaatggataagaaacactgggaggcagaggactaaagggaaacatgacctttgaaatgagatgaacatgggctaatgcatgggttgaacatatatttgttcaattgagtatatgtgtttattgttgatgaagtctgtgactacaggcatgatattatccttgtctgtaaaatgggtataataaaatacatcttaccattgttacgagactcaaaagagcctatatatgtaaagctcctgccacagagtggacaatctaagaaggtgtctccccacttgcctctttctttcttctgcatagaacgatttccacagaaaagtagagtttaagaagagatcataattttatggaagacctc

SEQ ID NO: 867947 - DNA, 610 bp, Homo sapiens
gacacaggcataaaatgcataatagccacacctgggtaaattaggtatctatcaactcaagcatttatcctttgtgttacaagcaatgcaattatacttagttattttaaaatgtataattaaattattattgactatattcatcctgttgtgctatcaaatgctaggtcttattaattctttctaactatgattctgtacccattaatcatcctctcttccccccactacccttcctaacctctgataaccatcattctactctctatctctataagtataattgttttaatttttagctcccacaaataagtgagaccatgaaaagtttgtcgttctgggcctgacttattctacttaacataatgacstatattttcatccatgttgttgccaatgacaggatgtcatctttttaatggctgaataatactccattgtatgtatggatcacattttctgtgtccattgatctgttgactgacacttgggtggcttccaaatcttggctattgtgaacactgctgtaataaacatgggagtgcagatagctctttgatatactgatttccttttttgggcatatatacctagcactgaaattgtttca

SEQ ID NO: 867948 - DNA, 610 bp, Homo sapiens
gacacaggcataaaatgcataatagccacacctgggtaaattaggtatctatcaactcaagcatttatcctttgtgttacaagcaatgcaattatacttagttattttaaaatgtataattaaattattattgactatattcatcctgttgtgctatcaaatgctaggtcttattaattctttctaactatgattctgtacccattaatcatcctctcttccccccactacccttcctaacctctgataaccatcattctactctctatctctataagtataattgttttaatttttagctcccacaaataagtgagaccatgaaaagtttgtcgttctgggcctgacttattctacttaacataatgacgtatattttcatccatgttgttgccaatgacaggatgtcatytttttaatggctgaataatactccattgtatgtatggatcacattttctgtgtccattgatctgttgactgacacttgggtggcttccaaatcttggctattgtgaacactgctgtaataaacatgggagtgcagatagctctttgatatactgatttccttttttgggcatatatacctagcactgaaattgtttca

SEQ ID NO: 867949 - DNA, 610 bp, Homo sapiens
gacacaggcataaaatgcataatagccacacctgggtaaattaggtatctatcaactcaagcatttatcctttgtgttacaagcaatgcaattatacttagttattttaaaatgtataattaaattattattgactatattcatcctgttgtgctatcaaatgctaggtcttattaattctttctaactatgattctgtacccattaatcatcctctcttccccccactacccttcctaacctctgataaccatcattctactctctatctctataagtataattgttttaatttttagctcccacaaataagtgagaccatgaaaagtttgtcgttctgggcctgacttattctacttaacataatgacgtatattttcatccatgttgttgccaatgacaggatgtcatctttttaatggctgaataatactccattgtatrtatggatcacattttctgtgtccattgatctgttgactgacacttgggtggcttccaaatcttggctattgtgaacactgctgtaataaacatgggagtgcagatagctctttgatatactgatttccttttttgggcatatatacctagcactgaaattgtttca

SEQ ID NO: 867950 - DNA, 604 bp, Homo sapiens
gtttcaaaacatttttaccacctcaaaaggaaacagtgtactattaagcagttgttctgcatttctgactcccctcagcccctggcaaccacaaatccgcattctgtctctggatgcatatattctgaatgtttcatataagtgaaaccagacagtgtgactttcttttttattattattttactttaagttctgggatacaagtgcagaacatgtaggtttgttacatacatatacgtgtgccatggtgttttgttgcacctatcaacctgtcatctaggttttaagtgctgcatgcattagctatttatccctccttcctcttgcccctcaaccctgactggccccaatgtatgttgttcccctccctgtgtccatgtgttctcattgttcaactcacrcttatgagttagaacatgcgatgtttggttttctgttcctgtgttagtttgctgaggatgatggcttccagcttcatccatgacactgcaaaggacatgatctcattcttttttatggctgcatagtattccaggtgtataagtacacattttctttatcctgtctatcactgatgggcatttggattggttccatgtctttg

SEQ ID NO: 867951 - DNA, 657 bp, Homo sapiens
agaaggagacccaccttcattctgggagggcatcatctaatcagctgccagagcagccagaataaagcagaccagagaacatggaaggaccagatttgctgtgtcttccggccttcatctttctcccatgctggatgcttcctgccctcagtcatcagactccaagttcttcagcttttggactcttggacttggaccagtgtttgccaggggctcttggacctttggccacagactgaaggctgcactgtcagcttccctacttttaaggttttgggatttggattgatcaaccactggcttccttgctcctcaacttgcagatgkcctattgtgtgacttcaccttgtgatcgtgtgagtcaattctccttaataaactccctctcatatatacatctatcttattagttctgtccctctagagaaccctcactaatacaatgtctctctgatattccaccatctctgttccctgataaattctcctttccacttcttgcaaagcttatctctggcttattgatgcaagccgatggtcaggataaatacggggaatgtttgaaaaagacacagatcttgaacatacaagacctctgtaactcagccctcaacacgtatctgtttttctcttattttatctaggaattaaagtgaa

SEQ ID NO: 867952 - DNA, 657 bp, Homo sapiens
agaaggagacccaccttcattctgggagggcatcatctaatcagctgccagagcagccagaataaagcagaccagagaacatggaaggaccagatttgctgtgtcttccggccttcatctttctcccatgctggatgcttcctgccctcagtcatcagactccaagttcttcagcttttggactcttggacttggaccagtgtttgccaggggctcttggacctttggccacagactgaaggctgcactgtcagcttccctacttttaaggttttgggatttggattgatcaaccactggcttccttgctcctcaacttgcagatggcctattgtgtgacttyaccttgtgatcgtgtgagtcaattctccttaataaactccctctcatatatacatctatcttattagttctgtccctctagagaaccctcactaatacaatgtctctctgatattccaccatctctgttccctgataaattctcctttccacttcttgcaaagcttatctctggcttattgatgcaagccgatggtcaggataaatacggggaatgtttgaaaaagacacagatcttgaacatacaagacctctgtaactcagccctcaacacgtatctgtttttctcttattttatctaggaattaaagtgaa

SEQ ID NO: 867953 - DNA, 609 bp, Homo sapiens
aaatagctttacagtggatttgaccagatgtttggctgcattagctgaaatcactggttattataatatagcaaagattcatcccacataattgcccacaggaatttaatagccataggttaaaaaatacatcattatcgggccgggcgcagtggctcatgcctgtaatcccagcactttgggaggccgagacgggtggatcatgaggtcaggagttcaagaccagcctggccaagatgctgaaaccccatctctactaaaaatacaaaaattagctggtcatggtggcacacacctgtaatcccagctactcgggaggctgaggcagaagaatcacttgcacccgggaggcagaggttgaagtgagtcaagatcrtgccactgcactccagcctgggcgacagagcaagactctgtctcaaaaaaaaatcattattataccaggtcaaaattgtacaacagtttacacctttcaaagcactcgctcacaaataatctcatggaaactttaaagaaacccttttgtcaggtgataataaacccatataacaaatgaagaaacagagactcctgtcccatgacttgcccaaacttattcaagtaggatca

SEQ ID NO: 867954 - DNA, 589 bp, Homo sapiens
gtggcttcaggaaaacctaatttaattatatacatatatattccagcttaaggaaaagccaatataataaagttcaaaataataaaatgaacaattaggcataattatttacctttattaatttagcaaatatttatcatgtacctatcttgtgtcggaaactatgtgagataaaaggatgcgaagatgttacagagcccttccctcaagaggctgactatgagaggaggaagaaggcttaagtactatgaggaaaaaaaggtattcagagtatggtagagacacaagctagtagtcaaaactcatatgataattagccttatayactgcactaagaaatctggactttttattgtaggccacaggagccattgaaaagttttaagcgttgagtaactatcaaaatcatattttgtaaatagcagcactctagcaataaggaacaagatagcttgaaaggatcaagatcagacatggggaaacaaaacagaagcctattgagagagttcacatgaaaaatgatcagggcttaaactagaactgcagcaagaaaaatggaagttaagtggggttggagtggagagcagga

SEQ ID NO: 867955 - DNA, 608 bp, Homo sapiens
aaaataaagtgaaaataggagtcatagtgtgtaaattcctaccacctgctacattttctatgttcagagatttaaaagtcactttgcaaattgctcaaaaaggaacaagctgctggaagtcaaatttgagttttattactacgtgagtttaacctgatgcatgcccataacaacagggaggtaaaccgctgaaaagtaataaatgtgaagatgattaggatcaccaratatctggcttcccatggagatttttcacttgtcctggaattgctttacatacactgagttaaaagctactctatgacagtgggttcccagaggaacatgagatcctcccttttccaactatatagctgtgtgaggatggattttttaaaaatatacacttcaaccaaaacaacgtttcatgacagattgaatgcaggagcagacatccaaatccagctgtctcctattaagccagacagtaaagagatttgcaaaagtgtaaaacaatgtcactctcctcactagttggttctgttttaaaaaataattaaatataaatctataatatgtaaatatatagttatgttgcttatgttaacagtaataaaacatcacatttt

SEQ ID NO: 867956 - DNA, 663 bp, Homo sapiens
gtgagacactgggagaaacgtccaatcccctggaaagggggctgaagtcagggagccaagtggtctccctcggtgggtcccactcccacagagcccagcaagttaagaaattttggcttgaaattctcactaccagcagagcagtctggagttgacctgggataatgaagcttggttgggggagggacatccgccattactgaggctttggtaggcagttttcccctaacagtgctaaggagactgggaggtttggacwgagcagaattcaccacttggcggcaaagaggctatggccagactgcttctctagattctgcctcactgggcagggcatctctgaaggaaatgaagcagccccagtcaggggcttacagataaaactctcatttccctgggacagagcacctgggatgaggggtggcacaggcacagcttcagcagacttaatcattcctgcctgccagctctgaagagagcagtggatcttcacaagggagattctcccagcacagcacaccagctctgctatgggacagactgcctcctcacgtgggtccctgaccctgtgcctcgtaactgggagagacctcccaacaggggtcgacagacacctcatacaggagagctcctactggcatcaggctggtgcccctctgggac

SEQ ID NO: 867957 - DNA, 625 bp, Homo sapiens
tttctgtggtaccagttgtaatatcttcctttttatatgagattttacttgtttgaggcttttctcttcatggtttagctaaaagtttgtatagtttttaatctttttttttttttacagctttgttgatttttttgtattgatttttggtctccatttcctttaaaaatccattttgatatttgtgtgtgtgtttgtgtgtgggtatttaattggtttttaaataagaaattttaaagtttatatctaattatactttctcttgtgaactttagtattgtatttattaagaaagtcattcaattttttacttacataaacatgaagttatttttgtcatcttttttcttgttattgtctgcatgatctagyaatatattaatgtatcactttcatttacttacctggcaataaacatgtgtttgtggggttttttgttttttgtttttttattgattgttacaagcttcttaactttttaaatcatttcagataaccaaatttgactttgttgcatttctctatctcatttattttctatttcattaaattctgctcttttctacattgtttttattctttgattatccttaggattgatttttttaaaatagtttctccacaa

SEQ ID NO: 867958 - DNA, 695 bp, Homo sapiens
ctcacaggcctgtgcaccacagggttgtgtagagaggtcaaccaagttttccattgttttcaggaagttctgaaaggtttaagagaaaacagttagaccaaaaagagctctaaacttctggcaagaggagttcaggtttgaagatgtattgagaaggtgctatagcgtgaccagtaactcaacttcaagaattgacgcgagctcaggcccagtgggaattatataccacagtagaagaaattcaacatggactaattccaaataagcattggatgttcccatcacatatgtaatcaaccctccccagtgaacatagatatcattcctatagcatagaggttgatggaaatgattctttagtagataaaggttcaatcatagatcaatttagtaaatcccccaaatcaccaaaaaaaaaaaaactattgaaataatgaattaatcatgaaatgactagaatctagttcgtttgcagctattgtatgaaatgacaggactaagtataaacagaaaaaaaaatttactcttgtttatctaagyttgactgacatttgttttcttgctattggacttttacatgaacaaaccacttagtttttcttttaggttttttttttaactattaatcattttgtgatgaagacatttataagcagaatttcttgcctgatgctttcatttttcatgcttgttca

SEQ ID NO: 867959 - DNA, 583 bp, Homo sapiens
ctttttcaagttcttattggaaaaatacacttgagaaaaattttatctcacaaataatttaatgggttgatttgagctaaaaagaataggcctgtaactcagctggagcaatgctttatcatttggtcaatgcttcctgactcctattcacatgcaagtcactatgcaggacttcatcttcgatgtaaaaatatataacacccagcccccgccatccaggtgctcacacgttagtaccaaaacttttatttgaatttagcagacttaatatatctaaaatgacatctgtgagagcatttctttatatttcatagartttccataaatataaacattcctttatagctcattgaaattacaaattaaaatattataacttaaaaataaaattttgcatttttacatctcctaaactaacattgctaatcaactttaaatggctataagcaatgactcagaatgagtctatttcatagttttttttcctgctacaatttaatcgtagtggtactaaaattatttactctcagacatcaatgaatgataatttaggaatggctaagtaacttttgtacagaaataa

SEQ ID NO: 867960 - DNA, 656 bp, Homo sapiens
tatcatcacttgtcacatagcacgagggtccttggtatacttgtccctacctatatgtcaacagtaagctacttaaaactatgggtcacatcaataaaaatatttatcaaatacttatatagcccttactatgtgctaggcactgtattaagtgctgaaatgtattattttatttcatactcataagaaatcctatgataaatccactgttattcccattttacagatgaaaaaaactgaagtacaactgactttatattccaagctgcaagtatgtttcttggcacatgggaaaaaattccttaggtaaatgaatgatctacattttctgctatatccaagcaagagaacaaagcctctgccatatggrtatcttcactttggtgtggacaccatctccctactcctgacttttccatcctgttagggataaaggtcaccttcatgccacatacgttcctatgcacagcaaaatagcttccatccatccttgaggttcaatgcaaaattgcatttaacaatttacacatctaaaatctacttagtatattatgattccaaccttgtctcctggtggactacatatatgtatttgattttcttccagaggaattattttgaaattgtaaaactaatttgtgcattaacagacctag

SEQ ID NO: 867961 - DNA, 630 bp, Homo sapiens
gtcttgcttctagcttatggggagaaaacattatttatttgtagctgccaaatactatattctcactaatttaataagcagccaccattttctctgcctctgaaaatttatgttggtctttggacaggtctggctgcctttttaaatctagtggtctgtgaccatggaaggctttakccaaagggaaaatgactccataaatcctcagaggctgtctcacattaatttatagtttgaaggctccaggaccctatgaaaagcctttaaacaagaaaaatcaacacataccaacacatatgtattggaagtcatcctaccttacaacaggaagtattcctaagtctttagaaagcaaagtatgtgcaaacatagcaagatacagacttggcaacacctgtagagacctgatacttaattatgaaaaaatctggtcacattacatcatgaagcacatgagtatacaaagtagtttttggtgcaaaattatgattatgatatttctgctcttgaattttgcaaacaatagacctattcatcatgtcattactgggaagcaaattaagttgctttagaagatgacatgtcactttcctttagaactcacggtagatctctttaaatcaacaaagg

SEQ ID NO: 867962 - DNA, 611 bp, Homo sapiens
atactcattttcctaatgagtataaaaagatatcattaatgtttcgtacatttgatgccatccagccatataaatatggaatagtcctggagctgtgatgttttgtatttttctgggtatcacaaatcattgagatagtcaagggcatccatatttactctctgtgagttcacttattcatccagatatatgtactgagctctttggtctccaaggcactacactgggctacgggtatacactggtcagcagacatcatctctgcctttctgtggcttatgatctagcccagtggtcctcaaccctagctgcacaacagaatcatctgaagaatgtttaaaaacactgatgatgaggctccaacctgtgcttcaatttgtctagggtgatattgaggaatggtatgttttaaaatttcccyaaatgattttaatgcacttccatggttgagaagccctagtctagtgaataagaaaagtatgagataaatgtacaaatatagaattttttaagtgttgaaaggaaaggtgtaagaagttataagagtgatcaatgagaccgaagaattgggaaaattagtcaagaagggcctctctgaattggtgatattt

SEQ ID NO: 867963 - DNA, 671 bp, Homo sapiens
acaggtacaaggaatgagttctggtgttctattgcacagtagggtgagtatgattaacaatattgtaaagcatattccaaaatagctagaagagagtactttgaatgttctcactgcaaagaaatgataaatgtaagaggtgatggaaatgctaaaaacactgatttgatcattatacattgtatacatatatagaactatcacactgtaccctataaaaatgcacaattatgtgtcaataaaaacaaaacaaaataataggaaatcttcttttgtagaataaatctgccaattaagagacatggctagtakaaacagatgcgcttttgttactaaactttaatattcggcaagaattaccctcaaccatttgaagcagcaaattacaccctaagccaaagaaggggaaccaggatgtggctgagaaaaggaaggatcctgcttcattagtccattttcacactgctataaagaaatacccaagactgggtaatttataaaggaaagacgtttgattgactcatggttccgcatggctggggaggcctcagggcacttacaatcatggtgaaaggggaagcaggcacatcttacctggcagcaggtgggagagaaagagagtgatagtgcaggaaaaactactatttataaaaccatcagatctcatgaga

SEQ ID NO: 867964 - DNA, 634 bp, Homo sapiens
ggtaaaataaaaatgataatgactttctcatacagttgtgcttggaattaatatttgtaaagtagtcggcacattgaaagctatgggatagccaaatggaagatcctcactccccaattaaatccttaattggaattatgagaacaattattttgtaaaaattggagacataagaaagaattggaaagaaatactatatgcttgtatagcaaagcttaatatattacaataaatctttctccaagtaacataagacagacacagcctctgcttcccatacaggtttattgccaggttttgactaccttcaaatatcatagtctaatcagaagttacycatgttaataaaaacttctgttagagtgaaactaagtaaaaattctatacctattcctttaaaaacctttactgattaataaatttcatacctataagattctcccattgtaagtcttcaattcaatgatttttagtaaatttatagttatgcagtcaccataattcaaatttagaacatttctatcacccccattttatttcctgctctcactgaaaccctaagtaattactattctgctttctttgtaaatttttctttttatacatttaagtggaatcaatatttgtaggcttc

SEQ ID NO: 867965 - DNA, 634 bp, Homo sapiens
ggtaaaataaaaatgataatgactttctcatacagttgtgcttggaattaatatttgtaaagtagtcggcacattgaaagctatgggatagccaaatggaagatcctcactccccaattaaatccttaattggaattatgagaacaattattttgtaaaaattggagacataagaaagaattggaaagaaatactatatgcttgtatagcaaagcttaatatattacaataaatctttctccaagtaacataagacagacacagcctctgcttcccatacaggtttattgccaggttttgactaccttcaaatatcatagtctaatcagaagttactcatgttaataaaaacttctgttagagtgaaactaagtaaaaattctatacctattcctttaaaaacctttactgattaataaatttcatacctataagattcycccattgtaagtcttcaattcaatgatttttagtaaatttatagttatgcagtcaccataattcaaatttagaacatttctatcacccccattttatttcctgctctcactgaaaccctaagtaattactattctgctttctttgtaaatttttctttttatacatttaagtggaatcaatatttgtaggcttc

SEQ ID NO: 867966 - DNA, 589 bp, Homo sapiens
gtgttagtattctggagattgtcaaagtgacttagacttctcacaaaccatatcatgagcatgaggggtaggaaattatcctctgctctctgcattagtagtctgagaaaatatgaaaggaggccatgacccagtgagctgttstaaagtagaagggggaccttctagagttgcatatgtgctattattgactgtaaaactattttagtttaaaaaataattaatgtaattattttattgagttatattatgagttaacaattcctagacttaacaaagttgtaacatatgaaattggatttcagggagccaaatttttgccattgaaagtaatggcaaacactgcaattatttttgtgccaacttgatatataggcttttctgcaacgaggaatcaagccatatcttgaatgtggaggcaagaggtagaagaaacatctctgatgcagctttgtcctgaggggaggaattccttttgacatttttcagaatgacttaaattgattaaaatcatggacacaactcctctgccacctcctcatgacaattgggtaatgagggccagaagatactggcttatgttttgttt

SEQ ID NO: 867967 - DNA, 617 bp, Homo sapiens
atgaatggataaagaaaatgtggtaaatatacacaatggagtactattcagccataaaaagaatgagatcctgttatttgcaacaatatagatggaggacattatattaagtgaagtaaaccaggtacagaaagacaaacttgacatgttctcacttatttgtaggaactaaaaattaaaacaattgaactcatggacaaagagaataaaaggatggttagcagtggctgagagggatagtgttgaagggagtrggtaatgggaacaaaaatacaattaagcagaatgaataggatctagtatttgatatcaaaacagggtgactaagtcaacaataatttattgcaattttaaaaataactgaaagaatataattgggttgtttgtaacacaaagaatggataaatgcttgaggtgatgggtactccacttactctaatgtgattattacacattgcatgcctgtatcaaaatatctcatgtgccttataaatatatatacctactatgtaccagcaaaaatgtaaacactacaggctcattgatatatcttactttagaaagaaatctctaaaattttagatcataccttgcaaaactgtgtctggggtcaaaat

SEQ ID NO: 867968 - DNA, 601 bp, Homo sapiens
taaaagaaagggaggaatcatgtccacaattgcagctttctatggcggcaagtccattctcatcacgggggccacaggctttctgggcaaagtgctgatggagaagctgtttcgcaccagcccagacctgaaagtcatttacatccttgtgaggcccaaggctggccagacactgcagcagagggttttccagatcctagacagtaaggtatgccttatrggaaagcgtgtgtgatgggcaatgccttagggcaagatgattcactacaatgttctcttatagtctcatattgcaagtggggaccaggctacctgcacaggtagaggaaggcagacaaaacaagacagcaacaagctgctggtggaaatcggtgttttcccaaaggagggaaaagagtgcttagtttcagtccagggcaggtgagattgtctatgtctggaaactactaattatcaaaatactcaaactccctgagtggatgcttcagccttaatatctgctgcaagttcatctgaattcttcactaattttcttttaaatttaaggttgatttcctccccaaattttttggatattcttctattctgttctattctattg

SEQ ID NO: 867969 - DNA, 601 bp, Homo sapiens
taaaagaaagggaggaatcatgtccacaattgcagctttctatggcggcaagtccattctcatcacgggggccacaggctttctgggcaaagtgctgatggagaagctgtttcgcaccagcccagacctgaaagtcatttacatccttgtgaggcccaaggctggccagacactgcagcagagggttttccagatcctagacagtaaggtatgccttataggaaagcgtgtgtgatgggcaatgccttagggcaagatgattcactacaatgttctcttatagtctcatattgcaagtggggaccaggctacctgcacaggtagaggaaggcagacaaaacaagacagyaacaagctgctggtggaaatcggtgttttcccaaaggagggaaaagagtgcttagtttcagtccagggcaggtgagattgtctatgtctggaaactactaattatcaaaatactcaaactccctgagtggatgcttcagccttaatatctgctgcaagttcatctgaattcttcactaattttcttttaaatttaaggttgatttcctccccaaattttttggatattcttctattctgttctattctattg

SEQ ID NO: 867970 - DNA, 660 bp, Homo sapiens
gcatttatgtggttcaaaaatttaacgtttatctgtacaccaaacccccatgacacaatttacctatatagtaaaccagcacatgtacctctgaacctaaaattaaagttaaaaaaaatacagtgttaacagatgtacactaaaaatctgtttcccactcctgttcctagtcactgtgtgtttccttgctcactgtgattaagtttctagtgtgtagttttgaaatgacaagaaatataaatgcatattcttatttccccctgtttacatgatggatagttctggcagaagccatagtgttcaccaatattcacactcttttctatctaataaagacttcgtgtgtggataaaactcttccttatgtgatcttttctcttttagctctcactctctggctgaatgtagaggactctgaaggcttaggcaagaggggagttataaggcaccacagaaccctgaatgactgcatggagcagaacccttcgcaaacctsctcttcaggcctcctttttgagacagctggaaaagattctttctccttttctagcaattacttcctccctccgactcaaatgcctactcagcctctagtattcagtgtaagtacgtgtatcactagaaatctagatctggggatttaacctcagaagctttctc

SEQ ID NO: 867971 - DNA, 518 bp, Homo sapiens
aatgggagttcactcatgatttggctctctgtttgtctattatttgtgtataggaatcttgtgatttttgcacattgattttgtatcctgagactttgctgaagttgcttatgagcttaaggagatttggggtgagacaatggggttttctaaatatccaatcatgtcatctgcaaacaaatataatttgacttcctctcttcctatttgaatatcctttatttatttctcttgcctgattgccctggtcagaacttccaatactttgttaaataggagtggtgagagagggcatccttgtcttctgycagttttcaaaggaaatgcttccagcattttcccattcagtatgatattagctgtggttttgtcataaatagctcttattattttgagatgcgttccatcaatacctagtttatgagtatttttagcaagaaggggtgttgaattttatggaatgccttttctgcatctattgagataataatgtggttttgtcattggttctgtttatg

SEQ ID NO: 867972 - DNA, 622 bp, Homo sapiens
gctctctgtctattattggtgtgtaggaatgcttgtgatttttgcacattgattttgtatcctgagactttgctgaagttgcttattagcttaaggagattttgggctgagacaatggggttttctagatatacaatcatgtcatctgcaaacagagacaatttgacttcccttttcctacttgaataccctttatttctttctcttgcctgatttccttggccagaacttccaacactatgttgaataggagtggtgagagagggcatccttgtcttgtaccggcacaaacggaatgcttccagtttttgcccattcagtatgatattggctgtgggtttgtcctaaataactcttattatattgagatacgttccatcaatgcctagtttattgagtttttagcatgaagggctgttaaattttgtcaaagaccttttctgcatctattgagataatcatgtggtttttgtcattggttctgcytatgtgatggattacatttattgatttgcatatgttgaatcagccttgcatgccagggatgacactgacttgatcgtggtggataagctttttgatgtgctgctggattcggtttgccagtattttattgaggatt

SEQ ID NO: 867973 - DNA, 639 bp, Homo sapiens
ctggcagcagcccccagacaggttaaaacattcaagtaacttctgctctgtactccctggttccagagagggaattgtgaactgggttgctatcttctccagaccaagactgcacaatgctggggagaggagggaactagggtgagtaaaaacatcacacaatttccaactgtttttaatgtgtttttttttcttgatcaggcatttgtttagtcrccattgacttttggctattttccaaagctctcacaaaattttagttgggtgctttttgttttttaaatgtttctgtggggaaatgatacctgaagcttcttagtcttgtcatttttttaaactaatgcttttaatttgtcttcttgttgatatctgtatttataattttatataaagaacagcaatttctcttataatgagaaaaggtaaaaattgctgagaaagagactattatgagaagggatctcacttagaatagcaaccaaagaaatataaactgcatgggaatagaccttacaacagatgcttatgaacccaaataaaactatatgttacataggagttaaatcacaaactgagctctcacctgaaatcttgtacagtcaacataaacacaatatcacatcaagcaccctgagatgc

SEQ ID NO: 867974 - DNA, 590 bp, Homo sapiens
tggttttataaggagaaacccctttctttcacttggcactcactctctttgcctgctgccatctatgtaagatgtgacttgctcctccttgccttctgccataatgtgaggcttccccagccacacatagaggtgtaagtccagttaaacctctttcttttgtaaattgtccagtcttgggtatgtctttatcagcagcatgaaaattgtctaatacagtaaattggtaccagtagagtgaggtgctgctgtagaaacccaaaaatgtggaagcagatttggaactgggtaacaggcagtggttggaacagtttggagggctcagaggaagagagaaaaatgtgggaaggttgggaacttcctagagacttgctgaatggctttgaccaaaatgctgataatgatatagacaatgaaatctggtctgaggtggtttcagatggagatgaggagyttattgggaactggaacagtggtgactcttcctatgttttagcaaagagactggtggcatttttcccctgccatagagatatgtgggcctttgaacttgaaagagatgatttaaagcatctggtggaagaaacttc

SEQ ID NO: 867975 - DNA, 621 bp, Homo sapiens
tgtgaaataaattagaatttcttggattccctatgagtacaaattattttgctctatcttgttattttaaaggaaatagtaaatgtcctatttgtgtggcacctgtggatttttttctcaaaggagaaggtgcagatacacctgagtgctgccttctctgttttactactcaaagcataaacattgaagactttttaaagacagtcaataaagaacaatagtttagtgtgctgacatatgctttttgcttgtttgttttgagacaggatcttgctctgtcattcagactggagtgcagtggtgagatctcagctcactgcaacttccatctcccagactcagttgattcttgtgcctccaccacctaagtaactgagactacargtgtgcaccaccatgcctggctaatttttttgatgttttttattgagacagggtcttactatgtgtcccagactggtcttggcttcccgggctcaagtgatccatctgccttggcctcccaaaggctgaaattacagctatgagcgtgcccaactgtaaactgatatatgttattagaatctgcaccatatccaaatgaactttaattttcttccactcttcaagtttggaggaaga

SEQ ID NO: 867976 - DNA, 554 bp, Homo sapiens
gctcagagaaggtaagcgacttatccaaggtaacccagctagcaagggatagagctggtgtttgaactctccctccagaggcctgtgactctcctcctgtcaccaacccactatgattgtcctcatggttgaataggaagcttatgaggccacagttatagatttagtttctgggaaggctggatagagttccaggttgtcccatgatcacagagtgaaccaactaccctggtcaatgtgtgtctgacccagggaagggtgtggatggcttctctrccccctcacctcgacagctgaatccctgccacccagggccggagcagctcagtggcattcactcagtgcctgctgtgtacctggcactcggcagttctcaaggcatgtcacgcatgaggaaggcgggagaggtgtttttagcttccttgtatactgaagcttgcaaaggctacagtttacccaactaaacttgactcctgcattctaatcatgtgttctttctcctccatccctggacttaggataactagttgctggtgatgacttcgtgtcaagaa

SEQ ID NO: 867977 - DNA, 604 bp, Homo sapiens
aggaatttaactcagttatatttcaccgcatgttctccctcccaatttttatttttatattaagtctatcggaatctttataactttaaataatatacttacatctcaatttcttggcccgtcaccttttacagtatgtctaacttacaaagtgtaagttcaggaaaatacacaaggcagacttccttctgccttgtaatggacactgtggtgtggcgtgctgcccagatccctttcaggaccaaggccttgattccccaastttggggagtgctggcagctaagaggtctcagctgagtccctctccaagaattgcttttggctgaagggagttacctggagattatgtgagagattatgccacctcccagagggcagcccatatccagtgactggtcagtatgggttatgtgttataatggtgtagccagcctattggcctcaatggagcaactttgaagagccatctgcctcctcccaaacttcttgcagcattgactggggccttgtatctactcactcctcccctgcctggtcttggctccctcaactctcacaggtgatgtttctgagaacactctccaacaacctccctatacccaa

SEQ ID NO: 867978 - DNA, 594 bp, Homo sapiens
ggctggttaacctcagagagcgggagtccgttggtgctaatgaggccaagggagcccggctcctttctgcccccaggcaggtgagaaagaaagaacggagacgaaagagggcccgctgtgtctactcctcttggcccagaagcccagctggaccctgaggccacaaactgcccccyactggagaaatcgctgcaggatttctcctccatcaaatcgctgtgtcagagccagttgggggcttttaaaagacgcccacgctcaggcccgcaccaggccacctacactggaatatctgaggctaagtcccaagctagaatttcccatcttctttctggccttgggagattttgcatctccttccagggaaggaagcctgacttctgaaatgattctcacgaaggagaagtgctccgttctgcagtgagcctggccaggggggccacaccacagactcccaggaggcttctgctctgcgtggttcttctgctctcgtttccttaacgattgggccagagcatctctgctcttgtaaaatagcaggcaattagatctcgaagtctttgaagtgggcagattcaccaggcgttggactga

SEQ ID NO: 867979 - DNA, 549 bp, Homo sapiens
catagaatataaatgatatctgtcttatcccttaggactatgttgagaataaaactgaagtaatgtgacaaaattcttcagaagtgaagcattttaaaaagcaaaaaggtaccttactgatctaagggtagtatagaaacattccagagatctatagaaatcttttatgtacgtgtaggatttcctacagagcattctggtccttttttcctctgcctatattttaaattagactctgttctttcacwacaaaacttgcacagtaagctttcacctttgtttcttgccaatctttaactattgcatccatttgatctgagcagagccagctcacgtcagaagtgaccatttcatgccatgcagtctggttcccctcacactgtccatgtgagaaaccagcatgaagaaacatccaagatgagatttaaatgcgcaaaccagggcaatcacgtctttaagggctaacagatttttcctgacatcgattttcagtttctcactgggcatgaaatatacctacattcattctaaagtgatcttacagatgag

SEQ ID NO: 867980 - DNA, 597 bp, Homo sapiens
agtcaaatgtcaagaccccatattttcttcctggaaaatagctgaaaaatgatatacatgaatactaccataagagttactcatagggatagacgaagggcatgaaaggaagaaaataggtcagtaacagaatatgtgacacgggaaaggggcacacttagatttttccactcacatcaagagttctctctactatccctctcaatgggcttaggaaatctccttgtaagaaacttctagataaacccatacgcaactcaaatatctgctctgccactttttagatagytaatttggggcagatttcttaactcctgtgagccccagtttcaacagtttgcatggagatatctactttacagggttgctttgacgattaaattgactaacgtagtaatattatgcaatgtgcttgcagaaaattgctcaaaagatgtaatttttagctttttataatgtggatagcctatgtggctagagcagagttgctctagtgttcagcaaactcccccagccccattgccaaccctcagcccccctcaggtacaagaaaagctaaaaaaaaaaaaaaaatggatagcttcaatacaatggtgt

SEQ ID NO: 867981 - DNA, 556 bp, Homo sapiens
taccccaggtcaactggctctgagtacagcacagcaccaaaacttgcccaggaatttctggccttgtggtctgcactgtttttcaggcctatttaagaccttagagcactttagtccacgctagtggggcatgctaaaactcaggttttgatcactgggatggatgattcctctctggttagtgctggcctacatattccctccatggctgmagcccaattctgccctgtgatgttttccactgtgacagggtagcattgagttccaatgcaaaatcccatagacactttgctctccctcccccaagtgcacagattctctctccatgccatgctgcactgctaggggatggggaaagagtggtgttgacaattaaagactgtctttcctaccctcttcagcacctctttccttgctatgacgttaaatccaagttctgtgattgttcacctgattttttagttcctatgaagatgctttcttgtgtggatagttgttaactttggtgcttctgcaagggtatgatcactgcagggttctattcagtcaccttgtt

SEQ ID NO: 867982 - DNA, 628 bp, Homo sapiens
aatatagtaaaaaattcatgcattcctatgcctgaagctataccattagattcttttggcagccttgaaatggggtggtgtgggcatttagtggtgtgggctaagcaggaagatgtcttataaaaatagtcagcagatggcactccagcctctgcttactagttttggacctgatttggttgctgtgctgttcttggacgttcagactaggktagggacaggcactttgggcctgcttttggatagttgaagatactgtcaagaaatatagagaaggaagaaggtaatcaagtcaaggagctgtatttggtggttgctgggctggccggctcttaagaaccttttgctaaagctagaaaggaaccatttatcttggtatgggtgtattttgccctgccacactgggcgggaaaaaaactattacgtcctcagattattcagattctttcagggattcaggaaagaaatgaattctttggttagtggtataattacaacaccttcacatgccccgtggtaatggaagacattaaaaaagttttcctcaaaccttttcccaaaaatttctgctgaatataaatcatcacaataggaatgccggtggtagtgggagaaaagggagatgatc

SEQ ID NO: 867983 - DNA, 626 bp, Homo sapiens
tactcctgctttccaaatcctccaagaataccacaccataaattgctctctagttactatcaataaacatatattacagagtgtgtaaatcaaggtctttggttgaatcaagtttgttgctgaatttgattcatctggcgggaatgtatttcttaatacacttaatacatatagttctagcttagaatttatttttaaattgcaaaagaacaacagagttggcagccatcatggcgaattgaactacagggtgacctggaacactactaaaggaaaacagaactggccggatgtggtagctcacacctgtaatgccagcactttgggaggccgaggtaggcagattacgaggtcaagggatcgagaccatcctggccaacatggtgaaaccccatttctactaaaaatacaaaaattagccgggtgtggtggtgtgcacctgtagtcccagctactcgggaggctgaggcaggagaatcgcttgaayccaggaggcggaggttgcagtgtgctgagattgtgccactgcactccagcctggcgactgagcgagactccatctcaaaaacaaaaacaaaaacaaaagcaaaaagaaccagggctgttttctggagaatttctggagg

SEQ ID NO: 867984 - DNA, 572 bp, Homo sapiens
cccaatggccatagtttgctaatccctgttctaggaccctaagagaggtacatttgtagaaattatgtttggaaagcagactagctacccagaattccaaacaataggcacatggaagtttggaaaactcttcatttaaagcattttttagttctagatgctggtaatgcaatgctgaacaagaccaacatggtttctctccttataagatttgcattaacatttgtgaatgcataaagacktaagtgagttcaagtaatgccaaatgcaataaataaaattaaacagagtaaagtaaatgcctggatgtgggaggaagtataactttagataaaactgccctggaagcttttctgagaaaatgatatttgaattttggacatttgatacttgaatgatgagaaggatctagtcttggaagggtttgggaaagagcattctgtgcagagacattgacaaaggtgaagggcttatggaagatacatacttggtgtgtttgaggaataggaagacaccagtacggttgagaagggaaagggactgttatctctatcttgaactgtccccattaa

SEQ ID NO: 867985 - DNA, 511 bp, Homo sapiens
actctgaacaggcatggagcattcaataaggcaaagggtcagaaatcttgcttaacttcttactgttcacatctgtaactgggcataaacctataggatcattttcctttcacaaagaatccatcaaataaatacttgttaaagcctacgcttaacttgagcaccggtagtaatgactcgcattatcagcggggcttttgggcttgcactcatggctctgtgattcatgagggcagaaaaactgactggcttacagctgtctctctttttctggctggcctgcctgcatgcctagataactraatggcttttttcagaatgaggtatggtctaaggattttgctacttcaacgtcagtttcctggatcttttcttctactccagcttgccatatgtcccttttatattttcttggccactctcttacaaatagggccatagatcagagatggtggccccatctggtgaaatctagctttcagatacgctttgtttgacccatagagtgttg

SEQ ID NO: 867986 - DNA, 511 bp, Homo sapiens
actctgaacaggcatggagcattcaataaggcaaagggtcagaaatcttgcttaacttcttactgttcacatctgtaactgggcataaacctataggatcattttcctttcacaaagaatccatcaaataaatacttgttaaagcctacgcttaacttgagcaccggtagtaatgactcgcattatcagcggggcttttgggcttgcactcatggctctgtgattcatgagggcagaaaaactgactggcttacagctgtctctctttttctggctggcctgcctgcatgcctagataactgaatggcttttttcagaatgaggtatggtctaaggattttgctacttcaacrtcagtttcctggatcttttcttctactccagcttgccatatgtcccttttatattttcttggccactctcttacaaatagggccatagatcagagatggtggccccatctggtgaaatctagctttcagatacgctttgtttgacccatagagtgttg

SEQ ID NO: 867987 - DNA, 603 bp, Homo sapiens
gtagctgggattacaggcatgcaccaccatgtcagctaatgtttttctttcttttttttttttttttgtatttagtaaagcctgggtttcacagtgttaggctgatctcgaactcctgacctcaggtgatccacccacctcggcctcccaaagtgctgggattacaggcgtgtgccaccgcacccggccatgtcacagttttataggcctttcctgactaccctgtacaaataaaaacaagaataagcctccaccctatcctagcactccttcttccgtttarcttgtccatcaccatctaacatgccgtaaattcacttctttatttgccccatccccttagattttaaagttcatgaaagtaaaactgcatctgtgtcatctactttggaacagttcctggcacttagtattttaattcaatacatgtttgttgaatgaataacttacttttctctctggcatggcttccacatttatttgcctaatgagtggatcgataaatgaatgatgactatattctcttggcactagcagaatctgttatttcccaatgtaccatttctctgaaataactttacagttctttattggaacaaaaga

SEQ ID NO: 867988 - DNA, 603 bp, Homo sapiens
gtagctgggattacaggcatgcaccaccatgtcagctaatgtttttctttcttttttttttttttttgtatttagtaaagcctgggtttcacagtgttaggctgatctcgaactcctgacctcaggtgatccacccacctcggcctcccaaagtgctgggattacaggcgtgtgccaccgcacccggccatgtcacagttttataggcctttcctgactaccctgtacaaataaaaacaagaataagcctccaccctatcctagcactccttcttccgtttagcttgtccatcaccatctaacatgccrtaaattcacttctttatttgccccatccccttagattttaaagttcatgaaagtaaaactgcatctgtgtcatctactttggaacagttcctggcacttagtattttaattcaatacatgtttgttgaatgaataacttacttttctctctggcatggcttccacatttatttgcctaatgagtggatcgataaatgaatgatgactatattctcttggcactagcagaatctgttatttcccaatgtaccatttctctgaaataactttacagttctttattggaacaaaaga

SEQ ID NO: 867989 - DNA, 602 bp, Homo sapiens
aatccattttgtagtcattcactcatgtaggataaatgcattttttaaagcactttcattttcattttacatgaaagagaacacttgggtactggtgaaatgcttaggtcagcaatccttttgggaagatacacatgaggggtattatgtatctcgtctttccctctttcaacattttctaattcaattctatataataaatatttactgagtatctactctctgctgggtattgtgctaggttcaggggatatataactgaatcagacagaacccctttctttacagagcatatatgatgatgtcatctcaaggggagcccaggatttcaggtcacctatgtataaagtgagaaataaaggctggctaggagtcagccatgggaaggggatagaataagttgaacattcatggtaaagagaatactrtattcaagatcctaaagcataatatgttggaaaacagaaaatacagtatggccagaaggcagaactcaaaggagaatgagagccagcggatgcggtaggaaatgtggggaagggtagataaagaagttagggggtttattctcaagacaatgagaaattattgaaagagctaaa

SEQ ID NO: 867990 - DNA, 582 bp, Homo sapiens
agggaaaaacataaagcctttcacatgagttcaaaaattcaagtgtaaagaagactttaagggtttaggttgactttaaatataatagaatttaacaatagaaggacaggtgcagtggctcatgcctgtaatcccagcactttgggaggctgcggtgagtccaggagttcaagaccagcctgggcaacgtagtgagacctcctctctacaagaaataaaaaattagccaggtgtgttagcacacacctgtagtcctagctactcagraggcggaggtggcggagggattgcttgagcctgggacttagaggttgcagtgagccacgattgtaccactgtactcggcctgagtgacagagtgagaccttgtctcaaaaaaaaaaaaaaaaaaaaaaagttaatggaataagaactgccaaaagcacatattatcttgtgggaaaatgttcataacattatcagatgaaaaagcaggttataaagcatagagtatggactcattctgtttgtgcaagggaaatacacacagaggaagaatatacgtcaacatggtgacaaaatgtagcagacgtctttggttgt

SEQ ID NO: 867991 - DNA, 621 bp, Homo sapiens
caccaggggacactcagtttccacagaggggtgctatgctctaccaaaatggtgcagattctttttcctgtcaggggtggactccaaaaagattttgtcctggattttacagctttaggtggatccagtattgggtttagatgagttgacagagccctttctgagatgaagctaatagccagattttcactgaaacaggaaaaataaaaatttcaaaaaaattaaaacaaaatggagttaaaaactaaatatgttgccagagacccaaagataggcagctctagcaacttggggggcatgcaagtayccatccagggagctgagttccacccatgcggcggaggtgggaagagaggattctgggaaggtcccggttggaatggccttttttctgcctcagccatattattcagtggaaattcagaaaagaccccaaaacatttgtagtgcctttccctttctccccacccccagttccttcttcagtagccttccttgctaattaacactggctctgcagggatatttaccttttctctgctggattcctgtggttttgaaagaattcaggtacttgctggttgccaaggaattcagattacctcacaggctgcacactgt

SEQ ID NO: 867992 - DNA, 597 bp, Homo sapiens
gaagaaacattatttctttggcttttaaaatgtgacattaaaagggttttttttttttttcctatctctctctcttttctttgctattgcttgtttgatttctgtgtgcaatttgatgctgggacctagttatccatcaggcgtagtagtcatactacttaraaccagaattcttttagggacccatagaaatattttaattttaatttcttttaaaattagaggaaaaatgaatataacactaatgaatatattataatgaatccagtcttgcttatacttgcttatactaatgtttaacataattttcagtatttcttaatgaaggaagggatacattaaggcaaagatgtctagggaccacacaaattataatgaagccttggttaatatcttgccctcattcttttttttaatcgtactattgctttctttttaaaatttttaaatatattttttaatagctttggggctacaagtggtttttgtttacatggatgaattatatagtggttaattctgagactttagtgcaattgtcaccagactagtgtccccttctaagtctccaaagtccattatatcactctgtgtgcc

SEQ ID NO: 867993 - DNA, 594 bp, Homo sapiens
gtacacctgtttgctatttgtctttttttgagaagtgtctattcaaatcttttactcactttttaatcaaattatttgattttttcatatagaattatttgaatcccttatatattctggttattgaatcccttatatattctggttattaatcccttgacagatggatggttcacaaatattttcttccattctatgggttgtctctttgttgattgtttcctttgctgtgcagaatctttttaacttgatgtgatcctacttgtccatttttgctttggttgcctgtacttgtggggtattactyaagaaacctttgccaaatccagtgttctaaagagcttccccaatattttcttgtaggagtttcatagtttgaggtcttagatttaagtctttaatccatgtttaattgatttttacatgtgacaagaagcaggtgtctagtttcattcttctgcatacagatattcagttttcctagcaccatttattgaagagactgtcctttccccagtgtatgttctttgaacctttgtcaaaaatgagtttgctgtagatgtatggatttttttctgggttctctattttgtt

SEQ ID NO: 867994 - DNA, 550 bp, Homo sapiens
gtgtctggcattttccctgctggcacttctctctcctgctgccaagtgaagaagaaggtgtttacttcaccttctgccatgattgtaagtttcctgaggcctccctggccatgcagaactgtgagtcaactaaacctccttgctttataaattaccgagtcttgggtatttcttcatagtggtgtaaaaatgaactaatacagtaagttggtactgaggtagtggggtgctgctattaaagatatctgaaaatgtggyagcaactttggaactgggtaatgggcagaggctggaagagtttggagggctcagaaggagacaggaaaatgtgggaaagtttgaaacttcctagagacttggagggcttagaagacaggaagatgtggggaagtttggaacttcctggagacttgttgaatggttttgaccaaaatgctgatagtgatatgggcaatgaagtccaggtggtctcagatggagatgaggaacttcttgggaaatcatctcttgctatgctttagcaaagagactggtggcattttgcccatgc

SEQ ID NO: 867995 - DNA, 571 bp, Homo sapiens
attgtgctgggtctctgaaggaaaagtgaagcttgtgattaggggttttaatagggtaacaattcaggaaggggagagagagaaggatttactgaagaagtgatgtttcagctgaggcatgagtgatgaatttgagttaggttgttaaagagttggtggcrgggacacattccaggcaaagagaaagaacataggttgtatgtacaaaggtcttgggaccaccgcctcctcagaacctcctcagaagagagctggtgtgtgagtggtataaagacatcatctgataatttagcaatttgtaattcatttgggtcatactgagttacttcaatatttcttaaaagcatgtacaactaactgcagggcccccttttgttgccttcacttgggaagacatggcaataaggtaaaaggatacaacataccatgctcactttctgtcttccagaatttcaatgacctctctactttgttgggcctctcacttcccatctttaatgcactttaaacaccatcaatttcatggcaaatttctttcatccttatttggcaacgggagacatgttagctg

SEQ ID NO: 867996 - DNA, 571 bp, Homo sapiens
attgtgctgggtctctgaaggaaaagtgaagcttgtgattaggggttttaatagggtaacaattcaggaaggggagagagagaaggatttactgaagaagtgatgtttcagctgaggcatgagtgatgaatttgagttaggttgttaaagagttggtggcagggacacattccaggcaaagagraagaacataggttgtatgtacaaaggtcttgggaccaccgcctcctcagaacctcctcagaagagagctggtgtgtgagtggtataaagacatcatctgataatttagcaatttgtaattcatttgggtcatactgagttacttcaatatttcttaaaagcatgtacaactaactgcagggcccccttttgttgccttcacttgggaagacatggcaataaggtaaaaggatacaacataccatgctcactttctgtcttccagaatttcaatgacctctctactttgttgggcctctcacttcccatctttaatgcactttaaacaccatcaatttcatggcaaatttctttcatccttatttggcaacgggagacatgttagctg

SEQ ID NO: 867997 - DNA, 658 bp, Homo sapiens
caaggtatttgttttcatttatacaaattatcttctgtgttcttaatagcatttaattttttcttcaagtagatctttcacatttctttacattgccatttgaaccaatgtgttgtattccattgtgtaaatataccataattaatttaaacaattccatatcattggccatatagtaatagatcatttccaatttttactgattaaaaacctagggccaggcatggtagcttgcacctgtaatcccaactacttgggagactgaggcaggaggactgcttgagcccaggagtttcagtacagcctatgcaacaaagcaagactcyttctctaaaaattaaaaaataattaaaaaataatttagcaatgaacacacttgtagctatatattttaatatgttcataatgatttagttaggataaattcctggaaattgagtctttaggggtatgaactttttgggcggcttttgatgcataatgctaaattacattcccaaaatgtttcagaaatgtttgttctaatttttgtaaattataagtgttacatgtggtatagtaaggtctcatcatacaatcaataacttacttgaattaaactttaagggtcaggaaagaaagagaaagaggaaaatggcctgtattacaggggttctgc

SEQ ID NO: 867998 - DNA, 658 bp, Homo sapiens
caaggtatttgttttcatttatacaaattatcttctgtgttcttaatagcatttaattttttcttcaagtagatctttcacatttctttacattgccatttgaaccaatgtgttgtattccattgtgtaaatataccataattaatttaaacaattccatatcattggccatatagtaatagatcatttccaatttttactgattaaaaacctagggccaggcatggtagcttgcacctgtaatcccaactacttgggagactgaggcaggaggactgcttgagcccaggagtttcagtacagcctatgcaacaaagcaagactccttctytaaaaattaaaaaataattaaaaaataatttagcaatgaacacacttgtagctatatattttaatatgttcataatgatttagttaggataaattcctggaaattgagtctttaggggtatgaactttttgggcggcttttgatgcataatgctaaattacattcccaaaatgtttcagaaatgtttgttctaatttttgtaaattataagtgttacatgtggtatagtaaggtctcatcatacaatcaataacttacttgaattaaactttaagggtcaggaaagaaagagaaagaggaaaatggcctgtattacaggggttctgc

SEQ ID NO: 867999 - DNA, 586 bp, Homo sapiens
gtgctgtgtcccaagaagagggtcacttcattgattacctatcctgccttaaattggtaaaatatgatgtatgatggaataacgtatggggtgagaagacattaatttgagcttcacaaaacaatgtggataaatctctcaaacatggtcagtgtttaaatgtataaacacatacataataataaaatgttatttgcagatcgacatatatgtaaagggtgtattggtaggctgcaccttaaataaatatattaagaaagattcgtgggataggaaaggagaggtgaaataaaaaataaaataaaataaaatcagagataattattttgcagacaaatactaacataaactataaagyggtttaccttaaattgagtaagaattttgaaaactattctgaaaaatcttgagctgctctgagggcagttgacagtttccctttgtggatgaaagaattaatacccccccctccatacactctcctcaaaaataatatataaccatgttgatagagtttggatatacatccctaccaaaatctcatgttgaaatgtaatccccaatgctagaggaggtgcctcgtggg

SEQ ID NO: 868000 - DNA, 659 bp, Homo sapiens
ttttgagagatcttctttgtgtcaaattctatttttatggcactgtttttggagagtctgcatgatatgatttccattttttcaaatttattgagatttgctttacggctgagcatgtgatcaatcttagaatatgttctaggtgtggatgagaagaatgtatattctgtggaggttgggtgaagattctgtcaatgtctattaggttcaatttattgggtgtcaagtttaagtccataatttctttgttaatttcctatctttatagtctgtctaatgctgttagtgaggtgtcaaagtctcccactattattgtgtggctgtctmagtcttttcataggtcaagaaaaatgtgtttaacgaatcttagtgctctagcattgggtgcatatgtcttaagtcgtcttgtagaattgaaccctttataattatgtaatgcccctctttgttcttcttgattgtcattattttaaagtctgttttatctgctataagaataatgaacctgttttttttttttccatttacatgataggcctttacttagaacctctggagtgtctttacatagaaatgggtctcttgaggacaacagacagttgggtatacttttttatccaacttgccactctatgccttttacatgttgcattgagact

SEQ ID NO: 868001 - DNA, 577 bp, Homo sapiens
atcaccttcccttctccatttattcacattctgaactttatttaacctctgaggctcaactcaattttcctttcctctgggacaactttgctgaggttttcttctataaaagttatcttccttctctttgctctcatcctatactgccaacccttgtcaaattgccacattratctttttgctcatctttcttcccttttagcctatcagaccttgcagaatttgtgatctgttcatttttatatttggtattttgtatgtactgaaaaaacattggtttaattcatcaaagaataagttataagttcatcttaaaattattcaaagttatctcaaaaataaatttgaatgctagtgtcaatctcttgtttttcagttctcatctctagcacactttgtttttaaattagagtttgaaattcaagttatgatagcaattgaaatgtaaactgtggtctctgaggacacggattatttttgcttcagtgttacctcgagcacaatgtttgccacactagtgctaaacaattgtatgtaacaaaaatgaataaatgttttcttctggacaagtcacttt

SEQ ID NO: 868002 - DNA, 549 bp, Homo sapiens
tgtgtatgtttgtgttttaatttgggtaatttctattgacttagcttcaagttactgatcatttcctcagttgtgtcaaatttattaatgagccactaaagaaattctttatttttccatttgatctttctttgcatttctatccctctgcttaaatttccaaaccattcatrcataataactattttttccaccagatcttccaggtagtgatcatagtcattttaatgtctctgtctgatagtcacaacacctgtgtgttctctaagactggttttactgatgaccatgtgtcttgatagtgggttgtttttcctttcattgttgtatgcctcatgaatttttattaaatcccagacatagtgtatagagtagtaaggactgaggtaaagagtatttacacccaaaaaaggtttttcttttcttttgtaaggcgatttatgtggagtgttgagttgtcaaagttgagctgagtttggatttgttgttgctatggttactttctgtacacataggtctcaaattccttgagtgtgtattgtgcctagg

SEQ ID NO: 868003 - DNA, 549 bp, Homo sapiens
tgtgtatgtttgtgttttaatttgggtaatttctattgacttagcttcaagttactgatcatttcctcagttgtgtcaaatttattaatgagccactaaagaaattctttatttttccatttgatctttctttgcatttctatccctctgcttaaatttccaaaccattcatacataataactawtttttccaccagatcttccaggtagtgatcatagtcattttaatgtctctgtctgatagtcacaacacctgtgtgttctctaagactggttttactgatgaccatgtgtcttgatagtgggttgtttttcctttcattgttgtatgcctcatgaatttttattaaatcccagacatagtgtatagagtagtaaggactgaggtaaagagtatttacacccaaaaaaggtttttcttttcttttgtaaggcgatttatgtggagtgttgagttgtcaaagttgagctgagtttggatttgttgttgctatggttactttctgtacacataggtctcaaattccttgagtgtgtattgtgcctagg

SEQ ID NO: 868004 - DNA, 561 bp, Homo sapiens
tcttgtttctttttctggtcttataaagctgcaacaacctttagtatgatgtcaaatatgaatggtgataatgcaacattttcagtctcatgaaaaaggtttacatatttcaccattaagtatcatttttttgctataaaatttcctcaatattctttatgggattagatacttatcttttattccaagtgtattaagatgttttctgacgaatgtatgcagcttttctgtaccttttcagaagatgacaatgcttttcttttttattgggtttacatgtagaataatattgggttttaaaatgttaaagcagctttgcattttgttaaaaaaaaacctgcactttgtcatgacatgctattctttctrtatattgctggtttcagtttgctcagttttcgtggaataattttgaatttcagaattcatttctgttacctttataggtttattcacgttttctacttatttcaggtgagtgttgctttttttctgtgcattcaaatatttatctaaattacaaaatgtattgacatttagttgttaatattatattaaagt

SEQ ID NO: 868005 - DNA, 680 bp, Homo sapiens
ttgagaaggtgtctttaacagatgccactttcaaacagaaggaagtgaggagactgatttattagccacctgacaacacatttctactttgtgaaaatgtattacgttgtcttgcagaaatacctcatgcaatcaccatcttaccatcatttttttctactttgaaccttcatgtgtccttttcactgaatcattaattaccaatccaattgtgactcccccagagctgcttttcatggactcaatggatatagctcttccttggaatccagggtcatctraaagtcaactcttcttcgtgatgagatagttctatttttgtgttaacttaaagtgtctgaaaagctaatttatgtgatagattaaagcaacagaataaaaaacaccctaggcacagtcatttcacatggtgcaacgtatttccagaataaaacaacttttatttcgacacgatatcctcaggagcattggatactgtgtggctattaagtccttcacacatcattaatttccaagcaagaaggtgataaatctcaccacaaaactagttcagtacacgtaggaaaataacagatatgatattatttttgacttgatcacagacagtagtttaaaagaaatacttaatttttatacaaattcagctagataagaataatatgatctatgctaaggccact

SEQ ID NO: 868006 - DNA, 642 bp, Homo sapiens
ttgagaaggtgtctttaacagatgccactttcaaacagaaggaagtgaggagactgatttattagccacctgacaacacatttctactttgtgaaaatgtattacgttgtcttgcagaaatacctcatgcaatcaccatcttaccatcatttttttctactttgaaccttcatgtgtccttttcactgaatcattaattaccaatccaattgtgactcccccagagctgcttttcatggactcaatggatatagctcttccttggaatccagggtcatctaaaagtcaactcttcttcgtgatgagatagytctatttttgtgttaacttaaagtgtctgaaaagctaatttatgtgatagattaaagcaacagaataaaaaacaccctaggcacagtcatttcacatggtgcaacgtatttccagaataaaacaacttttatttcgacacgatatcctcaggagcattggatactgtgtggctattaagtccttcacacatcattaatttccaagcaagaaggtgataaatctcaccacaaaactagttcagtacacgtaggaaaataacagatatgatattatttttgacttgatcacagacagtagtttaaaagaaatacttaatttttatacaaattc

SEQ ID NO: 868007 - DNA, 643 bp, Homo sapiens
ctgggggctcagatagaacaaaaaagaagaggaaagtataattcattctttctctcctctgagcttggacatccttttcggacatcaaaactccagattctcagggcttcagtcttggtctgggagttacaccatcagcttccctggttcttaggccttcagaattgaactgtgccaagttatcatctttcctggttatcttgcttgcagatggcttatcatagcacttctcaatctccataatcacatgaaccaatccccctaataaatctttaatatttctatgtaatagataratagatacatagatactattggttctttatctctggggaaccctgactaatacaataaccttttctgttacaagcagaattctaggtactcaaaaaaccatgggtcattgcaaaattgttaaccctatataaatttacaagtaaggcttaataactgaagataccaacacatatctgtcctttgtttaatattacttcctttggatgtttttattaattcttatgtataattaaaaattaccgatctatgcaaattttactctttactaaatgtttagagtcatacacagtgtcacccttcatcaacctgttcattctgtttctcactttatcaggtgtgaaagcac

SEQ ID NO: 868008 - DNA, 641 bp, Homo sapiens
atcattctggaatactgaagaaaaaatgagctatatatcccagtctgattattttatttacctcgtatactgaatttctttcttccttcttttcagtgagtcttcatgcttaaagtatgcctaatctgcaagatatactttataagctaattctaattctaagtgttttcatacccctgtgtgtatcttctgcctcaataagttttcaaactttcatgtggttttaacgttggaaattggatagagaaaatgaataattaaggaattaaaaaaacacttttacaataaactggggtatcatttgctttactctaattacttttattaagacaaaatttcttaaaatatatttgtactctattgttgatagaggatgaataaaaatcatcatgggttgrgattctagtcaaagcaattgttacctggttaaataattcacaagagattcttatctgtggtaacagctcatgagggggcattatatatgcctttttatatgtcttaatattgtacaagagatctcagaaattcatattcactaaaaataaaaatcaagacatttctctttaagttttcatgtcctcagtttgtaaatctttattattacagtttaaaaataaaatgactgttcagtaatttta

SEQ ID NO: 868009 - DNA, 590 bp, Homo sapiens
ttgtaaaaactcattttaccttattttgtttctttgtacttcaatcttttctattgatttattgttatgagctaaattgtggtccctccaaaatttatatgttgaaaacttaattcctataacctcagaatgttactgtatttgaaaataaggtctttaaaggggtgattacattaaaatgaggccattaggatgggacctaatgtaacctgacttggatctttataagaagaagaaatttggacaaacaaagagacactaagagtgcctcatgtagagaaaagaccatgtagagacacagaagtaagatggccatctgcaagccaaagagagaggtttcagaagaaaccaaacctactaagacctgatctcggacatttaacttccagaacagtgagaaaataagttactgttgtctrtgtcacccaatttgtgttatttacatggtattttgttctggtagccctagtgaactatgttttccatttgctgattctatctctagctgtacttattctcttctaaaaactatctattgaattcttaatttgtttaagtttcaggaatgcaacttttaaaaataattagtt

SEQ ID NO: 868010 - DNA, 542 bp, Homo sapiens
cacctctttcagtcatcatagttgtgtttcaggaagtcaaggcaagaaagactgggtggtgtctaaataagaaaagcacatatttcttcccagaaattctagcatatagctgcttatattcccctgagactcccttagctgtcatgggcactcttagatccaagggaatctgagaagaatctcatttgttgactgtgcycaagtatgcaatgagcagctaaacaaactgaataagttttcagtttagattttaaaagatgtcatacagattttactttttctcataagataattttcatcatccaatgcaaaaatgtataagcagaactcctggtactattcttgcaatactgatgtgttcataccaagtacagattgtctgtgtgcatggccacagatgattcatttgtttctaagaaaatcccaaaaggctacaatttattttcttgtaatagcctgtatgaatttgctttgggcatggcccagtttatgaagattgtttgagaaatgaaacagaaactatcgttttattgaatttggag

SEQ ID NO: 868011 - DNA, 634 bp, Homo sapiens
gagtatgtgccatgtgcagatgagaatgtatattctgttgttttgggtggagagttctgtagatatctattacattcatttgctcaagtgtcaagtttgggtcctgaatatcttttgttagttttctgcctcaatactctgtctaatactgtcrgtggggtgttgaagtctcccaatattattgcatggttatatgaggcactttgtaagtgtctaataatttgctttatgagtctgggcgctcctgtttcttcagcatttatatttaggatagttaggccttattgttgaatgaagccttttaccattatgtaatgcccttctttgtctttttgacttttgttgttttaaagtctgttttgtctgaaattagaatagcagctcctacttttattctgttttctactttcttggtagattttcctccaaccctttacattgagtctatggttgtcactgcatgtgaaatgggtctcttgtagacagcataacattgggtcttgcttctttatccatttgtcaatatgtgccttttaattggggcatttaacccatttacatttaaggttagtgttaatatgtgtggatatgatcctgtcattgtgttgttagcttgttattatgcaaatttgtt

SEQ ID NO: 868012 - DNA, 634 bp, Homo sapiens
gagtatgtgccatgtgcagatgagaatgtatattctgttgttttgggtggagagttctgtagatatctattacattcatttgctcaagtgtcaagtttgggtcctgaatatcttttgttagttttctgcctcaatactctgtctaatactgtcggtggggtgttgaagtctcccaatattattgcatggttatatgaggcactttgtaagtgtctaataatttgctttatgagtctgggcgctcctgtttcttcagcatttatatttaggatagttaggccttattgttgaatgaagccttttaccattatgtaatgcccttctttgtctttttgacttttgttgttttaaagtctgttttgtctgaaattagaatagcagctcctacttttattctgttttctactttcttggtagattttcctccaaccctttacattgagtctatggktgtcactgcatgtgaaatgggtctcttgtagacagcataacattgggtcttgcttctttatccatttgtcaatatgtgccttttaattggggcatttaacccatttacatttaaggttagtgttaatatgtgtggatatgatcctgtcattgtgttgttagcttgttattatgcaaatttgtt

SEQ ID NO: 868013 - DNA, 636 bp, Homo sapiens
ccaatcaccccagccaacactgtaactcccttcttagcctgttcacttgaaggtaggagaagcccaaagtgtccaggtggcaatcttaacttccagtttaatggaattgttgtgtcttctcgttgcagcattcctccctctgggactaagacctctaggccagcagaacgtaatgttgcaggaacaggaagcaaaaatgtcgctagtggatcatgaggggtgatgrtgagtggtgccacttccacttccacctcttgattcctgggccctcatgttgcattggcatcacaaggattctaaattggcaacatccagaggtagtagccttggtacacacatgagccttttgaaactgtgcagtggttagtttggcttctccatgtgagcttttgagcaggagttggtaagtgagaaagctggatgaaagataagtgggaattaagttgggggctggggagcagcaaatagaagctgcctctggttctgtggtttttttttttaggcccagtgaaaaagatctagatgaaaatttcaggatgttgaattactactgttaggtaagttagagcaatcaaaatcataaacatctggactccaatattgggactgccaaagttagtcatgcattcacagtag

SEQ ID NO: 868014 - DNA, 636 bp, Homo sapiens
ccaatcaccccagccaacactgtaactcccttcttagcctgttcacttgaaggtaggagaagcccaaagtgtccaggtggcaatcttaacttccagtttaatggaattgttgtgtcttctcgttgcagcattcctccctctgggactaagacctctaggccagcagaacgtaatgttgcaggaacaggaagcaaaaatgtcgctagtggatcatgaggggtgatggtgagtggtgccacttccacttccaccycttgattcctgggccctcatgttgcattggcatcacaaggattctaaattggcaacatccagaggtagtagccttggtacacacatgagccttttgaaactgtgcagtggttagtttggcttctccatgtgagcttttgagcaggagttggtaagtgagaaagctggatgaaagataagtgggaattaagttgggggctggggagcagcaaatagaagctgcctctggttctgtggtttttttttttaggcccagtgaaaaagatctagatgaaaatttcaggatgttgaattactactgttaggtaagttagagcaatcaaaatcataaacatctggactccaatattgggactgccaaagttagtcatgcattcacagtag

SEQ ID NO: 868015 - DNA, 643 bp, Homo sapiens
tgtcccctcagtccactgtctctggacctagttcagcactgggactcacctaatagttgcagtccttttggcctagactgcctttcaagtttacttggtgatacagcgtgctgtagccctcggtggtgaggtttgtaggcactcaagtttggaccastgggatctgcaattcccctctggctagggctggtttgaaagctccctctgtgagcaggcatcagctgagtttggtctggttttcctttctgctctaacagaacagcactgagttcaatgcctcacaattgctgtgttctcccccagcacccagagaggctctctgcatcacactgctgctgtcgggggtgggtgaggggtggtgttggtgattcaggactgttttttctgtctcttcaaagcctctttcggtgatgagaagttaaaagcagtacaatgagggcttgcctgatttttagttcttatgaaagtgttttatctgtgtagatagttgttaacttaatgtccttgagaggggaacaattgctggagctttctattctgctgttttgctctgcctcctctcaaattattagaattaatttcacctgtttctttggacattttaatgtggctactagaaaatctaaaattacagatgtggttc

SEQ ID NO: 868016 - DNA, 623 bp, Homo sapiens
ctcttcagaaaattgattactgaatactgatgcaatcaactcttatggaaggaagcagaattggacaggattgggatggaagcagggtttgccagagggaaaagttttgttgagatatagtttcaatccagatttctgcttgctccttaggaagctctgaagctggcatggctcttcagaattgtccaaattagggtaagggacttggcctggaaacccccatgttaaacaatcactggatgtggtttgccttgggaaaaaatatgtctttgggtaaggcaattcatgaagacagcaatttgaaagccacagtctcagtagctgggaatcaagtttttccattctgaaaggggcactgagcagcatgtcacagcatccaccacactcaacatgaccagaagcagtgccatcacttgtcaaggagctctattycaggcattggaacagatagatcacctgttcaataaggcctattaggtttgtggggagagggagttccaataaaaacaccttcttttgcttctcctgagtttgaagtcagatgagaaataagatatttgaatcctacacatggaactagaatgacagttttctttctaataaagctgaattggataatgtgg

SEQ ID NO: 868017 - DNA, 623 bp, Homo sapiens
ctcttcagaaaattgattactgaatactgatgcaatcaactcttatggaaggaagcagaattggacaggattgggatggaagcagggtttgccagagggaaaagttttgttgagatatagtttcaatccagatttctgcttgctccttaggaagctctgaagctggcatggctcttcagaattgtccaaattagggtaagggacttggcctggaaacccccatgttaaacaatcactggatgtggtttgccttgggaaaaaatatgtctttgggtaaggcaattcatgaagacagcaatttgaaagccacagtctcagtagctgggaatcaagtttttccattctgaaaggggcactgagcagcatgtcacagcatccaccacactcaacatgaccagaagcagtgccatcacttgtcaaggagctctattccaggcrttggaacagatagatcacctgttcaataaggcctattaggtttgtggggagagggagttccaataaaaacaccttcttttgcttctcctgagtttgaagtcagatgagaaataagatatttgaatcctacacatggaactagaatgacagttttctttctaataaagctgaattggataatgtgg

SEQ ID NO: 868018 - DNA, 615 bp, Homo sapiens
ccttgtcaattaataccagcatcctttttggcaaatagatctgtctctttgttctgcttcactgtatacagaaaaggggcctcaaaagtcagagctgttagatcattgccatatacaagtctttagttttgtgttgactgaatgggttagatttctagaacaaaagattgttcctttaaaartgattcccctgggataactgatttctcacaaaatgtattgcagatgagactgtttggatgaacatttataaagcagacattctagttggtctagaactgaacttattttagatagagctagtgatgccctttccccagcatcaattatattgtcttatttatatggggtttaggtacctattgggaaactaatttgaacaataatgaagttcaggcatgtctagaaggctgggaggataagcaagctcaatgggaaccaaaatacaaaaaaaagaggatgacttggcttcacagagtgaatttattgtaacagaaggtggtgtctggctcaatgatcaattctgcaatggggcatggagttgagaagagagaggcagttctgctgatattgtattgactgttgaaaataacattatcttgttatatacataaa

SEQ ID NO: 868019 - DNA, 615 bp, Homo sapiens
ccttgtcaattaataccagcatcctttttggcaaatagatctgtctctttgttctgcttcactgtatacagaaaaggggcctcaaaagtcagagctgttagatcattgccatatacaagtctttagttttgtgttgactgaatgggttagatttctagaacaaaagattgttcctttaaaaatgattcccctgggataactgatttctcacaaaatgtattgcagatgagactgtttggatgaacatttataaagcagacattctagttggtctagaactgaacttattttagatagagctagtgatgccctttccccagcatcarttatattgtcttatttatatggggtttaggtacctattgggaaactaatttgaacaataatgaagttcaggcatgtctagaaggctgggaggataagcaagctcaatgggaaccaaaatacaaaaaaaagaggatgacttggcttcacagagtgaatttattgtaacagaaggtggtgtctggctcaatgatcaattctgcaatggggcatggagttgagaagagagaggcagttctgctgatattgtattgactgttgaaaataacattatcttgttatatacataaa

SEQ ID NO: 868020 - DNA, 632 bp, Homo sapiens
gacagtatttttttcaagtggaacaaaaaaacaagtgcatatttacacacttatttgtatcacagattaaagctcaatccttgtattggagtggcataattacatccacatataagcatttgcatatgaatgtccttgatttgcatggacaattataagtactcttttttgctcatgcaaatgaagaaacacctttggaatattggcctcataatttctaatcatatatcattgagtggcatatacagttttaggaaagcaatcggcatcatttcaagaataagaagtcatttaggcagattttctctgagaagtgcttgacagaataatttttcttcctaataagaataatgtttaaagattgagcattcaatagtccaaagagaaaagggataaaggactgacttcrtggttcctggataagcataaaatagtatacttgacttcacttggatatcatatagagaattttgtaagtgtttcaatacaagcaatcggaagactgtttattatctttgcactacaaagcattgaaattcctgaaagaaagagtggcaagaagatgttggaaagttaacaagggtcaaaactcttggcttagaaggcaaagggtcgtgccaggcatttgtagt

SEQ ID NO: 868021 - DNA, 651 bp, Homo sapiens
gttaatgtagcatcatgagaaaagggaattaggatttttccacattctggtgggaatgtgccattatgtgccccaggatctgactggtcatcctaggacaatcactgggaactgtatgggatgatcattagaagaattgagtcccctgatgagtctacatcgtattttctgctttagagacaagctaataatggctgtgcacactgaatcctgggttttagcagataagaatgttgcccaggatgttcaaaatcacatcagagagaataatttgacaggaggataaataaataatgcacttgctagttagcctgcaaataaatgatgactcttgaaaactgtacctatttgaatcgtatctttttgagcaaaattgggcccactgtataggcagagctgcttctccatttctaactttagtattcctgctttggcacaggtatttctttttcattagagcttttcaaccagaaaagctaatatstgaatatattattctacatatttacttcgaacttaacaggactgaagctcagtgaagcagtttacatgcgtggaatactaacagaagtaagcagaggagtggaaggaaagatataagatggccaggaacagtgtcccatatagcaaagtaatggaaaaggcagagca

SEQ ID NO: 868022 - DNA, 586 bp, Homo sapiens
attagcatgccaatggacacacacgtgagcgtagtcagtctgctttcaccttgggccactgtccagagtcctcttcctctggagagctgtatgactcccttcttcccttccttcaggtccctgcttatttataattttatcaatgaagttttctttgaccatgatattcaaaacagcagtgcaattctccatccctctgcataacctatttttgctgaccctgctttactatatagcatttattgcttcctaaaatgctatctatttatggtctgtctctttcaagtatagtgtatgatccataaaggcagraatgttgtctgtgtttgttctctgctgtgtctccagagcctagaacagtgctcaggacttagcagtcattgaatgaataaatgaagggacagtccttggaagaaatgtgctgagaattggagggtgcaaaattcttgatccatcacaaattcttatttgctggctaaccagtttctcttcactagcttcaatgtgtcatctgtaatattgtgtgaattaggcgaggtcgggagtaggaatattatattgccccagggaaggaattgaactagcc

SEQ ID NO: 868023 - DNA, 589 bp, Homo sapiens
accaaacttattccgtgtttgttctagccacaaagataggctacttcttccactctctctagaagtgaggtggggctgggtgaccaagttctagataatggaacacatgtagaattgatgtgtgctaataaaaatcaccctgcatgcttctttacatgcattccatatccactagctggaatcagaggactctgaatatatagagaaatatagaaccacaaggtggaaggwtcctgaattcccaaattacattatcaaaactgatatgttttggctctatgtccccatccaaatctcatcttgtagtgcccataattcccatgtgttgtgggagggaccctatgggagatatttgaatcatgagggcaggtctttcccatgctattctcatgatagtgaataagtctcatgagatctgatggatttaaaaacgggagtttccttgcacaaactctctctctttgcctgctgccatccatgtaagacatgacttgctcctccttgcattccaccatgatcgtgaggcttccctagccacttggaactgtaaatccattaaacctctttcttttgtaaattgcccagtctt

SEQ ID NO: 868024 - DNA, 635 bp, Homo sapiens
tgttttggtgtcttctctttggagaaatcaaaccactccatgaacattgacacctacatggcctttttcaacaagttagccattggttcacaaccaattctggttcttgctctaatattaattattttgtgttactgatcaagttgattaactgctcagggctctagttttcttatttataaaatgcaggggtctgatggtgttttctaaaatcctttccagctctgaaatgctatcactttataggatcaaatgaaataatattaagtactgtctgaacacaraggctaataatgtagatgaagctgataaaaggagggaaaagggttgaaagttttcacctatttagccacagaattattaattatgccaggatttcaaatattctctgctaagaggaaggagtgccagggaatgatctttaataacatggttctacaatgctactcattttctataatatatatttaagattgatattgctatttctggcaccttccaccaaaaaaaaagagacaaaaggaaagaaaggaagaggaaaagaaagagagagaaagaaagaaaaagagaaaaaagaaagaaaaagagaaaatgatattcaatactcactagtgactctagagttagaagatgtg

SEQ ID NO: 868025 - DNA, 635 bp, Homo sapiens
tgttttggtgtcttctctttggagaaatcaaaccactccatgaacattgacacctacatggcctttttcaacaagttagccattggttcacaaccaattctggttcttgctctaatattaattattttgtgttactgatcaagttgattaactgctcagggctctagttttcttatttataaaatgcaggggtctgatggtgttttctaaaatcctttccagctctgaaatgctatcactttataggatcaaatgaaataatattaagtactgtctgaacacagrggctaataatgtagatgaagctgataaaaggagggaaaagggttgaaagttttcacctatttagccacagaattattaattatgccaggatttcaaatattctctgctaagaggaaggagtgccagggaatgatctttaataacatggttctacaatgctactcattttctataatatatatttaagattgatattgctatttctggcaccttccaccaaaaaaaaagagacaaaaggaaagaaaggaagaggaaaagaaagagagagaaagaaagaaaaagagaaaaaagaaagaaaaagagaaaatgatattcaatactcactagtgactctagagttagaagatgtg

SEQ ID NO: 868026 - DNA, 644 bp, Homo sapiens
agatcaatatgatcccaatttgagatatcataactcatactaaattcaaagcatgtttaatcaatttaacacgtaatgtgctttctaaatggcataatattgggtggatttctgtggcaataaaaaggtgggtagaatttacatcctacattaataggatttttgttcttgattctaacacagtcacattaatccagcaaaaccctgccttggccctttctagtctctttctctgcctttcccaccacttagcgtgctagatgtaggtacctgaggacacattcagatctaaatccattcagagaatggggtgtgtttaataaaagtrgtaatgcaattgcttggatcactgccctcagggaagtgtaaaagttgtattgagattcaaagtgaagaatagaaaaaaaaaatacttcttgcctggtttttaaatcaaatcccaggctaaaagttgagaatatgtttgagtttgcttcagcattgctgaagtcctattcttgatgttatgtccagtgacttagtaatcttttattggaatatgtgaattagatattctttcaagtcacttttcataggcatccagatgggtgatggagatagatttgtacccatcatctgaccatcactctggctcttattcgact

SEQ ID NO: 868027 - DNA, 621 bp, Homo sapiens
tgcagctttgttcttttcacttaggattgtcttggctattcaggcacttttttggttccatatgaaaattaaagtagttttttctagttctgtgaagaaagtcaatggagcttggtgggaatagcattgaatctacaaattaccttgggcagtgtggccattttcactatattgattcttcctattcatgakcatggattttttttttccatttctttgcatcctctcttatttccttgagcagtggcttgtagttctccttgaagaggtccttcacatcccttgtaagttgtattcctaggtattttattttcattgtagcaattgtgaatgggagttcactcatgatttggctctctgcttgtctgttattagtgtataggaatgcttgtgatttttccagatcgattttgtatcctgagactgctaaagttgatgaaccaatcatttcttaatggaaaacattgaaaggtcacagcatgatgagaaaaaaaaacatcattgtcatgtagtgtatctagcacaggaagtagctggaaatgccctaaccttgaagtattaaaatgattccagtaaagcaatggtttgaagtcccaatagtttcctttcttcctcctttgg

SEQ ID NO: 868028 - DNA, 621 bp, Homo sapiens
tgcagctttgttcttttcacttaggattgtcttggctattcaggcacttttttggttccatatgaaaattaaagtagttttttctagttctgtgaagaaagtcaatggagcttggtgggaatagcattgaatctacaaattaccttgggcagtgtggccattttcactatattgattcttcctattcatgatcatggattttttttttccatttctttgcatcctctcttatttccttgagcagtggcttgtagttctccttgaagaggtccttcacatcccttgtaagttgtattcctaggtattttattttcattgtagcaattgtgaatgggagttcactcatgatttggctstctgcttgtctgttattagtgtataggaatgcttgtgatttttccagatcgattttgtatcctgagactgctaaagttgatgaaccaatcatttcttaatggaaaacattgaaaggtcacagcatgatgagaaaaaaaaacatcattgtcatgtagtgtatctagcacaggaagtagctggaaatgccctaaccttgaagtattaaaatgattccagtaaagcaatggtttgaagtcccaatagtttcctttcttcctcctttgg

SEQ ID NO: 868029 - DNA, 621 bp, Homo sapiens
tgcagctttgttcttttcacttaggattgtcttggctattcaggcacttttttggttccatatgaaaattaaagtagttttttctagttctgtgaagaaagtcaatggagcttggtgggaatagcattgaatctacaaattaccttgggcagtgtggccattttcactatattgattcttcctattcatgatcatggattttttttttccatttctttgcatcctctcttatttccttgagcagtggcttgtagttctccttgaagaggtccttcacatcccttgtaagttgtattcctaggtattttattttcattgtagcaattgtgaatgggagttcactcatgatttggctctctgcttgtctgttattagtgtataggaatgcttgtgatttttccagatcgattttgtatcctgagactgctraagttgatgaaccaatcatttcttaatggaaaacattgaaaggtcacagcatgatgagaaaaaaaaacatcattgtcatgtagtgtatctagcacaggaagtagctggaaatgccctaaccttgaagtattaaaatgattccagtaaagcaatggtttgaagtcccaatagtttcctttcttcctcctttgg

SEQ ID NO: 868030 - DNA, 631 bp, Homo sapiens
caggttctagagaaagaagcatcacctaaattgctattctaaagtagtaaacaggattcaggcaacttctgagagttagacaacttctaagagggtaaaccaaggatagaaacaggatgtggagtgttgacctgttctatatgcttcactctgatatatagatgactgatttattattttctcgttgaagagtatgcaaaatttctgccttttgaaatagatgattattggttacaggttgcaggagcaaattaataaataactttcataaagttaaagaaccaaggtcatgttgggacaaatatggacttaggcttggacggcaaaacagcgaggtcaggtgtagttgagwcactggaaatgttgcagtatttgtgtgttcagtacaggaagtggtccttgtgtatttggcagatctgtttaaggaaaagatttggtcatgttcttagtccagaccctatacttaacactttccaatcagtagccaccagccacatgtgccattcagcacttgaaatgtggctggtatgaatgagtaaatctattaagtataaaatacacatgcaatttcaaagatttagtattaaaaaggatgtaaaatattatatactaatgtttatactggttgttg

SEQ ID NO: 868031 - DNA, 607 bp, Homo sapiens
ttcacaacttaaattccttccatggcttcccatctttcctggcttaactatcaatgttcttaatctgacttactagccgttgcatgatctgcattttcctcccagtcttacattaaatcactttctcttctgcagcccacattgactcttgtccagctcttagaacacaccatggtcctcgcattsccatgctcttcttccctttgtctagttaactcccacttgtcattgaaaattcagctcaaatgccatttttggaggaaaaccatccctgaccctccattctaggtcagatccttttcttaggtgctgttaaattttttttcctttggagcactcacctcagtttgtaattgcatattagcatgataattaagttattgtccatgtaacaggggtgtgtttaatcactgccccagcttgaggaaaaacctctcaccaagattggccatggattctctttccttccacacctcaaccactccctatattatcaggatctcaccttgcatctggggtgtgtgtggacaaggaaggtattgttcttgcaagatggttggaagcagattgatcagtttttcttagatggttacaagctcagatggaa

SEQ ID NO: 868032 - DNA, 607 bp, Homo sapiens
ttcacaacttaaattccttccatggcttcccatctttcctggcttaactatcaatgttcttaatctgacttactagccgttgcatgatctgcattttcctcccagtcttacattaaatcactttctcttctgcagcccacattgactcttgtccagctcttagaacacaccatggtcctcgcattgccatgctcttcttccctttgtctagttaactcccacttgtcattgaaaattcagctcaaatgccattttyggaggaaaaccatccctgaccctccattctaggtcagatccttttcttaggtgctgttaaattttttttcctttggagcactcacctcagtttgtaattgcatattagcatgataattaagttattgtccatgtaacaggggtgtgtttaatcactgccccagcttgaggaaaaacctctcaccaagattggccatggattctctttccttccacacctcaaccactccctatattatcaggatctcaccttgcatctggggtgtgtgtggacaaggaaggtattgttcttgcaagatggttggaagcagattgatcagtttttcttagatggttacaagctcagatggaa

SEQ ID NO: 868033 - DNA, 600 bp, Homo sapiens
aatgtagttctagcttccaatttcacttctatctggaagcctaactgcttttttgacaaactagctggagttaggtttggttatttacattccaaagtgccttaagtgaagctcctgttcagttgtgtgttggcctcatttccgacctttggagggtgctacggtctgaatgtttgtgttccctcaaaagtcacatggtgatacctaatcctcaattgattgtattaagaggtgggggcctatgggaggctattagtcatgaggcygcatgaatgggattaatgtctttaaaagagactccagagattctgttccaaggtggccaaaaaggaactgctctggtctgcagctcccagcgtgatagatgcagaagacggtgatttctgcatttccaactgaggtaccaggttcatctcattgggactggttggacagtgggtgcagcccatggagggtaagccgaagcagggcagggcatcgcatcacccaggaagcacaaggggtcaggggatttccctttcctagccaaggaaagccataacagactgtacctggaaaatcaggacactcccgcccaaataccacacttttccaacaggc

SEQ ID NO: 868034 - DNA, 655 bp, Homo sapiens
agaaacggaaggcaaaaaaaaaaaaagagcaggtgttgcaatcctagtctctgataaaacagactttaaaccaaaaaagatcaaaagagacaaagaaggccattacataatggtaaagggatcaattcaacaagaagagctaactatcctaaatatatatgcacccaatacaggaccacccagactcataaagcaagtccttagagacctacaaagagacttagactcccacacaataataatgggagactttaacaccctactgtcaatattagacagatcaatgagacagaaggttaacaaggatatccaggacttgaactcagctctgcaccaagtggacctaatagacatctacagaactctccaccccaaatcaacagaatatacattcttctcagcaccacccygcacttattccaaaattgaccacgtaattggaagtaaagcactcctcagctaatgtaaaagaacagaaatcacaacaaacggtccttcagaccacagtgcaatcaaattagaactcaggattaagaaactcattcaaaaccacacagctacatggaaactgaacaacctgctcctgaatgactgctgggtacataacaaaatgaaggcagaaataaagatgttctttgaaaccagtgagaacaaa

SEQ ID NO: 868035 - DNA, 605 bp, Homo sapiens
tagagatgtcagaacagccagggcagactgtggagaaaaggaaaaatgagtagagagaagcaggcatgtaaagagtactctaatatgggagacttgaacacttgccagctgactgtcttccttgggaggaaacactctgccaaggtcataagggatacaccatgcagaggggacatcagcattgctaagaagcttgccttcttctgtgggctgacaataggagatactatttcagaaatgaagaatctagtggcagagtttggtgcaaataaaaaatgtgggattccaaaggaatataaattattytgttataaagacacatacatgtgtatgttcattgcagcgctattcacaggagcaaagacatggagtcaacctaaatccatcaatgacagattggattaacaaaatgtggtacatatacaccatggaatactatacagccattaaaaagaatgagaccacgttctttgcagggaaatggatggagctgaaggccattatccttaacaaactaatgcgggaacagaaaaccaaatactgcatgttctcacttataaatggaagctaaatgatgagaacacatggacacatagaagggaatc

SEQ ID NO: 868036 - DNA, 628 bp, Homo sapiens
gctatatttaatgcttttgtgaagagtaaactttggggaaaaaagaatctgaaagtgcacctagctggaataatgaaaaaggagcatcgtatatcatgaatcaatataagtttatgtttgaggaaagcaaaatgaccagcacggacaatgaaatgtttcaagcactataaaatgtattgagttccagaaaccagacaattttgtgtaaaatgctctccagattcatttccccatgataataaacagtagaaaaaatgtgccaaaataaagaaaaaatgttttgagaagcatattaaatcagagaaatgatactgtcataattgattttataaagacactcagaaaagtaaacttgatatatctagcatcaagcttaaaatggcacatccagctatcagtggtcaatgagaaacaactgaaaaactgcctcacgaagtttggaaaaaratccccaaatgaaactcctaaaaataaaccctgcaatcacactggcatatgtgatcagtatgagatttcatattgtgcacccctgtttactctgagaatgtgcttcttaatggttcatgtatacatcatggctctgctcaaagtcactcctgcaagaagcccagaggcttctatctggagg

SEQ ID NO: 868037 - DNA, 621 bp, Homo sapiens
ggaagccaaagataccaatatcaactcataggttaatataaatggatagataaatagagatatagttatgtataaataggtatagaaatagtgagatagagatgagagaaagaaaaagataaagagagatagagacagagacagagagaggcccttgagccatttggracagtatttcacaccaatttgtcattttggttctgcctttagtcccatatccctgataggagagccttccaagaaagagaaactccatttctggtatcaaagaaggaattgtagttcaataattaggaaaacaacttagcaattataaggacaataagaaaaaaagggccttaagaaatgtatgtgttttacaacttttactgaattctgctgtagtataaaaacacacccgaactgaaggtcgcagtcaaagcagctgcttttagagagtgtatgttgtgaatgaaattgctcagagtatttcacagagtaatactcatgaagtcagtctgatgaaattcctgttcaatcttactactaagaggagtcttagttcttcaatatttgcctatattttaacttatggtcatccttaattgatatactaaatttatttctttatctgttgctaga

SEQ ID NO: 868038 - DNA, 658 bp, Homo sapiens
atatccctgataggagagccttccaagaaagagaaactccatttctggtatcaaagaaggaattgtagttcaataattaggaaaacaacttagcaattataaggacaataagaaaaaaagggccttaagaaatgtatgtgttttacaacttytactgaattctgctgtagtataaaaacacacccgaactgaaggtcgcagtcaaagcagctgcttttagagagtgtatgttgtgaatgaaattgctcagagtatttcacagagtaatactcatgaagtcagtctgatgaaattcctgttcaatcttactactaagaggagtcttagttcttcaatatttgcctatattttaacttatggtcatccttaattgatatactaaatttatttctttatctgttgctagaaaggttagggatgaccttgaggctctgatgtcacaaatgtgtgaggagagattgcaggcacgttagtctaattcatggccctgtcaatatcctcatgcttgtcttcctattttcgtttggctaacccttcagttaagctcagtgactgcattttgttaaccatgttggagcagaggatttcttgcttcatctagttcctctttcctggtcggggtaccagggcttctccttctggtttcttaactcctaac

SEQ ID NO: 868039 - DNA, 621 bp, Homo sapiens
ggaagccaaagataccaatatcaactcataggttaatataaatggatagataaatagagatatagttatgtataaataggtatagaaatagtgagatagagatgagagaaagaaaaagataaagagagatagagacagagacagagagaggcccttgagccatttggaacagtatttcacaccaatttgtcattttggttctgcctttagtcccatatccctgataggagagccttccaagaaagagaaactccatttctggtatcaaagaaggaattgtagttcaataattaggaaaacaacttagcaattataaggacaataagaaaaaaagggccttaagaaatgtatgtgttttacaacttttactgaattctgctgtagtataaaaacacacccgaactgaaggtcrcagtcaaagcagctgcttttagagagtgtatgttgtgaatgaaattgctcagagtatttcacagagtaatactcatgaagtcagtctgatgaaattcctgttcaatcttactactaagaggagtcttagttcttcaatatttgcctatattttaacttatggtcatccttaattgatatactaaatttatttctttatctgttgctaga

SEQ ID NO: 868040 - DNA, 635 bp, Homo sapiens
aaactaaccaggagacaaaaagagatggaggcaaataaacaagatatcacttcagatcttagggacaccatatagattataaaaagggaaactgcaaggtgttttaaaatagttgcaacacataatctaaaaaagagtcatactaataatatgtagagaaaacttctacaaattaagaagaaaagtcacaggtcagacagaatagtcagggacacgcctggaccaaaatttccaaattgggcatctaaatggtgacaacacaagaaaatacacccaagcatctttctaatgagggaaattcctatgaaaatatcaatgtgatatcactgcagtcacctacataactawaattttaaaaatatttgtcaaaacgtggattaataggacatctcctatactggtgtgcatataaatcaataatgtcactttgggaaaagtttaatattatgtattaaatattaaaataatgtccccaaattttcccatctaggtttttacccaagggcaaggcacactcctaaggaatatgtacagaaatattcaatgcagcattattcatataaccaccaaaaatggaaataataaaaatatccattagcaagagagtgaataaataatctacaaatacaatgata

SEQ ID NO: 868041 - DNA, 608 bp, Homo sapiens
tgataatcaatatcattccataatgaaaactttaggctcagatgttttcaatggtagaacataaaacaatatgataaaaataaagccaattcacacaaactttctcagaaaacaggagaaaatgtttctcagctccttttatgacaccaccataatttagataccaaaatcaaaaaaagatactacaagaatagaacattataaaccagcatgttttatgaacactaacaaacaaaatcttcaataagatactagcagttcataactagtagactatacagagaataacacatcatacaaaagtggtgctctacccagcaatgcaaagttttcytagtgtttaaaaatcaaggtaattcactgtatttagataatagaggagggaaaaaagttatgctcatttaaaaaaaaacttgtcaaaattcagcatccactcctaataaaattttccacaatgtatgaataagattaccttttcctaattttaaaaaaagcattgtggtgagtacaataacagcaccaccaaagacttccatgtcctaatgccctaatttcgcaaaatctgtgaatgatatcttacatggcaaaaaaatatgcaaatgatatta

SEQ ID NO: 868042 - DNA, 647 bp, Homo sapiens
aaaatgcaaaagacccactaaagaaataggagaattatatcccctttaggtgaaccaaaacttaatccatatctcagattctgcaactatgggtcccaggctatgacaatatatttttaaatttataagattctgccaaggagttgtctatgtcattagatcaattttattctctatagtagtgtagttaagttctggttactccatatccttgaaacacttattattgtcagcctttttaattttrgtcatcttgtgctcctattaaggcagctaattgtagttttcattcacattctcatgataactaggatgttgaacaccttgccatatagttttaatgtaattttggtcatttaaggaagctcacatgcttggtgtatgatgagcatggtcgagcagtagggaaagaatggccctttcaacaaatggtagatgaacagtatttggtgtattagaaaatgacattggacttctacagcatacaatcaactctagacttaattaggccaaaataataacaatcccagaatataacgtagtttaggaactttaggattggagactgtttaaaggtgccttaataacaaacattatagtatcaagagaatcataatttaaaaatacaatgaggttcaattcgatat

SEQ ID NO: 868043 - DNA, 647 bp, Homo sapiens
aaaatgcaaaagacccactaaagaaataggagaattatatcccctttaggtgaaccaaaacttaatccatatctcagattctgcaactatgggtcccaggctatgacaatatatttttaaatttataagattctgccaaggagttgtctatgtcattagatcaattttattctctatagtagtgtagttaagttctggttactccatatccttgaaacacttattattgtcagcctttttaattttggtcatcttgtgctcctattaaggcagctaattgtagttttcattcacattctcatgataactaggatgttgaacaccttgccatatagttttaatgtaattttggtcatttaaggaagctcacaygcttggtgtatgatgagcatggtcgagcagtagggaaagaatggccctttcaacaaatggtagatgaacagtatttggtgtattagaaaatgacattggacttctacagcatacaatcaactctagacttaattaggccaaaataataacaatcccagaatataacgtagtttaggaactttaggattggagactgtttaaaggtgccttaataacaaacattatagtatcaagagaatcataatttaaaaatacaatgaggttcaattcgatat

SEQ ID NO: 868044 - DNA, 625 bp, Homo sapiens
ttatttcattaagttgatcttcaatctctgatatcctttcttctgcttgatcgatttggctattgatacttatgtatgcttcatgaagttcttgtgctatgtttttcagctccaccaggcatttatgttcttatctaaactggttattctagttagcaattcctctaaccttttatcaaggttcttagcttccttgcattgggttagaacatgctcctttagcttggaggagttygttattccctaccttctgaggcctacttctgtcaattcatcaaactcattctccatccagttttgttcccttgctggtgaggagttgtggtcctttggaggagaagaggctctctggtttttggaattttcagcctttgtgctctgatttttcctcatctttgtggatttatctacctttggtcttttccgttggtgaccttcggatggagtttttgcgtggttgtccttttggttgatgttgattctattgctttctgtttgttagttttccttctaacagtcaggcctctcttctgtaggtgtgctggagtttgctgggggtcctcaccagaccctgtttgcctgggaatcaccagcagaggctgcagaacagcaaagatttctgcct

SEQ ID NO: 868045 - DNA, 624 bp, Homo sapiens
ttctatttttaattttttgaggaagctccatactgttttctataatggctatactaacctacattcttaccaacagggcacaagggttcccttttctctatatccccaccaacaattgttatcttttattgtgttgataatagccattttaagagacataggatgatgtctcattgtaattttaattttaatttttataatgattagtgataaacattgtttcatatagttcttggttgtctgtatgtcttgttttgagtaaggtctactcagttcctttgcccatttaaaaatttttttccttgcagttgagttgagttccttatatattttggatagtagccccttatcagatgcatagtttgcaaatattttctcccattccttaaactgtcttcactatgttcattgtttccttggctgtggagaagctttcaatttgatgcaattcygttttttcagttttgcttttgcccagacgaatgttgtggggcttttctctatgtttttttctagtagttttacagttttgggtcttacatttaagtttttaatcggttttgagctgttttagtgtgtggtatgagacaaaggtctaatttcattattctgtatttggagatt

SEQ ID NO: 868046 - DNA, 661 bp, Homo sapiens
gaggttaccttgtgcagaagataagccggccaacagggcctagaaatacatgtgaagtactggaagtagaaaaaaaaaatggagcctgaaagaatagctgaagggctcttcaaaaatctgatcttctaggaaaaaaaggaatcaacagcatgagagagatttctaagcaaaaattaatgaatttaaaggtttgctgaatataggtaatgtgggaatggtgtgatataaatgtgagtgccagatttcagggttttcatgacagagtttctcaggaagtagtggcctgattgactgaggagggtatgttgggcacagatgattaatttaagcaagtgattaatttcacagattaagtgggattgtgagtgtgagttgatattaggattttcagcaaaagacatgactatatgtactagagacataagtctagtatagccaaaaaaacaactattattatagtttcacaatttttaataatatcttaaatgcatctcagaawccatataatcaaaccagtataataaacctactgataaaaatgaaatgtttagataaataataacattgagctatcactttttttcaagatctactgatattcttaggaaaatgtcctttgagattgcccaaaatatatgacaaaatttgagactatttttga

SEQ ID NO: 868047 - DNA, 661 bp, Homo sapiens
gaggttaccttgtgcagaagataagccggccaacagggcctagaaatacatgtgaagtactggaagtagaaaaaaaaaatggagcctgaaagaatagctgaagggctcttcaaaaatctgatcttctaggaaaaaaaggaatcaacagcatgagagagatttctaagcaaaaattaatgaatttaaaggtttgctgaatataggtaatgtgggaatggtgtgatataaatgtgagtgccagatttcagggttttcatgacagagtttctcaggaagtagtggcctgattgactgaggagggtatgttgggcacagatgattaatttaagcaagtgattaatttcacagattaagtgggattgtgagtgtgagttgatattaggattttcagcaaaagacatgactatatgtactagagacataagtctagtatagccaaaaaaacaactattattatagtttcacaatttttaataatatcttaaatgcatctcagaaascatataatcaaaccagtataataaacctactgataaaaatgaaatgtttagataaataataacattgagctatcactttttttcaagatctactgatattcttaggaaaatgtcctttgagattgcccaaaatatatgacaaaatttgagactatttttga

SEQ ID NO: 868048 - DNA, 611 bp, Homo sapiens
aagctcaaggggaaagtggggatgagggaagacacactgcttttttttcttttctttccttctctctctttcttttttttaaagtggaatacttcggaacttatgactaggatttcacaacaaagtgaggtgaccaggaaaaaacacaagaaatcagtgtggcaagatccctcagatagggctctatttgatgawccaatatcatgtcaaccataggatttcacatttttgttatatattttagcctacacgttgataaaattataatcagaacatataacacagtaatcatggagcataaaataaactaaaatataaattacgttgcaagtaaagaaaaatgaattaacatgcacataacacagcataatagaagatataacagttttaaaaattatcatcaacatgttaaacttatctattaaacttatctatttcttggatttattaagaaaaaaggatcaatgtatggtaatcacattacaaaagtacaaaaaaccccacaaaagttattaaaaataaattatgtcagctaaaatacacactaaaagaagaaaaagacaccaattaataccagatagaatgaattaagtaaaaggaacatcatgtga

SEQ ID NO: 868049 - DNA, 635 bp, Homo sapiens
gattttcctaccatcctccaggagaatgttcctgtggtcagagatgctgtcctctacttgggcattaggaacacaggatactttcgtcctgtggttccaacactccctaggtttccttctcattttcaccagtaaaaaggtctgcgtgttcagtacagatgcagccatccactttttaaaactatttttgatctgtggttggttgagtccatgcatgcagaacctgtgcatatataagccaactgtaggtactggggagttttaagaatggagggagaaatcctgaaaacacagggtcttatagaaccgagattaatgttcttgcttgggaagccacggccactttcattctcatgatgcctaagaactaagaactatkgctgaccgaagatgcaagctgataactttgggtaggtatcatgtcagacaaaaaagcagcaatgtttcattacacaacccaagaaatcaagatttcaaatccttccagaaagagcccatacattggtttcaacatgtttcctttggtttacctatagaaattgtcagagttcttaacccccttcccctattggtgatgtgatgacgtttttgtcttaatctatgggaaacctttctcatggacaggccttcactag

SEQ ID NO: 868050 - DNA, 650 bp, Homo sapiens
gcttggtgagcaggttcaaaagatttcagtttttatgtttctttgaaaattgatgcttaaactctctgggcctcattttctaagtggggttctaacttagagttagagagggttaatcagggttctaactaaactctctgggcctcattttctaagtggggttctaacttagagttagagagggttaatcagggttctaacttactgtttggtgtttaaattttgtagcttcaactagggttaattcaaaatgaaagtaaatatgactttgattttcattgggatgaaataactaagccattttgaatgtgattgggttacttatgtttacaatgttaatttaattttagtattggttgtagattatggttaaagttgaggcctgctggacacatcattyaggagttctggaaaagacagagaaaaaagatgacccaatggtggagaaatacacacaagggaaaatcatgggctagcctaggagatagaaaatattggcagagactggaagccatgagagagttagctgccaacgcatggtgggtagagcagcacgcagtaggacaggaaggacgggggtgcagtcatagaagtggtgtgcgtccccactctctgggatgcctcatagctggcctaactcatcttcttcc

SEQ ID NO: 868051 - DNA, 501 bp, Homo sapiens
tacctgctgggagaatacttaggaaggtgtacattagtctttatttttattttatttatttattattgagatggtgtctcactctgttgtccaggctggagtgcagtggcacagtctcagctcactgcaacctctgcctcccrggttcaagcaattctcctgccttagcctcccgagcagctgggattacaggtgcctgccaccacacccagctaatttttcatatttttagtagagacggggtttcaccatgttgacctggctggtctcgaactcctaacctcatgagccgcctgcctcggcctcccaaagtgctgggattacatgtgtgagccactgcacccagccagcctttattttaaatagatacagaattcaagccttgatattgtgctagaataggaaagagatatttgtttctttatccccattttcaggttacaaacctcttaaaacccttgtagtttcctgagcaatgagggtagtaggagcattttttgt

SEQ ID NO: 868052 - DNA, 620 bp, Homo sapiens
gtggtgaatatctgcaggtggtctggtgatactgtgggccaagggcagaggatctccaggaagggcagtggtaccgtggatgtgtagctggtgtggtatctgcagcctgagattttttttgcccagaagactgcactggggactgcccagctcaaactccccaaactaagtcttcctccagtatctaccccacgagtaagccagaccagctagtttcatccccagccttctgtgtccagatcacagtggagctgttccaggcattacaggcygcagtgctttatcaggaagaagctgcagctggctgacaggctatatcctccccagatcagtcttctggaagggggtggtgtccagctcccatgccagtgcatgaacttgtgcctcactcttagtgtgctgagagtgggcactgctcttccactcgaggccacagatttcatctcacccctgggcagtgtgctcaaatgctgggagtttgggtctaggcctgtggctttgtcctccatcccctcaagagcaagcactggctgtactggctgtactgcagggggagggacaaagtgttctcaggccactggctaaacactcagcagtgccaggagaggtggtgctatgtg

SEQ ID NO: 868053 - DNA, 620 bp, Homo sapiens
gtggtgaatatctgcaggtggtctggtgatactgtgggccaagggcagaggatctccaggaagggcagtggtaccgtggatgtgtagctggtgtggtatctgcagcctgagattttttttgcccagaagactgcactggggactgcccagctcaaactccccaaactaagtcttcctccagtatctaccccacgagtaagccagaccagctagtttcatccccagccttctgtgtccagatcacagtggagctgttccaggcattacaggctgcagtgctttmtcaggaagaagctgcagctggctgacaggctatatcctccccagatcagtcttctggaagggggtggtgtccagctcccatgccagtgcatgaacttgtgcctcactcttagtgtgctgagagtgggcactgctcttccactcgaggccacagatttcatctcacccctgggcagtgtgctcaaatgctgggagtttgggtctaggcctgtggctttgtcctccatcccctcaagagcaagcactggctgtactggctgtactgcagggggagggacaaagtgttctcaggccactggctaaacactcagcagtgccaggagaggtggtgctatgtg

SEQ ID NO: 868054 - DNA, 620 bp, Homo sapiens
gtggtgaatatctgcaggtggtctggtgatactgtgggccaagggcagaggatctccaggaagggcagtggtaccgtggatgtgtagctggtgtggtatctgcagcctgagattttttttgcccagaagactgcactggggactgcccagctcaaactccccaaactaagtcttcctccagtatctaccccacgagtaagccagaccagctagtttcatccccagccttctgtgtccagatcacagtggagctgttccaggcattacaggctgcagtgctttatcaggaagaagctgcagctggctgrcaggctatatcctccccagatcagtcttctggaagggggtggtgtccagctcccatgccagtgcatgaacttgtgcctcactcttagtgtgctgagagtgggcactgctcttccactcgaggccacagatttcatctcacccctgggcagtgtgctcaaatgctgggagtttgggtctaggcctgtggctttgtcctccatcccctcaagagcaagcactggctgtactggctgtactgcagggggagggacaaagtgttctcaggccactggctaaacactcagcagtgccaggagaggtggtgctatgtg

SEQ ID NO: 868055 - DNA, 640 bp, Homo sapiens
ctggaacctcaatgatcaatgtgcagtggaagcatatttggttgagctgtagccagcgataacttggcaagtggaccatatgcctgatcaacctgcagccttaagtgaaggggtgggaaagagccagtgcatgcgctttgactatygttaggtgcccttagcatagaattgtaaaaaagaaaaagtttagacaaaaatagatggcatgccaagcagagatcaaagaaaataaagagtccaaagatcaaggggctatacattggaaaggttgactgtttctggaatcctattcataagataaagactaaacaaggctttgagtgacaggaaagaaaatcttggtttaaaaaactgaaccttatagcagagattagaatatgggtgtgttatttcctttcaagtctattttttagatgcctttagggtgaatactacttaggataaagagagacagagatagcgatgaacagatagagaaagagaagggcagaggaaagtagatctgaggctatgtttagaaaaaacaaaagcaaaaatagtagttatgtttactggcacataaaattaaaaccaactacaagcaaattaatcagaaactcacaaagtgcttgagaaaattgtattgctaaataatcctcat

SEQ ID NO: 868056 - DNA, 651 bp, Homo sapiens
tgttacttccttctggcccctcaggaagaaatttagaacaaagaacaacggtcagagttcaggtctcagctccccctttcagaggtctacatgccagtgggttcatttgatgggtgtccaggtttctgaaaaacagctcagagacccatgttaagatgttatctttagtttctataggtaaacaaacattttgtggctctgctttaagctattattaacttcttgcttatcaagttgtttatatacttctcaaggttggatagatgctttgaatttcccttgaaggaactcaagattttcctttatttcatgcctgtgygggattggggggccaggggtgaggcaggcccctaagggagatccttgcttcatcccaatgcgtggaagcaggaataaaaatagaaagctcaggtaatagtacaggagaagaatgtggcttgaactaggagagtaggggtattgataaaagaaagaatttggttctgagcatatttcaatgatagaaatcaggatttcctgattgtttggatgtggagtataaaaataagccaggaggtttaaagtgttggacatccacaactatagaatggaattacctttttcagaaatgaccttacaattttctaaagagtaataggaaaagaagttaag

SEQ ID NO: 868057 - DNA, 506 bp, Homo sapiens
ccagtagtccctgaaatgcctatcatttctctttcaccagaagtctccttggggaaggatggaagaaatattaacagcataaattgtcagtagtgtagtggggtccttccttaaggggaccgggactccccttcattcaaggggtactgggtctgtaaactggatcaagtctggaaattgattgaggggccatgwttctctgtttttataatccaaattggtcttttgtccatttgacctagaagttttctgcttatgtaaattaaggaggaatgcaataggcttcctattaattttaattctaggaacactgtgattaattagctaatgcccaaactctacacaagtcagagtatttttaatgctgctttgcctctgctgtttattacagtagctatgctcaccttgattttgatggttcagtgccaccacttggcttctgctgcctgggatccaattattcccactgtatttaaattttgtagttgagtgactgtggttcccac

SEQ ID NO: 868058 - DNA, 649 bp, Homo sapiens
tatggttttgccataggtggttcttattatttcgattcatatcttttcactcagttctcccttaggagtatttgggttatccattatcttggaatataattctatatcattttcctatctgaccttcgtatattaccacttgtgctaacaatttctctctggggttactttttattatattttattttttaaaatctttcattttaggtttaggggtatatgtacatgtttgttatataggtaaattgtgtgttatggagggttggtaatacagattatttaatcacccaggtaataagcatagtaccccatttgtagttttttgatccccaccttcctyccaccctccctgctcaactaggccctagtgtctatctttcccttctttgagtccatatgtacttaatgtttatctcccatttataagtgagaacctgtggtatttggttttctcttctgtgttagtttgcttaggataatggcctctagttccatccatgttgctgcaaaggacttgatctccttcttttttatggctacatagaattccatggtatatatatgtatctatatacctcattttatttatccagtctaccgtttatgggcatttaggttgattacatgtatttactattgtgaatagtgc

SEQ ID NO: 868059 - DNA, 627 bp, Homo sapiens
gttctatagatatctatcaggtccacttgatccagagctgagttcaagttttgaatatccttgttaattttctgtcttgtcaatctatctaatattgacagtggggtgttaaagcatcccactattattgtgtgggagtctaagtctctttgtaggtctctaagaacttgttttatgaatctgggtgctyctatatttggtgcatatatatttaggagagggatagttagctcttcttgttgaaattgatccctataccgttatgtaatgcccttctttttttttaatcattgttggtttaaagtttgttttgtcagaaactggattgcaacgcctgtttttatctactttccatttgcttggtaaattttccaccatccctttattttgagcctggtgtgtctttgcatgtgagatggatctcttgagtagagcacaccaatgggtcctggttgtttatccaacttgctactatgtgtcttttaattgggatatttagcccatttaaatttaaggttaatattgttatgtgtgaatttggatcctgtaatcatgatcctagctgtttattttgcagacttacttatgtagttgcttcatagtatcattggtctttgtacttcagtg

SEQ ID NO: 868060 - DNA, 627 bp, Homo sapiens
gttctatagatatctatcaggtccacttgatccagagctgagttcaagttttgaatatccttgttaattttctgtcttgtcaatctatctaatattgacagtggggtgttaaagcatcccactattattgtgtgggagtctaagtctctttgtaggtctctaagaacttgttttatgaatctgggtgcttctatatttggtgcatatatatttaggagagggatagttagctcttcttgttgaaattgatccctataccgttatgtaatgccyttctttttttttaatcattgttggtttaaagtttgttttgtcagaaactggattgcaacgcctgtttttatctactttccatttgcttggtaaattttccaccatccctttattttgagcctggtgtgtctttgcatgtgagatggatctcttgagtagagcacaccaatgggtcctggttgtttatccaacttgctactatgtgtcttttaattgggatatttagcccatttaaatttaaggttaatattgttatgtgtgaatttggatcctgtaatcatgatcctagctgtttattttgcagacttacttatgtagttgcttcatagtatcattggtctttgtacttcagtg

SEQ ID NO: 868061 - DNA, 576 bp, Homo sapiens
tttgcttaggttctgccctaggaggaacccgaagtgtgatggtcactgtcctgaatatcgtggaagataaagggcttggaagcattttcttatgaacaacattcacagggttctggtacacatattttaatgggattttctaatagtgtgtgacatttagatagtgctttatggttaactacaagctatcagacaaattatttatgttgatccttagaggttagtatacatgcaattattattaacattttacttatgaaaaaatggtgtcagagaggatacatggcttatttaaagtcacagagaagatctgcaaagaaaamccaagtttcccttactatgtgaaattctatccgtacagttaggacatttatcctttactgtcaaatttatggaaagagaattttactaatttttgtttgatttttcctgctgtctttattttggctttctagttgtgggcctcaaaaacagtaatatagttgtttcctgcttttcccagtgaggaatagaaaagagccagttaagtttgtaagttacagttatagtttatgcctatgtacaacaggccagtga

SEQ ID NO: 868062 - DNA, 630 bp, Homo sapiens
tagaaatagtggggtttagtgtgctagtggaaaggagtagctttagatagaagcattgcgacttcagttatattaacaggaagaaagtcaccaaaaacaggcaaagattttgactacctgtgtagatctggtagtagatatggcatatagttaatgtcatctaaaataaaatccatattaaagggaaatgtgaatgttaattagttcctttaaattgtcccatagtagttcaaatggaagttgattcaatccaaattaataaactctaaatcatggtggtataacatctacaaatgactttctaagacaaactgaaatatacttggcttttttacttttgtatatatgaaagggagaattggcyagaaactgcttttatttgctcttataatatcaatgcacagtacctcaaaacttgttacctaatttggaacaaagagaaaaaatccgaaggatttttttccaattaactgtgactcaaacggaagttatgaagtttgaattaatttgaatttcaatccataaagtatttatttcttattaactgtttattggtgaaatgaaacatagacatgagaggagaaaacatgagattgcaacctgtgtatgaatgctgtattagtccatttt

SEQ ID NO: 868063 - DNA, 648 bp, Homo sapiens
aagaagaacaaacagattgaggtatgtcttcagtcttcatttcacacatggagctaatgttgaatgtgtaccttaatgcaagaagaacaattaattcaaagactaggtatgtttaaagtgctagtctaatattttaacttgctgttataaagaaaccctcaattattttcattactcaaatgccataattaaaggaaacattcccttacagaagcttgtggaaggggcataaatgaacatcaaaaatgtatattagtttagattataatgctcagttattacattttattttctgtgaacttaattgcaatgtctgtaaactgattagtaataataacttaatgtttaatgttttagaataagacagtcacctataaattattcaaccatataatgaaatatagaagaaaattatatgtaatgataattttgctttaatacatgttaagtccagtaaataacaggagggaagtatgtttctgaggagayggcagcatttggcaataaaaataggtgtcacttaaggtgaacttactttatataaggagtttcacatgttcttatctgtgcaaccttatgatgtggtattatgacctctactctatgaaaaagagactgtggctgggctctcatagtgagagtgacagc

SEQ ID NO: 868064 - DNA, 611 bp, Homo sapiens
agacatcttgctcttctttgatttaccatactctttataattttctatatttttcatgctgttttctaggtctagaatattattccttcttacatttacttgcagatattctatttacttaaacaaagccaaggtgatgtgccacttctttccataagaagggtttctaattcttccactaaggattctgtaatggattatacatttcatagcacattatttgaacagcacatttatacaagtgtttaggtgctagtggcctgataaggaatgtagcgtgaaagagtctaagamctttatagaaatgagaaatttatagcaatcacaaagcaattggtttgtagtggctatagctttctgattgaatatactccttctctgagtggtacttaatacttcgtaattctctggcatcctttgttttctaaactatatacacacttagaatcttttgaagtcaaggccttgtttatcatctttgttaactcatagtacaatggctttcatgatgtaggtacgtttgctaaagaaacaaatatccaagttctttcgcacagctcttaaattaactataaaatagtgctctcttcatgctgatgaagaatcttcat

SEQ ID NO: 868065 - DNA, 605 bp, Homo sapiens
agcaagaggtcagaggataaaaggacagaactgtagtgaacttctctaacaggacagaaagaaggcaaggagtcagcaaaagagatgaagagagtgtctagaaaggcagaaatatgatgtgtcatcaagaaggaaaagacaacctaccagatagtagaaaacatttacaaactgtatatctgataaagsgttaatatccaaatatataagaaactcctacaactcaatagcaattttgtaaagagcaaatggtaagagacttaactagacatttctccaaagaagacatattagtggccaatgggtatatgaaaagatactcagcatcactaatcatcagggaaatgcaaaccaaaatcacagtgaggtaatctgacaattatagtaattataaaaacaaaagaaaacaaacaaagaaagtaaaagataacaagagctggcaggacatgaagaaactggaacccttgtacattttgatagaaatgtgaatagtgaagccaccatggaaaaccgcccaaagggcccacctcctaatactatcacctcagaggttaggattttaacatataaatttgaggggatagacacaaacattcagaccttag

SEQ ID NO: 868066 - DNA, 669 bp, Homo sapiens
ggacaaatacaaacaagcccagactgtgaagattgcaataaatacctaactcttcaatgcccaggcatctacgaacatccacaaacatcaagaccattcaggaaaacatcatcttaccaaatgaactaaagaaaggaccagtgaccaatcctgtagtgaaagatattcaaacaaagaattcaaaatagctgttttaggaagctcaatgaaattcaagataacacagagaaggaattagaatcctaccaaataaaaaaaaattaacacatagattaaaatayctttagtaataaagtagaaattatggagctgaaaaaggcaattgacatactgaagaatgcatcagtctcccaacagcaaaattgatcaaacagaagaaacaattagtgacctggaagacaggccatttgaaaacacagagtcagagcagacaaaagaaaaaagaataaaaataataaaggatgcctaaaagatctacaaaatagcctcaaatgggaaaatctaagagttattgcctttaaagaggaggtagagagaaagatcagggtagaaaatgtattcaaagggataaaaacaaagaattttccaaacctagagaaatatgtcaatattcaagtgctagaaggttataaaacatcaagcatatttaatccaattaagaataccaca

SEQ ID NO: 868067 - DNA, 657 bp, Homo sapiens
gccagatcaattgttttttttgttttccttgtcatgcaatgattctgtgatgggcacgaaacacaagtcaagcaaattagatcaatttagggcttgctcttgagctataaacgaagtgggtgtactatttccagctggaaataaatccagacaactgtatcccaggaaactgttcacagtgctcttgaaaccacacgggagaaygtacctaagagtgtcatgatgctaaggaaatgtatgcaaagaatgaaagcaaacaaacaactcccagtctgtaatttaaacaccaaattaaggtttctctgaccctttaattatttagctgttcagagaattttaaaaagtcctttgtttgaattaatctagttggagtagcattgttattattattgtttttgtgacatatgaagtacacatttcagatatctaatagttttctctaagactaccacatcaatgttgctgataatttcattttaagaggatagatctacactaaaaggaaagtaagtgcaacaaattctccttatatactgaatttctgtcatgactacgtccacaagtgatagtcattttttaaaaaatgagaaaggtcataccatagtaatgacatcaaatagcatagagaatctgtgcaactatattgaattctgcatc

SEQ ID NO: 868068 - DNA, 639 bp, Homo sapiens
aactgttagcaaattgatcccagggtgtactaagggattggtcatcatgttcaaggttttattacagaaatgaaagtttgtcccagtactggaaaaaaaaactatgaatacagttaaaggagagacataattaaatacatgattgtgtcaatggatacagaaaaatgtttgactagaagttagatgaaatgtatttgaactctctgcagttggtaaagattcttttccacatacccttgtcaartatattaaatgttcaaatataaattcactgccatccaaagaagaataagacagaaatgctagctctcatcactataatttaatggaattttgaggggtccaatcttctcctacaatagacctctggcaaaaattataagattgaggatgaagacaaatatgctgaggatggtagagggaattcaagaacgcacctgagtctcagataaaaataacattggtgtataccctctagacatgtcatgtggcaacagtaaacacatgtttgtttaagccacaattagttgggttttctgtaatatgccaatacatgtcttcctaattattacaatgcctaatcatgaaataattaaaattaacaaaagcattaaatactgtggccaaataccacacaag

SEQ ID NO: 868069 - DNA, 649 bp, Homo sapiens
tgtatattataaatcattctactataaagacacatgcacacatatatttattgcagcactattcacagtaacaaagacttggaaccaacccaaatatccatcaataatagactggataaagaaaacgtggcacatatatgccatggattactatgcagcaataaaaaggatgagttcatgtcctttgcggggacacggatcaagctgcaaaccatcattctcagcaaattatcacaagaacagaaaacaaaacacagcatgttctcactcataagtaggtgttgaacaatgagaacccatggacatagggaagggaacagcacacactggggcttttcggggggtgggkggctaggggagggataacattaggagaaatatctaatttatatgatgggttgatgggtgcagcaaaccaccatggcaggtgtatagcaatgtaacaaacatgcacattctgcacatgcaccccagaacttaaagcataatgattaaaaatatatataatggatttaatgtttgtaaaatatacaatttttttaggatatacattaatatttaaacctattaaagttaatattaaatattaactttattatttaaaacaaaaaagaggacaaaatataacccactacaacaaaagcaagta

SEQ ID NO: 868070 - DNA, 621 bp, Homo sapiens
acactatttacacaaaacgcttctgatacaaaccattcataacttcttatgaaagaaaatagtcctaaacacataaacaattacagtgcagttaacatttcaagaaccactgactctgttgggcagtgcttccccatccccctcagtagcacactgaacttttacatttaaccagaataaggctggtgttcaccaaagtcatggatagttagtaaaagtttatggtcctacagtcttaaaaatttttcattttgtaaaacttctagagaataattsaatcaatataataggaaatttggcttttcttttactgaatgtacattagctaatacaaaggtcatgacactgattcaaagtgaagttacgatatcaagaaactgtatgtttcttgatagtagctaatctttttttcactgccaaaagatgtattcttgctcaaatgctatgtaaaggagactcatgaatgaagctcatgcaacaaggccaggcaatgccttttagccatgacactaccaacttctggaagatcaaaagtaggaacaccgcatgtatctgtgctaggttatgtaaacataggctctatcaccaaacacataaatgctaaatatttggggaactaca

SEQ ID NO: 868071 - DNA, 455 bp, Homo sapiens
gcaggataaacacaagtattaatgtatgtgtttctgtgggtgggaaaatacgttagagcttacctcaaattctaaaaggaagtatccacaatacctatattttttaagtcaaaataaagcattcaattacaatgctgcataattgatctggtaaatattatacaagtcatttccatatcaaactctatagaattttacacaccaaactctcagctttcattctctctgcattgctcttgagtaaccctgttcaayagaaacagaatgagagcctcctatgatattttaaatttaagagaagccacattaaaaaactaaaaatgtgagttaataattaaaggtgaattaattttacgaatatattttattcaccaaaatatatccaaaatgtgatgttgataggtattcactataaaaacagtaaaacattttctttatttcataccaagtcttta

SEQ ID NO: 868072 - DNA, 493 bp, Homo sapiens
gatggaagggttaggaattccttagagccaagttcacagttaatgacagaaacatgtagtaaatgatacaggctttgtagcttttagaatatattaggtcaacaaacattttccaggtcactatctggagcagatgcatkccaattagtaggctcagtgggagcctcacccatcccataacgtcctttattaattcttatctgggtgtgccacatatttcatttgctttactgtttcttaaatatatttggcctttaatgtttaaatatcattattgtgggtaaatcagtgcagttgaattgcttttagaagattcgggactgtgttttctttgatgattaacattgaaaatgtgaacttgtaacacatttaaagtgaggaaattcaacgttaatttctatggtttttatcacttttgaaaaaaagtcatttttcctttgatgataacattggaaatgggaactggtaacactcttaaagtgggaaaacctga

SEQ ID NO: 868073 - DNA, 645 bp, Homo sapiens
ggaaagaggagctgttctaagttagacacaggcatggaatattgacttcacagagaggtacatcttatcatataagaatttctttaacaaggaaccactaaaaattcagagacaaagaaaagtagaagtaaaaattaaaaaatgaaatgaagtaagtgcagaacagattaaatcagcttcctagcactcttccaacctgtgaaacttttatagctccctgaaaatggataagaaaccaaagaggtggcaaaaggagtttaaataaaaactgtaaagtaagtagggaatgtgggagaagctgcagtgaagaaagcctacagaataataaccctcatgctcttgactatggtaaggaagttstctggttccagacactagaacctgtttaccagacagattctgcaagggaggatggactgtgtggaaagactgtttcgtgatggtgtgaaatatcttttatgatttttcaagtatcttacatttattccttaccaaattaattattctaatgagtgagtcacctctctgcatgttcagtacctaaaaaggagttctccatttgcagttgattatttattttaaatgatgcttcactttagaagaaatatacactgtatagatgtaggtcagtctttccatgacttg

SEQ ID NO: 868074 - DNA, 589 bp, Homo sapiens
ggaaaccatacactgggaaaagcatgtgatggaactgcaacactgaacctaaagaaaatgttgagagtagtgtccaaatattcaatttgctatttggaacagggattatgaagtttatgacttcaaaaaatagaactagatctatytatccagcagttatatattgagcacctactaagttcacatgctgttttaggcccccaagacaaatatactagctaactagacagtgaaaggaggtttcagaaaggtgacttccaagtcaataaaaaagacttccttaaaaattagaagctatctgaggccaggagtggtggctgtcacctgtaatcccagcactttgtggaggcaaagtgggaagatcgcttgaggccaggagttacagtttgtactgagctaatatcacacacggcactccagcctggatgacagagcgagaccctgtctgtgaaggaaaaaaacaagctatctgaaggtagactggtctatctcatgaggcgatgaattctcagccattggggttgtacaaaaacagtctagcacatagaataaactggcctggggcattttagaggagaatgtgtatggg

SEQ ID NO: 868075 - DNA, 624 bp, Homo sapiens
agttgacatgatttagcatttgaatcaagcacccacttctgtatgttttgttatgtgataatgaaaaggactctatttgtttaagccaatattgcacttcctgttatttcagacaaaagtatcttcactgctgcaacttctcatgggaataaatatttgaatttgattttgaactatgaataggtaattttcaggcagagaaaagaagtcagggagatttacgcagaaatatcaggccgatatttcaaaaatactaatgtatatagaaaattagaatttatgtgtgcaatggttggaaagaagatcaaagagagtagttgacgcaagattgtgtatgttaagctctggtgatcatgcwgtcttgtggcaactaggaacacagttgggatggagagttacatgatgaaatttatttttttgatgttgctgactgtctttgaggatggacataagctggaagagattgatgtcagagataaccagtttcttaaaagttcctaagaggttcacagataactgattcttcacataacttgcagtgtatgttgtggtacgcctcctattcccatccttcaggactgaggtattcatacccttggctgtgaggagtggctatagctgcaa

SEQ ID NO: 868076 - DNA, 623 bp, Homo sapiens
aaatgctggcaggattgatataggaaaaagtgccatttcagtttaagtctaaaagcgaaaaaaaaaatcctgcttactccttaggggatcagctttttgttctattcaggccttcaactgattggatgaagcccacccacactaggaagaaaaaattgttttactcagtctactgattcyaatggtaacatcatccagaatcaccctcacagatgcactcagaataatgtttgaccattaatctggcacgcagtgtcccagtcaaattgacacaataaatttaccatctcagggttagaggctagcactatttaattattttgtgcaaaattgttctagctttggatatttgggtctctttttatttgattcttctttcctttttacttgcccaaacttatgttttagcactttccaactttctgatgccacagaaagctctatggttaacttctattttctctttctttgtcctagaactagccacatctctaaggagctctcattcctgttaatgaagaatgatatttacaaaccaaaatccaggaactaggtatgctcattactgctggggtatacttcttttaggctctcttattggacaaagctgggtcatatttctt

SEQ ID NO: 868077 - DNA, 584 bp, Homo sapiens
ttttgcccattcagtatgatattggctgtgggtttgtcatagatagctcttattattttgagatatgtcccatcaatacctaatttattgagagtttttagcatgaagggtggtttgagtacccagtgctcagtaagccaaacactgacacattagcacttaggagcagagaatgtttatttgatttggccaaagtgaaggggcaggaggcaaactctcaaattcaacctgcatttgaacataactggggattttatgagtaagataggaatgcgggacatgagatttctggatgatcaaagctgcttgcatcgctcagctgatcaaacttctggatgccatcaaggaggtctgcatgacctaaggatcattgttgtttaagagaaaaacatgttmtttagtcttgcaagtagcccctgggggttaaaatatgaagttaatcaattattagtgtctaccctctacctaaatgactacatgacagcaatcatgaatgaaagacgaaaaggacaaaaagaaaggaaaataagtaaaacaaacatcttataatttgtataatataggctcaattgcaatgcccttta

SEQ ID NO: 868078 - DNA, 567 bp, Homo sapiens
cagggctcaagtgatcctcctacctcagcctcccgagtagctgggactacaggtgtgggctgccacgcccagctactttttgtattttttgtagagactgggttttgctatgttgtgcaggctcgtctcgaactcytgagctcaagcaatccacctgactccacctcccaaagtgctgggattacaggtgtgtgccaccacaccaggccagaaaatatttttaaagactgcagattccttagatgttctaatttactgactcaagtcttgaaagtgggagaggcagggtggggagcaatttggaagatatattttaaatgttttccaggtgatttggagtacagatagtatagtccttgagttgtcaattggaagtcactgataccacacggtgagtactacttgtactagtctacaggtatagaaaaaaacagaacaataaggttatgacgtgagagctttttgtgttgttgaaaatgaaagagaagttgaatttggcaaaaatgagaagggagggcatttcaggttggagaaaaaattaattaagagatataaacattctgattt

SEQ ID NO: 868079 - DNA, 567 bp, Homo sapiens
cagggctcaagtgatcctcctacctcagcctcccgagtagctgggactacaggtgtgggctgccacgcccagctactttttgtattttttgtagagactgggttttgctatgttgtgcaggctcgtctcgaactcctgagctcaagcaatccacctgactccacctcccaaagtgctgggattacaggtgtgtgccaccacaccaggccagaaaatatttttaaagactgcagattcyttagatgttctaatttactgactcaagtcttgaaagtgggagaggcagggtggggagcaatttggaagatatattttaaatgttttccaggtgatttggagtacagatagtatagtccttgagttgtcaattggaagtcactgataccacacggtgagtactacttgtactagtctacaggtatagaaaaaaacagaacaataaggttatgacgtgagagctttttgtgttgttgaaaatgaaagagaagttgaatttggcaaaaatgagaagggagggcatttcaggttggagaaaaaattaattaagagatataaacattctgattt

SEQ ID NO: 868080 - DNA, 663 bp, Homo sapiens
tgggttttgacaaaacattttgacagaaatgctgatagtgatatgaacaataaggtccaggctgaggtggtctcagatgagatgaggaacttgttggaaactggaggaaaggtgactcttgttacattttagcaaagagactggtggcattttgcctctgccctagagacttgtggaactctgaactagagagagatgatttagggtatctgatggaagacatttytaagcagcaaagcattcaagagcagacttgggtgctgttaaaagcattcagttttaaaagggaaacagaacataaaagttcagaaaagttgcagcccgacaaggcaatagaaaagaaaatcccattttctgagaagaaatacaagccggctgcagaaatctgcaaaagtaatgaggatcccaatgctaatcccaaagacaatggggaaaatgtcttcaggtcatatcagaggtcttcatggcagcttctctcatacaggcgcaaagatctaggaggaaaaagtggtttcatgggccgggcccagtgtccctgtactgtgtgcagcctagggacttggtgccctgcatcccagctgctccagccatggctgaaagggccaaaatagagctcgggccatggcttgagggttcaagcctcaagccttagcagcttccatg

SEQ ID NO: 868081 - DNA, 663 bp, Homo sapiens
tgggttttgacaaaacattttgacagaaatgctgatagtgatatgaacaataaggtccaggctgaggtggtctcagatgagatgaggaacttgttggaaactggaggaaaggtgactcttgttacattttagcaaagagactggtggcattttgcctctgccctagagacttgtggaactctgaactagagagagatgatttagggtatctgatggaagacatttctaagcagcaaagcattcaagagcagacttgggtgctgttaaaagcattcagttttaaaagggaaacagaacataaaagttcagaaaagttgcagcccgacaaggcaatagaaaagaaaatcccattttytgagaagaaatacaagccggctgcagaaatctgcaaaagtaatgaggatcccaatgctaatcccaaagacaatggggaaaatgtcttcaggtcatatcagaggtcttcatggcagcttctctcatacaggcgcaaagatctaggaggaaaaagtggtttcatgggccgggcccagtgtccctgtactgtgtgcagcctagggacttggtgccctgcatcccagctgctccagccatggctgaaagggccaaaatagagctcgggccatggcttgagggttcaagcctcaagccttagcagcttccatg

SEQ ID NO: 868082 - DNA, 585 bp, Homo sapiens
ggaaaaataggaatgcttttacactgttggtgggagtgtaaattagatcaaccattttggaagacagtgtggtgattcctcaagtatctagaattagaaataccatttgacccagcaatccaattactgggcatatacccaaaggattataaatcattctatgaaaaagacacatgcaaatgcatgtttattgcagcactatttacaatagcaaagacttggaaccaacccaaatgtccatcaatgatagactggattaagcaaatgtggcacatatatactatggaatactatgcagtcataaaaaaggatgaattcatgtcctttgcaaggacatggatgaagctgggaatcataattctsagcaaactatcataagatcagaagaccaaacactgcatgttctcactaataagtgggagctgaacaatgagaacacatggtcacagggaggggatcatcacacactggggcctgtggggagtggggggctacgggagcgatgagaaataactaacgtaggtgacgggttgatgggtgcagcaaaccaccatgtatacctatgtaacaaaactgcacattctg

SEQ ID NO: 868083 - DNA, 662 bp, Homo sapiens
agaccatggactgatgccggaggaagatgggaaccttgcatggggtttccgagcaacaagactccttacagccctcaagtggttcctggggaaggtgtgagctaaataggcatggagtggcctactgtcgccatgaacctctggaatcctagctgcagaagacctcataacccccacagacatttgagctggcagggaaagctgcttggaaggttggcagggacagaaatcaagcctgtagggagcccaaagggtttggcatgaatacaactgcagtggagcacagctarggatgcccatatgccaaggattgccatgctcctctaggtggctttggcttttgttgactgtcaaatatgaacagaacagggccatcttgcctgtgggacaggacagccactctcatagctcttttgctggcagatcccaccttcttattcaaattcatgaaattcaggtaactcctgtaagatactactcaagatgaccatccccaagacacagtcctcagattctgcaaggtcaatgtgaaagaaaaaatattaaaggcagctacagaggaggggcagatcatctacaaagggaatcccaccaggccaacagggggtctttcatcagaaactctgcaagtcagaagagattgaagaactgtattcagcatc

SEQ ID NO: 868084 - DNA, 662 bp, Homo sapiens
agaccatggactgatgccggaggaagatgggaaccttgcatggggtttccgagcaacaagactccttacagccctcaagtggttcctggggaaggtgtgagctaaataggcatggagtggcctactgtcgccatgaacctctggaatcctagctgcagaagacctcataacccccacagacatttgagctggcagggaaagctgcttggaaggttggcagggacagaaatcaagcctgtagggagcccaaagggtttggcatgaatacaactgcagtggagcacagctaaggatgcccatatgccaaggattgccatgctcctctaggtggctttggcttttgttgactgtcaaatatgaacagaacagggccatcttgcctgtgggacaggacagccactctcatagctcttttgctggcagatcccaccttcttattcaaattcaygaaattcaggtaactcctgtaagatactactcaagatgaccatccccaagacacagtcctcagattctgcaaggtcaatgtgaaagaaaaaatattaaaggcagctacagaggaggggcagatcatctacaaagggaatcccaccaggccaacagggggtctttcatcagaaactctgcaagtcagaagagattgaagaactgtattcagcatc

SEQ ID NO: 868085 - DNA, 563 bp, Homo sapiens
acataatctcagagtaatttctctagccctttctaatagaccagaattttgtttttattttattatgtgtttacagcagatcagcccttctgaatatagttgttagtttgagtaataaattgagaatagattaactgagataagcccagcttagatccaggaggaactggctgaaatgttgtaggtagtggtgggaagttgtcctggtaagaaattcccacagattaactagaatttactacacatcactattttatatctggttttgatattatgctttctaacgggatggataacaacacttcccttcctgtggattagagagaaatcttatgagtttctccaaagagtgcaaaaacttcaggyctatttatttccaattataggctttgacttttacatcaaacctcatgttcatttttaaattttgaatcatcagtgggttttaaaatattgctaattacaggaggcataaatgttaaagtgttaaaaatactaaaagtgaacaaccttccagaaaaaaatgttttcagttgaatttctcaactaatgaaaatgacaat

SEQ ID NO: 868086 - DNA, 642 bp, Homo sapiens
tcactttatggttatgtggagcacagtagctgcctctgaataaccagctcgcaactaccactgcttctgctgactgccgaaagccttagcatcatgcagctgatggtttagctttttggacattggcatgtgagaaaaaacattagaagaatgttaaatatgacttgtcaataaatgaaattrtaattttgattggtaatatttcagtaggcccgtggaactttctttgcaacatgaacttctgcctccttgctgaggggcccagagatctactttgccgtcatttatgtcagagtaagactctttagtgcagcccaactatgctgtcaaccccaaatcccaagggatacatatgatcaccatatttattgcaatggcccaggcaatcatgataccactgcctctaatgaaactaaagtgcacatgtcattttggagatgctacttgttcaggcagagttgcctgtcagctgtctctggccaagcagtacaacctgcaatttagttaacaaactgagacatcatagaaatcagtgctcttaacaggcttccttgattcacttgggttttactgcctgtcatacatatcacaagcctccagtaaagtggcactggtgggaggaggtcccagtaggattgaaaa

SEQ ID NO: 868087 - DNA, 590 bp, Homo sapiens
accctattccctctgagcaccagcatgcagtaaaactggcctctgctgtgcttgctccttcccaaattccttggagagaagagacctggaatgaagaaacaagagcttaagatcttctcttttggcttaagaggcaactcatttaatcaacaaaggaataaataatgtcaacataatttgaggcaagatttggcttgctaattaattgaatttagattcttcaatatttattcagttttcagcatatcatgtgtgtgtggagttagcagctttgtttctatttgaaggtaaatttctaggggccatgcacaatgtattctcttcattttgtttagtgttaaaagaagatagatggagtaatayagtacaattcatggccatgccttcagaaaaagattattgcacaattttccactgcaggatacaattataagtactgatgttttataagagcacccgatcttcagaaattaaaggttatttaatttctcatggctccagattgagtgtagagggggaagtgggcatggacatactgttttttatagccatgcacagggcttggtctataggaggggctcaactaactg

SEQ ID NO: 868088 - DNA, 672 bp, Homo sapiens
ttccagagcccaactaggctcaggagagactccagcacagccacgtggtggaagaagacttagggacagaaaaagggaagtgatgttaagaaaacttaagtaagctatggaagcagcgggattagttatagctctgtgtttgccttatttgaacacagtttgaacagttgcccccctttgattggctaaagcttggtgattggcacaagagtaggttatagtctgtttaccccaccaattagkttgcagttcactatgtactgagatacctttaggccgaatttaaaatatgtaaggaggcagctttaggctaaacttggtttaacagatcgcaacactataaaagcagcctgcaagagaaaggagataaaacaagttaatgtaataaactcttttacattgtgacttaagtttccaagagaatcacatcagaaatagcatatattaatgattatgtaatggtttgtagccattttaagtgtgagcagttgatggtttaataactagactactgtttgaatgcttaaatccaggggtggttaagtctggactatttcatgactaggcagaacaaagtaagtcctaactttacatgacttgtaggaagcaaacacaaatcggtaaatattgaataatgaaaatgtctatgaaacttttgccaggataatataa

SEQ ID NO: 868089 - DNA, 572 bp, Homo sapiens
ctgaattttgtgtactttctgcatgaagtcttaatagctggcttcaataggttaaacatgatttgttaagctaaataaaatattgataaaactgattatgctacctataaaattgatgtgcaactgagatgtgctagtaatattagagtaaaacatttttggaaggctcatataattgctagctcactataactccattttaagagaaagagggaacaatcttatatcgttgatatgtaaaaacaaagccaaactcaaacaactcccagtttatgtcctagagatggtccatattcagcccaatcatttatgtttaaaatacacacgtgatgttttgaaagataattcaagtctaggactctgatcacacgactttgagtgatcctaaacaggaaagaaagacactctgttgtrtaaaggattataaataatggtaaaaacaaacaaacaaaaaaacagctataacaattacttggccagaactattccttattcatttgaaagtctattttgtatgaatttgacaaaataggaatatattatacaaaagtaaataactggcaacaattgaa

SEQ ID NO: 868090 - DNA, 682 bp, Homo sapiens
ggtgcctagtacacagtaggcagccaataagcaaatgaatgagttgtgtttatgaattcacacctaaagttaaggtgtgagtatgctttgtaatattaactgtgggtttctcttttctgattataggaggagacacattatggaaaaattggtaaatatagaaatgtacaatgatgaaaactccaattatctatagtatgtatatatattttaacactttatatggctctatgaacacaatgcctgtaaagccacaggaataagcccactggtaggaagctcagggccatggaggacttgggacrtttattattgggcaggtctgggaatatctacaggattgcattcaatgcaacgcatgcctgctaaaggcagatggtttggtactagtggcaactttaagctaaccacccatttccggaggtcttcttaactgcctgtttcccagctagaactcttttgaagactcttggtataagcacaagtgagagcaggaaagaggaaatccccacttggtttccatagtttggtggcatcaattctcttcatgtggcagatctctgccaggacagcggtaatagaatttaaaagatttaatcactggtttattttccaaggaggtagagaagaaaaagaaggtaagaaaaagtcactgaggtccagcagggaacagaagttctct

SEQ ID NO: 868091 - DNA, 618 bp, Homo sapiens
ttcattgctggcgagcagctgcattcctttggattgggagaggtgctctgatttttagaatgttctgcttttctgctctgttttttccccatctctgtggttttatctacctttggtctttgatgatggtgatgtacagatggggttttggtgtggatgtcctttctgtttgttcattttccttctaacattcaggaccatcagctgcaggtctattggagtttgctggaggtccactccagaccctgtttgcctggggatcagcagcagaggctgcagaacaacgaatattgctgaacatcaactgttgctgcctgatygttcctctggaagctttatctcagagggttacccggccctgtgaggtgtcagtctgcccctactgggaggtgtctcccagttatggtactcaggggtcagggacccacttgaggaggcagtatgtccattctcagatctcaaacaccatgctgggagaaccactactctcttcaaagctgtcagacaaagacatttaagtctgcagtggtttctgctgccttttgttcagctatgccctgcccccagaggtggagtctacagaagcaggcaggccttcttgagctgcagtgggctcca

SEQ ID NO: 868092 - DNA, 565 bp, Homo sapiens
  misc_feature 49: n = A,T,C or G
tccccttgctccatgtggctctcaggtgggctgttgcaccagcctactnttctttgctctccatgggtaacaccaactgcctagtcagtcccaatgagagaacctggatacctcagttgccagtgcaggattcacttgctgttttcattcttctcagtgggagcctctgacaatggctgtttctagttggccatcttggcccctcctctgcagtgccttttttagtaccttagttgttcctgttttcttcagtcatatcacgtttattatcaatagtcttraatacttctacataccactctcctaacagatgatccaaaataagagaggtaaaattatgctgagtagcactcagagtcgaaattaggcctctgcaaatgagcttccaagagaataaatgagcttccaatagaatcagtggcgaagatctggacaatagtgatgatctttcctgcagctttggctgagagaaaataaaaaacaggattgagggtaaagaataatagtcttcagattcccagaaatagattgacaattgcacagccatggttagtgttagggttag

SEQ ID NO: 868093 - DNA, 613 bp, Homo sapiens
atccagttggccagtctgtgtctttcaattggggcatttagcccgtttacatttaaggttaatattgttatgtgtgaatttgatcctgtcattatgctgctagctggttgttttgcccgttagttaatgcagtttcatcatagkgttgatgttctttacaatttgctatgtttttgcagtggctgatactggttgttcctttccatgtttagtgcttccttcaggagctcttgtaaggcaggtctggtggtgacaaaatccctcagcatttgcttgtctgtaaaggattttatttctcatttgcttatgaagcttagtttggctggatatgaaattctgggttgaaaattcttttctttaagaacgttgaattttggcccccactcccttctggcttgtagggtttctacagagagagccactgtcagtctgatgggcttccctttgtgggtaatccatcctttacctctggctgcccttaacattttttccttcctttcaaccttggtgaatctgaagattatgtgtcttggggttgctcttctcgaggaatgtgtttgtggtgttctctgtatttcctgaatttgaatgttggcctctcttgctaggttgg

SEQ ID NO: 868094 - DNA, 613 bp, Homo sapiens
atccagttggccagtctgtgtctttcaattggggcatttagcccgtttacatttaaggttaatattgttatgtgtgaatttgatcctgtcattatgctgctagctggttgttttgcccgttagttaatgcagtttcatcatagtgttgatgttctttacaatttgctatgtttttgcagtggctgatactggttgttcctttccatgtttrgtgcttccttcaggagctcttgtaaggcaggtctggtggtgacaaaatccctcagcatttgcttgtctgtaaaggattttatttctcatttgcttatgaagcttagtttggctggatatgaaattctgggttgaaaattcttttctttaagaacgttgaattttggcccccactcccttctggcttgtagggtttctacagagagagccactgtcagtctgatgggcttccctttgtgggtaatccatcctttacctctggctgcccttaacattttttccttcctttcaaccttggtgaatctgaagattatgtgtcttggggttgctcttctcgaggaatgtgtttgtggtgttctctgtatttcctgaatttgaatgttggcctctcttgctaggttgg

SEQ ID NO: 868095 - DNA, 594 bp, Homo sapiens
ttttttcattgaattttttggtacctttgttaaaaaacaattgaccatagaagtaagggtttatttctggattaccaattatataacattgatatatatgtctgtccctatgccagtaccacactttcttggctactttatagtatgttttgaaatcagaagtatgagccttacaattttattcttctttttcaagattgtttattttgggttctttgtatttccacatgaatttttggatcactttgtcaatatctgcatgtaagccagcagggattttgataaattgtgttgaccttatagattaatttggaaagtattgaatttttaacaatatgtgtttcctgagtcatgagcataaattgtctttccatttgtttaagattttaaaattttkttcagtgatgttttatcttttttgacatacaactcttacgtatttttggttaaatttaatactaagaattatgttctttttgatgctattgagagtggaattatttccttagtttcattttcagactcttcactggcagtgtatagaaatgcaattgatttttgtgtggttatgtactgtgaccttgatgaagtcat

SEQ ID NO: 868096 - DNA, 658 bp, Homo sapiens
ctgcctttgctctattctgcccctccatttgctattgacaagcagtcttccatagtgagacagacaattttgcactctgcagctatgcttttgattgggcatattctagtgcagaattcagaggcgccccacccttgatccctagctttccgttgtgcttgttcacattcacaagtcagcccctgttcacaaaagcttggatctctaggcgctgtggatagcatgtgaaaaatctggaaagaaaaataattatccattttaggcatgtctgaattayaaagtttaagaaagtatgtagcaatagatgagtctaaaagagttatgcagttgtcacgtcaggaagtatcttttaaagccatacataaaactttatacactattccgtgagaaatggggaaatttgaaatgttttaaatagtgcatcaacactttcaattttggttaataaagtgaacaaaaactgctgggtggaaaaaagattgaaaagagactaaagtataatttccagacaggaaactattgcagtaattcatgtgagagataatgatggagaaagggatatgtttgagcaaatgggtagcgcagtttactgaagcaaggagcacaaaagacaagtcaggtatttttctcagtaaagtgaatgtgaagagccattttc

SEQ ID NO: 868097 - DNA, 632 bp, Homo sapiens
gaaactattgcagtaattcatgtgagagataatgatggagaaagggatatgtttgagcaaatgggtagcgcagtttactgaagcaaggagcacaaaagacaagtcaggtatttttctcagtaaagtgaatgtgaagagccattttcttgagtcatggacgggaaagtaacaaatctcatattcatgcagagttatgaatcatgagacttctaatgtaacacttttaaaaaaaaaaccttcttcgcaagggtaatttgcagtgcttctgaataattacatacaacatgtcaagggttctaattacatatttggtcctcgcaacaagtcaataatctgcattgcacattttattctgcaggttttacaaatatctttacttttcccttgggaaaactgtatctgaggcaggttattttccaggcccaagaccaygcctccaaaaaacacaaaaatttcaaaccttgaatgcaaaatcaagttctcagatataaaattatgtgcttttcagtctccaatattgcattgcctctcaaaagcaactgttaaagactacccaactattacatattgtctgattcattcaaacagttaaatgttactatttaaaaaccatttctcactgacattaatcc

SEQ ID NO: 868098 - DNA, 544 bp, Homo sapiens
aaaatactctatcataacttttagatgttttagatcagccccatggtaaccacaaagcaaagcattacagtacattcacaaacgagaaagatgaaatcaaaacttagcatacagaaactaattaaattacataggtaaacaacaggagaggaagaaagaaacaaaggatctataaaacamccagaaaacaataaaaaagtaaggaataagtccttatctagcaataataatcttgaatataaatgaataaactggccaatcaaaacatacagagtgactaaaaggtcactaaatgctagtattttttataaaatggagaatttaaaggagcagataactgctagagttttgttcccaatgtaagtagaagtcttgatgcatattaagcactccattaaacattgtattttttttttcctttcaaactctttggtccttatgattctgacactctaacattggagtattgtatcataatgatctagcaggctattataaacaactatatgccattgaattcgataggctagaggaagtttataaa

SEQ ID NO: 868099 - DNA, 544 bp, Homo sapiens
aaaatactctatcataacttttagatgttttagatcagccccatggtaaccacaaagcaaagcattacagtacattcacaaacgagaaagatgaaatcaaaacttagcatacagaaactaattaaattacataggtaaacaacaggagaggaagaaagaaacaaaggatctataaaacaaccagaaamcaataaaaaagtaaggaataagtccttatctagcaataataatcttgaatataaatgaataaactggccaatcaaaacatacagagtgactaaaaggtcactaaatgctagtattttttataaaatggagaatttaaaggagcagataactgctagagttttgttcccaatgtaagtagaagtcttgatgcatattaagcactccattaaacattgtattttttttttcctttcaaactctttggtccttatgattctgacactctaacattggagtattgtatcataatgatctagcaggctattataaacaactatatgccattgaattcgataggctagaggaagtttataaa

SEQ ID NO: 868100 - DNA, 608 bp, Homo sapiens
catggcagaaggagaagcaagcacgtccttctttacctgatggcaggaatgagaaatgcagagcgaagggggccagggaagtcctttataaaacatcagatgtcatgagaactcactcattattaggtgaacagcatggaggttaccaccccatgattcaattacctcccaccaggtcccttccacaacatgtggggataatgtgaactacaattcaagctgagatttcggtggggacacagtcaaatcataccaacaagtagctaccatctttccaataaagaaaagcccaggaccagatggcctcatgactgaattctacctaacattaamaaaaaattattatttccagttttcttaatctcttccaaaataagaaggtagtgtgtaaactttcaagtacattttacaagggtgtcaccactgtgacatctaagccagacagatactacaagaaaattcaactacagatcagtatctctgataaacattgatgcaaaaattatcaataaaatattagcaaactgaattcaacaacacatcaaaaacatacattatgatcaagtgggatttatccctggcatgcaagattggtttcacatatgcaa

SEQ ID NO: 868101 - DNA, 634 bp, Homo sapiens
cacttttactctcatggctgtcatttcagcttggttgagcttgatctctttcctctgctgcaatagctttgaataaagtctttcttgcctggttaacttacccagtgtaatttgcctttgacaaaaagacccttgaccggtgtaagaagactgacatgcagaatttttgtctctgctyggcccaaaagtaatgtttttgctttcatgaatttccagttcataaggtcattttcagaagactagggataatgttttcttaaatttgggagcttatatttcatttgcataaagaccccagcaaagacctttagttttctcagactcttaagtacatacaaagtcagtgtgaatcatgcagaatgagaatgacaatgacactgatggatgataacttcatagttttagaaatgaaacatcttaatgagaatgaattgaactacatggtaggaaataaactgatttaattctctaaattgatgtccccatgcccaagcaagtcctcccatgtatgtcccatattcttaatgtgttaaagggatcagccaatgagatgaataatactaaacacacacaaacacacacacacacacaaagttaaaaagtgcatttctatcttttggaaatctttcatgaa

SEQ ID NO: 868102 - DNA, 581 bp, Homo sapiens
cttgcccctccctagttcccgttgtcttacacattgttacatttcttcctggctatataaatcccccagttttagctagtcagggagttgaatttgaaactgagctcccatatccttggctgcagcacctgatcaaagccttcttccttgtcaataatcattgtttcagacattggctttctgagtggtgaaaagcaggacctagtccaaacccttggtgttttagtaatacaaggatgagatactagttcttccagggtggaaggccaaccaatcaactttccatcaagaacctagttggtctctgtgaggaatatygcctacggtcattctctgttaatggtgatggacactcaagggctgcagtggttagcttggtcactacacacccactgtgtctgccactgcagccactctcttccattggcaagttctggagtcgctgatgaggaaggatggataatgtcagatggttgagttctatcttctgcttagctattcggtgactgcccctgagtggatgagtggatgcctgctagtgagcattaagcatgtgctgtgacagtcctcaaacttggtga

SEQ ID NO: 868103 - DNA, 640 bp, Homo sapiens
gactagaaagcagcatcaggagttttccggagtgataaaaatattctctatctttttagaggcttggattacacaggtatgtacatggtcaaaacttatcaaaagataaacttacatcttgtgcatcttattgtatgtgaattttacctttaaagggaaaaaatataacatattatactcaaaattacgtgcttgccgaagcatttaggggtgtactgatgtcagcaacttactgttaaaacatcagaaagtaaaattggttaatacatgaatagcgggacagataggtggctacaattgtaaataaatactaattgtaaaatttaaatggttagtatttggcaatactaattgtaaagtctaaatggttagtatttggcggccttaatawgttcatgttcctatgaaggaatacctgaggttgggcaatttagaaagaaaacggatacactccagtctggacaacagagagagaccctgtctcaaaaaaaaaaaaaaaaaaaaaaaaaaagaaagaaagaaagaaagaaaacgtttattacttgggtcacagttctacaggctgcacaggtagcatggcatcagcacttgcttctgctgagggcttcaggctgcttccactgatggtggagggcgaagg

SEQ ID NO: 868104 - DNA, 609 bp, Homo sapiens
agtgtattacccagagcatgtccagatgtttttcagtttcctgactttctgatatgcttcccctggagagatttgtacaaatctttgtaataaaaatagtcaatcaattgtggccaatccaattataaaacaaggaggagatcaatcgraagctttgttgcaatgaatattaatatatgtgtgtgtgagtgtgtgtgtgcatgtgcacacacatacacttttattaccaaaaaaaggtttaaactagatgaaaaaatgacttgaaagccaactagaatctgtgtgttccaaggacaggaaggtgcccatctaccagcctccattttgcttcctccattatttgtcttctcctggaacactgctatcagtatgtaaaacatgctccaccttctactgcattaaagtacccttgaccccacatctcttttcacaatcaacctatttcccttttccccttacagaacaatttgtccacacacagatgatgtccacttctttttttttaaattctctcttcattcatctctgatccagttgctgaactttgcattttacaaaaccctgtcatcaagttccattatctccctgccactcatatcactgcgtttt

SEQ ID NO: 868105 - DNA, 609 bp, Homo sapiens
agtgtattacccagagcatgtccagatgtttttcagtttcctgactttctgatatgcttcccctggagagatttgtacaaatctttgtaataaaaatagtcaatcaattgtggccaatccaattataaaacaaggaggagatcaatcgaaagctttgttgcaatgaatattaatatatgtgtgtgtgagtgtgtgtgtgcatgtgcacacacatacacttttattaccaaaaaaaggtttaaactagatgaaaaaatgacttgaaagccawctagaatctgtgtgttccaaggacaggaaggtgcccatctaccagcctccattttgcttcctccattatttgtcttctcctggaacactgctatcagtatgtaaaacatgctccaccttctactgcattaaagtacccttgaccccacatctcttttcacaatcaacctatttcccttttccccttacagaacaatttgtccacacacagatgatgtccacttctttttttttaaattctctcttcattcatctctgatccagttgctgaactttgcattttacaaaaccctgtcatcaagttccattatctccctgccactcatatcactgcgtttt

SEQ ID NO: 868106 - DNA, 619 bp, Homo sapiens
tgggttcatgtatccatccactggttttctccaagtgatgactgtggtactggaagctacactttccaatataatattttctccttgaggcaaactagcatgctaggcatgaacagagtgtaagccgtgatatcacatagaaataatgtagtacctccaattctctttatgttagtttaaacactaatagccccattttgatgcaatattaattatgtgtacatagtcatttaaaattccaagtgggacacaaagaatagttcacagacacttaacaaataagacaggaattacttttcagrttgagaagttactcaacctctgttactatcaatttccttttctgtccaaagaggttcataatccctttctttctgagttgctgtgagcttagaaacgatgttccccacttgaatttttattccctctccctaaatttctcctgcagtactcctcattgccttgcagcactcaggtcagaaaagtggagccacacacttgtttgccttttccttctacaactataattctactcaaaatggccagatgtgaattgtatttcttatctacctttcggatatagtctcctcttttcatccgtgatgcccgtcctgtagag

SEQ ID NO: 868107 - DNA, 619 bp, Homo sapiens
tgggttcatgtatccatccactggttttctccaagtgatgactgtggtactggaagctacactttccaatataatattttctccttgaggcaaactagcatgctaggcatgaacagagtgtaagccgtgatatcacatagaaataatgtagtacctccaattctctttatgttagtttaaacactaatagccccattttgatgcaatattaattatgtgtacatagtcatttaaaattccaagtgggacacaaagaatagttcacagacacttaacaaataagacaggaattacttttcagattgagaagttactcaacctctgttactatcaatttccttttctgtccaaagaggttcataatccctttctttctgagttgctgtgagcttagaaacgatgttccccacttgaatttttattscctctccctaaatttctcctgcagtactcctcattgccttgcagcactcaggtcagaaaagtggagccacacacttgtttgccttttccttctacaactataattctactcaaaatggccagatgtgaattgtatttcttatctacctttcggatatagtctcctcttttcatccgtgatgcccgtcctgtagag

SEQ ID NO: 868108 - DNA, 666 bp, Homo sapiens
ccattgcgtacatacaaatataaccttgggttcacttatttattgttgtcccagctaaattctacagttttgtggttggtaaaataaacatctatgtgttatccatgcaatccctcaatacacacagaaagtatatatttatgtgctgtatagaagaatattatttccctgacatactttggctagtacaaactaaaatattctacacaacaaggaatagacattgaaagaaaaaatcatgggtagcaagcttttttttcctttttttaaacattattacaagtttcaatagagccttccccttgactacataaaaagtaatcatttgcccatgtggtttgatgaaaagattcctcagctgtagcagtcttccytatcctcaagcttgagcagagcaagtatgtagcatgctggaactttatactaggtgtgaagctgagcaaatagcactgaaaaattataccagaagttatttgcaaatatgaatgtgtcgaataatattgaaatatgtcaggattttctattcacctttgctattaaattatatcttaatctctctatggttaaataaaatactgagaagccatgcaattctttgaagtttattgatatttgctttatacggcccatatttggttaaaattaataatgtaccttgtgcaccca

SEQ ID NO: 868109 - DNA, 555 bp, Homo sapiens
catagctagtattaggactagaaaaaggttgacaaaattttcaatcattaaagatttcataaagccccaaccccaagtagaacattttgtgtcctaattgaagttattcttaaaaactatgactgctcatttacatatgaaattaagtattttacatatcagttgaactacttttgtgagaactttaatgaggagcaaaaatgatatttattctctaggaaatcttgattggcattttaggttatagagtatcaaacacatatttcaatgtatttgagaatttatggcctrtctcaagtccatatagagactgatgaatagtatggtaattatttaactgagaaggcatttgttttattttttatattagaatatcttaaaagtgtcttaaattgtttcatcctagtgagtgtggatgtggatttaaatatgagctaaaagccgaagtctttaaattcccaatagaaaatttaaatcttagattcctaagtccaaacacaataaataaaagttaccaggcacaagagttttatgccagtcaaacttaaaaataat

SEQ ID NO: 868110 - DNA, 652 bp, Homo sapiens
agctcatggacgagtataatcaatattgcgaaaattaccatactgccaaaaacaatctacaaattcagtggaattaccatcaaattaccaccatcattcttcacagaactagaaaaaataatcctaaaattaatatggaaccataaaataaccaaaggaagactaaccaaaagtccttttgcataacctatcctttggcatagctaaaggaagactaaccaaaaaagtaaatctggaggcatcacattacctgatttcaaattacactgtaaggccatagtcatcaaacagcatggtactggagtaaaaataagtacatagaccagtggaacagaatagagcacccagaaataaacccaaatacttagagccaactgatcttcaacaaaacaaacaaaagcataaagtggggaaaggacaccttattcaacaaatggtgctgggctaattggtaaccmacatgtaggagaaagaaactggatcctcatctctcaccttatacagaaatcaactcaagataaatcaaagactcaaatctaagacctgaaactataaaaattctagaatgtaacataggaagaacccttctagacactgacataggcaaagccttcatgaccacaaacccaaaagcaaatgcaacacaaacaaa

SEQ ID NO: 868111 - DNA, 657 bp, Homo sapiens
tacacctgacaaaggactaatatccagaatctacaaggagctcaaacaaattagcaagaaaaggacaatcccatcaaaaactgggctaaggacatgagaagacaactctcaaaagaatatatacaaatggccaacaaacatatgaaaaaaatgctcaccatcactaatgatcaaggaaatgcaaatcraaaccacaatgcaatgccacctcactcctgcaagaatggccataataaaaaagtcaaaagataatagatattggtgtggatgcagtgaaaagggaacacttctacactgctggtgggaatataactggtaaaaccactatggaaaacagtgtggagattccttaaagaactaaaagtagaactaccatttattccagcattcccactactgggtatctacctagaggaaagaagtcattataagaaaaagatacttgcacactcatgtttatagcaccacaattcacaattgcaaaagtatgcaaccaacccaagtgcccatcaatcaatgagtggataaagaaactgttatacatatatatacacacacacacacacatacacacacacacacgtacacacacacacacacacacacacacacaaaaggaatactactcagccataaaaaggaataaattaatggcat

SEQ ID NO: 868112 - DNA, 669 bp, Homo sapiens
cctgctatctccattctctcatggatgtaagaagggttgttgattttcagtttgttcaagttttctcttgttatgtagacaagagtaatgttttccaagcttgttacatgatggactgggaactaaaagtctaacttgttttattaagacaactttattaatacatatttatgtacaataagctgtacatatttgtgtgtaaatgaatrcaaaaaaactttatccattccattactgtttcctgaaagtatggtcttgctttataaatttctaattttagtcttttctctttcagatatatcctatcaaggctacttattttatgggattcctaaattctcaactattggatttggtaaacattgctacattataatttaaaatggaatattactccatggaaatttgagaaaatcctgtttttcccactcaaagttactttttaaatggatctctaatttctttttctgtcttattttattatcattatttttaaaatcttacactaatcaccaggatatatcttatccttgatacttcaggaatgagaatatacactgactacagattatctttttaggaaaccatcatttgtttcaccttcaattttgtatttgtctcttttgttgccctgtccgtaggaaagcaaatgccaaggtgtccaccttt

SEQ ID NO: 868113 - DNA, 502 bp, Homo sapiens
atttgagattatgtttgatgggcacagcttgtagccaagattttgtgggctttgtaccttttaccgagttgatatatttttgcatagtgggctgtctgctctccatcctgatgaagtactccctccccaatgctccagctgcttctgaggatccttatcatatgcccctgtgcagctctgcagaccatttctttgcaatcccccctctccatctaagtaactgctcttctggaaccatcaccagttccctaaaagtgccaggagatctctcatctccaaagatttgcacgcaaatttgtacctgactgaagagctcttcctacagcttctcctgattaaagcataaattcrctcaagtcactgtcaattctccaatgccatgttgctttgttttgttttcttattccaaagttccaacacaagactttattttctgaccctcctgtatgttctcataccaccatgtttatttaatactttttcctacttatatttgaattca

SEQ ID NO: 868114 - DNA, 636 bp, Homo sapiens
cagaggtttacgtttcatgcaacaaatcaacaaactaatgagggaattacgattttactgcatagtttaccacacttgtttttaaactgctatttttgagacatgtgaaagagttcattggcatacacagtttcctagttatgtgcaggacttacaatcccaattctaaatgaaaatttgtattgagcatttatattaggccaagaagagacccaaactagtaagactgcatcaaagatattaaaggaataacttataaaatgttatgaccattacacatatctgaagtaatggaggcttgtgtcawatgtattcattccttctcaggtgcatttggttaaatatctcagaaattccctacataaaagcgagttttagaaggtacattcttcaaaatccattagactgtgctacaggaaacaataaaatagtttgtaatttctgttctcagcaatatttaatcatgaaattttggatctaaacttcgattcacactctctgatttgattacattatatattatcctggaactcggtcattgatagactaaaattgattttcctgcaaacatggaaaatgcacagccacctcaatgtttattttgttgccaattttgtctagaaacagttctgttcc

SEQ ID NO: 868115 - DNA, 601 bp, Homo sapiens
ccacaagtgttcattatgttcactgagctacacattcatgtcgtgtgtaatttttgttgttatatttaaattttcagaaaaaaagtcaatggtgaataatcttggaatgtttctctcactataggatatacctttcgatatggagatttatatgtctttaagtttaaaaaaatatgttgcgtaatttaacatttattccattctttaaaatgtgggctttttcttcacagaattcaaatgtttacactggctctaatttacttgactttcattttatctatactcattttaaatttcttgttccttttaatacatttctcatatccatatttactgcctttattaagtatttcataatgtttattttcctatagttttcccatttgccataatatatacgatgaactttccctttcttttctctgttctaccrgttccactgcataaatacagatgttttataatttttccctgattatttttgtatctctttagttgttgtattcacagatgtgaatgattgacttatgataattaaatttgagactcaatggttggattaaattttcatctcttcagtaattgtttttgaatatgttct

SEQ ID NO: 868116 - DNA, 556 bp, Homo sapiens
cctcctgcctcagcctctcaagtagctaagagtaaaggcatgcaccaccatgcccagctaatttttatatttttgtagagacaaggttttgctatgttgcccaggctggtcttgaactcctggcctttagccatctccttgccttggcctcccaaagtacaaagtgctggcattacaggtgtgacacactgcaccttaccaatatagagtaaattttaattcacctttattttaaatcyttttaaaattttatttattatgctttaagttctgggatacatgtgcagaacatgccagtttgttacataggtatacatgtgccatggtggttttctgcacccatcaacccatcatctaggttttaagccacacatacactaggcatttgtcttaatgctcttgctccccttgccctcaaccccccaacaggccccagtgtgtgatgttcccctccctgtgtccctgtgttctcattgttcaactcccacttatgagggagaacatgctgtgtttggttttctgttactgtgttagtttgctgagaatgagtttccag

SEQ ID NO: 868117 - DNA, 556 bp, Homo sapiens
cctcctgcctcagcctctcaagtagctaagagtaaaggcatgcaccaccatgcccagctaatttttatatttttgtagagacaaggttttgctatgttgcccaggctggtcttgaactcctggcctttagccatctccttgccttggcctcccaaagtacaaagtgctggcattacaggtgtgacacactgcaccttaccaatatagagtaaattttaattcacctttattttaaatctttttaaaattttatttattatgctttaagttctgggatacatgtgcagaacatgccagtttgttacataggtatacatgtgccatggtggttttctgcacccatcaacccatcatmtaggttttaagccacacatacactaggcatttgtcttaatgctcttgctccccttgccctcaaccccccaacaggccccagtgtgtgatgttcccctccctgtgtccctgtgttctcattgttcaactcccacttatgagggagaacatgctgtgtttggttttctgttactgtgttagtttgctgagaatgagtttccag

SEQ ID NO: 868118 - DNA, 663 bp, Homo sapiens
ctgagaatgagtttccagcttcatccatgtcactgcaaaggacatgaacttattcttttttatggatgcataatattccatggtgtatatgtgccacattttctttatccagtctatcatcgatgggcatttgtgttggttccaagtccttgctattgtgaatagtgttgcaataaacatacctgtggatgtgtcttcatagtagaatgatttataatcctttgggtatatacccagtaatggaatkgctgggtcaaatggtatttctggttctaaatccttgaggaatcaccacactgtcttccacagtggtttaactaatgtacactccctccaacagtgtaaaagtgttcctatttctccacatcctctccagcatctgttgtttcctgactttttataaatcaccattctaactggtatgagatggtatctcattgtggttttgatttgcctttctctaatgaccagtgatgatgagctttttttcatatgtttcttggccacataaatgtgctcttttgagacgcgtctgttcatatcctttgcccacttttcaatggggttgtttgtttttgtcttgtaaatttgtttaagttcctcatagattctggatattagacctttgtcagatggatagattgcaaaaatgttctctcattc

SEQ ID NO: 868119 - DNA, 663 bp, Homo sapiens
ctgagaatgagtttccagcttcatccatgtcactgcaaaggacatgaacttattcttttttatggatgcataatattccatggtgtatatgtgccacattttctttatccagtctatcatcgatgggcatttgtgttggttccaagtccttgctattgtgaatagtgttgcaataaacatacctgtggatgtgtcttcatagtagaatgatttataatcctttgggtatatacccagtaatggaatggctgggtcaaatggtatttctggttctaaatccttgaggaatcaccacactgtcttccacagtggtttaactaatgtacactccctccaacagtgtaaaagtgttcctatttctccacatcctctccagcatctgttgtttcctgactttttataaatyaccattctaactggtatgagatggtatctcattgtggttttgatttgcctttctctaatgaccagtgatgatgagctttttttcatatgtttcttggccacataaatgtgctcttttgagacgcgtctgttcatatcctttgcccacttttcaatggggttgtttgtttttgtcttgtaaatttgtttaagttcctcatagattctggatattagacctttgtcagatggatagattgcaaaaatgttctctcattc

SEQ ID NO: 868120 - DNA, 639 bp, Homo sapiens
gtgtgtgtgtggttgtgtgtacatgtcagtttgagccgcctacttgttcttctttttcaagattgttttggcttttctgggttccttccaaattcacatgaatttttatattctatttgtcaatttctacaaaacataagctggaattctaatatgaattgagttgtaactgtagatcaatttggagagtattaccatcttaataataytaagctttctgaagtataggatatttttacatttacttagatccctttaattatgctcaacaagtcttttatagtttttaaagtacattttataccttttgttacatttattcctaagtattttattatcttttgaagctattgtaaatgagatttgtttcttcttagtttcatttttatgttatttgttgctgctgtatagaaacataactgatttttaatattgatcttttatctcgcaaccttcatgatcatgtctgttagttctagtaacttgttttagtgtgttccttaggatattttacatgcaatatcaggtcatctatgaatagaaatagttgcacttcttcctttccaattggaacatttattttattttacttgcttaatgccttgactagaacatctagtacaaggctgagtagaagtg

SEQ ID NO: 868121 - DNA, 649 bp, Homo sapiens
ctgagccgtcatgcttggccaatattattacattaatttgtgttttccttaaatgtatttcaaaaatgttgattgtttagtaaacttcacagaaaacccacaccatttttgtcaaccattttcttagtttgattatttgggctatttcaaaatgttttctattttataaaaattacaataaatactgttgtaaagaaaaaacactttcttttcctatgaagaacaattgtctggattctttaacaatgaaaacaagaatgaataacttaaaattctgctaaagttggcaaagtatggtaaactggattgttccatcatgtcggactattttctttgggtggagtaggagttgtgaaagtgtttgaacagtttcgaagtgtttcccargtactcccaattcaccacccatacaagtcataaccaggttaatccttaccagctggaatatattgtacttatttctagttgctttgaggaaacaatattttttataaattctaggaattaaatctattaaattgttagattttttctttttgttttttgttttgttttattttgttttttgtttttgtgggttttttttttcccttgcccaggctagagttcagtggcacaatctcggctcactgcaacctccacctcttgg

SEQ ID NO: 868122 - DNA, 626 bp, Homo sapiens
aatgctccattaaagccaggtaatgcatatatacatacaatggaatattcaaccttaaaaaaggaagggaattctgacacatgctacaccatggatgaactttgagaaattcatgctaagtgaaataatatagcggaatcagacaaatattttatgatttcacctctttgaggtacttagatttttcacattcatggggacagaaggtagaatggtgattgtcagggactggggcaagtaacgtagggaacattatggtatggyaggttaaaagtttcagtattttaaagtgaaaagaatcctggagatgcatggaggtgatggctgccaacagtgggaatgtacttaataccatggaactgtgcacttaaaaatggctaaaatggtaaattttatgttatgtgtatttttaaacaaccaaaaagaaaagcatgtaagagtgaaaaagagaggaataaaaaatatttaaatctaaatctaaatatattatagagatatggctgaaaatatataatataaatatattatattatatatatatatggctgaaaaaagagaagaaaaaagtaaaaaattgcagcaaatacaccacatttataaacatcagaaaaaccaatccattttta

SEQ ID NO: 868123 - DNA, 610 bp, Homo sapiens
atttataaatgtgcaattctgtggcatgaatcacattcacattttgtgaccatcacttccctccatttccagaaacttccatctcccccagctgagattctttacccattaaaaataactttccacttcactctgacatcagcactgggcaaccaccataatttctgtcttcatgaatttgactactctattattgtgtattgcactatttgggatcatataagtgaaatcatacaatatttttccttgtcttactggtttatttcatttagcatatcttcagggtttatccatgttgttacatatcttacaatyttcttcattttaaaggctaatattccatggtaggtatataacaaatttagttgatttatccatcagtggacattgtgttgcttcccccttttgactattataaataattgtgctgaaggtagtcaaatatgctatccccaaatcccctttagcctaaggattattttaagctgaaagcaattgaagaagcagatacaaaataagctctccagcctttctccaatctttgcctaaaagcaagaggtaaatttacaaggctgtccctccttccctctttactgggaaggacaaactt

SEQ ID NO: 868124 - DNA, 655 bp, Homo sapiens
ccaatctttgcctaaaagcaagaggtaaatttacaaggctgtccctccttccctctttactgggaaggacaaactttcagggggagattattatgcattgatatcagcctggaggcagcaccagacgaatctatataacaaactttactatcttttaagtactattagattcccatgtatttacctccccccacaatttgctgcttctagagactcaaagtctttttcctttgtcttgtctcttatcgaaaatgtattcttctttgttgaaaatgccatatgcaccggagttctaagccacttatttgagaattwctcatttccttggtatctcctgtatctcctgtatatgagaatcatatattaatgaacatgtttgtttttcgcttgtaaatctgtctttgttagaggaagcccaactaaaaattcagaaggtagaggaaaaattattcgtcctcccctacactattacgaacatgggtgtacgaatatctgttcaagtccctgcttatatttatttgggtatatagtcagaagtaaagttgctggatcatatagtaatgctttgtttaattttttgaggaattgccctactgtttctcacagtggctccatcattttacattttcaccagcaatgcttaaatatgtcaata

SEQ ID NO: 868125 - DNA, 621 bp, Homo sapiens
gccatcaaactcatctcactgagtttttgacaggattaaatgatgtaaagaagagaacaaacacaatacatacaaacagtctcagttaatattattattacatgcatggtaaatttaaaagctgatagcaagtaaaccactaaaggttaacattagaaaactgaagagtcaagtataaaatacagaactttctaatatcagattctatgacttcaatgattcgagatagcaaattttttttctcctrcctacactatttgaactcatagccagtgtgggttataggatattgggccaccacttactgtgcaatgggagatagaataatatggcaggagaaaaaggcagcagatttttatatttgaagctccaaactatgaggtcattagtaaagtgaagcaatttaagaactagcgtgatagcaaatgaaagaagttaatcattatctttcaaattatttaaactaaacgaagactgtgtctactagggaaggaagcaggagaacatgagaaaagaagctcaatgtagtagcagaatgagatccctgggcatttgctagctttcgtggtgagtcctggtgccaggcaccccagaaatggctctgattttcgggatgtgtga

SEQ ID NO: 868126 - DNA, 621 bp, Homo sapiens
gccatcaaactcatctcactgagtttttgacaggattaaatgatgtaaagaagagaacaaacacaatacatacaaacagtctcagttaatattattattacatgcatggtaaatttaaaagctgatagcaagtaaaccactaaaggttaacattagaaaactgaagagtcaagtataaaatacagaactttctaatatcagattctatgacttcaatgattcgagatagcaaattttttttctcctacctacactatttgaactcatagccagtgtgggttataggatattgggccaccacttactgtgcaatgggagatagaataatatggcaggagaaaaaggcagcagrtttttatatttgaagctccaaactatgaggtcattagtaaagtgaagcaatttaagaactagcgtgatagcaaatgaaagaagttaatcattatctttcaaattatttaaactaaacgaagactgtgtctactagggaaggaagcaggagaacatgagaaaagaagctcaatgtagtagcagaatgagatccctgggcatttgctagctttcgtggtgagtcctggtgccaggcaccccagaaatggctctgattttcgggatgtgtga

SEQ ID NO: 868127 - DNA, 568 bp, Homo sapiens
ggaaaatggattctcccttagagcccccaaaggagtactacactattgacactttgatttgaggacttctgacctccagaaatgttaagtaataaatgtgtattttaagacattaagtttgtgataatgttttaatagcagtaatggaactaatgtataagaatttttacttatttatgtaggctactcttgtactatgctgaatagtacatayagtaataaccatatggtaatatctaaaactcataactgtgattttctaataattgggtggccaacagtgttgtccctcattaagccaaagcaattatccggtgctgacaagccagtcaaaatcattcaaattcatgtatgtgattgattgaaatggaagcactgaggatcattgaagaagtaccatggaaacagcatttgccattccaagatatttagatgctttcatgactactcatcaatgaagtaatgaaaattttgggaacagatgatcataattttgagtacggttcaaagaattttaaagtaatgacaaatgtctatgcttactatagggagatttgccagaaagaga

SEQ ID NO: 868128 - DNA, 673 bp, Homo sapiens
agtacaggaccttcttgcacaaaaattaggaatttgacaaaataagtaaatgacaagcatctgaagattttcttcaaaccatgaatatattacttctcaaaattttaagcccccatttttgatgtatcaaataacattcagcagttgtttatattacgctgtatctggtaagttgtaggtaattactagaagaatataagattcttgagagctgcataaatgtgatttctgcagggtctctttaggtatgctatgctatacacacgctgggagcctgcagaaatcacacatacacaaaagggccactgaatcagatctgaaagaggagggccattttgagttggataaagctacgtgtrtattacttgttttttccacgcctgttgacatggagaaccaaaaccggtgtttcgtgctttcaacaaaaatagttttagttttgctctgaaagaaaaatgggttcacattctgaaaaaggtgattttgtcaccagaatatctgatgagtaaatctgcatttgcatttttatcattgcctaactaaaacctgttcagtttggttaataaattattaatacagttctctaacttctcatccgggtacactgttgaaatagcagaccatcccatttatttcaccaaatatttcttatacacctattttggatgaggct

SEQ ID NO: 868129 - DNA, 673 bp, Homo sapiens
agtacaggaccttcttgcacaaaaattaggaatttgacaaaataagtaaatgacaagcatctgaagattttcttcaaaccatgaatatattacttctcaaaattttaagcccccatttttgatgtatcaaataacattcagcagttgtttatattacgctgtatctggtaagttgtaggtaattactagaagaatataagattcttgagagctgcataaatgtgatttctgcagggtctctttaggtatgctatgctatacacacgctgggagcctgcagaaatcacacatacacaaaagggccactgaatcagatctgaaagaggagggccattttgagttggataaagctacgtgtatattacttgttttttccacgcctgttgacatggagaaccaaaaccrgtgtttcgtgctttcaacaaaaatagttttagttttgctctgaaagaaaaatgggttcacattctgaaaaaggtgattttgtcaccagaatatctgatgagtaaatctgcatttgcatttttatcattgcctaactaaaacctgttcagtttggttaataaattattaatacagttctctaacttctcatccgggtacactgttgaaatagcagaccatcccatttatttcaccaaatatttcttatacacctattttggatgaggct

SEQ ID NO: 868130 - DNA, 673 bp, Homo sapiens
agtacaggaccttcttgcacaaaaattaggaatttgacaaaataagtaaatgacaagcatctgaagattttcttcaaaccatgaatatattacttctcaaaattttaagcccccatttttgatgtatcaaataacattcagcagttgtttatattacgctgtatctggtaagttgtaggtaattactagaagaatataagattcttgagagctgcataaatgtgatttctgcagggtctctttaggtatgctatgctatacacacgctgggagcctgcagaaatcacacatacacaaaagggccactgaatcagatctgaaagaggagggccattttgagttggataaagctacgtgtatattacttgttttttccacgcctgttgacatggagaaccaaaaccggtgtttcgtgctttcaacaaaaatagttttagttttgctctgaaagaaaaatgggttcacattctgaaaaaggtgattttgtcaccaraatatctgatgagtaaatctgcatttgcatttttatcattgcctaactaaaacctgttcagtttggttaataaattattaatacagttctctaacttctcatccgggtacactgttgaaatagcagaccatcccatttatttcaccaaatatttcttatacacctattttggatgaggct

SEQ ID NO: 868131 - DNA, 594 bp, Homo sapiens
gagataaaactttacagctcttgttctgtgttcgattattaaacagcaatattgaaccatttatttgcagaattctaaagacatctagcaaaaaaaaaagcaagtatgttaactttcaatagggatgaatacacccatttaaaaattgatacaaatcaccctccacaagggaactaaatctgaacaggaattcacagaatggtttaatagaaggtgaggtttaggcatacagcaatgtggcaaagactgctgacagttcactaaaaccaatttttttttttaattttctgggcattgagctagactctattttccagcctacctttcatttatgtgtggtcatgtgactaggttctagctaatagaatgtgagcaaaagtgttccgtgccatagcaagctgtggtccataaaatgacracaagaaatcatctgttctccttcctttcatttggccaaatattggtactacaagtaaccctgtaagtctgtattaaaaatagcacaacctccatcagtctgggtccttgaaaagctgcagggagcaaagcttctgtttgcccataaaattagaaaataatacacttgttttgtaa

SEQ ID NO: 868132 - DNA, 636 bp, Homo sapiens
agggtttcaccatgttggccaggctggtcttgaactcctgatctcaagtgatccacctatcttggcctctcaaagtgctaggattacaggcgtaagccacatcgcccagccttaaacactttttaaaatttaatcttcacagctctcctgaagaagatacttgtttttcccaatttataaacaaggaaatygaggctaagagatattaagagacttatatatgatcacccagcaaataactattctaggtgggatttgaattctgttctatatgactccaaattccagaggaagtagaaacagctaccgcccctcacactactggcagagtaatctttccaaaacacaaatgccactttctatttcactgctcataactctaatggttcctcctctattgttatacaataaagtcacccacaaatgaggctttccatgctttagcttttctggccacctcttgccaatcaccatgctcacttgtgatccagtcatcctcaacagctcggtgtccttaaaacaagctacattctctggtgcctcttcctttgtgatgtgctgctcctctgtgagtcaggctttttcagtttcttgtatctgaaaaatccctgctcaatcttcaagatgcatctgaca

SEQ ID NO: 868133 - DNA, 611 bp, Homo sapiens
ttggaaagaagaagacacacaaatgaaacacatttcaaatgcatgaaacaagcattatcatctcttggggactgagtatttcctgagccccccagattttattgaatccctctcctcttgattttcccaagttcacacaacattctgtgtatatcttttaaagcagtgactggtgattttcttatctgttcccctctgcactgaaagcaccttacaataaacaggaagttcctttgtttctatccccagtgcctagtctagtacctggtacrttacagaaacgtaacaatggtcatcgaattaattaattaattaattaattaataattaacaatacaagtcagtacatgctgagtgctaaataataggtagagaaaagtggcctaggattcaaagcaaggataaataaatataaaatgtgttagtaaagtaaaagctttctgtaagagttaaggttggaagaaaagcaaggatgaaatctctctgtccatccatccatccattcagtaagtatcgcattttactttatgccagggcaatgcatggtctaggagatgcaattttaggaaggggagatggtcaaagccttaaagagcattaaatatgaatat

SEQ ID NO: 868134 - DNA, 615 bp, Homo sapiens
aaacattttccaaacggctcttccattttgggtccaacagcaagctatctgtgactagttctcccctgtcattcctccattcctatttttactttaaatgcaaactgtttttgctgtttcccacaatagttttagcctttcttggcaatctggtgccccagccaatttcctgaggtaaagctgtgtttatataaaaattgctattagaaaaacagctcaagcaatgaaagaagtcagtatacattttaattgccaactacataaataggtggagtcacatttggggggttttggattgttatatgcatttccttgttcccttgcctggacctaagaattgactgtatgtacaaaaaaacttakcttgcaaatgtttattgagagcctactatgtggtaggccttgtgttaatgaacctacaacaaagagcaaaactgcacaataccatgacatttgctacttgctaacttatgctttatctactgatacacggggcttactttcccaattggattataagctctgagtgggcagagaccatgcttcattcatgacttactcatttttgcccatcctgggccaggtatagactagacatcaaccatgaaaatcaga

SEQ ID NO: 868135 - DNA, 579 bp, Homo sapiens
gagttttggggattgtttaaaagtggaggagtcctgacttattcttcctcagacaatgggtctatcttaagggagggtctatcttaatgggtctatcttaagtgggtgaaacagattgcacacttaaaaatgtggggtcatggtggaaatgagggtgcaggggaaaatgaagaagcattgtcatcttcaggattacatgttccaagctgatccctgcatttctctagcattttyctggactgctttttgctgacatcagtcaatgcctggaggagaagtctacagaggaatggaggtagttctgtcagatacttttttaaaaaacttactttgtcctgtatacaggctgctaataacacagcgtcatcatcagccatgagaacccccttttcttgtccacactgagcataaaggatctcctattgtgatgttttcctcttctttaaaatttaacttgaggttcattctagccttattttcactgcatgaaaagactgggggatcagtggggtcacacatccctgaatgatgattcctgttattcttgagagggcttgcaagtattcaaccctcaaagtc

SEQ ID NO: 868136 - DNA, 629 bp, Homo sapiens
aagataacagattatctggcccaatccctcatgaggtgtgtgaggaaactgagttgagagccctttggtgactttttcaagatcacacaattaatcagtggagagttgatgctacattctatgtctcctgtatttgttttttctgccttctcctctcattggaattgaattaagtaaaatgtaggaaatagtctaccttatgttaaaatcagagtttttctggcacatatggagcaggtggggattcctaccaaggctttgcccatcctggtctccggtcctcagccaacatgtgtgaaagatcaattcactgcaaaggtttctcctccattgccctcattcttctcccccttaygttattagtcaataaggaatatttcttggctatggggaagtcataatggatagcattggtcttggaacaccttggtcttttaatgctagagagtgaccttctgagccttggtatgactcccagagaaataccaagttaagtttcagtagattgatttgtcttttcattggtgataaatccctttgtcaagtgtggtaactaaagactttgatttgggccctgggtcaaacagtgacactccataggctgaagacaattgctccctgatgctagt

SEQ ID NO: 868137 - DNA, 606 bp, Homo sapiens
catctgatttttcaactgtaaaactgacatatctcccttgtagcctggtgaagattaaattacttaattaatagaatatacttagaatagtgcctagcacgtactaagcactcagtaaaagattcagttccatttctgattctgctttgatgcaaacattaagccagaaaaaaagatgagcgattcccttgttgttactcaattattcataaattgtttyaagaagcaggctctgatatttcttctggcaccacccctcaaaataacctgagattctctagaatggcatcagctgctgagaatatagggaatctgtgtattgggaatgagtatgctgtttgccttgcaccacatgattaattgtgtttaaagaccatttttattaggaccagaatggtgacaataaaattaaaggagcgcagattcaacatctccttaaccaaaaggaaaaatgaaaacgccacacacaaacacaaaacgcaaacacacgcccaaatgcagaggcaaaaaataaaacctttcccctttcctcaggctttctccataagctgagctctacccagacaaaggcgagaactgctctgtgtaaaatgatgatctccatgg

SEQ ID NO: 868138 - DNA, 606 bp, Homo sapiens
catctgatttttcaactgtaaaactgacatatctcccttgtagcctggtgaagattaaattacttaattaatagaatatacttagaatagtgcctagcacgtactaagcactcagtaaaagattcagttccatttctgattctgctttgatgcaaacattaagccagaaaaaaagatgagcgattcccttgttgttactcaattattcataaattgttttaagaagcaggctctgatatttcttctggcaccacccctcaaaataacctgagattctctagaatggcatcagctgctgagaatatagggaatctgtgtattgggaatgagtatgctgtttgccttgcaccacatgattaattgtgtttaaagaccatttttattaggaccagaatggtgacaataaaattaaaggagcgcagattcaacatcwccttaaccaaaaggaaaaatgaaaacgccacacacaaacacaaaacgcaaacacacgcccaaatgcagaggcaaaaaataaaacctttcccctttcctcaggctttctccataagctgagctctacccagacaaaggcgagaactgctctgtgtaaaatgatgatctccatgg

SEQ ID NO: 868139 - DNA, 617 bp, Homo sapiens
agcatggtagtgcatgattgtagtcccagctactctggaggctgaaattggaggatcccttgagcccagaagttagaggctacagtgaccactgcactcaagcctggacaacaaaataagaccttgtttctaaaaaaataaaaaatatgaattttcaaaatacatatctggtttgcattaaatgtgctagataatataatactatctccccttgcatcattttaaagaaaggctaaaaagaaaaataatgtatgtgggccaggaaagagatacccttagcaatgaaaccagtattatcatcttatatacaattaaaatcagataaatacttttggaaattaagttatgtgtaacgttcataaagggccaagtgaattcaaaattaaacatttcaaagtgtttatattcaaattcatatgtcaatcaacacaattaytctctccactggcatcaagtcatgattgcttggttccaggctcagccctgagtggacctgcagctgtgacagcttagacatgcccttctgtccctcttcctaatcactccactggccttactcgccacctatgccttgtttctgtgcattcagttggtccaaggcaaaggatgatttctaa

SEQ ID NO: 868140 - DNA, 699 bp, Homo sapiens
ttctctgcttcaattctactatcctaaaagtattagccatcccacagttctactgtattcaactgaaaaccacagaagggtcttcagtaccagaacatgctagtaagcctggtatttgactgccaaagacaacataattccaaggtaaagaatgtgagcagagatgctgcctgccttctggaaagaggytttattttaacagagctcttcagatgatagttccatgtcaacccaaagcaagtttaaaatcaaacctaagagagatataggatgatagaatctccaagatcttgaggaatcttgccaacttcttcccttccagatatgcttatacctgccccactcctatcaaagaaagctgtgagcatagaattaagattccttcttactcagcaatatggatgacatgactttcttacttctgatttaagaaatcctgcacagcagaaaatctttcagaaaactcaagactataggacccaatttaaaaacaaaaacaaaaacaaaacgttattctaaaagtaattatctgcctgtagagcaaatggggcttgggtaaaaggtcttgacatccctttgaggacccgtggactttgcaaagcagagcaaaaagcattaatcactggccctgaaactcatccatctttgcaagtcctaccttccagagtgtgagctccaaccctcccagagtaagttgca

SEQ ID NO: 868141 - DNA, 677 bp, Homo sapiens
gtgaattgagcaccagtactggggtctgatggatctgtgcttgagtctcagcttactgactgcatggcactgggtaagtatttagtctctttaagtcttagctttcatctctactaagtgggatgaccaataattgtacttactaaaagggtttttgtgaatactaaatggttactgcagataaagtgcttacaagtgtctggcccatattaagagcttaatagcaataccatcaacaacaaatgagacagtgactcctagaacaaaagcactgctctttggtggctggattatgcacttgtggtgagtttaggacttggggagwcccagaaacatgtctgcaactagcagagtagctggcagtgtgaagattccatttctgagaagaacagagaactttttctatattatcctgcttcccacagtgaggtagaaaatgggacatgggaagactccaactccatgttcattttttgacattaactcattaaaagagaaaaaatctcctaaaccaacaagtagtgccaaggaaagtcactgatgctccctccttaggctctatcgggttatttttaaagggtctgcttgagaatgactgaagctacaagtatagccagaaacacagctactttcagagggcaagatcgaagtgaaaagatgaaaatttgccccctaaa

SEQ ID NO: 868142 - DNA, 677 bp, Homo sapiens
gtgaattgagcaccagtactggggtctgatggatctgtgcttgagtctcagcttactgactgcatggcactgggtaagtatttagtctctttaagtcttagctttcatctctactaagtgggatgaccaataattgtacttactaaaagggtttttgtgaatactaaatggttactgcagataaagtgcttacaagtgtctggcccatattaagagcttaatagcaataccatcaacaacaaatgagacagtgactcctagaacaaaagcactgctctttggtggctggattatgcacttgtggtgagtttaggacttggggagacccagaaacatgtctgcaactagcagagtagctggcagtgtgaagattccatttctgagaagaacagagaactttttctatattatcctgcttcccacagtgaggtagaaaatgggacatgggaagactccaactccatgttcattttttgacattaactcattaaaagagaaaaaatctcctaaaccaacaagtagtgccaargaaagtcactgatgctccctccttaggctctatcgggttatttttaaagggtctgcttgagaatgactgaagctacaagtatagccagaaacacagctactttcagagggcaagatcgaagtgaaaagatgaaaatttgccccctaaa

SEQ ID NO: 868143 - DNA, 689 bp, Homo sapiens
tctcttcaaattcaaggatgagaggcagaagacacttttgagagctgggtgaagtgccatcaaatttaatttttgagtgtacaacatttagtttataaagaatgggcaaataaggaatagaaagcaagaaactcccacttgtgaaaatatcaccaaaactttaacagtgcctctaagagagttgcatactcaggttcacaacaatatattggctgggacatatctaattagcaagtaggggtgtctgatgaaaaatcaacttccagaacacacttgcagtgcaaaatgccgtctcctctgtgcataataacacataggtaaagttcgttctacatctcaaactcacttttcttttattctatgctttaacaactgggtgtcagtgatagaggtattttcccccttccccctggacagatggaagaagagtaatattaataacttacgatcttttctcctaygtggaaaagaaaattaatgtgacataaactgacaaaaaccagcaaattaaaagttaagactgaaactcctttgagatggcttttttgtcctttgctcatggtaaatgaatttagtgggaataatttgctgggggaaagatctaattgtagagctcatcaagaaaaaaatacatatttctgaaaagttttcaccctctttaatagcaactaggtttacctgtcccctac

SEQ ID NO: 868144 - DNA, 584 bp, Homo sapiens
tcggcctccatcatcttggtgtgaaccaatccccataataaatctctctctccttccctccctttctctccttctctctgcacacacacacacacacacacacacacacacacacacacacgtattttattggttctgttactgtcggcaaatctgtacaggcctgcagcaccctcaattcttgccttctcagaagaaagaatttkactgcgggggcataaggcagaatgaaagaccaaggcaagttttttagagcaggagtgaagtttatttaaaagttttagcgcaagaatgaaagttacttggaagatggccaagcgggcaacttgagagatcaagtgcctggtctgacctttgacttggggttttgtatgttggcatacttccgaggtcttgcatcccttctcccgattcttcccttgaggtgggctgtctgcatgcgtagtgcctgctagcacttgggtggggctgcacttgcagtgtgtttattggagttgtatgcatgctcacttgaggccttcttcccttaccagttgaatgctcctagaaggacatttaacagttaaacttcacaattttgcctc

SEQ ID NO: 868145 - DNA, 550 bp, Homo sapiens
ctgggattacaggcgtgagccactgcgcccagccacctttttttaagatttaaaatgctggttcttatccagcagctacctaataagaagtctgacccttacttctatttttccatctcttagcatatgcttttaaattcagtccgaccagcacttaaggaacattttcaatacaaagctttaggttgtctagtaagtgcattcttctattgagattttcttgaagtttttatttcctagtaactcccttgctttctgaatgttctgtcttcatagcagcctgttcttatttgaaaagaaatgtcccctcaaacattctaaagatgccagctattattttgcttttaattattgcctactttcttttgcacatatctactattctatrttctcattttgatcctttctttcaagagatttgtttccaacatatttatagttatgaatgatgaagtcaattataatgagtagtggtgttgatttcttcaggagttcatcgaagtgtttccaaaaatagactgttccaaaagcaaggccaacaggcgcctta

SEQ ID NO: 868146 - DNA, 598 bp, Homo sapiens
aaagcattatgatggatagagaggctcactatataattattaaagatattcacagagaaaacaaatgaatttaaacttgaatattatcttcataaagtcaaatatgaattaattgatttaagtacaagaagaaattgtgaaaatttcatggtttgaggttacaggagatctgttcaatcattgataggttaggcaaaaaaaaaatagagccatagaataatatttgaataatatatttaatgacctagagtggattaacataaacacaactgtaaacatatgcatatgagtatacatatgatatatgcataagtaatgtrtttaatccagttcattaaatgtattcaattatatttcatgatgaaacattaagatatgtctatcatttatctgtatctacttatcaatctatctatattagtagtgaacacttggaaaataaaatagaaaaataccactgttgtgtgcaacagttagagatcatacattcttctcaagtatgtttggaatatttataaagaatagccatttatcaatcctcaacaatgaaaaaaacccacacaaaactagagcacacaaaaatataaagtttaaaata

SEQ ID NO: 868147 - DNA, 621 bp, Homo sapiens
tgaatgaagaatccaattaactataatttttgctctccactggagcaatatttgaaagacagtgtcttggtgctgaagtagttctcttctgggaagggcctttatttggggaagcagaatttaaaaggcctgctttcyaacatctttttgtaatggatgtacaccatgctatctatgatgattcatgaaagactttctatttttattttttttaatgaaaatgtgtataagcttacaatctgaacattatggtgcagacatactaaacagttctttgcattattttaagatatctacttgacatgttagcaaaattgcctaagaatttgtctgtatctacataagagcataactacctgaatgtggatttagagatctatgaatgtttccagaaagctagcaagttgaaaactggctggtcagtggaaggagaccatgtgaacctgcagttgctaagacagaagcaatgagaaaagaatgaaatggatgaagcagcaaggaggaaagggtctactaaataacattttttatcaaaactgtgcccctaatgccacatgttctctcaagatgttgaatagatatctactttggggaggccctaaaagcgtactagaagaaggc

SEQ ID NO: 868148 - DNA, 647 bp, Homo sapiens
acctataaaacaatcaatggtgtggtgaggattaaaataaatactctatgtagaaacacaaatgtgaggcctctcctgtaaagaactaagtaaattgttttcaactttttccaagtgttgagtataataaagagatagcgggttcttgtagagatttttgagttagtgattgttatttttattgtgttactccattattaaatgcaatttttagatctatatattgtccaggcttaggaatgaaaagaactatcaaaactggaataatttattattttatggttttattttctatggtatagttttggaaattcttaaaagcaccttaccytttctatttcaaaaatattcaataaagtttaatgacttcaatgttagtctctgatttccatttctcagggcaattaagtgttaatggatatgtttttgtgagtaaaattactaaaaaaaatccgtcaccataaaaagtatattttagatctagtttccaaacttatcataacatatacgataagcaaataaaatattcaaatatggcatttcacttcagccactgacattgtagatagccagggtggataggtttaataaattgtgctaaaatactaaaaaagagaaaaaaaggttaatcattattcacatttagt

SEQ ID NO: 868149 - DNA, 721 bp, Homo sapiens
catcatactaatatagtatttagcacactgttgtgccaaatatttctgatacttaaaaaagcatttttacataatatttttactggatcttcagtaattatgcaaggcagaatggcagattttattgttctcaatttacagataagaccaacaggaaggtgtaaaaggtcttgtacaactgttacaagtttttctcatgaaagcctttttaattcctctgtattagcctgaaatgacttgattttctcaatttttctacactgttttactcataattttttgatccattacgcaatgatgcctaaaacatagatgtacgcacacacacacacacacacacacwctctctctctctctctttctctcatgtgttcacacacaataagaccctgtatatgtttattttcaacctgttacataaattgtggccctttaatatagcttttagataatgtgaatttattttattctagcacaatcattttttccagttctttaaatgtataatttgggaggttttattacattaagaatatttctattagaaataacaaaataactacgtactccaaaggagacttaatgtcaaattccatttctaagggtacaatgataaaagaaataatagcaacaataacaaaaatgctttgttactgatttattatatcttatttgccttctaaaaagatccttttattcattcttttaataccatagccac

SEQ ID NO: 868150 - DNA, 604 bp, Homo sapiens
ggaaaaattcaagctggctgcagaaatttgcataattaatgaagagtcaaatattaatcaccaagacaatggggaaaatgtctccagggcatgtcagagacctttgcagcagcccctcagggctacaggcctagaaggaaaaaatggtttcatgggggcccccctgttatatgcagcctaaaaacttagtgccctgcttcccagctctctagccatggctaaaaggggccaaggtacatcttggactgtggcttctgaggstgtaagcaagccccaagccttggcagcttccatataatattgagactgcaggtgcacagaagtcaagaattgaggtttgggaacctccacctagatattagaggatgtatgaaaacgcctggatgtctaggcagaagtttgctgcaagtgtggggcctcatggagaacctctgctgaggcagtgcggaagggaaatgggggactgaagaccctgcacagagtcctcactgtggcactgcctagggtagctgtgagaaaaaggtcaccatccttcagaccccagaatggtagatccactgacaactggcactgtgctcccagaaaagccacagacactcaacgc

SEQ ID NO: 868151 - DNA, 604 bp, Homo sapiens
ggaaaaattcaagctggctgcagaaatttgcataattaatgaagagtcaaatattaatcaccaagacaatggggaaaatgtctccagggcatgtcagagacctttgcagcagcccctcagggctacaggcctagaaggaaaaaatggtttcatgggggcccccctgttatatgcagcctaaaaacttagtgccctgcttcccagctctctagccatggctaaaaggggccaaggtacatcttggactgtggcttctgagggtgtaagcaagccccaagccttggcagcttccatataatattgagactgcaggtgcacagaagtcaagaattgaggtttgggaacctccacctagatattagaggatgtatgaaaaygcctggatgtctaggcagaagtttgctgcaagtgtggggcctcatggagaacctctgctgaggcagtgcggaagggaaatgggggactgaagaccctgcacagagtcctcactgtggcactgcctagggtagctgtgagaaaaaggtcaccatccttcagaccccagaatggtagatccactgacaactggcactgtgctcccagaaaagccacagacactcaacgc

SEQ ID NO: 868152 - DNA, 642 bp, Homo sapiens
tccacctagatattagaggatgtatgaaaacgcctggatgtctaggcagaagtttgctgcaagtgtggggcctcatggagaacctctgctgaggcagtgcggaagggaaatgggggactgaagaccctgcacagagtcctcactgtggcactgcctagggtagctgtgagaaaaaggycaccatccttcagaccccagaatggtagatccactgacaactggcactgtgctcccagaaaagccacagacactcaacgccagcccatttatagcttttaagcagccaggagggtggccgtaccctacaaagccacaagagcaaagctgcccaagaccatggggatctaccttttgcatcagtgtgacctgagtgtgagactgggagtcaaaggacatcattttggaatgttaagatttgactgccccctgtattttggacttccaagaggcctttagccccttcattttggccaatttctcccatttggagtgggtgtattcatctaacatttgtaccaccattgcatctaggaagtaactaacttgttttttattttagaggctcataggcagaagggacttgcctggtcttaggtgagactttagactgtggacttttgagttaatgctgaaatgagttaa

SEQ ID NO: 868153 - DNA, 645 bp, Homo sapiens
tgtaattttatttatttatttattattattattttttgagatggagtcttgctctgttgcccaggctggaatgcagtggcccgatctcggctcactgcaagctccacctcctgggttcttgccattctcctgcctcagcctcccaagtagctgggactacaggcctccgccaccgtgcctggctaattttttttgtatttttagtagagacggggtttcaccgtgttagccaggatggtctcgatctcctgacctcgtgatccacctgcctcagcctcccaaagtgctgggattacaggcgtgagccaccgcgcctggccctgtaattggttttaatccaatgtcccacacatgtttactgaaaggataaaacaagattgcctttgaaagagaagagagtctcaagcacacagcaagatgtataattgtttctttattgcttttttataatttattattctttcaggtattaaggtctgtggtctcaggcaattgtcatgcaaactaytttacttaaactactgtagacatcagagttaccacaacagcagccctgctctacagcaagtccctatgcatgccaacaagactgatcctgtttctttatgaccagcttgtttactttgtgttagcagggttgttatt

SEQ ID NO: 868154 - DNA, 632 bp, Homo sapiens
ttatgcaaaggaaggattcaattttgtttagctctgtttggtcaagatagtcaagctctgattgggtggcttcccaaaccctaaaccagaagtctgtgacagatgctttattcaaatgactggttggggtgctttctggctgcagttttccttggatccagtcacaggaactgttctggctcaaaggcataaagtagtatgtttgtcaagagcttcctttccaagagcaaataatgtgtgattactctacccttaccctgccatgaccacttagttctgctgtctaaatttgggtatctctgccatgaggagtccatgttgtacagagagcttggggccttatttacagttttatttcatagcaaaraagtgctataaagtaatagaacaagaaagaaagaaaagaaagaaagaatgaatgaaagagagaaagaaagaaaggaaggaaggaaggaaggatctcttgaagtttgcagtgatgggagtgttcaaggtagttgtcactgagaaactgagacataacaaagccttgaaagaggcaagggatttaggcaagtgaatatctagagtaagagttttccagggaaagggcatggctagggtaaagggttagtacctggtaattccaaaaa

SEQ ID NO: 868155 - DNA, 599 bp, Homo sapiens
gtcaatatgcctcttgagcatatatttctttccttccagctgtcacattcccatctttgctacagtcttctcttgtgtggatttaactttcaactctggcatattctacagtaatttgcagtttaattttagtttttagaaaattaaccgatgtctttggtccatttargcttttcaattctattcttgatatgatggatttgattcatttttacatttctcttagtaggctatatatagagattaaaaagtaaattcatgttttcaggtgacaattttgtatttaaaaagtgtgtaaagtttatagcaatatagaattttattgcaaagggaggataagagacactttaggccattagtttgttttttaaataaggtaacttgtgtcaaaacaaatgtgaaaaagtatgattcagtccaagtacttatattagggttactttcaaccagaactaagtacagctaaagaagaatgaaaatggagattatcatgataaaagttatttttagttttgaaaaaatttcaactgagagtaaaaaaatgacaacggtggaagtactttttatctttagcatattgtagagatgaatttctattc

SEQ ID NO: 868156 - DNA, 609 bp, Homo sapiens
gttgtgatttgtagctattaatctttcctctctggaaaaacaattcaactgtgtttagctggcagggggagcttcaagctgttgactgtacagtactgaaatttagaatgctgtagtttatgtaaccagtctctcttatttaaattccaatgacagatcttttcattttgtttaccaccaaataacaatgcaaacatgtcatgatgcagccctagacacgctgtgtggtcaatggaagtgacattggctaaattkattttttggtctaagtctcttaaaacttattaaaagcgttttattgttatgtgcagctattagagaatgagaataagctttttatttacataaggatgaaagtaagtcactctgtcttcttgattattggttgtttggttaatcagaaaagctgtgttattacagtatttttgtagacagcagtttaggaggaaaaactgcaaatggtgtgatggtgaaatgttttactggaaatcggaatttcaattttaaaattagacagacattttatgtgtcatattagaataattaggtttctcctgcagattagagtgtaaacttttagcaaaagtacactcatgctatattttggta

SEQ ID NO: 868157 - DNA, 678 bp, Homo sapiens
gtaagattgcatgtctttcattttggtaaacaagctggaagtaaataggataaataagtaaaatatgttgtatgttggataataatatgtgcaagggagaaacatcaaagcagggaaagtgaataagaagtggatttttgtttaatgatcatggtaaaattaaattaaacaagagtctgtctcataagattatgtctccttagctgtgtctytccagcacttcagtggtatctagcacaaagaaattctcaaaacctatcaaccgaaatatgaatgtagagaatagaataatgtatatggactgaagtagttggcagtggttttatgggagaaatgtgatttcatttacttctgaagacgtggagagatttggaaaacattacttctatgtaagcactcctacttaaatgaatactcttctctgttttatatcttatagaatgttgggagatataacattagcaatgggctacatgcctcatccgattagactatcacttagaagttaatgatttatttgcaagttgactatatgtgtgtatgtataatgcaaatgtaaacaggaaataaaaaattcctattaacatattaatttccctaaattcaattctgccatttcaattacatttacttcatttttagttttgctttagagaaatatgtctgttagacgtcagt

SEQ ID NO: 868158 - DNA, 678 bp, Homo sapiens
gtaagattgcatgtctttcattttggtaaacaagctggaagtaaataggataaataagtaaaatatgttgtatgttggataataatatgtgcaagggagaaacatcaaagcagggaaagtgaataagaagtggatttttgtttaatgatcatggtaaaattaaattaaacaagagtctgtctcataagattatgtctccttagctgtgtctttccagcacttcagtggtatctagcacaaagaaattctcaaaacctatcaaccgaaatatgaatgtagagaatagaataatktatatggactgaagtagttggcagtggttttatgggagaaatgtgatttcatttacttctgaagacgtggagagatttggaaaacattacttctatgtaagcactcctacttaaatgaatactcttctctgttttatatcttatagaatgttgggagatataacattagcaatgggctacatgcctcatccgattagactatcacttagaagttaatgatttatttgcaagttgactatatgtgtgtatgtataatgcaaatgtaaacaggaaataaaaaattcctattaacatattaatttccctaaattcaattctgccatttcaattacatttacttcatttttagttttgctttagagaaatatgtctgttagacgtcagt

SEQ ID NO: 868159 - DNA, 652 bp, Homo sapiens
acatttctactttctgtagttaagccataccttacagtttggatgcctagaagaagcaaatagaggaagagagagagagagtgtgtgcaggcaaactgattcagtgactgtgattactatacccagtatttgattctctaattgggaattcatgtaatagggaatccattctgttgtattcactgtttcatatttatgaagtcataaagaacagcttgcttatatattcagtagtcatttacaatgaataaaatatgttagaattagaataaagacagggcataactttccagagccacagacatcaaattgccaaagtttgtgtatccttattgaatatacacaaggtttagaacagccagattcacatttgaatggtccgattctgcagtgcataacattggttaccaaggctaatttacttgtttgaagctttatttttgaacaatgaaaattggagatgataacaastctttcatgtgttgtggataaatttgttgatagtgtctcccacaatgctgggtacattgtaagcatacagagaataaaagttatgattttacagaaggtcttaagagttgaattaaacattttggaagctagtaattattatattagagtaaaaagtaaaagattactgcataaaagaaca

SEQ ID NO: 868160 - DNA, 628 bp, Homo sapiens
tccagtttctcaaggtggatgttcctgttttttatttaagacctataatattttggtataaacatttactaccataaatgtctgtcttaatgctgctttagcttcatttgatatactgtaattaaaaatgctttaatttttctttgagacatactcttatatccactgactgtacatgtgtgctgtttaattttaacacatttggggatttttcaggtatattttggttaatctgatttctatactgatgctgatattatcatggaacatattatatttggttttaattctactaattttttaaggtttgttatgtggttaagaatatggtccattgtaatgactagtcaatgagtacttgaaagaatattgtgttttttttttktttttttttttacatttttcagcggtggttaagtggcatgttctataaatgtcaatcaagctctcattcagagattggaaaactttttattaagcagtaaatactttaggctttgcagaccaagaggcaaaattgaggacattatgtagatacttatagaaccgtttaaaaggcaactatttaaaagtatgaaaaacattcttaccttgtagaccataccaaaaatgtggtggtctggatttg

SEQ ID NO: 868161 - DNA, 646 bp, Homo sapiens
tgttttcttttttctgtgcagaagctcttaggtttacttatatcccatttgtcaagttttgcttttgttccagttgcttttggcaactttgtcaaaaaatctttgtgcatcctatgtccaaaatggtattgcctaggttgtcttccagggtttttatagtttttggttttacatttaaatctttaatccgtcttgagttgatttttgtatatggtgtaagaaggggatcagtttcaatcctctgcrtgtggctagccagttatctcagcaacatttttttttttgtcagctttgttgaagatcagatggttgtaggagtatgcccttatttctgggctctctaatctactccatgatctatgtgtttgtttttgtaccagtaccatgctgttttggttactgtagctctgtagtatattttgaagccaggtaaagtgatgcctccacctttgttgtttttgcttaggattgccttggctattagggctcttttttgtttctatgtgcatcttaaaatagtttttttctagttctctgaagaacgttattggtagtttgataggaatagcattgaatctgtaaattacttttggcagtatggttattttaatgatattgattcttcctatccatgagcatggaatgt

SEQ ID NO: 868162 - DNA, 511 bp, Homo sapiens
tttgtttgtgtcatctctgatttcattaagcagtggtttgtagttctcattgtagagaacttttacatccctggttagctgtattcctaggtattttatgtttttttgtggcaattgtgaatgggactgcattcctgatttggctctcggcttggstgttgttggtgaataggaatgctagtaacttttgtacattgattctgtatcctgaaacattgctgaagttgtttatcagttgaaggaacttttgggccaagactatggggttgtctatatatagaatcatgttgtctgcaaatagtgatagtttgactttctctcttcctatgtggatgcactttatttctttttcttgcctgattgccctttccaggacttccaatactatcttgaataggagtggtgagagagggtatcattgtcatgtgccagttttcaagaggaatgcttctagcttttccccattcagtataatattggctgtggctatgcacacaagctaggagaacta

SEQ ID NO: 868163 - DNA, 561 bp, Homo sapiens
gatttggatacaggtagaaacttaaggaagaatattttaggccaagtgaacacacagaaccagaaactagaaataagctggatttatgaggtagatgactagaaaatcttaattataaggttaattgtaattataatggaattagtattgaacagtcacaacatagccttttggtggaaaaatttaattcaatcctattttctcccagtttccatgccaaatttaagttacattgggagctgatgagttcacatgtacatttatacatataaatggcaaagctgcaaccttcaaactcagggtcagtatctgttatrggaggtgagttaagggctgctggttgcaacccactaatgcctgaaagttgtttagaaccaaaaacccagaaactgggggcatcctcctctcttatttattttactttgagctatgccagaatattcagcatggctgatcctagtggaaagagcgatggaactgggtggaggaaggaggtggcagagaaaaggttgtacaaacaaaatattttcactttgcaaataaagcgatttaagcattctc

SEQ ID NO: 868164 - DNA, 614 bp, Homo sapiens
ttaccattgtaggagagattcagtctgctactattgatgtattgcctttgaggcagcaaatatcttcacacactcttttacctctgcctaaaatttgttccctgcccctcttattaagatttaacacaaatgttaggtcttctaacaagtcttccctgaactgcagttctctttctcaagagaaccgggcctagactggactctgctatttcaaatacttatttgcatatctgcctcactgctaaacagacagttctataaggagtacattctttaacttggagtttccttctcaaactaagcagtacctggtaagtagcaggtgctacttgcaaatttaaaaacaaaacaaaacgtgtttcaattaatcaacactagctattgaagagctatcatgaaccgtaataaatgttatgarcttaccatttgtatttgggccataaagtgtatatatctattatctcttgaaatgacacctaagcatataagagtacaaagcaataactgtcatctataaaatgcctaaaaccaacaagaagaataataagctatataagaatctaagagatggtctgctggggagagcagaggctgtttcaaggaaaggagaagat

SEQ ID NO: 868165 - DNA, 662 bp, Homo sapiens
gcttgagacagcactgctagttctgtatgtagctcataaggaattcaaaaatgctctagtaatgagctgcaaaggtgctgacaaattcagtgagtttctcagggactttgtgcactggataatatagtctgggaccacctgctgccctccaagagttggttatataccatggaaatccactttgtccatgggttctcagaatgtagagacacagaacccacctcaaagagtcacttggcctctcagcagggtgggtatccatcccaccttgcacttctgtcataccattccaaaggtaatagtggactctggtgcttcagatgattttgtggaactgagagctggtctgacacatccagcttgttacctggtcttaacctacacaggatgctagttagagcaccttgtaaacactgagacctcctcaccaagctacacattggacatatatcaaaaggctggtacagtccataaaaaaacrctagtttggctccccagctggaaactcataacccaatcctcctctgggaaaataatttttaccccctatactgactgtaccccaattaccacttctgtgcttttgataccatataattacacccattaacaagtacttctagacatggtagcagaaggatggaatttatgactcagaaata

SEQ ID NO: 868166 - DNA, 470 bp, Homo sapiens
ctagggacattcaactggtaaaggaagaatgtctcaagtgagcatgtataaaactccaataaatgcactgcacatgctcacctcccaagtgctggtaggccactttgcatgtggacagcccaccccaagggaagaaccaggggagaagggacccaagaccccagaaatataccaacatataaaacccctagtcaaaaggtcaaacagtgccsttgatctctcaagtcgcccattggccctcttccaagcatacacatttctttctaatactctctaataaacttcacttctgctttaaaatttgcctcagtctctccttctgccttatgcccctcagttgaaatattgcttctgaggaggcaagaattgagtttgttgcagacctgtatggattcactgccactaacatactctggtgctccgtgactcagatacgttctgctgctaatatactttggtgccgtgtgact

SEQ ID NO: 868167 - DNA, 470 bp, Homo sapiens
ctagggacattcaactggtaaaggaagaatgtctcaagtgagcatgtataaaactccaataaatgcactgcacatgctcacctcccaagtgctggtaggccactttgcatgtggacagcccaccccaagggaagaaccaggggagaagggacccaagaccccagaaatataccaacatataaaacccctagtcaaaaggtcaaacagtgccgttgatctctcaagtcgcccattggccctcttccaagcatacacatttctttctaawactctctaataaacttcacttctgctttaaaatttgcctcagtctctccttctgccttatgcccctcagttgaaatattgcttctgaggaggcaagaattgagtttgttgcagacctgtatggattcactgccactaacatactctggtgctccgtgactcagatacgttctgctgctaatatactttggtgccgtgtgact

SEQ ID NO: 868168 - DNA, 621 bp, Homo sapiens
atgcaatggggaaagccatctgcttgactcagttaaccaattaaaatgcttacctcttccagaagcaccctcacagacacatccagaagtaatgtttaatcagatgtctacatcctaaggccatgtcaagttgacataatatcatgcatcacacccaatgtcttatagtaatatacatttgttcagaagtgtaatacaaatttagtcacaataaaaatgttagccttaatagccccagtgtgaaaaaatattatttaataattcaagagtttctttaattttaaatatgtaaaattattttttaaaaaataaattattaaaactaagatttataccatagttagtatctgagaggcactgggttaacaaacctttggtgccratgctcatttaatcttcatggcaatcctgcaatgttattcttattcttatttgactccaattttatagatgatgaatacttaagtacagataatttaagtaatttgaatgaaggatcagagccaataagtccctgctcctaattactttgctatgtaaccagactcaatgcttatgacatttatattattacattcaagttaaataaggagtatattaaacctaaccattcctaactgt

SEQ ID NO: 868169 - DNA, 624 bp, Homo sapiens
gcatcatcacaatttcacaatttcaccaaatgctctagactttagctgtccaatacagtagccactagccatgtatagttagagtcctagaaaagtggctaatatgaattgagatgtgccgtaagtacaagatacacactggatttcaaaaaattagcaccaaaaaaacccacattaatcatgttcatattgattatgcattgaaatgatattctgaatatactgttgaataaaatacattactaaaattaattttattttaaaaacatttaatgtggctactagaaaatctgaaatttcattttttggctcatgtttgctgctggcattgcatttcttttgtagcaccactctagacactccatagtgctaaacttgattgtcccaatgacstcattataacccatgccatatgaggcattcttagaacacagccactctatctgttcaatcatttcctcaatgttgtaccaactagttcatccaattaaaaaatctaaaatgatgtctcatcacaaataatgtatgtgggcatttcaaggaaaacaataagctaacatgaatgtctccaatacaagtgtcaaacaaataggcacagctgtcaaacaaatgaacacataaacc

SEQ ID NO: 868170 - DNA, 629 bp, Homo sapiens
tatcaaatgttgccaaccttacctataatctgagacaacatggcaactggcaacttaacagaccatgaaaacacaaatttaaatcattggactcatgaaatatcaaagatgagaaaatcatagtagcactttaaaaagtcaaaatgcaacaaaataaagtcttggaatctaaagaaacaatttagagattactaaaatctcatttggtttagttgtgcttctcttaagaacagtgagtctggtggacccaaaaggcgaaaatgtcagtatcagagagaagggtatggagaggtgtgttacaaagacactgtgaggctcatttggacaccatttgtgggaatgacttcagaattttcctctytatggtataatgctccttaatttgctaagagtttcactgtaattcttatcttggttggctaggttaactcccttaaaaccagagttcaaaacaaggtaagcattttattaattatggtcaagatttagccttaaaaagggaaacgatctgcaatagatcataaaatattacttactgtatcatgaattagtctaacggtaaccaaaacccagctagtgattctcaagataattatgtaattaagagattaggttaaaagtttcttgaa

SEQ ID NO: 868171 - DNA, 541 bp, Homo sapiens
atatgagagggatttgacccgctattgctagctttgctgatggaggaaggggctgtgagccaaggaatgtgggcagcctccagaagctggagagggccctcagctgacagccagcagggaatggagccctcagtcctgtaatggcaaggaactgaattctcccaacaacctgaactacaaaggaagccgatccttctctttgagcctcaagaaaggaacacagccctgtgaataccttgattttagcctagtgagacccgtatcaaacttctgacctccagaactgtaagataaatttgtgtaatttagctgttatgtttgcagtaatttgttgcagcagcaatagaaaactgatacggggctctgctcaratgtgtctgggaaacgacgctatagaacatattgatcatcttgttatggaacagtcataataaaaacaaaaccaataataaaacattaattgaatcaaagagcagataacttgttcactacaaagagaaaagctgacactgcactgattcataattctgtgttctgatag

SEQ ID NO: 868172 - DNA, 622 bp, Homo sapiens
gaggagtcaccaccaaaatgtggccagttgcaccagggtcactccactcttctcctccatctccgatagtctctcaaacactgtggccctgaatctgccaggggaatatgccattttccatatggtctgctgttttaggtgcctaaaagggggaagggtctcaatacctcacataggtctgctcaccttccagaagtgggattagccaacaaatagggccttagcmattgtattttttcttagagaataaaaacaaacaagtaagaaaacaaaacacaacccagaagagcattgacggttacagtaggaaatgtaatagaaaaacacaatgaaacatgacatgcatacatatataaagatttagattgatatcaaagactggtggactgtgggttgataagaacccaccaacatattttgtttaatctgcagtgtttaaataaaattgatattttgtgaagttaaaagtggggaaacttcaccaaaaaatttcacacacaaaagtaagaatatctggcaagtacgcccatgttgccacttcacaagaatctgctggagcttcacaacagctgctccctttggccaagctcatttgctgtgtacactcacatcactccagtgt

SEQ ID NO: 868173 - DNA, 591 bp, Homo sapiens
aatgcccatgtccactaccaagggaatatttttgtaataaaaaatatgtaagaaaccaaactagtgcacagaaggggcttgttaagtatgaaatcagagcacaggatgtcagctgtccttgaggggtgttttattgcagctaaggttttaactccagtgaattatccaattgacccaaacacttgggcccctagaaacagcctctcattctgakaatagctgcctttctctgccctgaagagtcatttgagaattactgtgaactcacactctcccactgtcattttgtgactctacattagatccacatttcctatttgcacaaagcactgtaccatgcccattctcttctttaacagattctatcagaccatcttctatcttttctggtgtttttagtttcctagcagtgtacagaaaatcaattgcgccccctgagtaggcaccagtatacatagactagtagggtaacctcgaaggcattttctgctaaacaactaagtccattcatggttgggctttttcttaagccttcctaactttgtgcctaaatctatgatgttcaacttactttggggaactgaattccta

SEQ ID NO: 868174 - DNA, 700 bp, Homo sapiens
tttctttttgagacggagtctcactctgctacccaggctggagtgcaatggtgtgatctcggctcacagcaagctctgcctcctgggttcatgccattctcctgcctcagcctcccgagtagctgggactacaggcacctgccaccatgcctggctaattttttttattattattttttagtagagacagggtttcaccgtgttagccagcatggtctcgatctcctgacctcgtgatccrcccacctcggcctcccaaggtgctgggattacaggcgtgagccaccacgcccggccaataatcactattctgactggcatgagatggtatctcactgtggtattgatttgcttttctctaatgaccagtgatgttgagctttttgtagtatgtttgttggctgcataaatgtcttattttgagaagtgtctgctcaaacttttgcccactttttgataggattcttttttcttgtaaatttatgtgagttccttgtagattctggatattagacctttgtcagatgtgtagattgcaagaattttcttccattctgtagaaaaacctatacttctttctccagcattttctaatattagatctctgtccttccctgcatttagggcaaaagggctatctatactcactaccctctaggatagggccctattaaataaaaaatccaaaaagcaggaaatg

SEQ ID NO: 868175 - DNA, 700 bp, Homo sapiens
tttctttttgagacggagtctcactctgctacccaggctggagtgcaatggtgtgatctcggctcacagcaagctctgcctcctgggttcatgccattctcctgcctcagcctcccgagtagctgggactacaggcacctgccaccatgcctggctaattttttttattattattttttagtagagacagggtttcaccgtgttagccagcatggtctcgatctcctgacctcgtgatccacccacctcggcctcccaaggtgctgggattacaggcgtgagccaccacgcccggccaataatcactattctgactggcatgagatggtatctcactgtggtattgatttkcttttctctaatgaccagtgatgttgagctttttgtagtatgtttgttggctgcataaatgtcttattttgagaagtgtctgctcaaacttttgcccactttttgataggattcttttttcttgtaaatttatgtgagttccttgtagattctggatattagacctttgtcagatgtgtagattgcaagaattttcttccattctgtagaaaaacctatacttctttctccagcattttctaatattagatctctgtccttccctgcatttagggcaaaagggctatctatactcactaccctctaggatagggccctattaaataaaaaatccaaaaagcaggaaatg

SEQ ID NO: 868176 - DNA, 610 bp, Homo sapiens
ccttgtttatactgtgtagatgcttgatgctgtaacagcataaaaatgcacataagtttcctagaagccacatcaaggcatatgttacaggcacaaaaagtataggttggcggaagctcttaattgaggggctgtgtttctgaaagaggtttgcacagatggaggaagagatgtatctaaatgtggttacctatgagcttatatgtgagagataggaaaagtgtgtaaccatttaatgactgcacctgtgattgttacaggggaggcacaaaaatgtgtaaacctttactagttctgtgttcattatccatctttaggcccttaggtcttttcatgtcagatttttaatcatttcaccaatggaagagggaaccttccacagactggtttcacaggcattaaagcaatgctcttcctccccaagtctatttataaagtatacagaaatrtacatacacggtcacacaaatataccctcatacacaaaacaaggctttgtatatatgggggaaacttatacctcatgcccaaagggcagaaaggaaatattaacctgattttaatttagaggagacctgtagttgctagcaactaaccccgtttgcctgtg

SEQ ID NO: 868177 - DNA, 656 bp, Homo sapiens
ccttgatgaaagagataaacaaaggtggcagagagcaggggccctggatgtacaagtaggacagtaacagaggggagagagaggccaacaggggaatctaggtatgacatgtaattctcttcctcaacatgacaattctgatctaagtcagggtctggctgtgagaaagtctcaataaacatcatcaacaacaaaaatagaggtggtaatggaggatccctctttcatcccatatacattgtcactgaggaaggacatttgcctcagtcccttctttggcctaggtactcagggagaaagtgccctgagatgctccctgggatgtggggagcaacagttcctgggattcctcctgtattcctgctggctccttccctaacaccttaagtggatttgcattcttctggtttatcattagcactggctttatccctcccacactgagttggggtagagcctccgtgaggaagtgatccctgctacttcctrctcgggctggatgcatgggtgcttgggtgtgtgtgttgtggggcaggagggataagcctgaggcttatcttattacttattactaagattccttatttaagtaaataaatacaatatgaagagtccaggaactgtgtgtaccttgaaaagaagtacattttctacta

SEQ ID NO: 868178 - DNA, 591 bp, Homo sapiens
aaaaaagtgggagtttcccactcccccctctattttctagggaagaaaacagactatgaatggctaaattatctgcccaaggtctcatcaccagcaattggcagacagtaacagactcattaagatttatgctctccctgcttaaatgtaccatttttttcaataaagagcaaaagagaaaaaaattataaagaggaaagggaaataaagtagggattagattacgctgggggcaatcattctgcccagtcactttttcacccaaacattacttaattttgtgactctctrtctactcatttacttaacaaatgtattagaaatggtaaacaggacaaatcaaggtacctgcacttatggagctcacgtgcctggggcagggggcacagacaactgatgagcaacaaacacacaaacaaacatggcaaattcagatcatccttagtgctgtggagaatataaaacagtgtaatgtgactgagcagaggtctgagtgtcagggagaagaagcagtgtggttaagatcatgagctccacagttaactgtctgggtccaaatactggctttatcacttagcagctgtgtgactt

SEQ ID NO: 868179 - DNA, 609 bp, Homo sapiens
tagattttcctggcatgttgaaaggtaaaattcaaggcaaagggatgacattttacagtttttaaaccataaagcacttgtgaagcactttaaacttgactaataacttcctttgatttcagtcctcccaaaatgacactcaaagaaattatgctctttgctcaatgtcacacagctagtaagttaaaaaatctcgcatttaaatctaaataatcgaacgctgctgctactcttattactattgctaataatgggcagcatgactataatttattaagtgctcactatgttgtctgtcagttgctgtgtttacattttataaatcatcgcttcctatagatgaggacaaactttcgcmtagaaaaggtttcactgaatactatttagaatcttctaaacaaatttagtcctaatttcgatatgataatgaataactaaattaaggaaaagcacattttacataatttagtacaaaactttataaattcctgggaaactacttggagagccattgtctattaatatttacacatatgtctctcaggctttgagacccttgaggacagaaaatatgtctcagccaccactgtaccttcattgagcctggca

SEQ ID NO: 868180 - DNA, 679 bp, Homo sapiens
atctaattggcagttacccacatctcatgtttgttaactgttcacagtctgaatggcattgattgcaggaatttccttccttcaagagttcttctgccactagaaacttaatcagggattgtcctagtgctgtaagtaacacaaacagaaataagacagagcccagatcctaaagatgtttccaatctaatgagtgagcaaaacactacaatgaggtacatagtataatcaaagaatgggcaaaagaaggggtaactctgtgagattagaaagsttcatggagaaagtaaaattcacttgcatccttaaagtgaatatgatccggatgaggagaaaagtggtggagtgaagaagatactcaagtaaaagaataatataactaaaaaagaaagagatggtaagacaataaaaaacaataaatggcacttattcagagaccattgcctattccagtaagattttaacagaaggtgtaaatggtagatttagaagacaaaatggtgaagagacagatgaaagccagtcattggcagactctaaatgttgggctaaggcatttggactttttcttgtagcagtggtggagtcatagaaggtttttcagttagagaaaaaacagggtattattttccttaaaagtaaactctggaggcagttgaaagaatggattgagaaaagg

SEQ ID NO: 868181 - DNA, 578 bp, Homo sapiens
agtgtcttatttctaggtgtgactgatccaacatgccccagttagctagtccagtaactattcaatcatacaaggcttctatggaaaagatcttgcaggaagacatgcccagggaacatattaattatatggctctgtcacaaagcaacaaatgtcatgaatgggtgaacttatggagctgctatatgttccatgtattctgtaccttgagtaaatcccgacctacttcttttatctgtggacasggagagatgggtagtgtagcatagttctggttctaccactaagttgctataatatctaggaaagtcaccacttctctaagcttctgtttcctgacctataaagtggcaacaataatgttgcttatctcaggatattctgaagataaaaatgaaatgatgcatattaagtacttagcttggtgccaggaacatgatcatatttccaaactgttagctgctttataattattactgttgttacaagtaatgtatctacgatggaaaaccctcacagcccatcctccaacagcagaggctaagaagcaatgtgttcttgttttataaccattaaga

SEQ ID NO: 868182 - DNA, 578 bp, Homo sapiens
agtgtcttatttctaggtgtgactgatccaacatgccccagttagctagtccagtaactattcaatcatacaaggcttctatggaaaagatcttgcaggaagacatgcccagggaacatattaattatatggctctgtcacaaagcaacaaatgtcatgaatgggtgaacttatggagctgctatatgttccatgtattctgtaccttgagtaaatcccgacctacttcttttatctgtggacagggagagatgggtagtgtagcatagttctggttctaccactaagttgctataatatctaggaaagtcaccacttctctaagcttctgtttcctgacctataaagtggsaacaataatgttgcttatctcaggatattctgaagataaaaatgaaatgatgcatattaagtacttagcttggtgccaggaacatgatcatatttccaaactgttagctgctttataattattactgttgttacaagtaatgtatctacgatggaaaaccctcacagcccatcctccaacagcagaggctaagaagcaatgtgttcttgttttataaccattaaga

SEQ ID NO: 868183 - DNA, 629 bp, Homo sapiens
caaagaatatgaaccaattttaagaccacccattctttttttgttgttattgagatagaatctcactccatcacccaggctggagtacagtggcgtgatctcagctcactgcaacctcagcctcctgggatcaagggattctcatgcctcggccacccacgtaactgggattacaggtgtgcaccaccatgccaggctaatttttatatttttagtagagatggggtttcaccctgttggctaggctgatttcgaactcctgaactcaagtgatccacccgcctcagcctcccaaagtgccaggattacaggtgtgagccaccacacctgggcsccattattctttataatatttttccccactcttattttctgttgctccactttgtttttgaatttcaattaaatgtaggttaagctttctcattgtgtctatgtctcttaccttttcttctgtgttttctatctctttttactgtgttacactatagataattttctctgtccaatctttcagttaatcaattatattattaaccatatcaagtctgctattaacctcatgaggttttcaagttcagtcatttcatttcagaaaactttttgttaatccaaaaatgaattgtgtc

SEQ ID NO: 868184 - DNA, 629 bp, Homo sapiens
caaagaatatgaaccaattttaagaccacccattctttttttgttgttattgagatagaatctcactccatcacccaggctggagtacagtggcgtgatctcagctcactgcaacctcagcctcctgggatcaagggattctcatgcctcggccacccacgtaactgggattacaggtgtgcaccaccatgccaggctaatttttatatttttagtagagatggggtttcaccctgttggctaggctgatttcgaactcctgaactcaagtgatccacccgcctcagcctcccaaagtgccaggattacaggtgtgagccaccacacctgggcgccattattctttataatatttttccccactcttattttctgttgctccactttgtttttgaatttcaattaaatgtaggttaagctttctcattgtrtctatgtctcttaccttttcttctgtgttttctatctctttttactgtgttacactatagataattttctctgtccaatctttcagttaatcaattatattattaaccatatcaagtctgctattaacctcatgaggttttcaagttcagtcatttcatttcagaaaactttttgttaatccaaaaatgaattgtgtc

SEQ ID NO: 868185 - DNA, 629 bp, Homo sapiens
ttctttaacattctcatgatcccttcctttgctccttgacctcatcctcttttcttcatgtctattatgtcttgaatctccttctttactctttgatttctttttgctcttactcttaattttagatttggcccttttcttcactttgttcgtattgtatttatcatctttttttgaatttcttcmgatgtctctctttgctgttagatttacagtctttttcttttccttttcattttttctgtttggactctcaaatacattcctgtggttagttatttttctctcttttactctaactagacttctctgattttcttttatttcattcaactcactcttatcccctttgatccatctttcaccacttgataccctcatcctttgagctctcggcatctcttgcctccaatgtgcaggagtctcactaagtctgaaacaatcccttgatctggatctggaaggagtttgatagcaccttgatcctcttcctttaattctcctgccagatctagtaactaaaagtcgtctctggtatgaagcaggctgggagttagatagattacattctctttctctttttctctctctctctctggcttttcctttccattgcatcagctatagga

SEQ ID NO: 868186 - DNA, 629 bp, Homo sapiens
ttctttaacattctcatgatcccttcctttgctccttgacctcatcctcttttcttcatgtctattatgtcttgaatctccttctttactctttgatttctttttgctcttactcttaattttagatttggcccttttcttcactttgttcgtattgtatttatcatctttttttgaatttcttccgatgtctctctttgctgttagatttacagtctttttcttttccttttcattttttctgtttggactctcaratacattcctgtggttagttatttttctctcttttactctaactagacttctctgattttcttttatttcattcaactcactcttatcccctttgatccatctttcaccacttgataccctcatcctttgagctctcggcatctcttgcctccaatgtgcaggagtctcactaagtctgaaacaatcccttgatctggatctggaaggagtttgatagcaccttgatcctcttcctttaattctcctgccagatctagtaactaaaagtcgtctctggtatgaagcaggctgggagttagatagattacattctctttctctttttctctctctctctctggcttttcctttccattgcatcagctatagga

SEQ ID NO: 868187 - DNA, 649 bp, Homo sapiens
catttatagcaaaagacattgtcttagtccattcaggctactataacagaataccagagactgggtgccttataaacaacagaaatttatttcttacagttctggaggctgggaagaccaagatcacggcactggtggatttggtgtttggtgaaggcctacgtcctagttcacagagggccatgttttcactgtataatcacatggtggaagggatgaacaagctctctgggttctcttttataagggaacaaatcccattcttaatgggacttgataccttcccaaagggctcatcttccaatatcaccaccttagagatttggtttcaacctaggaatctggacggatgaaaacattcagtccatagcaaacactataatcaaattccagtgctgaaaagtgaaaatgggtgcctgtaatgtatttttaatctcttttacattgacaagaaggaaaattwccaagagaaaagtatgtgagattgtgaataggaattcacaaaggacaaatccaaatagccaatagaatgtagaaaaaggcttaaaatctctaccagtcaggaacatgtgaacaactaatccaacaatgagttatgattttacaaacattagactggcaaaagaccaataacaattcttgctagtgt

SEQ ID NO: 868188 - DNA, 612 bp, Homo sapiens
atccaaaggcagattgatattgagtagttgctaattaaacttaacttaggagatatatctccagaacccagcccaaagtttgtagaaccatgaccatatagggctataatttcactgtgacctattctgtcaattctacctaaaataaatagggcactaagccactgtatcctgcccttgaattctgagcatcccatygggaacataacagagaagctgcgcttataggatcaagcaacataaaatctgtgcaaccaagactttctgtagcgtagtagccagatcaattgtgtgtttctttgttttgtttgcaagcagtaaaactggctctggctaactgaagcaacgcagctttagtggtaggacataggatcatttgaaaacttaaaaaacctctaaagagccaatcttaggggaaaaaaagaagcagagatccaagcagcaggaactaatcaacaattaaggtgacaacactacaaagaatcagctccaatcatcttttcatcctggcatcactgaactctataatatttggagtcctcaaaatgagaaatgagttggccttatttggttctcttactgatctcttggctagggcaacttgattgacag

SEQ ID NO: 868189 - DNA, 629 bp, Homo sapiens
caaatgtactcaactatctgagataataattcaactgtaacatagtgaaaattgaattctgtaacttattccacatcagtcatcatactcagcactgggcatatagagatgattaagaagggggctatgctatcaaaatgctcaaggtccagttggagagtgtcttagtccatctgtgttratataaaggaatacctggggctgggtaatctataaagaaaataggtttatttgactcacagttctgcaggctgtataagaaacattgcaccagcatctgcttctgatgagggcctcaggctgcttctattcatagtggaaggcaagccagtgtgtgcagtgagaaagggaatgaaagagagagagggaggaggtgctacgctctttttaataaccaggttttttaggaactaacagagatggaactcactctttactatgaggatgttaccaagccattcatgggggatccacctacatgaccaaaacacctcccattaggctccaacttcaatactggggatcaaatttcaatgtgatattttgagatgtcaaacaaaccatactcaaactatagcacagagagatgtacacatcaacaaaggcaatccccttggataagcacagtc

SEQ ID NO: 868190 - DNA, 629 bp, Homo sapiens
caaatgtactcaactatctgagataataattcaactgtaacatagtgaaaattgaattctgtaacttattccacatcagtcatcatactcagcactgggcatatagagatgattaagaagggggctatgctatcaaaatgctcaaggtccagttggagagtgtcttagtccatctgtgttaatataaaggaatacctggggctgggtaatctataaagaaaataggtttatttgactcacagttctgcaggctgtataagaaacattgcaccagcatctgcttctgatgagggcctcaggctgcttctattcatagtggaaggcaagccagtgtgtgcagtgagaaagggaatgaaagagagagagggaggaggtgctacgctctttttaataaccaggttttttaggaactaacagagatggaactcactcwttactatgaggatgttaccaagccattcatgggggatccacctacatgaccaaaacacctcccattaggctccaacttcaatactggggatcaaatttcaatgtgatattttgagatgtcaaacaaaccatactcaaactatagcacagagagatgtacacatcaacaaaggcaatccccttggataagcacagtc

SEQ ID NO: 868191 - DNA, 694 bp, Homo sapiens
gagtgcttctctcaggaggtgacatctgagctgaggtgtgaataacaagaaaaccaaaccaggcaaagatttggagacacggcagttcaaagtatagaaaaagaaaagtaaactactcactcttttaagaaagtgagaaggaggcagtgagtttgcagcttgtgaggaaaggatggtaggagttacaactagagaagaaagaagtcaggagccagatattgtaggccagaggttctccctgagagccgtcagggtagccatacctatgggcatttctgggactctttcagagtgggtttttttttgtttgtcagtgacaacaacagaaactccttcctggcattcagaaaacacaaaacaggactacaagggttcctgtagcacacaggaaagtctacacatcagagttgtgattcatcttatatgactttctaatgtcccactaaacacttatttagataaaacgccagctaatagttatccgatcctaaaatctaacttcattttaaatcagagcattttttaaactaaagatatattagtccccaactcttccaaaaacacaaataccttataaactgagggaagagtaaacatagttttgttctgaacatcaccaaaaacattttrggatataatgtcaccatagcaatgctgcttgaggtgtctgagttactaatcaaaacacaaacac

SEQ ID NO: 868192 - DNA, 670 bp, Homo sapiens
ctgccccaaattacagtgtttagaagtgatggaaccaggattgagccaatcttggtctagatctactactttaaccacaagcaatactgcctctgcttatgagcatgtgtgagacaccttctaaatactacctagatggtcagaaagagctaaggaaggtgatgcctgacctgagtccttagggtaaggagaaaccaaccagtctgagaaagagaaaaaaggtgtttagagagcattgcaaggaaaggggaatggaacagacagagcatagaagactttttgggcagttaaattactctctatgatattacaatgatggacacatcccactatacgtttatcaaaacccataaaatgtacaacaccaagagtgaacyttaagataaactatggactttgggagattatgagtcagtgtggtctcatcagttgtaacaaatctaccactcttttgggggataataatagtaataataattatgagggaggctatagatgtgtgggggtagggagtcgatgggaactctctgtaccttctggtcaatttcactacaaaaactactctaaaaaaggggggttgaaaagttacgtgttgggtacaagtttcactattcaagagatgagtacgctgaaagcccagactttagcactacgcaatatacgcatgtaa

SEQ ID NO: 868193 - DNA, 623 bp, Homo sapiens
tcctcataagccagaatatttttatctagcagatgcccagacacattcttcaacttagtatgggtggaaacttaaatccaaattacaattaagattcaaaaatgtttcttgaaatacattaggttttctctgaataataaaaatataaacaaatcccaattaatgaatttagaaatggaattgattaagaaaaaatgaaagctgtaataggaacagaacactgagcatcacatactgtgctagaccccagcaaggtatttgcttacatcattaggctaatgaaccagagctcattgtgtcattacagacatactctgccaactacttttacagtttaggtttttctgatagaatcactattgtttttttttaatatttaaattcatagaacttacttatctctccacattgtttttcaccattgtttaaatatggaaatgttatgtttaaagtctaatamtcaatacaacattgttaactaaacaatggatgaagaaaactctcaagtccattccaaacacagatcagaacatcagaatcagatttttacttttcagtaggctgattgtcatcaaagggaaagttgctagtgcaaagaggcatcaaagatcatgtcactgtac

SEQ ID NO: 868194 - DNA, 565 bp, Homo sapiens
atttgggtagggataaaggccacatacacccccaaattcccttgaccttcctgccactattagacaccctatgttaagaatgtaggttgtgttcctctatatgatagcttccagaatgtgagtatactcagattagagttagttgacactgagtcctgagatgatagctgctaggtgagaaaaactgtcagcatgcaatgaaggcaagcctaagtcagattctcataggacacaagacagcagtggaaagagaaagcaacactgcaataaattactgaaatttgacaacgttgggyccagtggcagagtgcaaggaaaaacaggggttctgaatttgctgctggctttgtttcctacacactctatgaccttggacaagataatgttacagaatctttggggtgtcgattttcttcccggaaacctctgtggctgctcatgcctttgcttgagttcttgtcctgcatccaggagaatgaggtacacagacaagtgaagggtgaacaagatgaagatgagctttattaagtgttacaacagttcagaggagatcagcagtgagtag

SEQ ID NO: 868195 - DNA, 565 bp, Homo sapiens
atttgggtagggataaaggccacatacacccccaaattcccttgaccttcctgccactattagacaccctatgttaagaatgtaggttgtgttcctctatatgatagcttccagaatgtgagtatactcagattagagttagttgacactgagtcctgagatgatagctgctaggtgagaaaaactgtcagcatgcaatgaaggcaagcctaagtcagattctcataggacacaagacagcagtggaaagagaaagcaacactgcaataaattactgaaatttgacaacgttgggtccagtggcagagtgcaaggaaaaacaggggytctgaatttgctgctggctttgtttcctacacactctatgaccttggacaagataatgttacagaatctttggggtgtcgattttcttcccggaaacctctgtggctgctcatgcctttgcttgagttcttgtcctgcatccaggagaatgaggtacacagacaagtgaagggtgaacaagatgaagatgagctttattaagtgttacaacagttcagaggagatcagcagtgagtag

SEQ ID NO: 868196 - DNA, 632 bp, Homo sapiens
cccatctaaaatggtaggtgacaggagcagcaatgcatcaggtatctattcaggcatacagggcctgagccatgggccatttccacatgagcacttgatagtcagccctctctcgctgtcaccatggaagcagtgggaaatcattaatgcttttacagacactttaggattggggccaggaaatagcctcttcaaattgtgtactggaggcccttcatggttaattcagaccagcacactcagctgatggactgagggttttgtacagagagcttgcaggttggaagaattctctctctcattctctctctctccctcattcacagccccagaaatacaatgctcttctcttttgcaaggcagctggggcycagaggggaaagtaagcatagagagtcaggatgcccaggtttgtgtctggactataacatcccatcactcttaacttggaaaaacacatgtccctcttcagaatccatttcctcatctgtcacataacagatgtagtgggctatggtgtttattgttcttttgtcttttcagaattcactcttatcctctttattttggtaatatcctcccttttattttggaaaattctttccctgctctggaccctaaaggtttcccac

SEQ ID NO: 868197 - DNA, 620 bp, Homo sapiens
tatgggtgagcaaagaaaatggtttcttgagatgaaagctattcctggtgaagatgctgtgaacacagttgaaatgacaacaaagggtttggaatattccataaacttagttgataaagcagtggcacagtttaagaggattgactccaattttgaaagaaattctactgtgggtaaaatgctatcaaatwgcagcacacgctacagtggtctttcccaaaaggaagggtccttagtacagcaatctttactgttgtcttattttatgaaattgcccacagccaccccaaccttcagcaattatcatcttgatcagaggacagccatcaacatggcaaaaccctccaccagcaaaaaagattacatacgactccccaaaggccaataattgtcagcaatttttagcatgaagtatttttagattaagatacatatgttattttttcagacataatgctattgtatacttaacgactacactagattataaacataacttttgtgtgtgctgggaaaccaaaactttcacgtgacttattttattagtgatattcactttatgacagtggtccggaatcaaacgcacaatatctccaaagtatgcctatatgaagcaagga

SEQ ID NO: 868198 - DNA, 540 bp, Homo sapiens
tctaagaatactgattgcaaatgtcaactatctactactacgtaaaacaccaccaacaccctcaaaagtatgtaaacacaggaaaaatcaaaacaaaaaaagtattgaagtccatatgttattaaatgttttacagctattttatttaaatactagctgtacctgccaaagcatatattttcctagcagatcatggaataaaatattaatgtatcctatttattcacatatttcattgcaaatataacatgatcacattcttcctagatttaacccttargaagcccaatgatttgagtcttaacaacacacagttgtcaatagacaaccagaggcttctggaggtacaagctgaatgtcaagtctcagaaattttcacaaatacgtttaggcaatgtattaaattcagaataagtgaagcacatttaatgatacatgttgcagaatctctacagttgactttttaagttaaggtaatgaacagtcagaaaaatgcatacagttttataggtagtcgttacccacttgtcacctgtcagt

SEQ ID NO: 868199 - DNA, 675 bp, Homo sapiens
tttgctcaatgttgtacgttgaaagttaggattatcagctataaaatattttccacatcgtagatgacattaaactgaaactatcacttttgagtggcttacaatatgtctgctattgaatgaactaaaaacaaaaacaaaaacacaggccttaggtttccatttgtgaaataaaatttggagaacaagtacaaaatgtcaaatgtctcaaagaagtcctctgaggaaattcttctttactgccagccaaaaatcacagggacacactgtggctgacttttttaattgtgtttttttagttgctggataattttctgaccattaaagacaatcacagccaagtctaacaataaaagtaattgaatctcatgcttgagagtatacagcccattcactgtaaggaggagaggaaggaggcaaatgagaggatgcaagaggtcctgaagtcattttctctcctgaaaagcagagcctgcctgcacaggagaaaagcccaagatggaagtacatttttatttccygagtgcctcactttccagggcccattctcccaagtggcacctgaaagccaccagaggccgaagaggcttaaccctggactctgcccaaagtctctgcccaaagtctcacaggtccagctcagcacatcgagatgaggtttccaagagaggacag

SEQ ID NO: 868200 - DNA, 735 bp, Homo sapiens
ctgggattacaggcatgagtcaccgagcccagctttataactttttaaataagtgaatgcctttcaaggtgttgttcacaaagtggtgtatgtccctgggaacaggtgtatctctactaaatacaatatctgatcattttactatcttatcccatttttaagttctatgtgcttttaataggaattgtatatagtgaaagttattatagagcttttttccttttttagaatatttgcatttggcaattctataaactttaaacaaagctaagcataggcaaaaaacaccctccaaacagataaactaaaacccataacaaatagcaaaggcctaaaaatgaaaaactgtttcattaaaacttattggtaagagtttcagtactttctccacaactattaaagaggtagacacagtattggacagtggaaaagagaaggcagatatggatgcacacaaaaaaagagaactcgcttctctaacctcagaaaagatcacaattctactggatggtttcactcagaccaaagcttaaagcatgtttgygggagggcatggcatggaggcaaaagaaagcaagggaccagagccttccacagtcaaatcgctgggatcttcacagacacccaacggctagaggagtggaagggatgaccatagatcatggtgcaaatatccagaaaagaaatcttcacaaaattttgttacagatcataaaataaggtttacacagaggc

SEQ ID NO: 868201 - DNA, 633 bp, Homo sapiens
atttataatcagtaaaaaaaagagataataaaacctcaagcatcccagtaatcacagaaacacaattgcaatagcaatgcctgttatattggacacacatagagccagtcactaacttatgatgggtcaacttagaattgttcaaatttacaatggtgcaaaagcaataagcattcagtagaaactatacttcaagtagccatacaaccattctggttttcacttttagtacagtattcaatgaattatatgagatattcaacactttattataaaataggctttgtgttagatgatttggccaactgtaggctaatgtaagtgttctgagcacatttaaggtgggataggctaagctatggtgttcagtagcttaggtgtattaaatgcattactgacatgrtattttcaacttacaatgggtttatctaggtgcatccccatcataagtcgaggagcatctgtatatataatggtcacgatggccaaggccagaagcaataggcatgctcaaatactgttggtggcagaataaaagctactgaaaataaatgtgatcatatttatcaagagtcataagttttcacattcttcaaactagtgattcttttcctgggaatttattgtaggtaa

SEQ ID NO: 868202 - DNA, 613 bp, Homo sapiens
cccaggagatttcaacctgactcatgcctttatcacatacaacaaaatttcatcacggtagtgctgccgactgtactccttggtgtatttctgtgtcaggaccacctctgtaaggggaaaaccatgccagtgagtacccagctgcagtcatcagctcaagcacyctgggcttgtttcaggaatcaattcttctaccagaattaagtatgggatcagtcctttccagatcttctctttcacactgcgtccactcaaatttaaggacaaggagtcacaaattacaagatatgatcttaaaagtaggactggaaaacctcacctgaaaggagtatggtttgcaagttcaaactttcagcagattcagagtattttttaggacaaatatacttagaaatctgaatgaatttgggaggtatggttgggcattgggataattgggcacagagaaatagaaggtgccaagaagaacattttcaccctgaagactattcactatctttacagtctatgggtgctagcccttatttacatttaaatcacaggcagggccttgcaatgtgctgcgagagtaattttcaaataaagaaattgacatccaaatgttctctcactt

SEQ ID NO: 868203 - DNA, 613 bp, Homo sapiens
cccaggagatttcaacctgactcatgcctttatcacatacaacaaaatttcatcacggtagtgctgccgactgtactccttggtgtatttctgtgtcaggaccacctctgtaaggggaaaaccatgccagtgagtacccagctgcagtcatcagctcaagcaccctgggcttgtttcaggaatcaattcttctaccagaattaagtatgggatcagtcctttccagatcttctctttcacactgcgtccactcaaatttaaggacaaggagtcacaaattacaagatatgatcttaaaagtaggactggaaaacctcacctgaaaggagtatggtttgcaagttcaaactttcagcagattcagagtattttttaggacaaatatacttagaaatctgaatgaatttgggaggtatggttgggcawtgggataattgggcacagagaaatagaaggtgccaagaagaacattttcaccctgaagactattcactatctttacagtctatgggtgctagcccttatttacatttaaatcacaggcagggccttgcaatgtgctgcgagagtaattttcaaataaagaaattgacatccaaatgttctctcactt

SEQ ID NO: 868204 - DNA, 619 bp, Homo sapiens
atcacccctctccaccccactacggacactggaggagcttgtgagcaggtgcccttgggagcagatgccttgcaggctttgcagattccccagggaatgactgcacgcactgcctaaagcacaggagagcagaggcagaatgctggatgggctcaggaggccaggtactccccgttcccaggctcaccactgcgtcatcctgaacagctactcaggcatcaggcactaagcaagaaacagcatagctgtttcccaaacagggtaggctcaaaccaaagaaagttcctgaaatgctctgtaaatgaacagttactactacatgctctgggtatattgctgatgaaaaataagtaggwccctcaacccagtattcaaaaaattcaggaagaatttgctagaccaattacacagaagaagctgtgtgttttttaacctagacagtaaaaaatataagggaatgacaagaagggagaaaaagtaatattaacttgaaacaggaaggcaatatgaatttgagtcaaatagaatagttacaccccatgtattcttgaaatttatatacagatatatctttctaccaccatatgcaagaaagaggttgattttttttttcagaaaa

SEQ ID NO: 868205 - DNA, 589 bp, Homo sapiens
tgggcagttactgactgacagccaacaagaaaacaaggacctcaggcttaccactgcaagaactgaattctgccaaaaatgatgtgagcttcaaagaggtcaactgagctccagaaagaagcacctcttatttatttatttattttattttattttattttatttagatagggtctcactctgtcacccaggctggattgcagtggcatgattatggctcactgaagcctcgaccccctgggttcaagtgatccttccacctcagcatcccaagtagctgggactacaggtgtgcatcaccatgctcttctaatttttttattttttattttttttgtagagacagggtctcgccttsttgcccagggtggtcttgaactcctaggctcaaccaatcctcctgcttcggtctcccaaagtgctgcaattacatgtgagccaccacgcttggccaggagcaccttgatttcagcctttaatactctgaacagaggatccagacaagctgtgcctagactcctgccacatgaaaacagacagataatacatgtatgcttttttaagcagctaagttcatcataatttgtta

SEQ ID NO: 868206 - DNA, 589 bp, Homo sapiens
tgggcagttactgactgacagccaacaagaaaacaaggacctcaggcttaccactgcaagaactgaattctgccaaaaatgatgtgagcttcaaagaggtcaactgagctccagaaagaagcacctcttatttatttatttattttattttattttattttatttagatagggtctcactctgtcacccaggctggattgcagtggcatgattatggctcactgaagcctcgaccccctgggttcaagtgatccttccacctcagcatcccaagtagctgggactacaggtgtgcatcaccatgctcttctaatttttttattttttattttttttgtagagacagggtctcgccttgttgcccagggtggtcttgaactcytaggctcaaccaatcctcctgcttcggtctcccaaagtgctgcaattacatgtgagccaccacgcttggccaggagcaccttgatttcagcctttaatactctgaacagaggatccagacaagctgtgcctagactcctgccacatgaaaacagacagataatacatgtatgcttttttaagcagctaagttcatcataatttgtta

SEQ ID NO: 868207 - DNA, 467 bp, Homo sapiens
ttaaaatgcatatttccggcagggcgtggtggctcaggcttgtaataccagttacttgggagggtgaggcgggagaatcgcttgaaccagaaggtggaagttgcagtgaaccaagatcgtgccattgcactccaacctgggcaactgagtgaaactctgtctccaaaaaaaaaaaaaaaaaaaaaaaaaaaaaaaatgcatatttcctttgactgagctaggaacctccctcaragggcagatgcagagtctcctgaaatacctgaatacatatgcaaacacatgtgcttgtatgtaatagtaaaccaaacaacaacaaaacaggaaattactcaaatgtccattagtagaggacactgggttattttctgagacgatgatgggttatttcttgataaatagatgctgttggaatagtatgacgccatgacaaagaatgaagcggcactacttatatacagatatgg

SEQ ID NO: 868208 - DNA, 635 bp, Homo sapiens
tcaggaaggtgtcagggagatgcaatgctatgcctgctggttaggagcctagagaagcacattttatagagcgtgagctctattgaatctaatgatagctgtgagccctaggcttcctgagctccccagagcgcggagcactgagtccaccagagctctggggcatcagggaagtgaggtagacagtgggacctgagcaacattttatgtttaatgatggactctttggttccagtcagcaagtgggcatgtgattcccccaccccttcagtctgcaggtaagtcgctgtctcagctagctgtttgtgatggccacctcatttgcaggctatgcaggtatgcttcccgaaaagtgtacrgaaaaaagcctgtcatgctccattatataaatggaccaaccactaccaaaataaaaaggaaaagcttttgttgtaccacccacctttggtttcctgaacagtctctttgggaggcaattcagagtacttttcccagaaagctaagttgcaactttcctatttttatatacgcttaacaaattatacaagtaatccattttttggagacagggtcacactctgtcacccaggctgcagtacagtggtatgatcacggctcactgcagccttgacctt

SEQ ID NO: 868209 - DNA, 610 bp, Homo sapiens
tgtttgtgccagaaaataagcatatcattatctaaaactctttgtgaccatttcgctctgacattctatcactgcattctgtagcaaagaccctgaaacatgtcacttttctgtagaccagtgtgacagaatttgaacaggcctgacacaagtgttgtgacttgtgatatggttttctggttagctggtagctagcacataggtaatgatatggctttaaagttagatttttaaaactacttttgatttgtgaccatgaaagagcaactcgttttcagccagctttttgaaattttttgctagttaatctaaaggaggttmctcttaattaaatgtgaatagtgatttttaagggcacttaacgacgtgtaagtagcacctagtaagcacatcaaaatcctacactgtcacaagttgccatcgcagatacttactcagaactttcttaacccaaatattggactttttaagagttgaggatcaagggcaattcgggaggggagtgacatttgtataaaaagaattgacattacatattttttagaaatatgtatttattgaatgacaaattaattttataatattggtggacctataaaatagttctatt

SEQ ID NO: 868210 - DNA, 610 bp, Homo sapiens
tgtttgtgccagaaaataagcatatcattatctaaaactctttgtgaccatttcgctctgacattctatcactgcattctgtagcaaagaccctgaaacatgtcacttttctgtagaccagtgtgacagaatttgaacaggcctgacacaagtgttgtgacttgtgatatggttttctggttagctggtagctagcacataggtaatgatatggctttaaagttagatttttaaaactacttttgatttgtgaccatgaaagagcaactcgttttcagccagctttttgaaattttttgctagttaatctaaaggaggttactcttaattaaatgtgaatagtgatttttaagggcacttaacgaygtgtaagtagcacctagtaagcacatcaaaatcctacactgtcacaagttgccatcgcagatacttactcagaactttcttaacccaaatattggactttttaagagttgaggatcaagggcaattcgggaggggagtgacatttgtataaaaagaattgacattacatattttttagaaatatgtatttattgaatgacaaattaattttataatattggtggacctataaaatagttctatt

SEQ ID NO: 868211 - DNA, 609 bp, Homo sapiens
cttacacatttgcagctacatgattgaaatgacagtgtgaataaaaagccaggggttcagtctaggtcccggtgctcactgcacagaaagcccatcactgaggcaagtattgtcagggaagaagactttaatcaggtgctgcagcccaggagatgagagatcagtctcaaattcatctccctgactgcctaaaattaggggtttctatatcaaggaaagaaatgtaatcatgtataaaccatatattaaaaaaacaggaaccgaggagaggtcaagatgaggagttggtcaagaggaggcaggtgatcagtcaggcagatataatggatgaggggtctggcatctcattgtctgggtgcagtgatctggtaagtctcagctccttarttctatctggggaggctgatggtttgttttgtgagaaaggaactcagataaaacaaatgtaactttctcaagttttaagacaggaaggatcaatttctatgtttattcaaagaaaccataaacatcagttatgtggaacaattaggtcagtttcaacagatcatcgagaggaaagattgctgcccattacaattcagaaactaaacaaatatttacttaatg

SEQ ID NO: 868212 - DNA, 734 bp, Homo sapiens
agattcttatcagactcccgtgctccgagtaactattagactcatttctctggtttgacactaaggatatctctggtttcttttcatgcatttgacatatttttgataagcgctgcagtgccaggacccatgtggacttctgggaatacagagatgaaggcaagcatgattttctggaggcagctgcacaactgtctagaagaatgatgtgacaacaagccactatgtctcttcccttcctcggccctcagtgttctcatccttataaatgggggtccaaactagataactcttaagttcctttgccagatagggactatttaaagacagcacctgcatggtaacacacatagaagacttaagatcagtggtagtttttatagttattaaggatattatatttttaaattgttatgtccttagtctggttttgttagatgagcaatatacttgaagttaaaaaacctggccsctgaccctggctctgtgacttctgcggaaggatcagaaacagagaacatctcaggcgtgctggcctcacagggtaaatctcctcatctccctgtctctgcttttcagggcactgtggggataggagcggtgctagcaaaaaaggatacacttcagcaattgtcatgcatagatgggtattctccctccgcaccccttccagggtcagccccaggagattctccataggctacctttctagcctctgcctctgcagccagggc

SEQ ID NO: 868213 - DNA, 656 bp, Homo sapiens
atataatgtaattgaaaatcaagtagattgtgccttcagacaccagttaatatttcattagtacagttagtctcaaaaatatagggcctagtatctgtgagtccattaactggcttctgtatgtattggctacagcagttactagctttatgaccaccatgtagggttgtgcaagtagtgagtgcatcgcgcaaatgtgcttggatgagggagcttccagctcaagctccactctctaygccagactatgtctgcttagaggactgagcacctttttctaattctctaccaggctgattcacctcctaatgtacacgaatatgagcacagattaaaggaagccctgatcatttctactttttgatctgtacagtatagcatttttatgcactaaaatttaattcattgcttctgatgattattgaaatgagtaaggatttaatatacactcttggtactttacaatcagtcactgctccctatggaatttcatagctcacttttataacagacattggtaaaataagaatctattgttaaagtactcatctaaaatattttaatactcattggagtgatttttgctagcaaagcttaaaaattaacataatgctttgtttcatcctgatccttaaagtaaatagacttaatccaag

SEQ ID NO: 868214 - DNA, 656 bp, Homo sapiens
atataatgtaattgaaaatcaagtagattgtgccttcagacaccagttaatatttcattagtacagttagtctcaaaaatatagggcctagtatctgtgagtccattaactggcttctgtatgtattggctacagcagttactagctttatgaccaccatgtagggttgtgcaagtagtgagtgcatcgcgcaaatgtgcttggatgagggagcttccagctcaagctccactctctacgccagactatgtctgcttagaggactgagcacctttttstaattctctaccaggctgattcacctcctaatgtacacgaatatgagcacagattaaaggaagccctgatcatttctactttttgatctgtacagtatagcatttttatgcactaaaatttaattcattgcttctgatgattattgaaatgagtaaggatttaatatacactcttggtactttacaatcagtcactgctccctatggaatttcatagctcacttttataacagacattggtaaaataagaatctattgttaaagtactcatctaaaatattttaatactcattggagtgatttttgctagcaaagcttaaaaattaacataatgctttgtttcatcctgatccttaaagtaaatagacttaatccaag

SEQ ID NO: 868215 - DNA, 656 bp, Homo sapiens
atataatgtaattgaaaatcaagtagattgtgccttcagacaccagttaatatttcattagtacagttagtctcaaaaatatagggcctagtatctgtgagtccattaactggcttctgtatgtattggctacagcagttactagctttatgaccaccatgtagggttgtgcaagtagtgagtgcatcgcgcaaatgtgcttggatgagggagcttccagctcaagctccactctctacgccagactatgtctgcttagaggactgagcacctttttctaattctctaccaggctgattcacctcctaatgtacacgaatatgagcacagattaaaggaagccctgatcatttctactttttgatctgtacagtatagcatttttatgcactaaaatttaattcattgcttctgatgattattgaaatgartaaggatttaatatacactcttggtactttacaatcagtcactgctccctatggaatttcatagctcacttttataacagacattggtaaaataagaatctattgttaaagtactcatctaaaatattttaatactcattggagtgatttttgctagcaaagcttaaaaattaacataatgctttgtttcatcctgatccttaaagtaaatagacttaatccaag

SEQ ID NO: 868216 - DNA, 576 bp, Homo sapiens
gagcatgtgatgagtgaggggagtgggggaccacttcccccttggcgcaaggggatcttataatgctctcttctaattgcctgcctgtgtaccacagtttacttctgctgtgatagatttagttgattaagtgtatttttaacacttatttttaagtttacatggaatgagtacagtctgtgaaaaatggcaccattcagggacaaacaaaattcattcagaatataaatattttatcagactgatatctgacacccatctatttggaaatgtctagctaattacatcaatttttctttctytttttttggggagtatctcataaacttagccattttccttggcataaaaagcaaatatataagcacttacataaattacttaatgttatgtttatgttcttaatagctcagtttagctgttaacctgccttcttggtaacaaaagctctgcctttactcttatccagacaacttgtttacttaacccccagccttactcgagggtcgcaagggaatccttgtccaggtatgataggaatatcctgttgctccttgggaactgtctttgtttgct

SEQ ID NO: 868217 - DNA, 622 bp, Homo sapiens
ccgggccacctttgaggtggccaggatttctaaagactcttcttttgggagttttaatttgggctttgaactagaacagattaaaatctactttaaaaaaaaattctctctttcctttagaaaacaagcagatttccccgtgcattttattcttggcaagctttggcatctaaaaaaaaatttctctctctctctcttkttttcatctcagaactgatggctgaaatgaacaaacatcactgttctgggagatcaaaagaacatacacattcatatatgtgaaaactacaataaatcaaattactgagggctatggattgagctttctagcacttgaaccacttctgatttttcaagtttgcaaaaacagattttagtggctgatttgactactaggagtgataggggtttttgtgtttgtttcttttttttacttaaatgataatatcagaaattaaaacatgcttttaaatccaacctgattttaagatgcaacttgtggtttctcaggttgtgagtcagaagcgacaaacgttttaaaatataaaatacttaaaatagtcaacatttagtgatgaattcaagttctccttaaagatttttgtctgaacaagtgcattgt

SEQ ID NO: 868218 - DNA, 671 bp, Homo sapiens
aatcataattagccctttgggtgattgagaatcacagattctgcaactccttcacttttcccttccttcttccaacttttctttcatggttctctctttttgctcattcattcattcattcattcattcattttacaggtttccgtagcatttgcttttcacagggtatgtcctcatatagctctcctaagaaaacttgctagacatgtgacatgtgatatggaagaataargtggaggaaagaagatctggtaatgtttttcttaatatgtcttttcaacccattttctaacggccttcccctcctccatggtttcttatttcttgtagcctaatacattttaattgacatttggattgtctttccttgaaccatctgatgccaattcactttctctttactcttcacctaagtttagcatgatgaagattaagaggaattttttaaaaagcaaagttttcttagttaatattaatttaatcccttgagaagattgcaatatgaagtgtacacgccactattaaataggaagggttctacaattatctgcactatatcttattaagtaaatatatcactatcagccctttctcagcatagccataaaaaaataaggtacaaaacctaagagattcaggccttgcagatcatgagaaacagtcttacttgc

SEQ ID NO: 868219 - DNA, 657 bp, Homo sapiens
ttccttcttccaacttttctttcatggttctctctttttgctcattcattcattcattcattcattcattttacaggtttccgtagcatttgcttttcacagggtatgtcctcatatagctctcctaagaaaacttgctagacatgtgacatgtgatatggaagaataaggtggaggaaagaagatctggtaatgtttttcttaatatgtcttttcaacccattttctaacggccttcccctcctccatggtttcttatttcttgtagcctaatacattttaattgacatttggattgtctttccttgaaccatctgatgccaattcactttctctttactcttcacctaagtttarcatgatgaagattaagaggaattttttaaaaagcaaagttttcttagttaatattaatttaatcccttgagaagattgcaatatgaagtgtacacgccactattaaataggaagggttctacaattatctgcactatatcttattaagtaaatatatcactatcagccctttctcagcatagccataaaaaaataaggtacaaaacctaagagattcaggccttgcagatcatgagaaacagtcttacttgcattaccacttgtttaggaaactctgttctgtttctgagtttaaacttt

SEQ ID NO: 868220 - DNA, 671 bp, Homo sapiens
aatcataattagccctttgggtgattgagaatcacagattctgcaactccttcacttttcccttccttcttccaacttttctttcatggttctctctttttgctcattcattcattcattcattcattcattttacaggtttccgtagcatttgcttttcacagggtatgtcctcatatagctctcctaagaaaacttgctagacatgtgacatgtgatatggaagaataaggtggaggaaagaagatctggtaatgtttttcttaatatgtcttttcaacccattttctaacggccttcccctcctccatggtttcttatttcttgtagcctaatacattttaattgacatttggattgtctttccttgaaccatctgatgccaattcactttctctttactcttcacctaagtttagcatgatgaagattaagaggaattttttaaaaagcaaagttttcttagttaatattaatttaatcccttgagaagattgcaatatgaagtgtacacgccactattaaatargaagggttctacaattatctgcactatatcttattaagtaaatatatcactatcagccctttctcagcatagccataaaaaaataaggtacaaaacctaagagattcaggccttgcagatcatgagaaacagtcttacttgc

SEQ ID NO: 868221 - DNA, 609 bp, Homo sapiens
ttttggaatcagaaaatcatgcttaattctaaaaagttatttttgtgttataattgaatctcatgtattctttttatctttgggttaaagttgtctatccttttttttttttagcatttctctttcattggtagcttcttaatctttttcttgagttgtttggattacattaagcacattgttagtttttaaaaatcttacatatrttcactctcggggtatacagcttttggaggtaacttgagtattagtagcaaactcctgaatagaaggagggaaaatggtttcctcctatgggttgttgatgtatcagctaaaaatctgtaagacttttgttctgtcaagataaagtccaacatttttagcatggtagataatgtccccatcattccactaacatctcttgccaccttcttaaatgcaccctgtgttaagatattctatctgggattccacatacaacccattttcttatgcgtttgtacttttgtaaccacaatatcttctgcctggtatacttttccccactcttgtccttccaggatattctttcttattgatactttgagattcagctgggcaggactttcacttcaagaatggcagggc

SEQ ID NO: 868222 - DNA, 674 bp, Homo sapiens
agctaaactggaaggccatgaagatcagtacgtaacttaagttttttgttttggtttggttttacctccatatcttttcatgcctttgacctttagaagatttgcagtggtgaatctagttttcaaaaaatgattgaatactcacaggacacttacgckgcttttgttttggccagacctatctgagataaaaacagagcctttgtgtgataaaaacagagccttcagaacccatttttttttaacggtgccagacgttcagctagtaaggtattcagtgctaggatacataaatattttccctgtcaatgagcgaatacaaaaatgttttaaaagaggatgaccagaaacttctgttttgacaaactatgaagaaaataaagatcaatattaagcactttcagccaacagccctttgaggccaatgtatacctttaaaaataaataaagtgtaccaattatatacattgttcatatattagttattcttggggtcaaaattagaaaaacaatacatataaaatgtggctgatctgtaactttaactaacactgggtcatatatttccttaccagctccaaaaacagtcaggcccacttaagtcattgaaacaaagacatttatattattattctttgggagatgggggacagggttaattaattaattaatac

SEQ ID NO: 868223 - DNA, 460 bp, Homo sapiens
tttatgccttccctttttagaccatatagggtaactttctgatgttgccatggcatttgtaaactgtcatggtgctggtgggaatgtagcagtgaagatgactagaggtcattcttgttgccatcttagttttggtgggttttagcctgcttctttactgcaacctgttttatcagtgaggtctttatgacctgtatcttgttctgaccttctatctcatcctataagttagaatgcctaaccatctgggaatgcagcccagtaggtctcagccttattttacccagctcctattcaaaatggarttgctgtggttcacacacctctgacaaagaggaatagaatatgataaatgtagctataccacacatcttctggcttgggacctcaagcagaaagttgtgggttttttggcccttgagaaaggggactaaaaatgctccatggggatgaggcccgg

SEQ ID NO: 868224 - DNA, 618 bp, Homo sapiens
cattcaaggtctcttactcctaaacccagttgcaatacttgtattaaaccctgggctccaggctgcttcagtgctatttaactttctctttacaaagagaagagaaaatgtgggggtatcagacatatcccacccttccaaggccccrtgcagactcttaaaagatgagggggtttttgtttgtgcatatggatcaaagaaagactttcttgaattttggtcagcagggtttgttttagatctgtgaagtgtggaagaggtctcaattgagtgatgtcatggaggactgggaggatccctttcctcatgcagaatcactgttgaggtgcattcaaccgttagaattccgctaaggtaaaatacggggaaatagcataggttaggagtcattgtacctagtttccaagcctggttctgctcctgtaatttataacttcatccatatgttcgtttaattaggaaacaaaacagtcattgaattaatatatgtcttgtactattatatgtgctgagtattcagtgtgaaataatgcaatatttttattgatcttatattgtggtggggaaagcaataattcacacatacatatataatataataataccaatgttatgaag

SEQ ID NO: 868225 - DNA, 618 bp, Homo sapiens
cattcaaggtctcttactcctaaacccagttgcaatacttgtattaaaccctgggctccaggctgcttcagtgctatttaactttctctttacaaagagaagagaaaatgtgggggtatcagacatatcccacccttccaaggccccatgcagactcttaaaagatgagggggtttttgtttgtgcatatggatcaaagaaagactttcttgaattttggtcagcagggtttgttttagatctgtgaagtgtggaagaggtctcaattgagtgatgtcatggaggactgggaggatccctttcctcatgcagaatcactgttgaggtgcattcaaccgttagaattccgctaaggtaaaatacggggaaatagcataggttaggagtcattgtacctagtttccaagcctggttctgctcctgtaatttataacttcatccatatgttcrtttaattaggaaacaaaacagtcattgaattaatatatgtcttgtactattatatgtgctgagtattcagtgtgaaataatgcaatatttttattgatcttatattgtggtggggaaagcaataattcacacatacatatataatataataataccaatgttatgaag

SEQ ID NO: 868226 - DNA, 593 bp, Homo sapiens
gttaaaatattcaaagacccttactttgttcacaaggatatctaaagtataaataagcattttaaagctaaccgggcatgatacatgttaaaggtatctgctttaaaaatattaagttataaatataaaggtaaaattggaaaaacagacgacatagctaagactaatattcaatctaaaaaaaagactggggaaaaaaacaaaggtataaaaaaggaaacaaatgagaagtaaaaagaagacggtagaaacaattccaaatatagtatgtcagcaatcttgccaatgtggctggactaaatccatcatttaaaagacagagatggccaggcgcagtgagycacacacctgtgtactttgggaggccaaggtgggggaatcacctgagcccaggcgttcgagagcagcctcagcagcatagggagatcctgtcactacaaaaataataaaaaatattatccaggcatggtagtggggccctgtggtcccagctacttgggaggctgagatgggagtattgcctgagcctgagaggtcaaggctgcagtgagctataattgtaccactggactccagcctgggtgacagaacaa

SEQ ID NO: 868227 - DNA, 593 bp, Homo sapiens
gttaaaatattcaaagacccttactttgttcacaaggatatctaaagtataaataagcattttaaagctaaccgggcatgatacatgttaaaggtatctgctttaaaaatattaagttataaatataaaggtaaaattggaaaaacagacgacatagctaagactaatattcaatctaaaaaaaagactggggaaaaaaacaaaggtataaaaaaggaaacaaatgagaagtaaaaagaagacggtagaaacaattccaaatatagtatgtcagcaatcttgccaatgtggctggactaaatccatcatttaaaagacagagatggccaggcgcagtgagccacacacctgtgtactttgggaggccaaggtgggggaatcacctgagcccaggcgttcgagagcagcctcrgcagcatagggagatcctgtcactacaaaaataataaaaaatattatccaggcatggtagtggggccctgtggtcccagctacttgggaggctgagatgggagtattgcctgagcctgagaggtcaaggctgcagtgagctataattgtaccactggactccagcctgggtgacagaacaa

SEQ ID NO: 868228 - DNA, 580 bp, Homo sapiens
cttccagagtgcctgaggatataagggctgaagaagttcgctggttctcagtggtcattccagtgtcactgtattgctttaatatccctaaaccttgatgctgttccaatatggtcttttgtaaagagggaattgattggtgctcaatgaaaacactgaaagtccttcatttcaggactgtaaaagagacacacgacaggacactacccgaatctgcttttttttctgtcctgttcatacacagtctccactccccasacagttactgggggttctcgctgaaattcattcctgtgttcacctatcagtcaataccaagtcaccacttagcctcagtcatattttctctttcctgctctagttctcctgatcagcatcttcaacttccaaagtcatgcaggggactcttaaccatactatcactaaggttaacctcgattttaacaccaatatttatgccaaggggaccatcaccttaaggtgttggttaagggtcgtgctatggcctgagctaatgcaatgaaacccttcccagtgctttgtcacacatttcagccaaacagcattcacagaacccttt

SEQ ID NO: 868229 - DNA, 580 bp, Homo sapiens
cttccagagtgcctgaggatataagggctgaagaagttcgctggttctcagtggtcattccagtgtcactgtattgctttaatatccctaaaccttgatgctgttccaatatggtcttttgtaaagagggaattgattggtgctcaatgaaaacactgaaagtccttcatttcaggactgtaaaagagacacacgacaggacactacccgaatctgcttttttttctgtcctgttcatacacagtctccactccccagacagttactgggggttctcgctgaaattcattcctgtgttcacctatcagtcaataccaagtcaccacttakcctcagtcatattttctctttcctgctctagttctcctgatcagcatcttcaacttccaaagtcatgcaggggactcttaaccatactatcactaaggttaacctcgattttaacaccaatatttatgccaaggggaccatcaccttaaggtgttggttaagggtcgtgctatggcctgagctaatgcaatgaaacccttcccagtgctttgtcacacatttcagccaaacagcattcacagaacccttt

SEQ ID NO: 868230 - DNA, 579 bp, Homo sapiens
atcatttttattaaactctattgcaccccaattcataagtaaaaaaagcaaaaaggaatcaactattattttccaaagaaaaatgcagttatttttgttacaattttgaatagattaccaacttttttctttttatcacaaaaatctaatttgaaggaatgatcctcattcctttccataaaaaatcaggattttagttatagtcaggagcctagaataatcctaatctgaacttttcttacatcccatcctgcagctagaaatatgattttcaaaaaaatacgaaggcttcaacgttctttgtggtgaagagactggaagtgacactrtggggcttgcgagacatgacatcataatattaattgcttgatcgtataaagtgtccttagtgaagtatacaagatgagctatgtctggctcaaactagggctgaaaatactgaggatgttcaaatattgattagttttcatttgtgtattatttacttattgttcagctattcaaaaaaatgatttacggcaagagatcgaatttggatttagtgcatgagataaagacctatgagtttatttaacccac

SEQ ID NO: 868231 - DNA, 613 bp, Homo sapiens
ctgtgccaggccagagtcagagggcaatttatgccccagccagagcaaggaggtggcacaggcaagcagaatgcactccctgggtccctctggatgccaaacagcactggaaattttcacgaatgctaaattcacttgccactttacaggaagcgctgagccttgagccatctttccttcagcagttccaattttttccagttgcctttttccttagccatcaggaccatctgcccttgggcatgtgggtctaaattgatcatcttgttaaatatccagagactcacactcacacctacacacgagtgaagtcacatgatcatcacccacactcccccataggccaaaacacatttgtgtacttcctggccttgccccctaaataaatttctggtcgttgaaatttagaaagaaccaagaaaactaatgcagcctttcttgacgtatgaatgcytaaattcaagccccatcttttttttttttcttttttttttttgagacagaatttcacttttttgttgcccaggctggagtgcaatggtgcgatcttgactcaccgcaacctccacctcccaggttcaacaattctcctgcctcagcctcctgagtagct

SEQ ID NO: 868232 - DNA, 606 bp, Homo sapiens
tagtaaaatttactcttttggaatctgaagacattcatgagtctttgcatcttatttcctgaattctaacttcccttgcctttatgaatgacaaagaagatgcatacaacctttgtaaatgcttgctgaatttgaacattatgttgctttgtgattgcctccacttgggattccaaatgacatcatgtggattcactggaggcctcgggtagctggggaactgaggggataagatgcacacatggtacacaagcacacgtacaccaacaacgtaaatagacacgtaactagaaacagctgtgcagagccatttagtaaaaggttgagtagctggaaccatcaggagtgcgtgggaatgagttcaagctccccccatgaggccttcctaaggctttgcaggagggcaagaacaaggtctgggaagtggggaaatgggatggctcagtctgtccttagcatctcgatcctggstgactctccaccactcctcacccttgcaagattacacactttgatttatgtgacatttaggcagaaagcagcctagagcactctgggggtattaacccagaagacatacaaatcagattggaccaaaggggaaag

SEQ ID NO: 868233 - DNA, 607 bp, Homo sapiens
acaaaataaaggtgcctggactgaaaaatttttaatgtcccttctggctctgatattctctcttctaacattatttattcaattttagagtttatagtccatttctgacaatccctatctatctatctatctatctatctatctatctatctatcatctatcatctgtctatcatctatctatctaatccatctatctatctatctatctctatatcyatatgcttaacatgtttttgcatgtgtctctatgtttcaaaagcctatttaaataaatctttcatggccttttagtctttagagggaaggtgaggctgtttatattacaggaacatattttatttgcccacagcagccagagcacagcatgctattactataaatggggcatgatagtgttttgttatgaaacgtcttttgatgtaggacagctacagcccaatgacttccaaatatatttcatcctactgtaaaaaataaaatgacagatcttctcatggccacggggtctctgcacacatttccaggaacttgaggccatttactaaatccaaacagataaacattgttttaatggtgataaatgtgtccactcacctttgaacaag

SEQ ID NO: 868234 - DNA, 634 bp, Homo sapiens
atttctcttccacagaaggcagacctcaagatccaggaggcaaagttcaggaaggggtcaagacaggagtttgagaagcaagattttcctgactggctgttagaagaaaccacatcccacggctggattagccatctccagaaaagtctggcggaagttacccacccacacgacaatctgaagaatgtgcttgtaagattaaagtgayctctaggtcttcaggaagcagctgcgtcaaatgtaatctctgtaaaatatttttcatatttagaaaatataaaaggttacacaagtacattaacatgataaaataatgatgagataatggcaagtgtctctcaaatctagctagaggaggaggggagtcctgatgctgacatcgaggggaggggattttgggaaggtgcagatatattaggtagacataccaccattaaaagggtgtgtcaaaccataaaagtttgtaaaatattcttagtaaccaatcaatagtcctcgctctatttttatagtcacagagtaatcttttgatctcccattattctttgctctctaaatacagattgagtaacttctatgtgagaggtactgtgagaaatatttgtattttggtcttaattttttgttggatttt

SEQ ID NO: 868235 - DNA, 634 bp, Homo sapiens
atttctcttccacagaaggcagacctcaagatccaggaggcaaagttcaggaaggggtcaagacaggagtttgagaagcaagattttcctgactggctgttagaagaaaccacatcccacggctggattagccatctccagaaaagtctggcggaagttacccacccacacgacaatctgaagaatgtgcttgtaagattaaagtgatctctaggtcttcaggaagcagctgcgtcaaatgtaatctctgtaaaatatttttcatatttagaaaatataaaaggttacacaagtacaytaacatgataaaataatgatgagataatggcaagtgtctctcaaatctagctagaggaggaggggagtcctgatgctgacatcgaggggaggggattttgggaaggtgcagatatattaggtagacataccaccattaaaagggtgtgtcaaaccataaaagtttgtaaaatattcttagtaaccaatcaatagtcctcgctctatttttatagtcacagagtaatcttttgatctcccattattctttgctctctaaatacagattgagtaacttctatgtgagaggtactgtgagaaatatttgtattttggtcttaattttttgttggatttt

SEQ ID NO: 868236 - DNA, 611 bp, Homo sapiens
tataattatgtacctgtaaaacccaagagaatcaacaacaaaactaaactataaaagtattcattatatggatttgcatataaaaatcaataacctttatatacacagaagaatcagccagaagttgataatggtagaaataatttatttacagtarcaacaaagaaaattaatttaacaagaaatatgtaacaatgcaaaatctttatgagaaaaacctttagacatgttttaaaggcacaaaagtggacttgaacaaattgaaagacataccatgcccttggataagatgacaccacgtcaggaataaagatcagttctttcaaagttactttatacatttaatgcaatcccaattataacaccataaaaatttttttatgaagctcatcttcatttgaaaatgtaagcacaccagaatacatgaaaaaccttgaaaaagaaagcaatggggagatactaattttcctagatattaaaacatacaataaagcctcaataattaataattaataaagtctccataaacagcactggctcattagagaggatgtcacttgatacgccctcatgagaggaatttggtaagatcaaataaaactatgtttatg

SEQ ID NO: 868237 - DNA, 617 bp, Homo sapiens
aaagctagaaagatctcaatttaataacataatatcacaactaaaagaactagagaaccaagagtaaaacaaccccaaagctagcagaagacaaaaaaataaccaaaatcagagcagaactgaaggagattgagacacaaacaaccaatcaaaagatcaataaatataggagttggtttttggaaaaaaatgaaagaaaaatacatcactaggtagactaataaasaagaaaagtgagaagatccaaacaaacacaattagaaatgacaaaagggatattaccagtgactccacagaaatacaaataactgtcagagagtattatgaacacgtctatgcacacaacccagaaaatgtagaagatatgaagaaattcctggacacaaacaccctcccaagactgaacaaggaagaaattgaatccctgaacacaccaataatgaactccaaaattgaatcagtgataaatagcctaccaaccaaaaaaaaaaaaaaaaaaaaaaaaagcacaggacctgatggactcactgccaacttcgacaggatgtacaaaaaagagctgatactgctcctactgaaactattccaaaaaattgaggaggaaggtcttctcccta

SEQ ID NO: 868238 - DNA, 629 bp, Homo sapiens
atattaaatgacatatccatattaaagtcttttttctaaattgtttcatcacaattttaaactaagcctgaggaaaatgccctagaatgaccctggtgaaactacaaataaaggaaaattcaaagtatttcccttgtgttaaatggaaaattgttagggatgaagatgccagattgaaagatgaaaagagaaaaaaaatctaatcaggaaatgcaaaagctaaggttttagcaaattagctcaccctgatgactcatcccagatgtattaagttcacatttaacagcctcttcattgaagatacaaaataccatctgtctgttgccgatgagttaatgttagtctcaaagccttaaagttcacatttcctaattcttttgtttggaaataaataacctttatgttgcagtgggaatgtaatttttctttyttttttttttttttttttgcccaattgagaggaataaatacaaaaattccaaaacgaagctctcaggttgtgaaatgttctgtgggtcaaagacgcctggctctgtgtacaagctgcctcgcctggatccatccctgggattctttttaggattatgttacttgcctctttagccaaatctcaattcttcattcaagtt

SEQ ID NO: 868239 - DNA, 650 bp, Homo sapiens
cctagagaggcatgtcttcattcaatctgtctctgagctaaacattcctgtggtatttcttcttgaggggaaagtcatgacttgcattttctacctgctactctgagaaatatttccagattggtggtccatgcttgcaaaatatttctcttggcccacaagagtttwaaaaaaaatcacttggcaagattaaaagtcacaagatactaaacaagaatacatgtttaccacattttgctaagaatttaagggtcccaagaatgaagtccccatgtttattggagtagttgccccataactagggcagtacccagtccaccacacacttcaccagttcttactgccttttccacactaaggaaggccaagcagcagttgtcatttagtatcttgtggttctttctttgtttttctttctctgtctttttctctttttaattctgggtccacttcactcctttacattacaaacctggcacctcaggctattaaatttgtcctgaaactgtatgtcactatgtctcataaaatttcatatccagaactaagcacaatagaccacttttagaccaccctctttgattctgatgttatattgctatataaaaataaaaattgcattacattttttgacatcccaagtaagctta

SEQ ID NO: 868240 - DNA, 652 bp, Homo sapiens
cctcccccaactctggcaacaattattgtactctctgcttctatgagatcaacttttttagattccacatatgtgtaaatcatgccatatttgtctttttgtgcctggtttatttcacttaacatactgttcctcaggtttatccatrttgccacaaatgatagaatttcattctttgttatggatgaatagtattccattgtgtatgtgtaccacattttctttttccattcatccaatgatggacacacactgattccataacttgcctgttgtgaattgtgttgcaataaacatgggagtgtagatgtctctttgaaatattgacttcatttctttaaaatataaataaattttaaaaagaaaccaatgaatcaacatcagatttacagtcattcatcagataaaaaagttcataatataaaataaaaatacataatgcaaaattcgtatggtaaaagcaaatactatgaagttgcttaaaaatgaaatggatctatctgtgtgtatagatgtatattgtaaaaaaaaaaatagttacagaatactacatagagctgtttctcaacattggctctcttgacatttagggcaggatacgtctttgctgtgggggttgtcctgtgcattgcagggtgattagaatcatccc

SEQ ID NO: 868241 - DNA, 650 bp, Homo sapiens
caccgcaatgccttttccctagagagcaattattctatggaacaatatcccttacctggtgcattgaagtcccaaaggttggctgttaaacttgcagttgtaattcgtgaaaaagtccagaatgccaagttttgaactgctggggattttatgcacagtttcattttactagaaacaacttgtttcttttctgcctttccttgcaaagattttgaataagtagctgaaaaggcagaaacttgaaatagaagttttcatatttaaacccaaagttacctaactgaaacctgtgtatcttctagcttcttgatktgtgaaattatactgctgacttggaaatgtagacatttgggtgtttgtatgtattcagatgatcatctattttgatatcccaatgaggtaaaatgattagaaaaaaggagaaaacacaggcctcagagttacatttcaaagtagtagagaatttcaatacataatacaattgtgcatatgaatctctgggccttgaagtaaaggattctttctgaacacttctcttatctgcagaatatttggaatatttcactcagcatgtacgcaaataaagctaccatcattagacgtgtaaagtctaaagaagtcacttacctccttgaggtatttgatattga

SEQ ID NO: 868242 - DNA, 636 bp, Homo sapiens
ttggctaggtctttgttttctagctttgtttccaaaaggatgcttaagaaaacagagtttttttcccctatccatttatctagggtagaaagtcactgccctgtgagaagaattacccttccaatcatgacagcttctattccaacttttcatatacctgactaacctgtaaacatatcccacaaaccacatacacaggctacctattaaaactctcccatatacctaacacatacacatgcacacacatacaaaatatatacatatcacacacttagagaatgacagatttcaggcaatggccaatagtcagtattgagttttyctgaccccagaatctggttgggctttatgatctaaaaaaatgtggtttagaaaagaggataattggtagagctgtagtttgaaaatatcaggtcaaagttgcaaacatacttatgatggaatcatttcatttttagttcctttcccagaaaagctgagagagcacactgttccagctgacttttttttccattaatagccgttctattcaacaaagagctgcccacatgccaggaaagtgctacagtccttctaagcttttaaaaatggggatcaagctacatgcagccagttggaatacttaagatcttt

SEQ ID NO: 868243 - DNA, 636 bp, Homo sapiens
ttggctaggtctttgttttctagctttgtttccaaaaggatgcttaagaaaacagagtttttttcccctatccatttatctagggtagaaagtcactgccctgtgagaagaattacccttccaatcatgacagcttctattccaacttttcatatacctgactaacctgtaaacatatcccacaaaccacatacacaggctacctattaaaactctcccatatacctaacacatacacatgcacacacatacaaaatatatacatatcacacacttagagaatgacagatttcaggcaatggccaatagtcagtattgagttttcctraccccagaatctggttgggctttatgatctaaaaaaatgtggtttagaaaagaggataattggtagagctgtagtttgaaaatatcaggtcaaagttgcaaacatacttatgatggaatcatttcatttttagttcctttcccagaaaagctgagagagcacactgttccagctgacttttttttccattaatagccgttctattcaacaaagagctgcccacatgccaggaaagtgctacagtccttctaagcttttaaaaatggggatcaagctacatgcagccagttggaatacttaagatcttt

SEQ ID NO: 868244 - DNA, 599 bp, Homo sapiens
ttcactccaatttcccaaatgttaatatcttacataaaccacagtatgataccaaactcagaaaattaacattgatacagtaatgttatttaatatatgtcttactcaaattttaccatttcttgttgctcatttgcaattccatccattatcatctcccttcagcctgaagaaatttgccttgtagaacaagaacagtagtagttcttgtaggcaaactttttgaaaagtaattatggttttttttycctctctctttctaaaaatgtcattattttgcctttaatttttaagatagggttctaggtttacagatttttttttccaatcccttatagatgctcttcttttgacttctaacatctattattttaggtgacaattccgggttttttatttgtttgttttcttggtaccaatttgcccttataccttttttctttgcctgcttttaatacttttttttttctcatcttgggttttcagcagtgtgactctggtatacattgttctaattttcttcttatttatcctgtttaagtttcagtgatatttaatgtgagttgaaatctttcaatagtttttgaaaattctcagcc

SEQ ID NO: 868245 - DNA, 585 bp, Homo sapiens
ttggagttttactagtattcattttattgtgcttcataacttcataacaaatcctatccttatcaacttgttaaaaatattttcatgcacctacaatgtgtcagttaccattcttgtgcatagaagtggatataacaccaaatgtgcttgcataaccaccatttgttttaattaaaaaataaattaaacaaacacaagaaaaactttatcttttacctctcctctaactccaaaggactggaaaatagcaaccactttcagtctccctgcttctaaaactttctccttccagtccrttctcaaaactgcgtcaacctaaataataaacaaagagaggctctctaaaagaaaatgatatttattcagtaatggacattgcaatgggaatacacataccatagtaaactatgcaagtgttcagggaggcaaaaagaagaaaaaaagtttttaaagcaaaacggagtaggattacataattgttttcagataattatctttggctacatggatcaataacaagggaggaactagtccgaggttggagaggcagttgctgggcagaagtcctcccagaaatattttttt

SEQ ID NO: 868246 - DNA, 556 bp, Homo sapiens
ggagtaattaatcattccactgtctttttcaataattccctccgtggcttataacaacgatttatgttattgctataggtcttcaggttgactgtgagtcatctgctctttactggacttggcttggtgattcttttttcaggcagtgggtgagctggccttggctccaggtttgctccatgtatgtgtaatctgggatctaggctgaatggtcagyggctacctagggcatgtccttcacatagcatatcacagagtccaaggagagtaagtgcaactatgctagctcatttcaagcttctacttgtatcttacctgctaatatcccattggcctaagcaagtcatttggaaaaacttaaagtcaatgacagctgcccttgagaccatcacaaatgtgtggatgcatagttctatcactgtgaagtagagaatttggaccaacaacttaatctatcccaccatggtaagatttttcttttattctgagtaagatgagagtgagatgagaaccatggaaagaactaagtagaaaggcaacagcatcttacttcttt

SEQ ID NO: 868247 - DNA, 620 bp, Homo sapiens
aagtatatacaattattatttatccatttaaaactaagataaagcttaaaaagaaaagcaataaaattaaaccatagttactatgcatgcataccacttagtgaaataataaggaaaagcagagaagtgattaacataaacgtcaagatagtgatgttttaggggaaaaagagtttattattaaaaggagcatatggaagttttctgagttgtgggctattacctgttttgaagtttttggtaatttataataattcattcrgttgtacttatattttatacatttttgtccatcgtagttcataataaactggtttagaaaattcccttatgccaaattaccttccttctcaagtgtccttacctcccctaacatacacatccaattattcctccattctccatgtgagcagctgagaataccctctgtggtgggcagaattccacaatgacccccaataacccttttccttgtataattccctccttataaaatgtgggcagaacttgtgctgtcgatagtatatcaatcctattattattttctattaaatgacaaaatgtaattaaggttactaatcagtttgctttcaggtaattaaaaggggattattcaagta

SEQ ID NO: 868248 - DNA, 620 bp, Homo sapiens
aagtatatacaattattatttatccatttaaaactaagataaagcttaaaaagaaaagcaataaaattaaaccatagttactatgcatgcataccacttagtgaaataataaggaaaagcagagaagtgattaacataaacgtcaagatagtgatgttttaggggaaaaagagtttattattaaaaggagcatatggaagttttctgagttgtgggctattacctgttttgaagtttttggtaatttataataattcattcggttgtacttatattttatacatttttgtccatcgtagttcataataaactggtttagaaaattcccttatgccaarttaccttccttctcaagtgtccttacctcccctaacatacacatccaattattcctccattctccatgtgagcagctgagaataccctctgtggtgggcagaattccacaatgacccccaataacccttttccttgtataattccctccttataaaatgtgggcagaacttgtgctgtcgatagtatatcaatcctattattattttctattaaatgacaaaatgtaattaaggttactaatcagtttgctttcaggtaattaaaaggggattattcaagta

SEQ ID NO: 868249 - DNA, 620 bp, Homo sapiens
aagtatatacaattattatttatccatttaaaactaagataaagcttaaaaagaaaagcaataaaattaaaccatagttactatgcatgcataccacttagtgaaataataaggaaaagcagagaagtgattaacataaacgtcaagatagtgatgttttaggggaaaaagagtttattattaaaaggagcatatggaagttttctgagttgtgggctattacctgttttgaagtttttggtaatttataataattcattcggttgtacttatattttatacatttttgtccatcgtagttcataataaactggtttagaaaattcccttatgccaaattaccttccttctcaagtgtccttacctcccctracatacacatccaattattcctccattctccatgtgagcagctgagaataccctctgtggtgggcagaattccacaatgacccccaataacccttttccttgtataattccctccttataaaatgtgggcagaacttgtgctgtcgatagtatatcaatcctattattattttctattaaatgacaaaatgtaattaaggttactaatcagtttgctttcaggtaattaaaaggggattattcaagta

SEQ ID NO: 868250 - DNA, 634 bp, Homo sapiens
tctgcagcttctttgcttctctcagccttcactgaattgaaatgagttagacccttgccctggattatgctttactgtaaaggaaggttgtgtctggtttgatcttctatgcaaaccacaaaaactttctgtatcagaaataaggttgtttcactttctcatcattcgtgtgttcactggagtagcactttaatttattccaagaacttttctgttgcattcacaattttgctctttggcactagaggcctcactttcagcctgtcttggctttcaacatgtcttcctcgctaagcttaatcatttctagcttttgatttaaagtgagagacgtgcaastttttctttcacttgaacacttagaggccattgtagggttattacttagcctaatttcaatattgttgtgtcttagagaatagggaggtccaaggagtggaagagaaacagggaaatggccagctggcagagcagtcagaatacacacatttatcaatttaagttcaccgtcttttatgggtgaggtttgcggcatcccaaaacaattacaataatgttatcaaagatcactgatcacagattggtatatcaaatataatatcataagaaagttgaaatattgtgagaaatacca

SEQ ID NO: 868251 - DNA, 609 bp, Homo sapiens
gaaaatccctctgcaaatacgaaatgctttgtaaataataacaagctacttgagcagttattattaaagagatcttgaacaagctgcccctatgcatacacatacacacactcagacacacaggcacacacacacacacaaacactgtggatgctaaaagatttattgatgatgattctcatgtggataaatggcttgaatgcaggcttacctcatggttgcagcaaacactggttgacctcctgaggtcctttcttgacctattaacctgttgtttcatgttgatgatgctaaacctaatgaatttagagtgggagccatttctaaatgtaccctcagcagtaaggacaatatttatcagtattactgagctttaggcttcatttataaagtgtattaacatcaatcattttacaagtatgtatttctcagaayggctgcactttgcaaaacaaacaaaagaactctggaagaatcagtggatattataatatatggcacagtgctgaggtaacaaaacagttgtataattattcccagcatgacatgttgatgtacaaaaactttggtttcctttaaacagtgtctgtcaattttcccacatcagtg

SEQ ID NO: 868252 - DNA, 602 bp, Homo sapiens
catctggtgttccagggaatctcttccctgccggggcttacattccaagagcaggtctatgccgggcataagagaccaatggtccctgcacttaagctgctaatactggaggaatctcagtactgattacaccatcagggtgcttctatataaagtaaattaaacaaatcctggtcactggaatgttttgctggtaacatttatgtgcaatacttttaaacatacttatgcttttaaaacacacccacaggaaagcaatgaagtctgaagtgcagacaaaaggtgaagaaaacctgcattcttaaggaaaaaaaaaaaggttagactggacctgaccaccattttccaaatggtttttgtgtaagagtttcataagtyggccaagtttaaggcattctgcattcttaaccttccttttagagattcactatgcaaattaattaatttaaggctctgagaagtcctgcagtgaagcaacctgttcaaatttatttggtctggaatttttcaaacttatttatgcccaggacatttttctcaaatgacccctatttgtaacccacacactcaggggaaaatgttggaccagacttagtgctgat

SEQ ID NO: 868253 - DNA, 576 bp, Homo sapiens
tcctccccctttagaccatatctctcatggtgctggtgggagtgtcacttagcatacttatgaattataattagcatataatgagcagtaaggacaactagaggtcactctcgacgccattttggttttgctgggttttggccagcttctttactgcaamctgttttaccagcaaggtctttctgacttgtttcttgtgcctacaccctttctcatcctgtgacttagaatgccttcatcttctggaaatgcagcccagtaggtctcagtcttattttacccagcccctattcaagatggagttgctctggttcaaatgcctctgccattaccattgattgagcatttattacatgtcaggcactggataagaacttgtatgtataaaacaacttaatccttttaacaacccacacaggaagctgttaatgtttaacaaaagaacaggctgaggtttagtgaggtcacctaatgggtagaagtcacatgtcagaggcagtgactgagcggcacactacctatctttcatctataatctgcaccaagtgccaaataaaagggtcaaggtgaagggag

SEQ ID NO: 868254 - DNA, 576 bp, Homo sapiens
tcctccccctttagaccatatctctcatggtgctggtgggagtgtcacttagcatacttatgaattataattagcatataatgagcagtaaggacaactagaggtcactctcgacgccattttggttttgctgggttttggccagcttctttactgcaaactgttttaccagcaaggtctttctgacttgtttcttgtgcctacaccctttctcatcctgtgacttagaatgccttcatcttctggaaatgcagcccagtaggtctcagtcttattttacccagcccctattcaagatggagttgctctggttcaaawgcctctgccattaccattgattgagcatttattacatgtcaggcactggataagaacttgtatgtataaaacaacttaatccttttaacaacccacacaggaagctgttaatgtttaacaaaagaacaggctgaggtttagtgaggtcacctaatgggtagaagtcacatgtcagaggcagtgactgagcggcacactacctatctttcatctataatctgcaccaagtgccaaataaaagggtcaaggtgaagggag

SEQ ID NO: 868255 - DNA, 538 bp, Homo sapiens
aaatgaggttgaccagaggtgaactgggcaggtggcaggagaaagggtcggggaagggccaggcaagaaggactttttgtttcatattgaggagatgagaccctattctacagatgacaagaatccatcaacaatttcaaacagatcccagttgctstgtgtgtgtgtgtgtgtgtgtgtgtgtgtgtgtgtgtgtgtgtgtgtgagatgcgttttggggaggagctgatggttgggaaagaaggatccacttatagtgaggggcctggagatacacagggtgaggccagtgaacaggttattgtaatccttctagtgagattttattcaagaagataaaaggaaataatgcagacatttttgtttgtttgtttgtttccatagaattacaggctggtaactacaatctattaaccaacaggcaattgttttgaaaacctacagatgttgagtgaggaaatgggaaaacagaagtgggtaaggcagacacagactctgctgtcctgctgcttacagtctaggggtcgggaataggtgg

SEQ ID NO: 868256 - DNA, 538 bp, Homo sapiens
aaatgaggttgaccagaggtgaactgggcaggtggcaggagaaagggtcggggaagggccaggcaagaaggactttttgtttcatattgaggagatgagaccctattctacagatgacaagaatccatcaacaatttcaaacagatcccagttgctctgtgtgtgtgtgtgtgtgtgtgtgtgtgtgtgtgtgtgtgtgtgtgtgagatgcgttttggggaggagctgatggttgggaaagaaggatccacttatagtgaggggcctggagatacacagggtgaggccagtgaayaggttattgtaatccttctagtgagattttattcaagaagataaaaggaaataatgcagacatttttgtttgtttgtttgtttccatagaattacaggctggtaactacaatctattaaccaacaggcaattgttttgaaaacctacagatgttgagtgaggaaatgggaaaacagaagtgggtaaggcagacacagactctgctgtcctgctgcttacagtctaggggtcgggaataggtgg

SEQ ID NO: 868257 - DNA, 611 bp, Homo sapiens
tttttttgttgcagttgtaaagaactggtcacaaaaacacaatctgccagcatatgtcctttccttttctcttccagctgaaattccttcgaaatcttgtctgagttcatgagcctttattaacaaaaggtagagaaaagctgctgaaactgtacatcaccaggaggcatagttctaatactggttctagggtccaaacagagatggggaaatctcctgtttttatttctagtagtgagaaagtgagtcttcagtgacatttacgcatgtgcgggaatggggagagaccattacacacagagaccgtytgatagagaaacatctatagagatggaactagaatagcaacagtggtgttttaaagtgctgataattgtaatgctctttaatttctaatgttcttctgtgcattatttttatagcttctttatttttacagctgcccctatattgaagaaacaaaaacaaataaacacaaatctatttcccttagaaatttaattctaaacctgaacaactgactcgaattttctgccaatcctcttggaaactggccaggggacatccttccaaggcaagtgtagtcccccagaatattggcactctggaaa

SEQ ID NO: 868258 - DNA, 659 bp, Homo sapiens
gaaacaacaatctacatcaatgacactcaattccaggacttttctggactttttgagaaagtggagttctttctattggagtggtaagcctggaggttctgggggccaccatgtgctgaatctgcctgagaatgaaacccgagaaaagcagagctgagagaataaaaaaaaagatagtgccttgattaaaccatctgagtccttgggcggaatacagtttttattattttattttttgcctaagtcaatttgggctgagtgtttgtgcaactcaagaakcttgaatgaatacagtggcaggctgggttctccagagcagacagagccagggtttaggttgctggatgtttatgaaggacccacatccgtggagggaaaggggaggtagcatgactacacagcagagggcaaacttcttcctcttgctgatctggcaaagcctcagccaacctggtaggtgctctggactgctttggctgtctgaagtatcctgtgttgggtcagagtggccctgcttttatagcctgacttgctcagtctccagatggggctgccccaggaagggtatgtacttgagtgaggtagctccctgaaggagctgacagctggaggctgtctgctgaccttgctccctgcagctgggcagcaactccttcttt

SEQ ID NO: 868259 - DNA, 512 bp, Homo sapiens
cacccccattgcacatgctctgtataatcttctctccctgaatatgagtaggtccgtgaatatgagggatcttactcccatgattaggttaaattagctgacaaagctgaagggattttgcagatttaagtaaagtgccaagtaaatcaacattgagttaatcaaaagggagattatcctaggtaaacctgacctaaccaggtgatcccataaaagggactggacccttctggaagaaagagctttgaacccacagagattctcctgacagccttaggaaagcaaatagtcatgttatggagaggaccagatggcaggtaaattcttttcacaaccatttctggyagtatccttcctgtccgtgggtttaatgcattctcatcaacacacatgatgtatccatcagggcccaggcaagagacagaaaccacatcagttatttgaacagggaaaatttaatacaaagatgccttaactagataagtagttgataactagaaaaatcaaagaat

SEQ ID NO: 868260 - DNA, 612 bp, Homo sapiens
taatcctagctgcttgggaggttgaggcaagagaattgcttgaacccgggtggcggaggttgcaatgagccgagattgcaccccagcctgggcgacaagatcaaaactcagtctcaaaaaaaaaaaaaaagaaaagaaaagaaagaaaaaaaggaaatggtggttaatagcgaatacccagcggctgattttgttttgcattatcacttgggcaacgtaaaaagcaaattcagaaattttggatatcytaaggcaagatttggttatttctgcaatactaagtgaaatacatagtaccactaaaactcctaacagggaagtgagtgagaagcaacaagagattatgaaagtatactactggttcattattgaggatatagtatttttagtttttaaaattctatttttttctttttatagtttatttttgtccactgaaatttcctaatttttaatgtactgtgtacattcctttatgttcttgacacagttctcatagctggtttaaatttgtttaattggaacatttgggtcatttcatggtagatcttttggtttcaggttggtgtgatatggagaccccagattttgttatttttctctgaaaggtgt

SEQ ID NO: 868261 - DNA, 589 bp, Homo sapiens
aatgaaaatttactataatggaagaattgtaaaaatgagtcagatacacacaaccacgcatcagcatggtcagaagatctggctttggattattatgtgctagttaagagacattaagtaagtttcttaatctaatttttaccttttgatttctcatctgtaaaatggactttatactagtgcctgtacawaaaactgttaggagaaaagtgaggtagtgtacgtaagatacttagctcctagtatttcagaaagccagctcttctgctgactttagaaccattatcttcatattacaatgatgtcatttggagttggcagtgaatatttgtgttatgagaaacagtatatatatatgtatatatatagtgctgtgtgaggtaaaaagcactagatttggagttagccgcatgtggttgaatctaggttcttgtacatagaaaatgtgaccttgggtatattaactcctgaaagattgaattcttcaactgtaaaatggggataaaaacaattgtgcctttcagggtaagaattgctctgcataatgacaaacattgaagtctgaaaaattagtccttcatttccttta

SEQ ID NO: 868262 - DNA, 589 bp, Homo sapiens
aatgaaaatttactataatggaagaattgtaaaaatgagtcagatacacacaaccacgcatcagcatggtcagaagatctggctttggattattatgtgctagttaagagacattaagtaagtttcttaatctaatttttaccttttgatttctcatctgtaaaatggactttatactagtgcctgtacaaaaaactgttaggagaaaagtgaggtagtgtacgtaagatacttagctcctagtatttcagaaagccagctcttctgctgactttagaaccattatcttcatattacaatgatgtcatttggagttggcagtgaatatttgtgttatgagaaacartatatatatatgtatatatatagtgctgtgtgaggtaaaaagcactagatttggagttagccgcatgtggttgaatctaggttcttgtacatagaaaatgtgaccttgggtatattaactcctgaaagattgaattcttcaactgtaaaatggggataaaaacaattgtgcctttcagggtaagaattgctctgcataatgacaaacattgaagtctgaaaaattagtccttcatttccttta

SEQ ID NO: 868263 - DNA, 608 bp, Homo sapiens
tctggtacatgtttatttactgttcattttaaaactgtttcacagacaaggacctgagaaatgccaactacattccagaaattgttattcaaattgaaacctttaaggagattcttaaatgtatcttatcttggattttrtattttaaaactttttatttccagagtaagagcaaaaaagaaactatgtacttgtatatcacaagtaaacaatttcgggtccctggggtttgttattacttggaagctcacttgtttgccttgtgaattatctatgcttcctcttcaaaatcactgaaatacatttccttatagaaacccaataatcttgagatagaatggtgtaatgtatcatccaaaacacaaaatcacttaccttggttcatactgaacctgagaaagaaaaatcagacctggtttgtaaataggaataaaatttccctacatttttaatggaagatatctgaggtgtcagagtagagaaaaaaatggcttttgcttcctagaatggcaagtcaatgtcataatagtattaccatctttgtgagttgctcctttttcatagtctcatcttcaaaaaaaaaactcaagaataaagcaaaacttttt

SEQ ID NO: 868264 - DNA, 628 bp, Homo sapiens
ggtatctacatctttgaaaaaggaacagtttagccccctgagaagtaaagcctaaaagttgtccagcttaggaaacaaaatgctgattcctcaaatccatttatgacgttttaaagatttaacaaaaaccctctactgaaaaagaaaacaaacaacaacaacaacaaaaacacacacacaaaaaaccaagcaaccaactaatcagactatctgaattacagctctcccctcaagttatttcccatttttataatgtcaccatcatttgctcgagccaagaaccatctttaattcctctctttctctgaaaccatatgtactcaatgaacaagttttccaggactttttccaaaatacatgtaaattcagtcctttgctcccttgcagttctctagtccaagctccaatsatcttcagcttgttttattataacagtcttctaaatagtctgaatatttttccagttcctctaattaatccacaaaaaaaattttttttgaaagatcattcagataacatcactttcccatttaaaacctctcaatgcttattgtcatgttaatataaaatggaagctcactattctggtctataagatactacatgatttggattctgtctggatttc

SEQ ID NO: 868265 - DNA, 628 bp, Homo sapiens
ggtatctacatctttgaaaaaggaacagtttagccccctgagaagtaaagcctaaaagttgtccagcttaggaaacaaaatgctgattcctcaaatccatttatgacgttttaaagatttaacaaaaaccctctactgaaaaagaaaacaaacaacaacaacaacaaaaacacacacacaaaaaaccaagcaaccaactaatcagactatctgaattacagctctcccctcaagttatttcccatttttataatgtcaccatcatttgctcgagccaagaaccatctttaattcctctctttctctgaaaccatatgtactcaatgaacaagttttccaggactttttccaaaatacatgtaaattcagtcctttgctcccttgcagttctctagtccaagctccaatcatcttcagcttgttttattataacagtcttctaaatagtctgaatatttttccagttcctctaattaatccacaaaaaaawttttttttgaaagatcattcagataacatcactttcccatttaaaacctctcaatgcttattgtcatgttaatataaaatggaagctcactattctggtctataagatactacatgatttggattctgtctggatttc

SEQ ID NO: 868266 - DNA, 638 bp, Homo sapiens
gcaaatcaactagaaaatcatacagtagcataatgaaaagaagaaaactgtctatatggaaaatccaaagacagaagcttagattattgagttgagttgttttttttttttttttggagatggagtcttgctctggagtctcgctctgttgcccaggctggagtgcagtggtgcgatctcagctcactgcaacctccgcctcccgggttcaagcaattcctctgcctcagcctcccgagtagctgggattacaggtgcgcaccaccacaccctgctaatttttgtatttttactagaaacggggwttcaccatgttggtcaggatggtctcgaactcctgacctcatgatccacccacctcggcctcccaaagtgctaggattacaggcatgagccaccacgcccagccaagttgttcttttctaagtgttacaggaaaggcatctggatccagaccccaagagagggttcttggatcttgtgcaagaaagaattcagggagagtccatagagcaaagtgaaagcaagtttattaagaaagtaaaggaataaaagaatagctattccatagacaaagcagcctgagggctgctggttgcccatttttatggttatttcttgattatacgctaaacaag

SEQ ID NO: 868267 - DNA, 596 bp, Homo sapiens
gtgccctgggcactgccaagaactcagcatggctccatctcagactctaacaggaggaaagatagaaaacccttccttacactgccacctctgggaaatatttcacacccctaacagaatgacagttgtgaagaacacctagccagcttgattgacaggacccaaggacaggtaaggcagaagaggagcctgaaggattagaaaccatataggaaacacttcccagcaaaaacccaaatgtgaaatcaagctgaacgattaaaatggcttactcrcaacaggacttcatggtgaaaacccaaaaagtcgctgccaatcaggtgctctttttgcaattttttttaaattcatttatacttttaatgaaaatgaatgctggggcatgagaaaattttgttaaccctcaatgttgcctaatcatggctaacaaggattctcatacttcttcttgactgaggattaagctgctgacagcaagtttattaaatgaagtcattgtaatgaggcagccagctaagtctgcagagctctgtcctgtggttcatggtaggtatcatttaaccaagagccatgagttgatggacctcagtaatcac

SEQ ID NO: 868268 - DNA, 596 bp, Homo sapiens
gtgccctgggcactgccaagaactcagcatggctccatctcagactctaacaggaggaaagatagaaaacccttccttacactgccacctctgggaaatatttcacacccctaacagaatgacagttgtgaagaacacctagccagcttgattgacaggacccaaggacaggtaaggcagaagaggagcctgaaggattagaaaccatataggaaacacttcccagcaaaaacccaaatgtgaaatcaagctgaacgattaaaatggcttactcgcaacaggacttcatggtgaaaacccaaaaagtcgctgccaatcaggtgctctttttgcaattttttttwaattcatttatacttttaatgaaaatgaatgctggggcatgagaaaattttgttaaccctcaatgttgcctaatcatggctaacaaggattctcatacttcttcttgactgaggattaagctgctgacagcaagtttattaaatgaagtcattgtaatgaggcagccagctaagtctgcagagctctgtcctgtggttcatggtaggtatcatttaaccaagagccatgagttgatggacctcagtaatcac

SEQ ID NO: 868269 - DNA, 578 bp, Homo sapiens
cacaggacctgtgacagaaggtatcctggggcatgcaatgaaaggacgaaaggcaagactgattggataagcaagccacaggagagacctggtgtgagaagaactagaagaggcaggtagggacttgtaggttatggctggacttttctctttcccctaagaacaatgggaagttattcaaaagagagagaatcaggctgggcgcggtgactcatgcctgtaatcccagcactttgggaggctgaggcaggcagatcaccaggtcaggagatcgagaccatccttgctaacatggtgaaacctcgtctctactaaaaaaaaatacaaaaaattagccaggcgtcgtggtgggcacctgtagtcccagatactcgggaggctgaggcaggagaatggcgtgaacccrggaggtggagcttgcagtgagccgagatcacgccactgcacgccagtctgggcgacagagcaagattccatctcaaaaaaaaataaaaaaaaacagagagagagagaatcagactcagatttgaatttcaagatcactctggctgcagtgtggagtctcaatgggagggtgg

SEQ ID NO: 868270 - DNA, 640 bp, Homo sapiens
tgaatctagcaattatgtgtcttggtgttgctcttctcaaggagtatctttgtggcgttctctgtatttcctgaatctgaatgttggcctgccttgctagattggggaagttctcctggataatatcctgcagagtgttttccaacttggttccattctccccgtcactttcaggtacaccaatcagacgtagatttggtctttttacatagtccgtatttcttggagggtttgttcatttctttttattcttttttttgtaaacttcmctgctcgcttcatttcattcatttcgtcttccatcactgattccctttcttgcagttgatcgcatcggctcctgaggcttctacattcttcacgtagttctcgagccttggctttcagctccatcagctcctttaagcacttctctgtattggttattctagttatacattcgtctaaatttttttcaaagttttcaacttctttggctttggtttgaatttcctcctgtagcttggagtagtttgatcgtctgaagccttctcctgtcaactggtcaaagtcgttctccgtccagctttgttccattgctggtgaggagctgcgttgctttggagggggagaggcactctgctttttagagtttccagtt

SEQ ID NO: 868271 - DNA, 640 bp, Homo sapiens
tgaatctagcaattatgtgtcttggtgttgctcttctcaaggagtatctttgtggcgttctctgtatttcctgaatctgaatgttggcctgccttgctagattggggaagttctcctggataatatcctgcagagtgttttccaacttggttccattctccccgtcactttcaggtacaccaatcagacgtagatttggtctttttacatagtccgtatttcttggagggtttgttcatttctttttattcttttttttgtaaacttcactgctcgcttcatttcattcatttcgtcttccatcactgatwccctttcttgcagttgatcgcatcggctcctgaggcttctacattcttcacgtagttctcgagccttggctttcagctccatcagctcctttaagcacttctctgtattggttattctagttatacattcgtctaaatttttttcaaagttttcaacttctttggctttggtttgaatttcctcctgtagcttggagtagtttgatcgtctgaagccttctcctgtcaactggtcaaagtcgttctccgtccagctttgttccattgctggtgaggagctgcgttgctttggagggggagaggcactctgctttttagagtttccagtt

SEQ ID NO: 868272 - DNA, 602 bp, Homo sapiens
ttccacaatcccacaacggtcatatggtccgtgcaccaggcatgtaatttgctaatctcatgattagacatgcacacaaacctcagtgctattctaatgaactctgcagttggcctttggattgtttctccctaaacaaatctctaggcacatgtgaatggaattagtcttctgatcactctgacctsctgcacactgttgttgaatacttttagtctgtagtacttcctgggttgtgggcagcccaggtttctgtgatcagaggcacataccttggttctgggtgctgtctttgggtcgacaatccccaggcgagaggggcctcacacttagtcttgatgtgctttggatgtagaagttttgggaagatttctgggttatttctttctctgattttattcttttgttgtcttggcaactagaataatagtcttaagtgtctgtgtttgtatattctttggagaatattttatcacaaatcttttccaagaatgcctatctcatgatgcattgattattcctcaatgtcttccttttttttttttttctgtatatgcttgttttccacagttgggagaaagaaatgtttgtacgacgtaaac

SEQ ID NO: 868273 - DNA, 589 bp, Homo sapiens
cttgttaaaaaaaaaacacagatgttttatatttattttatcatttttgttttatcaccttgcaaaattttacagcatggaattttattcaatgcagtggcattttgaacagcaatattagacagatgtatttgcaccatatttggggacttttttttctctttggcaggatattaaaagtgaaactaatgtaacctggtgttttgggaaatgtggacgaggcattttgcttattggtaattgaaaacaacaaccttctcctctccaaatgtacccctcaaaaaaataagctttattgcttggataagtgattaaacgtttttagaatgccagaagttcaaatgaagccactttaaggaagacttggctcctcaaatgcagggactgtgtcttttgacttttgctggatggtgccagrcaggacctaaccaatcatcctgttgatttgttgcttttgttgttttaggattttgtaaggacatatggcacagatacagatcacaatacagctaagaaatggaattattttcaggcatagtataaataagccaaatctcacttttttccttctactttgtaccccttagct

SEQ ID NO: 868274 - DNA, 622 bp, Homo sapiens
gccacagactctctgttggttcgcccaccctccaggtcacaacaaaatcccctattaattaaactaaaattatgtctgaaataaatcactcagtaaaagaaacccactatggcatttttttttcctgaagatgtttgcaataattaatgaaacatttggtggctggtgacatttttgataactcttaaagtgccagaaaatgttgacatrtatgtaatctccatggactcgagaccaagaaatcagatgattaaacaagggctgaataataatttttatttttttctaaagatcatgttgcttttgggggagatgtagaggaaagggtggtggaagatatcttttgaagagaaatccaatttttcatctccatggtatagtctttctcctatctaaagtatttccagtccatccaaagttataagcttagatactaataggttcacccagtgagtctcagcctggtgggaggttgtgtggtacagagttactgcaatggtttgtgaatctataacggccccaggcattgcagagatgcaaaaaataaatatacttcccatacattctttcattcaatacatgtatcttgaggctcagcccactatatgccaagctctgtcct

SEQ ID NO: 868275 - DNA, 552 bp, Homo sapiens
aattagttcctagaagtatttaatcaacttgtgtggaatcatccatgtagtgcatggtgaacacaaacttgggaatctgtcgtttttgaagcctctgttttttcctaccaaattacatttcctcaataagttgatgaattttccaaatttctaaaatttttccattagacctgctatagaaaataagtaactactttccacaatggattttaagttacaatataaacaccatatactctaattgacctaggatcaatgatcaatgtactttatttatggacattttctttcctgaaaatayaattaagatacttaatatttgtgataaagcagctatctgataataatcaatatggattctgaactcctcagagttaaatgcaaggggcagaaaaggaaggaaagaaactactatttactgagggcctactatatgccaggcagtgtgccacatttttttcatatctactctagcatttaatcctcataacattcctatattggtaggtaatactgcacccactttatatatgaagaagctgaaggcttgta

SEQ ID NO: 868276 - DNA, 552 bp, Homo sapiens
aattagttcctagaagtatttaatcaacttgtgtggaatcatccatgtagtgcatggtgaacacaaacttgggaatctgtcgtttttgaagcctctgttttttcctaccaaattacatttcctcaataagttgatgaattttccaaatttctaaaatttttccattagacctgctatagaaaataagtaactactttccacaatggattttaagttacaatataaacaccatatactctaattgacctaggatcaatgatcaatgtactttatttatggacattttctttcctgaaaatacaattaagatamttaatatttgtgataaagcagctatctgataataatcaatatggattctgaactcctcagagttaaatgcaaggggcagaaaaggaaggaaagaaactactatttactgagggcctactatatgccaggcagtgtgccacatttttttcatatctactctagcatttaatcctcataacattcctatattggtaggtaatactgcacccactttatatatgaagaagctgaaggcttgta

SEQ ID NO: 868277 - DNA, 658 bp, Homo sapiens
tgttgaagtgttctctagttgtccccaaattaagcaactttcctaccttgagtgccaatataaagcattgcttatactaattacatagcccttgatatttacaaccataatgctttggcgtctttccatgatcttatatataatttctccaactagttcttaaggtatttgagggcagtactktaccttattattattttgcttcttatcttcctccttcttctcatttttaaattctccttaagacctatacagtgtgtgttaggtacacactgtgtattcataatctatttgttggttattatgagccaaaaataaaatgatagctctcaaaaccaaaaaaaatgcaaaatcttatcttaggcggtgtgacatctgtagtgcattcagatccagggtgatcactctgaactccgcaccatttatgttgtaagcattgtgcactattccaggaggatgtggtcatgagaggatagagctcagtttcccaccccaactcttcaagagcagttctaccatatcagaaggctattatatacaatttcatttggataaagttctttagctaggacaaaattaaaaggaacatggacaaagaaatgaggaattcagaaattataacgagcttttagaggcactgggggtgttcagggatatc

SEQ ID NO: 868278 - DNA, 607 bp, Homo sapiens
tatttgttggttattatgagccaaaaataaaatgatagctctcaaaacmaaaaaaaatgcaaaatcttatcttaggcggtgtgacatctgtagtgcattcagatccagggtgatcactctgaactccgcaccatttatgttgtaagcattgtgcactattccaggaggatgtggtcatgagaggatagagctcagtttcccaccccaactcttcaagagcagttctaccatatcagaaggctattatatacaatttcatttggataaagttctttagctaggacaaaattaaaaggaacatggacaaagaaatgaggaattcagaaattataacgagcttttagaggcactgggggtgttcagggatatctgagaagacatgatgcccgtcttcagttaattgaagtcaggtatacacaggattcatgctaaatagcacctgataattgacctaaagtgaattgatggttagattttgagttagtctcaggaagactttaatagtagagagtaccgtcaatggactgggctttcctattaagtatcatgctctgtatcattggaattttccaaagggagtcaaacaggtagacttctgttatgaaga

SEQ ID NO: 868279 - DNA, 658 bp, Homo sapiens
tgttgaagtgttctctagttgtccccaaattaagcaactttcctaccttgagtgccaatataaagcattgcttatactaattacatagcccttgatatttacaaccataatgctttggcgtctttccatgatcttatatataatttctccaactagttcttaaggtatttgagggcagtactgtaccttattattattttgcttcttatcttcctccttcttctcatttttaaattctccttaagacctatacagtgtgtgttaggtacacactgtgtattcataatctatttgttggttattatgagccaaaaataaaatgatagctctcaaaaccaaaaaaaatgcaaaatcttatcttaggcggtgtgacatctgtagygcattcagatccagggtgatcactctgaactccgcaccatttatgttgtaagcattgtgcactattccaggaggatgtggtcatgagaggatagagctcagtttcccaccccaactcttcaagagcagttctaccatatcagaaggctattatatacaatttcatttggataaagttctttagctaggacaaaattaaaaggaacatggacaaagaaatgaggaattcagaaattataacgagcttttagaggcactgggggtgttcagggatatc

SEQ ID NO: 868280 - DNA, 626 bp, Homo sapiens
aagagaagcacagctaatctgggcaggtagagcctcggcgtcattacaacttgaatatcaaaggaatgtgactttcttggtatcccagtttattgaagcaggtcatacctgctttacatgggttttctgtatgtatattaggaaccccagcctyatgagtctcccagttcattgggcaaacatctgccgctgatggtgagactttgttaatccatatccaacatgagctgcacctctctgtcttctctcctttgatcccacccatgtttttctcccttgaccatcttccccttagctcatatgcagctcatgagccccattgccccactcctgtcccttctaactgccttatatatttttccacttttggagttttttgttacacataattaaaaatccaaaggtgatgaaaaatggcaaatgattcaaacctgggtaaatctattcatgtcagaagtctgtagttactggtatttatttcttttgtgttccagtggtattttcattgttgctggccccatccctcctctttttctctagggagaaatcttggctgctggcttctttaaagtgtttcacagatgaagggaatatcaaggacagacttaaaagagggaagaagacta

SEQ ID NO: 868281 - DNA, 626 bp, Homo sapiens
aagagaagcacagctaatctgggcaggtagagcctcggcgtcattacaacttgaatatcaaaggaatgtgactttcttggtatcccagtttattgaagcaggtcatacctgctttacatgggttttctgtatgtatattaggaaccccagcctcatgagtctcccagttcattgggcaaacatctgccgctgatggtgagactttgttaatccatatccaacatgagctgcacctctctgtcttctctcctttgatcccacccaygtttttctcccttgaccatcttccccttagctcatatgcagctcatgagccccattgccccactcctgtcccttctaactgccttatatatttttccacttttggagttttttgttacacataattaaaaatccaaaggtgatgaaaaatggcaaatgattcaaacctgggtaaatctattcatgtcagaagtctgtagttactggtatttatttcttttgtgttccagtggtattttcattgttgctggccccatccctcctctttttctctagggagaaatcttggctgctggcttctttaaagtgtttcacagatgaagggaatatcaaggacagacttaaaagagggaagaagacta

SEQ ID NO: 868282 - DNA, 641 bp, Homo sapiens
acagtttcttttcttttttttaattaatgtgatgcattacattaagtgattttcaaatgttaaaccaatcttgcatttctgggataaaatccacttaacagctgtatataatccttttaacatgctgctggattcagtttactaaattttaaaactaattttgcatctatatccatgaggaactgaatatgtagttgtcttttcttgtcatatctttatctggctttagtatgagataatacaggcatcttaaaatgtgccaggaaacattccctccttctctattttctgagagmgtttatgtaagattggtcttatttcttccttaaatgtttagtagaattcaccagtgaagccatctggacctgggctttttttgtggaagattttaaatttctaattcaaatcatagaagaaatctaataatttaaaaagattttgtaagatttgtgtctttctaggaattttttctatttcataaaaatggtctaatatgttaacatcaattgttcatactaacctcttctaatccctttaattacaatagggtctgtagtgatgtttcctctatcactcttgatttggtcaatttgtgtcttctttcttttcttgctcatgttagctcaggggttagctaacta

SEQ ID NO: 868283 - DNA, 561 bp, Homo sapiens
ttattaattaattatctggaaagaaataagaaaaatgagctcaggatcacatagctcctaattccaaagactgtattaaccaccttagcagcaattatcaaaatatttaaaaactagtatagcaaagcactgattaatcagatagtcacagagtctggcgaggcctcctaatacaccatgtattaaccattagtttgcaggattttgaggaagtctggggtagttcaaggagccagtctagcggaaggagcmagggtggtcaaggggtaggtggggcattgggaggcccagattgctatttttgtatgttaaccctacactatactggatggtttttatctcaaagtctctcatttatgctcagaaatctatacagcctgtgtatttttaatctatatttgagtaatcaaaattctccatggtttttctccctgtagacaaaggagctcacctgacagctacaaattactgactttcagctccaatcagttttcatccagctgccttagacattaaggataaaaagtcctgacagtggcttgaaacatccctaaaaagtta

SEQ ID NO: 868284 - DNA, 621 bp, Homo sapiens
ctgcatatgcctgcactgtggccatggatgattggatcaggaatggacatctgactgcatgattagccaatctgattctgccttctaattacttggagcctagtttcagctcatggatcacttgaactagaagaacatgcatagccaaggttggggagccaaggcagtctggaaagaaagggaggaaaggagaaggtgagggaggaagaaaagcccagaaaaaaaagggtaaacataaaagagcacatctctaaaaagtaaaattcttagtggctgtccctttcttgcctttaaattttattaaatgtcatttttcccctcatgctagctttagtagctatctctttccggcaagctaatgatcttttyactaatatgcagcccaacagaggaattctttaagtcctagagaaagcactttatgttgaattcactcttcttccctctctgaaacataccaaagacatgccaggtgaaaaggtaccataggcaagaggggccttatgtcttcagcttgaactctgcaggatcatgctactaataagtggtgagactatggaagtcttgccttaaaactttaaaaagagagtatatatatttctatatcccagcaaggaacat

SEQ ID NO: 868285 - DNA, 589 bp, Homo sapiens
atttaatcctttttttttcagttggtcattgagtccacaagattgaatgagatcatttacagaaagtgggaagaagacctcagaatgaacatggaaaaacaacatttactggagagaaagaaaagaataaactgtcaaaggagatatagaacaaaaaggaaaaccaagtattttttgcacaatggaaggcaagaggagagagtattttaataaagagggagtgatcaatttgtattcctactgagaaaccaagtaagatcaacactgaaaaatatacatcaagtgatttatatgaatatgttttatacacaaaaagaaaacaagtaattattttaaactcaaattaacaaatcacataacataaaatttttaaaaagcaacaaatagtctttctaaatcctagattgcaatctactttttgtcaccckcatagtacctaaagggttccccacagagtaactattcaataaatatgcactgccttgaattaaaagtgtgtaacagcttaagtcttaacaaacctatgactccttttctatccttcactatgcgtatacattctaagttgatgaacaaaatcacagtattt

SEQ ID NO: 868286 - DNA, 595 bp, Homo sapiens
agtatggtgtatgaatataccgatacaatcttagatttgtattgacatgcatagatgttcacagtatatgaaaagaggaataaaatatacaatcaaaagtgtttgtgtatgtatgtgtataaatatatataatcacatgtctagaaacatatatacaraagcatactacagtagtttttctctgggtagggaattttaggcgattatcattctctccatacttcattagctttttggttattcataataaaaatctggccagggaccatgacccatgcctgtaatcccaccaccttggattgcttgaataaagaagttagagaccagcctgcacaacatggtgagaccctgtctacaaaatgtaaaaaaaaaaatttagctggtgatatggttttggtgtatccccacccaaatctcaccttgaatcataactttcagaattcccacatgtcccaggaggaactcagtgggaggtgattgaactactggggcgggtatttcctgtgctgttcttgtgatagtgagtgagtctcacatgatctgatagttttaaaaaggggagtttccctgcacaagttctctctctctctttgcc

SEQ ID NO: 868287 - DNA, 595 bp, Homo sapiens
agtatggtgtatgaatataccgatacaatcttagatttgtattgacatgcatagatgttcacagtatatgaaaagaggaataaaatatacaatcaaaagtgtttgtgtatgtatgtgtataaatatatataatcacatgtctagaaacatatatacagaagcatactacagtagtttttctctgggtagggaattttaggcgattatcattctctccatacttcattagctttttggttattcataataaaaatytggccagggaccatgacccatgcctgtaatcccaccaccttggattgcttgaataaagaagttagagaccagcctgcacaacatggtgagaccctgtctacaaaatgtaaaaaaaaaaatttagctggtgatatggttttggtgtatccccacccaaatctcaccttgaatcataactttcagaattcccacatgtcccaggaggaactcagtgggaggtgattgaactactggggcgggtatttcctgtgctgttcttgtgatagtgagtgagtctcacatgatctgatagttttaaaaaggggagtttccctgcacaagttctctctctctctttgcc

SEQ ID NO: 868288 - DNA, 595 bp, Homo sapiens
agtatggtgtatgaatataccgatacaatcttagatttgtattgacatgcatagatgttcacagtatatgaaaagaggaataaaatatacaatcaaaagtgtttgtgtatgtatgtgtataaatatatataatcacatgtctagaaacatatatacagaagcatactacagtagtttttctctgggtagggaattttaggcgattatcattctctccatacttcattagctttttggttattcataataaaaatctggccagggaccatgacccatgcctgtaatcccaccaccttggattgcttgaataaagaagttagagaccagcctgcacaacatggtgagaccctgtctacaaaatgtaaaaaaaamaatttagctggtgatatggttttggtgtatccccacccaaatctcaccttgaatcataactttcagaattcccacatgtcccaggaggaactcagtgggaggtgattgaactactggggcgggtatttcctgtgctgttcttgtgatagtgagtgagtctcacatgatctgatagttttaaaaaggggagtttccctgcacaagttctctctctctctttgcc

SEQ ID NO: 868289 - DNA, 540 bp, Homo sapiens
cctttttggatgaatagtttgcaaatattttcccccatgcaacaagttgtttcttcaccctgttgattgttttctttgctggccagaagttgtttagattaatgtagtcccatctgtctacttttgttaggtttgtctgtgctttttagctcttagccatgatatctttgcttacactaatgtcttgaagtgttaactctatctctagttttttttctcctactagttttatagtgtttggtgttacatttaagtctctaatccatttttagttgatttctgcatactgggagatatatgagtccwgtttcatcttctgcatatggatattccattttcccagcactacttattgaagacggtgacctttgcccagtgtttgttcttggcacctttctcaaaagtcagtggggtaaaaacactgatttacttctggactctatgttccattaatctatgtgtctgtctttataccaataccatgttgtttgggttactatagccttgtaatatattttgaagtgagatgcctctagcttt

SEQ ID NO: 868290 - DNA, 552 bp, Homo sapiens
gctgaatatcacgtacgttgccaaactacttgttaatattcaagcaaagagcccttcctggaatgtcagagctgaagcactctcataaagccattctctaccctaaggtaaaaccattctggcaaattataatctggctcagggcttttcattcagactctgctttgtttttttgtttgtttgtttttgttttttgtttttgtttttgtttttgtttgagatggaatctcactctgtctgtcacccaggctggagtgcagtggtgtgatctyggctcactgcaacctccacctcccaggttcaagtgattcttctgcctcagcctcccaagtagctgggactacaggtgcatgccaccacacccggctaatttttgtatttttagtagagatggggcttcaccatattggccaggctggtctcaaactcctgaccttgtgatccacccgcctcagcctcccaaagtgctgggattacaggcatgagccaccatgcctggcccagactgtgctcttaggagctcatagaaaccatgatggcttggattctctg

SEQ ID NO: 868291 - DNA, 634 bp, Homo sapiens
aagcaaattcaaaaaatttgaagaagtgactgccgcacagactgtacagatatcaaattaagggcatagggaacataaaaaagcaagaaaacatgacacccctaaaggaacacaataattctccagcaacagttcccastcgaaaagaaattcatgaaatccaggataatgaattcaaaatactggttttaaaaaagctcagggagatacaagagaattctgaaaaataatacagagaaatcagaaaaataattaaaaatattaatgagaaatttatcagagatatagatattatttaaaggaaacaaattctggaactgaagaattcattgaataaaatacaaaatacatttaaaagctttgaaaacacacaagatctagcaaaaaaaaaagaaaagagttttgtaacttgaatacagattatttgaaataactcaggaacaaataaagaataaggaataaaaaagaataagcaaagcctttatgacatttgacacaccataaagagactgaataatcctgttattggtgttcccaagggagaagagagactaaaagggttagaaaaccccatttaatgaaacaatagatgaaaagtttccaagtctagcaacaaatatagacattcagccac

SEQ ID NO: 868292 - DNA, 572 bp, Homo sapiens
cctggagcttattatacaaagcatgtggatctgagcagtgcaaacggcggactattgtgagtagcaaggtgtccttcccaaatcaacactttgggactcaaacactcatttccccaccttctgcaattgttggtagctgatggctctcagctgaatttatctctgagacacatcatgggctgaagaaggctacctcaggtawagagaccgtccatgtcctgggtcacaatacccacactccatttctggaggcagctaatatccacatgttagtcaatataggtgtctacaggtctagctctcttgcctctatgtggtcaactccacagtgccattccacttcagatcttcccatgggatcaacagaggccctcattgtgactacagtgcaatccaatttctccctctatttagtcctactttcctcattgcctcataggtgtggtttccaagagcactcccaataaactccctgtgcaaaaaatctcgatctgaatattttttcccagggaaaccaacctacaacatagagtattagtttagaaaaatataaatttttcagaagtatgctg

SEQ ID NO: 868293 - DNA, 572 bp, Homo sapiens
cctggagcttattatacaaagcatgtggatctgagcagtgcaaacggcggactattgtgagtagcaaggtgtccttcccaaatcaacactttgggactcaaacactcatttccccaccttctgcaattgttggtagctgatggctctcagctgaatttatctctgagacacatcatgggctgaagaaggctacctcaggtaaagagaccgtccatgtcctgggtcacamtacccacactccatttctggaggcagctaatatccacatgttagtcaatataggtgtctacaggtctagctctcttgcctctatgtggtcaactccacagtgccattccacttcagatcttcccatgggatcaacagaggccctcattgtgactacagtgcaatccaatttctccctctatttagtcctactttcctcattgcctcataggtgtggtttccaagagcactcccaataaactccctgtgcaaaaaatctcgatctgaatattttttcccagggaaaccaacctacaacatagagtattagtttagaaaaatataaatttttcagaagtatgctg

SEQ ID NO: 868294 - DNA, 572 bp, Homo sapiens
cctggagcttattatacaaagcatgtggatctgagcagtgcaaacggcggactattgtgagtagcaaggtgtccttcccaaatcaacactttgggactcaaacactcatttccccaccttctgcaattgttggtagctgatggctctcagctgaatttatctctgagacacatcatgggctgaagaaggctacctcaggtaaagagaccgtccatgtcctgggtcacaatacccacactccatttctggaggcagctaatatccacatgttagtcaatatargtgtctacaggtctagctctcttgcctctatgtggtcaactccacagtgccattccacttcagatcttcccatgggatcaacagaggccctcattgtgactacagtgcaatccaatttctccctctatttagtcctactttcctcattgcctcataggtgtggtttccaagagcactcccaataaactccctgtgcaaaaaatctcgatctgaatattttttcccagggaaaccaacctacaacatagagtattagtttagaaaaatataaatttttcagaagtatgctg

SEQ ID NO: 868295 - DNA, 660 bp, Homo sapiens
agttctctgtaagtctgaccagactgtgctaaaaaaaatttcatctgtaaataatttttcacttggtatccacatcccttagataaaatgttaaaaatggcgattggatgttgggtcagtctcagcccatctacataaatctataaagtaccttacatacaatttcargagtactttgaagctctctgccatgtacaacaatccttttccatcttaaatcatttttttttgaagcaaggcagaacttaagtgtaaataagtaaaatacctctgtgagaaaatgcaattgatagtccaactcagtagtgccaagaacacattcttattcccatcattcaagcagtaaatatgaagattctcatgctcagagctgagggtagataaactggttgggcaatgactaaagaaaaagtgagttattttgtgttaaagagaagaaaacagcctgcttagccaagttccacagtcaaaattctagattactgtaatcagaatatagagttgtagagaggcagattttaaatggcagagcatgagcacctggatcaaactggcctgaagcctttctattctgtaacagtaaattaaatatccaattttgtttatcactttttcagagtcatttcgtttgcagttgaaaaactcccaactactacaata

SEQ ID NO: 868296 - DNA, 660 bp, Homo sapiens
agttctctgtaagtctgaccagactgtgctaaaaaaaatttcatctgtaaataatttttcacttggtatccacatcccttagataaaatgttaaaaatggcgattggatgttgggtcagtctcagcccatctacataaatctataaagtaccttacatacaatttcaggagtactttgaagctctctgccatgtacaacaatccttttccatcttaaatcatttttttttgaagcaaggcagaacttaagtgtaaataagtaaaatacctctgtgagaaaatgcaattgatagtccaactcagtagtgccaagaacacattcttattcccatcattcaagcagtaaatatgaagattctcatgctcagagctgagggtagataaactggttgggcaatgactraagaaaaagtgagttattttgtgttaaagagaagaaaacagcctgcttagccaagttccacagtcaaaattctagattactgtaatcagaatatagagttgtagagaggcagattttaaatggcagagcatgagcacctggatcaaactggcctgaagcctttctattctgtaacagtaaattaaatatccaattttgtttatcactttttcagagtcatttcgtttgcagttgaaaaactcccaactactacaata

SEQ ID NO: 868297 - DNA, 662 bp, Homo sapiens
gggattgctgtccaaggagtatgcagtttcagtaacagaagacaagtaagttctacagatctgccatacaacagtgtgcttacagttaacaatgttatattgtgcacttaaacatttattaacagggcagatctaaagttaagtgttcttactacaataaaaagactaatgcattaaaaagaattgttagtttatgtttttgtatggattaygtgtaaagatgaaattctgtgacatcaacaactgaaagaggtggggactgagctgtaaaggagcagagtttttgtatgttattgaagttaagctgtataaattcaaattagagtattataactttagaatgttaagtgtaatctccatggtaaccacagagaaagtagctatagaatatacacaaaaggaaatgagaaagaaatgtaaatgcttcactataaaaaaaacaaatacatacgaagaaagtaatgcaggaaatgaaggacaaaaagaagctataaggtatgtagaaaacaaatagcaaaatgacagcagtaaatatacacacagtggaatattattctgccttaaaaaggaaaggaaggcaaatctgacgtagtacagcataaatgaacctggaagacattatgctgagtgaactaagccagtcacagtaagacaaatactgc

SEQ ID NO: 868298 - DNA, 662 bp, Homo sapiens
gggattgctgtccaaggagtatgcagtttcagtaacagaagacaagtaagttctacagatctgccatacaacagtgtgcttacagttaacaatgttatattgtgcacttaaacatttattaacagggcagatctaaagttaagtgttcttactacaataaaaagactaatgcattaaaaagaattgttagtttatgtttttgtatggattatgygtaaagatgaaattctgtgacatcaacaactgaaagaggtggggactgagctgtaaaggagcagagtttttgtatgttattgaagttaagctgtataaattcaaattagagtattataactttagaatgttaagtgtaatctccatggtaaccacagagaaagtagctatagaatatacacaaaaggaaatgagaaagaaatgtaaatgcttcactataaaaaaaacaaatacatacgaagaaagtaatgcaggaaatgaaggacaaaaagaagctataaggtatgtagaaaacaaatagcaaaatgacagcagtaaatatacacacagtggaatattattctgccttaaaaaggaaaggaaggcaaatctgacgtagtacagcataaatgaacctggaagacattatgctgagtgaactaagccagtcacagtaagacaaatactgc

SEQ ID NO: 868299 - DNA, 662 bp, Homo sapiens
gggattgctgtccaaggagtatgcagtttcagtaacagaagacaagtaagttctacagatctgccatacaacagtgtgcttacagttaacaatgttatattgtgcacttaaacatttattaacagggcagatctaaagttaagtgttcttactacaataaaaagactaatgcattaaaaagaattgttagtttatgtttttgtatggattatgtgtaaagatgwaattctgtgacatcaacaactgaaagaggtggggactgagctgtaaaggagcagagtttttgtatgttattgaagttaagctgtataaattcaaattagagtattataactttagaatgttaagtgtaatctccatggtaaccacagagaaagtagctatagaatatacacaaaaggaaatgagaaagaaatgtaaatgcttcactataaaaaaaacaaatacatacgaagaaagtaatgcaggaaatgaaggacaaaaagaagctataaggtatgtagaaaacaaatagcaaaatgacagcagtaaatatacacacagtggaatattattctgccttaaaaaggaaaggaaggcaaatctgacgtagtacagcataaatgaacctggaagacattatgctgagtgaactaagccagtcacagtaagacaaatactgc

SEQ ID NO: 868300 - DNA, 615 bp, Homo sapiens
gaatttcggagatgtgctgagcccattctttgacctgtcctttctccctgtagtgggagatatttttggggaatctcagggcacatagcatgtttaaaaaacactgattctggcccagcagggtggcttatgcctgtaatcccagcactttgggaggccaaggcaggtggatcagttgagttcaggagttcaagaccagcctgggcaatatagcaaaattctgtttctacaaaaaatgcaaaaattagctgggcattttggcgtgtgcctgtagtcccagctacttgggaggttcaggtagtaggatggcttgagtacaggaggcggatgttacaagtgagcctagattgcaccrctgcactccagcctgggcaacagagacagactctgtcggaaaaaaaaaaaaaaaaaggaaaaacactgattctgcagggatgacattggttcttctctcttaccacttgctccccaccaccaacctggtcatgatcttttcatgcgatacaggggaaaagagtctatgctgctcccagcaccctaccatccctgtttctacctagaccctgtcatgtgtagggaccctacctcttggaatgcaaggtgtttctatgctcc

SEQ ID NO: 868301 - DNA, 599 bp, Homo sapiens
tgcaggcacatctcctctttacatctgctgtgagaaactatggagtactgatatggtttggatctgtgtcattgcccacatctcatgtcaaagtgtgacccccaatgttggaggtggggtgtggtgggaggtgattggattgtggaggcagatttccccattgrtgctgtcctcacaatagcgagtgagctctcgtgagatctggtcatttaaaagtgtgagcacctcccctttcccctctcttgctcctgctctagccatgtaatatgtgtgcttcccattcagcttctgccatgattgtaagtttcctggggcctctcagaagctgagcagatgccagcatcatgcctcctgtacagcctgtggaatcgtgagccgattaaacctcttttctttataaattgcccagtctcaggtatgaccaatacaagtaccaagtgcatagatgtcatcaacagggctcttcttaattcattcccaagtctgcatggagtggcatagacttaaagcattccctcattttagctaagtcactcaaaatgttaattacacctaaagcaaagccacttaaagagagaaaccctctgtttgaagttttt

SEQ ID NO: 868302 - DNA, 571 bp, Homo sapiens
ggtgattttcaacatatgagttttggggaaacaaattcagaccatagcaagaagcacccccagtctttttggaggtgacactgtttttggaaaattgattttgagctgtcgcttctcttcttttttttttttttttgagatggagtctctctctgtcacccaggctggagtgcagtggcgcgatctcagttagtcactgcaagctctgcctcccgggttcatgccattctcctgcctcggcctccccagtagctgggactataggcgcccgccaccatgcccggctaattttttgttttcgtatttttagtagagayggggtttcaccgtgttagccaggatggtctcgaactcctgaccttgtgatccgcccaccttggcctcccaaagtgctgggattacaggcgtgagtcttctcttctttgtcattcttctccagaaaaccttgagggtactgtgtagcattttatctttttttttttttactgtggcaaaatatgcataacacagtatttatcatttgaaccatttttaagtgtccaattcagtggcattaagtacattcacactg

SEQ ID NO: 868303 - DNA, 634 bp, Homo sapiens
atcatcctgctgcccatcttgtgagtagaaagtcttgtctcatcttacaggtaaagcagctgaggttcagagaggctgatatttgccccagggcaaagagctagggtgtgacagagccaggctagtgtgagtctaaaattcatgcttttgaccagtatgtatgctacctggacagaatgtttttacttttcatgcatcagctaacccgcactcccagactgcagtggaaaggagcactgaggcattttctatttaatttcccartctttgagcagaaaaaggacaaaattgaggggttgtattctcacaataaagtagggattcttaacctggggtccatggatgccaagaaggggatagaatccaagaaaatctgtgaactcgtatgggaaaaaaatcctctttatttttcctaactgaattgtaccatttccttcaattatgagtagagtaatattagtagcacttaagattttgtcacccataagagttagaaatgttttcatatcatattatataatagtttgacagatatctcaagatattatgtatcctcaccactactgcaaaattagggaagctgttagactcattgcagggtcctgttatttaatgcattaataaaaagtaatat

SEQ ID NO: 868304 - DNA, 634 bp, Homo sapiens
atcatcctgctgcccatcttgtgagtagaaagtcttgtctcatcttacaggtaaagcagctgaggttcagagaggctgatatttgccccagggcaaagagctagggtgtgacagagccaggctagtgtgagtctaaaattcatgcttttgaccagtatgtatgctacctggacagaatgtttttacttttcatgcatcagctaacccgcactcccagactgcagtggaaaggagcactgaggcattttctatttaatttcccaatctttgagcagaaaaaggacaaaattgaggggttgtattctcacaataaagtagggattcttaacctggggtccatggatgccaagaaggggatagaatccaagaaaatctgtgaactcgtatgggaaaaaaatcctctttatttttcctaactgaattgtaccatttccttcaattatgagtagagtartattagtagcacttaagattttgtcacccataagagttagaaatgttttcatatcatattatataatagtttgacagatatctcaagatattatgtatcctcaccactactgcaaaattagggaagctgttagactcattgcagggtcctgttatttaatgcattaataaaaagtaatat

SEQ ID NO: 868305 - DNA, 596 bp, Homo sapiens
tatctccacaggtagccactctatgttcaccttctcttatggaaagtgccgatttgctgaatgtgagataatacataattaactaacccctacctactccttttctcttgcaacatgtggattcagtaatgtgacctatctttcctttcccctccagcctgcttttcccytttaaatattgaagccctcaaaatcttctttgggaaaaggcacagacctgtctcccaggtggatccttaactttgacaaaataaacgtctaaactgattgacacctgtctatctgacctagagacagatgctcatatgccttttggtttacactaataaagaactggaaacatccaacatccctccacaggggagtgactaagggaccacagagagccttctcagccagaacatcacatagttgctgtaaggaattggatagagctctggctcccgacacagagaatcctccaggcatactgttaaaggaaaaagaaagctgtagaatcagaaacaaagctatagaatcagaaaagaaagctgtggaatcagaaagctatagaatcatactacattgtatgatgtatttatgtaagacagccacaa

SEQ ID NO: 868306 - DNA, 599 bp, Homo sapiens
atatctctttaacatactgatttcattttcttcggatatatacccagttgtaaaattgctgaatcatatgataattcgatttttgaggaaccttcatactgttttccataatggttgtactaatttacattcccacagtgtgcgagagttccctttttccacatcctactaaatgcttgttattttttcctatttttgatagtagccattgtaacaggtttgaagtgatatctcattgtggttttatttgcattttcctgttgattagtgaggctgaacatttttaaacatacctcctggccatttgtatgtcttcttttgaaaaatcccgtttagattctttacccatttttaaataggattatttgttttcttgctattgagttttctgagttccttataaattgtgtrtattaactccttatcagatgtatagtttgcaatactttctcccattctgtaggttgtctcttcaatttattcattctttccctttttgtctgcataaggtttttaatttgatgtagtcccatttgtctatttttgcttttgttgcttgtacttttggggtcatgttcaaaaagccattgcccagacca

SEQ ID NO: 868307 - DNA, 633 bp, Homo sapiens
accatatctatattatgttaaatataagtggattaaatttgtctaattctcccttaacaccatcagtttttgcttcatgtatttggaagctttgttattagttgcaaaaacatttgtgcttgttatgacttcctgatgaattaacacttatcattgtaaaatatctttctttctagtcatacttcctgatgtgtagtttttaaataaacccgctcctgctttcctgtgcttacatatgtatgttatctcatttttcatccttttactattatatttctttatayttaaagtctctattaacagcacataattaggacttaaaaaactaatctgatgatctctggctcttatcagcgtttactgcatttgtacttaatgtaattttaaaaatgttattttaaaaaattgttatatttcagtagctttaggggtacaagtggttttcagttacatgatgaattgtatagcggaagtctgggattttagtgcttctgtcacctgaatagtgtacattgtacctattttcatcctcacctccctctcactcttcctgcttctgagtctctgctgttatataccactttgtatgcctttgcatacccatggcttactccaacttacacaacacttaat

SEQ ID NO: 868308 - DNA, 678 bp, Homo sapiens
ctgtcttcttggtacttctcagatttttttttctttataaccgtatgaatggtaggatcattcctttttttgttccatttagagaaataacgtatgcagtgggacccaaattctttttcactcattgcattattttgctctaaatacaggtaagtgtgttaacagaccaggtggaggctcagggagagaagattcgagatttggagttttgtcttgaagagcacagagagaagktgaatgccacagaagaaatgctgcagcaggtatgtgcagaggccagaaccaagatgggatttccctgctgaactatgtgagatgctgcatttctatgttgtgtttgctctgatgcagcagtaagtttcttgattcatttagaccagcacattaaaaaaaaaaaattgagagtagtagagtctcaaaacacatgcacacaatataaagtgtttatgtaattagaatctggaacaaaatgtcaataggattgtggcttattttaattttctttttttgcattcagatggtttcctctcacccatagcatgtgttttataattaagaaaaaatataatagtaaaaaatctaataatccagtttaaaaatgggtaaaatatttgaatagacatttctcaaaagaagacatacaaatggcaaacagacatatgaaaaggtgctcaacat

SEQ ID NO: 868309 - DNA, 662 bp, Homo sapiens
aacagccatgcccacacttaggtgtatctgtgctgactctgtttggcatcccaatcagataatgaaataaatggaactcagttcaaataccttttgaaaccaatccctgctataatataatttgcaaaagtaactacatcacacaaaaaaactgactcatcccagagccttttgragaatttgctgtaaaatatggtagaagggcttggtagtaaattcagtgaactagagtaacagactcagaggaagaaactgcggcaatcagtgcatcctttgttttaaacatattgctttccttatgagatgagacggaaggaaaatgtgctattcgcatctgaaaacaggctaaaccaagcactaggcaatatgtgagatgggaatctcaatttatttacaatctcaattactaaggcatattgctttagcaccttatatatgaagtgtgacaataaagtaatgagatcagtttttttgtttggttcataaactgggactaatgcaaatggaaattccaaaataagagttcctaaacaatgtggagaatttgcaaaatgaatggagtaagtttataaatgagattatccatttcaaaagatctaacactcatttttatatgtaaatttattaactatagtcatagcacttgatcttcacagctcata

SEQ ID NO: 868310 - DNA, 570 bp, Homo sapiens
taacacctcttgggaaacaaagttaaaattactattgctttttccaagtcttctggctttacttagtgatatggtttggctgtgtccccacccaaatctcatcttgaattgtagctcccataatccccatgtaatgggaggtaactgaatcatgsggtcaggtttttcccatgagacctccccagccatgtgaaactgtgagtccattgaacctctttttctttataaattacccagtcccgggtatttcttcatagcagtatgaaaatgtacaaatacacttaggttgagttattatcattggtacctgatatgaactaaaaataataatttcagagattttaccaacttcagtaatagctactttgatatttgtaaatctattcttggttttcaaaacatagtagtaccatggtattttgacaagaaaatagtgatacactaattacaataaaatagaaagttattgcaagtccagctttgtatcatcaaaaactaaagtggctcaatttcaagtcatgcacctataaggactaatgaatgaacgtatgaatgaacagatgaatgata

SEQ ID NO: 868311 - DNA, 612 bp, Homo sapiens
acatccagctttacccatatttattccatagagaaatacaatattcataaattacatggccgaacgcgaaaccctgttaataattacaacagtgattataaataaacatctccctttcaactcaggattttaaatccacgcatttcacgtatctccctcacaccttttattgtggaagacttgataaataacaaaaaagctactttaatcaggtgtatctccaaggttttagaacatcaatttgttttgttggcatcattggacaataggtcaggaggaccatccccaaattcctaattgcagaacaaacatgaaaaaaatayttgtagtgttcagtcagaggttagcaaaaaggaaaggaagaagaatttgtgattctcctcaattttgacccctgccttgacctgagattttataatgccacacacaggatggatagtacttatggaatgcttactttaaatcaagtgctgggctaagcaccagtttccatggatcacttcctttagtccttgctgtaacttatcaaataggtagtattacgctgcctcccatattagagatgaggaaactgaagctcagagagattaagacctttttgtaaggttacag

SEQ ID NO: 868312 - DNA, 612 bp, Homo sapiens
acatccagctttacccatatttattccatagagaaatacaatattcataaattacatggccgaacgcgaaaccctgttaataattacaacagtgattataaataaacatctccctttcaactcaggattttaaatccacgcatttcacgtatctccctcacaccttttattgtggaagacttgataaataacaaaaaagctactttaatcaggtgtatctccaaggttttagaacatcaatttgttttgttggcatcattggacaataggtcaggaggaccatccccaaattcctaattgcagaacaaacatgaaaaaaatacttgtagtgttcagtcagaggttagcaaaaaggaaaggaagaagaatttgtgattctcctcaattttgacccctgccttgacctgagattttataatgccacacacaggatggatagtacttatggaatgcttactttaaatcaagtgctgggctaagcaccagtttccatggatcacttcctttagtccttgctgtaacttatcaaataggtagtattackctgcctcccatattagagatgaggaaactgaagctcagagagattaagacctttttgtaaggttacag

SEQ ID NO: 868313 - DNA, 632 bp, Homo sapiens
attattacagaatatcttaagaaagaagcaagtttgtgtaaagccatcctatattggagactattactatcagaagtattaatacagccccaagtaaatacagcccatatacttgttctcttttttattcattctttctcttatgtggctggcaatatcctaggcactaaacatatatttataatacaacacaggctccacaatcagacaactccagtctagtgaatcaggttgctctagctaatagaaacaactaaatattctcattcctaaacacacctccttaaaaaacttttttctccatcttctgttctctgtatcaagagcagaaaaacaagagagaggcatttgaggtttctgacttgggagaccctgggaatgaagttggagctctcatttctttcttcaagtcctataagttggttagtccagctccataaagtttagggttcatggtttggccaaagagagtcaycatcctactccccactgaggaggatgatttgagctaaggagacccatgttctccaaacccccaccacaagcactggatttgattgccacaggtatcttgcaagagccttgcacttgtcagaacagagtctctaatgtaaaaacaaaaacccaaacca

SEQ ID NO: 868314 - DNA, 607 bp, Homo sapiens
tatagggtatttagtttgtttttatgctgctatgaagaaatacccaagactaggtaatttataaagaaaacaggtttaattgactcacagttctgcatggctggggaggcttcaggaaacttacaatcatagtggaaggtaaagaggaagcagggaccttgggcagcaggagacagaatgagtgctgagcaaagggagaaaaacccctaataaaaccatcagatctcgtgagaactctctcactatcacaagaacagcatgtgggtaactgcccccatgagtcaattacctctcayggggtccctcctatgacatgtggggattatgggaactacaattcaatttgggtggggacacagccaaaccatgtcatatagcatacagtcttacatgtctggcttctttcacttagcaccatgttcatccatgtctgtccacattgttttatgtattcgtagtttgttccctaaaatttctgaataattgatgacactgagttcgtccatttgcatgttaggtcattagatttttcccactttgtctgctattataaataaagctgtatgaatattcacagacacgatattcatatgggcaagttttcatt

SEQ ID NO: 868315 - DNA, 688 bp, Homo sapiens
agtttagatgtctttttcattactctctttttcttttcaatgttactttagtgccagtgcagggagccagatggaaactaaagccctctgtttatgactgaacaggtacaccacaaacagcagtgcaaatgttccaccccactgcctcccacacacccagactgccccaagccccacctggaaggaccagcttctagcagggggatgatggttccatttctatgcttattgaacctggtaatatttgcttaagaacatttgaatagaggcccctcagaaaattcacatttccatatttactgggggatttttgtttattacaaatgaggttaagaaaccattctgtatacttgctaagtgaaaagaagcaggctactaaagaacatgccagtaatcttaatttaataagcatttttttagcattgactatacytcaggacctgtgccgggcacataaggtgagtatagatgaggctatgcgaggagtgttataatccccatctttcagttgagagaaggaggagcaaagaggtaaaataactagcctaatagaagatgattacttctgggaagtaggggaggggtgcagcgggcagcagcttgtacctttttatactgttagaatttatcataagcatatattattttgatgcatttgacaagatgtgacaaggaaataattgcatct

SEQ ID NO: 868316 - DNA, 540 bp, Homo sapiens
ttttccttagtaatagatcctgtatctgttttcatccgcagtgtaacaatttatcacaaacttagcactttaatacaatacctattagttaatgcacagttctgtaggccagaagtctggcatggcatgactgagttctctgcttggagcatctcaaggctaaaatcaagatgttggccatcctgagttcttgtctgcagacttcagagaaaaatccacttttacatttagcgtttttgtcattgtcaagattyggttccctgtggttgttaaactgagactctcgtttccttgctggctgtcggtggggtcattctcagctcctggaggtacccacactccttgccacatggcccctccgccttcaagccagcaatggcacgtccaatcattctcatgctcctaatctctgacttcctccatctctgactctagatctagatttaaggggcttttttttgaaggtcaagcctacctagataatctccgtatcttaagatcaactgatctgatatataacataatcacaggagtgacatt

SEQ ID NO: 868317 - DNA, 540 bp, Homo sapiens
ttttccttagtaatagatcctgtatctgttttcatccgcagtgtaacaatttatcacaaacttagcactttaatacaatacctattagttaatgcacagttctgtaggccagaagtctggcatggcatgactgagttctctgcttggagcatctcaaggctaaaatcaagatgttggccatcctgagttcttgtctgcagacttcagagaaaaatccacttttacatttagcgtttttgtcattgtcaagatttggttccctgtggttgtkaaactgagactctcgtttccttgctggctgtcggtggggtcattctcagctcctggaggtacccacactccttgccacatggcccctccgccttcaagccagcaatggcacgtccaatcattctcatgctcctaatctctgacttcctccatctctgactctagatctagatttaaggggcttttttttgaaggtcaagcctacctagataatctccgtatcttaagatcaactgatctgatatataacataatcacaggagtgacatt

SEQ ID NO: 868318 - DNA, 642 bp, Homo sapiens
aaagtctataaaaggcatccatttccaagttagaagagcaaagacatttccaatcccttctgaaaagtcatctgaaaacaaggaaaataggaaacagaaagaggactctatgtttttgatgaaactaaaatcacctataatcctgaatcaaaatgctaaaagtaaatcagagaactgtggattgcttaactgatggaggaaagtcaaaaccagtgctgaaatggtgggatgcaggaartaggggcaagctatggtttgagaagcaaatccaggaaaactcagaattcaaggtacctgttaggaatgaggccaaggcactgaaaagaaaaggcctgtctgaaagtctacataaggaaagtctatctcagaccctaggcccacccccatgctacactgtcaggaactctccatcttccaccccaccacaagatacaagggttttctccctagcaacatttccccagagaaactacagtcatgaagcacagggaagtgtgggggtgaggttctgcagaataaacagataatgccttcagatctttcccttccctgaaggtggaggtgaggggaagggaagtaagaaaatgtccaggactttaactgtgcaggcaaatgtattcataagctttgtaagaagctgtt

SEQ ID NO: 868319 - DNA, 504 bp, Homo sapiens
gagatctggtagttttataaggggttcttctccctttgctcagcacttctccttcctaccaccatgtgaagaatgacatatttgcttccacttctgccatgattttaagttttctgaagcctctgtagtgctgcacaactgtgagtcaattgcctcttttcttttattattattattattatactttaagttttagggtacgtgtgcacaatgtgcaggttagktacatatgtatacatgtgccatgctggtgtgctgcacccattaaatagtcatttagcattaggtatatagcccaatgctatccctccccctccccacacccacaacagtccccagagtgtgatgttccccttcctgtgtccatgtgttctcattgttaaattcccacctatgagtgagaatatgtggtgtttggttttttgttcttgtgatagtttactgagaatgatgatttccagtttcacccatgtccctacaaaggacgtgaactcatcatttttt

SEQ ID NO: 868320 - DNA, 569 bp, Homo sapiens
tgggtgagatagtggtagaccacagactaaggagaagaaaggccatgagaaattaaatccttgtacagcatacaactaagtgtcttggtaaatgtcatatctagttgctttccttctgtgaccctgccaacttgcagtaaaaagtttcataagcagcttttartagttggtgttttagaaaatgaaatgtgagcaaggctatccacacttgggtcacaacagtgtgtcaaggtagataggagcctctgtaataagattgaaaagattagatggtgcacttaatgtgagtaggaatccagaatgagacttgtccaggagattactagatccacaaagtactccctagaatattagaggaaaactgtaattttctaagcacaaaagatgaaggcttgagccattttgcttttggattagtgaaaattaatatctagaaagttatatattaaagacacatgaatagcttaagtaacagctattttaacagcctgaagcacccttaggtgaaaatgcaatgagtattttggcactataggtatataaacatgatccagaagacagtgtggtgg

SEQ ID NO: 868321 - DNA, 660 bp, Homo sapiens
gccagcagcccacctgtgacaggagcctggctctgctcctagctggccgtgtgaccttgggcaagtcactggcttcttctgtgcttctgtttattgtgaaatgaggatgttaatgctaacgtatcccagaggatggtttcaaggrttaaagaaaataaagcactagagagaggtctggcacttagtagggccatttcctcaatttggcttccttgacctctcaaagtatgtccccacagtcactttcctatcacccagttttcttcacagagcttggcagtgtgaagtaaccttggttattcaactttttttttttcccccaagacggagtcttcctctgtcacccaggctggagtgtagtggcaagatctcggctcactgcaacctctgcctcccgggttcaagcgattctcctgcctcagcctcctgagtagcagagattacaggcgcccgccaccacgcctggctaattttttgtatttttagtagagaccgagtttcaccacgttggccaggctggtctcgaactcgtgaccgcgtgatccacccgcctcggtctcccaaagtgctgggattacaggcgtgagcccccgcgcctggtcaactattttatgcaatcagtatttattatgctcctactatgtgccaggcactggttgt

SEQ ID NO: 868322 - DNA, 660 bp, Homo sapiens
gccagcagcccacctgtgacaggagcctggctctgctcctagctggccgtgtgaccttgggcaagtcactggcttcttctgtgcttctgtttattgtgaaatgaggatgttaatgctaacgtatcccagaggatggtttcaagggttaaagaaaataaagcactagagagaggtctggcacttagtagggccatttcctcaatttggcttccttgacctctcaaagtatgtccccacagtcactttcctatcacccagttttcttcacagagcttggcagtgtgaagtaaccttggttattcaactttttttttttcccccaagacggagtcttcctctgtcacccaggctggagtgtagtggcaagatctcggctcactgcaacctctgcctcccgggttcaagcgattctcctgcctcagcctcctgagtagcagagattacaggcgcccgccaccacgcctggctaattttttgtatttttagtagagacygagtttcaccacgttggccaggctggtctcgaactcgtgaccgcgtgatccacccgcctcggtctcccaaagtgctgggattacaggcgtgagcccccgcgcctggtcaactattttatgcaatcagtatttattatgctcctactatgtgccaggcactggttgt

SEQ ID NO: 868323 - DNA, 733 bp, Homo sapiens
tttaacatcttgcattagtgcggtacatttatacaatagatgagccaatactgataaattattataaaccaaagtctgtggtttacattagggttcactctttgtgttgtatagtctatgggttttgaaatgtacattgaatgcatctaccattacagtatcatgcagaataattgttttactgccctaaagatcctctgtgttatttctattcattcttcccttcctccccctaccacaaaaaaaagctttttaaaccawtattttgtattctattgatgacaacagcatttacctacattgaaaaacaacgtgcataatttgctgatcatgtgtgtgagactgtatgtgagacatgggttcctgagccccagttctggggagtcctctacagattgggagccactgctaaaggtaataaggagccatagaagaatgttgggtagaagcttactaggatgggattggggtctgggaagttaaacagcagccttgcagacaggaaagatgagatagagggatccatgaggaggccatgtcacttctgggttctccaagatgtgtcgtcacctctgcacatgtaagagacatgattttatgaacagaggcactagttttgtcccctttgtctcttcacacccaccccagtgctgaaaaacaacaaacaaacaatgatgccccatagataaagtggaaccaaaccacaatttcatgctgattttcaaccatggcg

SEQ ID NO: 868324 - DNA, 625 bp, Homo sapiens
caaattgtatgatactgtgtctgtgcattgcttctttagtacttcctgggatttagcttggaatggctagagaaaatgagcaaattagattattttagtaaacaaactcagagatgaattaggcttttaagagaggaaaaacacttacaggtgaaggtattttaacaaatcgctttagcatccatggaaagctttcaaatcacaaacaaagggagaatayttatcctatcccatagagatttaagctacatgtctcatgggcatatattagcctgccaataatactagggtgcgagtttgattgtatacatgagaaacattaaaaagaaataataagaaatgtttaggcataacatttgtggctgaatcttagtctggcttctatatgatcatcagacgtgacagatgatttcagtgatatgagttgagacagaatctcaaatgtgttatgaaatttttaatagaaagagaaaaagatgagtgggaaggaaaaagcacagactgtggagtgaggcagatctgagtctgaattttagtttcatcaattacaatgtggaaaagtgagttgcttgaccttgaacattttacagattgagaaattgaggtttagagattaatttgccca

SEQ ID NO: 868325 - DNA, 619 bp, Homo sapiens
gggtgctccggccatggaagattacaagacagtgaaaggcagtgagctcctcctgtctgccacaagagggatgaatttcacagacataatgtggaaacaaggaagccagtcacaaaacagtccatactgtatgattcctctcattcccaytgatttcagaaacagtgtttggaggttactcaattgtcgtgaaaagaaaatcaggaaagacactgacacaccaatttactatcaagggtagggtaaccaattgctatttgtagttgtcctgtgtagataaaggattcaaagcatggaacaaaacacctttggtgttagacgtaggcaggagtaggtgaagcttgatctggtttttctcatctcccttccttggcctggtcagcttcatcatcagcattttcctcctcctcactcctcccccagtatcgttattctaatttctgtcgttttttttcccctaggaaatatacattttctagagcccaatctgccaggagagatctaagagattacaaaggaaaaaacttgaaattctgaggacagagaaaagaaaaaggaagagttaatgactagtgagacaccatcatgtagactggtgccacatggaatctggggcaac

SEQ ID NO: 868326 - DNA, 679 bp, Homo sapiens
aaagtctctccaggaattatcttcacaacttctttatctttatattggcattttacctcctatctcattgccatagataaaaattctgttatttgttttgatgactaacaattgtatgtatgggatattcatgtgcaaatcatcattccattttcaagagcaatggagaagattggtattagggttacccagaggaacagaggcagagattgagacagagagaggttacaggaattggtccatgtgcctacggaggctaagtctcatgatctgctgtctgcaagctggagaaacaggaaagctggtgatgtaattcaatctgagtccaaaggcctgagaaccaggrcagatgtccaagggcaggagaaaaatggatgcaccatctccgagattgcaaattcacccttcctccagctttttttgttttatgtgggccttcagtggattgggtgatgcccactgcattggtgaagaccatattctttattcagtctacagattcaaatcctaatctctttagaaacgccctcacagataccctcagatacaatgttttaccagctatctgggcatcccttaggccaatcaaattgacacataaaattacctgtcacaatggctatctccattctttcaatattctttcatataggtgaacttttaaaattttttatttcta

SEQ ID NO: 868327 - DNA, 643 bp, Homo sapiens
ataattgatacaacaggctagaggaagtactgacctaaatacgtacagaggcatccatgactgaggaaagagttgatttgctgggaagaatgccagagatacttggaataagaaacaccaagtaaaatggagagatggtagaagtgagtttatgatgctaatattgagctggcatttcaggtcagaacttstgtttgacatttagaagtccaatatgtattatctttatgactccaattgtagctcaacatgtaagaaactttgcatgagtatgtagatatctcaaataggtgtccatttcctcatggttccacgtgaacaaatgttgaggaaatcctgaaaaccaaaagagactaatacaaatgatacaggtgtgggggaagggaatcacaaagaaaaatgaaaaattggggtgggacctcttattagtgttttcagatggttcctaaaagttaggaagctatgaaaaatatcagaacaagagaatactcttgaaatattaaatataattggtacagaaaatagaagttttagaccatgttgaaggaatcatccataatttaaaaagaaaacatgaaaaaatagaaaaggggaaagataaaacagtatgaatacaggagaacatctacctaataggaaaaaa

SEQ ID NO: 868328 - DNA, 593 bp, Homo sapiens
tactacagggctacagtaaacagcatggtactggtaccaaaacagacatatagaccaatggaacagaatagagacctcagaaataacaccacacatctataaccatctgatctttgacaaatctgacaaaaacaagtaatggggaaaggattccctgtttaataaatggtgctgggaaaacaggctagccatatgcagaaaactgaaactggaccccttccttacaccttttacaaaaattaactcaagatggattgaagacttaaatgtaaaaccaaaaaccataaaaaccctagaagaaagcctaggcaataccattcaggacataggcatgggcaaagacttcatgactaaaacaccaaaagcaatggcaacaraagccaaaattgacaaatgggatctaattaaactaaagagcttctgcacagcaaaagaaaccagcatcagagtgaaaggcaacctaccgaatgggagaaactttttgcaatctacccatctaacaaaggtctaatatccataatctacaaggaacttaaacaaatttacaagaaaaaaacaaccctatcaaaaagcggtcaaaggatatgaacaga

SEQ ID NO: 868329 - DNA, 602 bp, Homo sapiens
tccccgggtttgggaaaataacaactgttggccccccggagcgccgcgcagcatccgcacctcccttctcccacctcctggtttatttttaaccgccttccattcatgcccttctgtcacattcccgatattatttatccctcaaatgtccactgtttcttaacagccaaaataagaaggtagaggaaagatmcaaaaaaaaaaaaaaaaaaaaaaaggtatcatacttaccgttccccggcggggcgaaaaataaaaataaagaaaatccaccggctggcttgtttttccccctcaagctgcaacagctggaggaggggaagaatgatcctgggtggggggcggggggtggtaaaaggaatcactcgggtttggcaggtggaggctccaaatatccacggaacaagttctgttgcctggcccgaggggtgcacagagtcctcgcggctggagcctgggggtgggggttggggctgccccagagaagaccccaagactcctggttcctctggagttcagcacaggagggattgcctgggaaaggaagtcaaggttcccccgaaaagaaacaaaatcctagacagcagcgatcacttgttaag

SEQ ID NO: 868330 - DNA, 573 bp, Homo sapiens
acagagagtcagaccaagtaattcctatagggaacaatgtaattaataatatcacagcaatttttacagttcagagtcctgtctaatgaaagacgagtgaagactgaacatccttcaaggcatgaaggaatgaagtctaacagtagaaggcagtagaagtacagattgagatatttcagaagatgttattcttggtgctacacagatcatatcataaagataccacaaatacaaacacaaaggactaaatctatgtcaaattatttatttagagtttattgycactaccataaggtaagtttcctgagaccaagaacctgttgcttattcatcatagctgacttctgtgccaagaaatatgttttaaataagaagttatagggaggagccaagatggccgaataggaacagctctggtctacagctcccagcgtgagcgacacagaagatgggtgatttctgcatttccatctgaggtaccgggttcatctcactagtgagtgccagacagtgggcgcaggtcagtgggtgcgcgcaccgtgcgggagccgaagcagggcgaggcattgcctc

SEQ ID NO: 868331 - DNA, 573 bp, Homo sapiens
acagagagtcagaccaagtaattcctatagggaacaatgtaattaataatatcacagcaatttttacagttcagagtcctgtctaatgaaagacgagtgaagactgaacatccttcaaggcatgaaggaatgaagtctaacagtagaaggcagtagaagtacagattgagatatttcagaagatgttattcttggtgctacacagatcatatcataaagataccacaaatacaaacacaaaggactaaatctatgtcaaattatttatttagagtttattgtcactaccataaggtaagtttcctgagaccaagaacctgttgcttattcatcatagctgacttctgtgccaagaaatatgttttaaataagaagttatagggaggagccaagatggcygaataggaacagctctggtctacagctcccagcgtgagcgacacagaagatgggtgatttctgcatttccatctgaggtaccgggttcatctcactagtgagtgccagacagtgggcgcaggtcagtgggtgcgcgcaccgtgcgggagccgaagcagggcgaggcattgcctc

SEQ ID NO: 868332 - DNA, 666 bp, Homo sapiens
tgtttatttttgaagttttgtagtttttgttagtgaagggatcttccgcatctatttctttttgtatttttggatttcatcacaggtttttaattgttaaaaattccaatagtcattgttgctggtacatataaaaaaactgaattttttatttgacagttgggtcctgtaaacttgctaagtttcttattctaaccatagttatgtctgtagattctttagggttttctgaaacactatcatgttacctacaagaaagggtagctcattaattcgaaagatataggagtgttttagtttttctttgtacatttcaggaaggttgtcctttccctgcattttgcctaatgcatcttagctgtcaactttaytgaaataatgtatttcacaatcatacttttctaaccttttaaagtctaaaggctctgtggaatgattatttgttttataatttatgatactggcaatttgaatttatctttgttttctcttgaacattcttgttaacagtttatcagtttcattataaaaggaccaattttgggccattttaattttctctattttatgttttacattttattggtttctgatctgaaatttatgtccttttgtttacctaccttggcttttttttactcttcttattctagcttcttaaggtga

SEQ ID NO: 868333 - DNA, 605 bp, Homo sapiens
ctgccatccatacctattactaaactagaaagttaaatgtacataaaatatgtatttatttttttgaaaggagaaatgcggctgggcatggtggctcacgcctgtaatcccagtactttgggaggcaaaggcaggcagtcacctgaggtcaggagttcgagaccagactggccaacatggtaaaacctcgtctctactaaaaataccaacaattagctgggcwtagtggcaggcgcctataatcccagctcctcaggaggctgagacaggagaatcgcttgaaactgtgaggtggagattgcagtgagccgagatcattccattgcacttcagcctgggcaacaagagtgaaactccgtcgcaaaaacaaacaaacaaaaaaagaaatgcatatgtattactctcttctcacattgctataaggaaataccaagctcgttaatttataaataaaagaggttgaattgactcacagttccgcatgattggaaggcttcaggtaacttacaatcatgtctcttcacagggcggcaggagagagaataagtgccagcaggggaaatgtcagacacttataaaaccatcaggactcacgagaactcact

SEQ ID NO: 868334 - DNA, 632 bp, Homo sapiens
aaactggggactatgtgaaaagaccaaacctatgttttattggtgtactgaaagtgacaaggataatggaaccaagttccattatctaagagatattggatattatctaagagaacttccccaacatagcaagacaggccaatattgaaattcaggaaatagagagaacaccacaaagatactcctcaacaagagcaaccttaagacacataatcgtcagattcagcaaggttgaaatgaaagaaaagatgttaagggtagcgagaaagaaaggtcaggttatccacaaacggaagyctatcagactaacagcagatctctcagcagaaaccctacagcccagaagaaagtggaggccaatattcagcattcttaaagaaaagagaatttcatatccagccaaactaagcttcataagtgaagaggaaataaaatcctttacagaaaagcaaatgctgagagactctttaccaccaggcctgccttccaagagctcctgaaggaagcactaaacatggaaaggaaaacccggtaccagccattgcaaaaacaaaccaaaatgtaaagaccatggacattaggaagaaactgcctcaactgatgggcaaaataatcagctagcatcataatga

SEQ ID NO: 868335 - DNA, 485 bp, Homo sapiens
tccatgtgttctattgttcaactcccacttatgagtgaaagcatgtggtgtttggttttctgttcctctgttagtttgctgaggatgatggcttccagcttcatccatgtccctgcgaaggacatgaactcattcctttttatggcygcatggtgctccatggcaaatatgttccacattttctttatccagtctatcattgatgggcatgtgggttggttccatgtctttgctattgtaaatagtgctgcaataaaaatacatgtgcatatatctttatagtggaatgatttatatttctttgggtatatacccagtaatgggattgctgggtcaaatggtatccttggttctagatccatgaggaatcaccatattgtcttccacaatggctgaacgaatttacatttccaccaacaatgtaaaagtgttcctatttctccatagcctcaccagcatctattatttcttgaatttttaaataa

SEQ ID NO: 868336 - DNA, 485 bp, Homo sapiens
tccatgtgttctattgttcaactcccacttatgagtgaaagcatgtggtgtttggttttctgttcctctgttagtttgctgaggatgatggcttccagcttcatccatgtccctgcgaaggacatgaactcattcctttttatggccgcatggtgctccatggcaaatatgttccacattttctttatccagtctatcattgatgggcatktgggttggttccatgtctttgctattgtaaatagtgctgcaataaaaatacatgtgcatatatctttatagtggaatgatttatatttctttgggtatatacccagtaatgggattgctgggtcaaatggtatccttggttctagatccatgaggaatcaccatattgtcttccacaatggctgaacgaatttacatttccaccaacaatgtaaaagtgttcctatttctccatagcctcaccagcatctattatttcttgaatttttaaataa

SEQ ID NO: 868337 - DNA, 602 bp, Homo sapiens
aatgtaatccagcatataaacagaaccaaagacaaaaaccatgtgattatctcaatagatgcagaaaaggcctttgacaaaattcaacaatgcttcatgctaaaaactctcaataaattcaataaattaggtattggtgggacatatttcaaaataataagagctatctatgacaaacccacagccaatatcatactgaatgkgcaaaaactggaagcattccctttgaaaactggcacaagacagggatgccctctctcaccactcctattcaacatagtgttggaagttctcaccaggacaattaggcaggagaaggaaataaagggtattcaattaggaaaagaggaagtcaaattgtccttgtttgcagacgacatgattgtatatctagaaaaccccattgtttcagcccaaaatctccttaagctgataagcaacttcagcaaagtctcaggatacaaaatcaatgtacaaaaatcacaagcattcttatacaccaacaacagacaaacagagagccaaatcatgagtgaactcccattcacaattgcttcaaagagaatgaaatacctaggaatccaacttacaagggatgtgaa

SEQ ID NO: 868338 - DNA, 681 bp, Homo sapiens
caaataaactagaaaatctagaagaaatggataaattcatggataaatacaaccccccaggactaaaccaggaagaagtttaatctctgaatagaccaataataggttctgaaattgaaacaataattaatagcctaccaaccaaaaaaagtccaggaccagatggatttacagccagattcaaccagagttacaaagaggaactggtaccattccttctgaaactatgccaatcaattgaaaaagagggaatcctccctaactcatttcatgaggccagcatcatcctgataccaaagcctggcagagacacaacaaaaaaaagataattttagaccaataaccctgatgaatattgacgtgaaaatcctcaataaaatactggcaaaccaaatccagcagcacaaaaaacagcctatccaccatgatcacgtctgcttcatccctggggtgaaaggctagttcaacatatgcaaatcaataaaygtaatccatcacataaacagaaccaagaacaaaaaacacatgattatctccatagatgcagaaaaggcctctgacaaaattcaacagcctttcatgcttaaatctcccaataaactaggtatcaatggaacatatctcaatataataagagctatttatgatgaacccatagcaaatatcacactgaatgggcaa

SEQ ID NO: 868339 - DNA, 650 bp, Homo sapiens
ggcttccccacccatgtggaactgtaagtccaaataaatctctttcttttgtaaattacccaatctcaggtatgtctttatcagcagcatgaaaacagactaatagagtaaattgataccagcagagtggggcaatgctgaaaaggtacctgaaaatgtggaagtgactttggaacttggtaacacgcaaagttggaaaagtttggagggctcaaagaagacaggaaaatgtgggaaagttcggaacttcctggagacttcttgaatgactttaaccaaaaccctgatagtgatatagacaataaggtccaggctgaggtggtctcagatggagatgaggaacttgttgggaactggagcaaaggtgactactgttgtgttttagcaaagagattggmagcatttggcccctgcactagagatttgtagaactttcaacttaagagagatgaatgatttaggatatctggcagaagaaacatctaagcagcaaagcattcaagaggtgacttgggtgctattaaaggcattcaattttataagggaagcagagcacaaaagtttggaaaatttgcagcctgacaatgtgatagaaaagaaaaacccattttctgaggataaattcaagctgactgcagaaatttgcataa

SEQ ID NO: 868340 - DNA, 631 bp, Homo sapiens
gaatataaaagaatgaacaaaacctccaagaaatatgggattatgtaaagaaaccaaatctatgactcactgttgtccctgaaagagatggagagaaagcaagcaacttggaaaacatattttagaatatcacctgtgaaagcttccccaacctcactaaagatgtcaacattcaaattcaggaaatgcagagaacttcagcaagatactaaataaggggaccatycccgagacacataatcatcagattcttcaacattgaaatgaaagaaaaaatgttaaaggcagctagagagaagggacgttcatctagaaaggaaatcccatcaggtcaacagtggacctttcagcagaaaccctacaagccagaggagaataagggcctatattaagcattcttaaggaaaataattttcaactcagaattttatatccagacaaactaaacttcataaatgagaaataaaatccctttcagacaagcaaatgagggaattcattaccaccagacttgctgctttacaataggtcctgaaaggagtgctaaatatggaaaagaaagaccattaccagccactacaaaaacatgcttaagcatatagacaagtgacactagaaagcaacaacacaa

SEQ ID NO: 868341 - DNA, 604 bp, Homo sapiens
ataacgtaaagtgttcagtgcagtgtctggcaaataaggaacacttaataaaagtagctatttatattgctaacctaagagatggggcatgctgaatcaacattaatagcccgtaaatgagaaaagatatggcttattctctcaagcccctggaaaggtatcaatctgttccaaggatctgtagaacatctatcacctttctagtacagtaccaggcagaacgggaagatgagggargggcatgtccactttctgagtgcctgatgggtgaggctctttacatataatctcatttcatctttacagaaacacttaaatcaggtctgatacatccattttctatgacagtaacaacatggtaacaataataacaatggtaataatggccaaatccttatatatcactttctatgtgccaggaattgttctaaggactttacattaaaaactaattttattcttattacaatcaaatgagataaatgttattatccccattttacacatatgaaaactgaggcaaagaccagtttggtaactttgtgagtagcaaaggtagaattagaactcgggcagtctggcactagatcccatgtctttaacc

SEQ ID NO: 868342 - DNA, 647 bp, Homo sapiens
tattgctttgtggaaatcacatgtttatgtgtgcatagaaaaaagacctaaaggctattctaacaataatttgactttttaatttttcatttttgtttatattgactaaatgtcttaaaatgagcatgtgttatttttgaaataagatttaaagtgactgtttattagctttaaaaggtacaatttcccaaactctccttaattaaatgtttattgatgtttccaaccccacttgtgataaagttttggggaggaatgaggaaaattgcagattrgctaggtgaacttataacagctcattggtgtgtctggatgaggggttgtgaagtccagtgaggtaggcctcaactttcttctcctcgcaggcctagggcccctgtgtaccacaggccaggcccttccttggtttaacagtggcctttgtgcttgctagagttcatattagcctgactaccactcacagcctcttcatcagaatgtcagccccatattacaatgtcaggcggtagcctcaggtgcaaactgcttccctggtgatgacagatttattgcatttgaaggcaaaggttctataaatttcaattagggccagaaagaattctaccagaaagctttataataattaagcagaaatgtgagtcacttga

SEQ ID NO: 868343 - DNA, 471 bp, Homo sapiens
tgaaagatgaaatagaaaatcaatagaagaaaatgtcagagtacatgtttgcaatgcagagtcaagaaataactctttttaaaaacttgaaaagcttacatgcaaaggcaaacctgtctttaaaatgactatttcctctattaaaaaaattaagtgtttttgtttaatagaggaagagtggataaagagagataatcttttatcaacaatatccaaaactggcaatatgcaaacatgtaaggattaagtcaacaagacagataamccaaaagaaaaaaatgggcaaaaatatgaataagcaataaaaccaacagctaatatgtaaatcaagagacattcaaattcattagtcatcacaggagcaaatgaaaacagtaatgaaacagtatcttatccctgttaatttagttagaatgtaaaaaataagcagtctcaactatcggtagagtgtagggatagaggaccctacat

SEQ ID NO: 868344 - DNA, 565 bp, Homo sapiens
taatcaaatataaggcataatatacccccctgcttatatcagcaccatttcaaatgtaatgttaaaaaataataaatggagaagtagatagctaacaagtaggcttaatttaataagacaaagtaaatggcatttggaaacmtcatggatttaatgttttatttaaatgatttctgatttttaaaaagtaaatattgtttccagaaggctgagaaacaagttagtagggagattttttctttgcaaaaaaattttacagttgtgtctttaacattgtaccacaaactgttgtcctaccagtctctttgtaagaaagctatagacatgttgggaatgaatgagctctttcctttttaaaatatcagttttacatcattcaggttccaatcgttgcacttactgctactgcaagttcttcaatccgggaagacattgtacgttgcttaaatctgagaaatcctcagatcacctgtactggttttgatcgaccaaacctgtatttagaagttaggcgaaaaacagggaatatccttcaggatctgcagccatttcttgtcaaaacaag

SEQ ID NO: 868345 - DNA, 565 bp, Homo sapiens
taatcaaatataaggcataatatacccccctgcttatatcagcaccatttcaaatgtaatgttaaaaaataataaatggagaagtagatagctaacaagtaggcttaatttaataagacaaagtaaatggcatttggaaacctcatggatttaatgttttatttaaatgatttctgatttttaaaaagtaaatattgtwtccagaaggctgagaaacaagttagtagggagattttttctttgcaaaaaaattttacagttgtgtctttaacattgtaccacaaactgttgtcctaccagtctctttgtaagaaagctatagacatgttgggaatgaatgagctctttcctttttaaaatatcagttttacatcattcaggttccaatcgttgcacttactgctactgcaagttcttcaatccgggaagacattgtacgttgcttaaatctgagaaatcctcagatcacctgtactggttttgatcgaccaaacctgtatttagaagttaggcgaaaaacagggaatatccttcaggatctgcagccatttcttgtcaaaacaag

SEQ ID NO: 868346 - DNA, 602 bp, Homo sapiens
ccttttaagcagcaatagcagttttaaataaagtatagcaaaaaatttacaagcttggacacattatcttgaacatacatatcttgaacatattaacctctcttaactgtagctttcacatctctaaaatacagtaattcttatttcttacaattgatatgagggctaaatgaagaaaatccatgtagagcagcttacgcatatcttagggccaggagtccttttcttgttcaccaacgtatatctgaaactagcatgactacatatagtaaatgtataatgaaaatttgttggtaaataatcttctttcctacaaaataaaaacatatttcaaattatttttccagaatctattgtcatttcagattctcttctaattgtgacatctctgcagtatcatgatatatgtgagctatttgactgcaattttttgagctcctcttgatataaatgtagccattctgtgyattgggataatattttttcaggctctggaggtaactccctgatggcatgtacaactgcattctcattttcagtttcttgatgtgggatgattctgttctgtgttcttaatgacaaaggtcatttgggccccacca

SEQ ID NO: 868347 - DNA, 445 bp, Homo sapiens
tgcttcccctttactttttgtcatgattgtaagtttcctgaggcctccccagccatgctgaacagtgagtcaattaaacctgtttcctttataaattacacagtctctggtagttatttatagcagtacgaaaatggcctaatacagtacattggtaccaggagaggggtgctgttataaagatacctgaaaatgtggaagcaactttgggactgggtaacaggcagaggttggaacagtttggagggctcagaagacaggaagatgtgagraagtttggaacttcctagagacttgttatatggctttgaccaaaatgaaaagagtgatatggacaatgaagtccaggctgaggtggtctcagatggagatgaggaacttctcaggaaccagagcaaaggtgactcttgctatgctatagcaaagagactggtggcattttgcc

SEQ ID NO: 868348 - DNA, 601 bp, Homo sapiens
ttgcaagatgggaacattttcctggagtattttctcaaagatgctttccaggttgtttactttttgcccttctctctcaggaatgacagtaaatcttaggtgtgattgctttacataaacccgtatttctcaaatacattgttcattttaaaaaattatttttctttatttctctctgactgtgttggttcaaaaaactgatcctcaagctctgaaatttttacttctgctttgctgtccagtctattgataaagttttccaatgtgttttgaaaattgttaagtgagtctttaattccagaagcccgattgatttctttttagatgtttgtcccttccttcatttcctcagttgcgtaagaagtttctttgtgttgattttctatcttgtcttggatctctttaagtatctttgcaatccatgctctgaattctttatgtgtcatttcwgaattttcattttggttagggatcattgctggacagctagtgttatcctttggtggtatcgctacattcagatttttcatggtgccagaattcttgcactgacttctcatctggagacaccagcacttctaattttttgtaattattttca

SEQ ID NO: 868349 - DNA, 601 bp, Homo sapiens
ttgcaagatgggaacattttcctggagtattttctcaaagatgctttccaggttgtttactttttgcccttctctctcaggaatgacagtaaatcttaggtgtgattgctttacataaacccgtatttctcaaatacattgttcattttaaaaaattatttttctttatttctctctgactgtgttggttcaaaaaactgatcctcaagctctgaaatttttacttctgctttgctgtccagtctattgataaagttttccaatgtgttttgaaaattgttaagtgagtctttaattccagaagcccgattgatttctttttagatgtttgtcccttccttcatttcctcagttgcgtaagaagtttctttgtgttgattttctatcttgtcttggatctctttaagtatctttgcaatccatgctctgaattctttatgtgtcatttcagarttttcattttggttagggatcattgctggacagctagtgttatcctttggtggtatcgctacattcagatttttcatggtgccagaattcttgcactgacttctcatctggagacaccagcacttctaattttttgtaattattttca

SEQ ID NO: 868350 - DNA, 571 bp, Homo sapiens
ccatatgccaaagagctaatatccaaaatctacgaggaacataaacaaatttacaagaaaattacaaaccaccccattaaaaagtaggcaaagaacataaacaggcacttctcaaaagaagacatttatgtgaccaacaaacatatgaaaaaaaaccccacatcactgatcattagagaaaagcaaatcaaaaccacaatgagatatcatctcataccagtaagaatggcaattattaaaaagtcaagaaacaacatatgctggtgaggttgcagagaaataggaagacttttacactgttggtaggaatgtaaattagttcaatcattttggaagatagtgtggtgcttcctcaaaggttgagatccacaaataccatttgacccagcaatcccattactggacrtatacccaaaggaatatacataattctatcacaaagatacatgtgcatgtatgttcactgcagcactattcacaatagcaaggaaatggaatcaacccaaatgcccatcaatgatagactgaataaagaaaatgtggtacatataacatcgtggaaaattatgca

SEQ ID NO: 868351 - DNA, 663 bp, Homo sapiens
atagatgcagaaaaagcctttgataaaaatccaacatcccttcatgttaaaaactctcaataaactaggtattgaaggaacagacttcaaaataataacagccatctatgacaaacccacagccaatatcatactgaatgagcaaaagctagaagcattttccttgataattggcacaagacaaggatgccctctctcaccacttttattcaacatcatattggaagttctggctggagcaatcaggcaggagaaagcaataaagcatattmaaataggaagagaggtagttaaactgtctttgtttgcagatgacatgatcctgtgtcttgaaaaccctatcatctcagcccaaaagcttctgaagctgataagcaacttcagcaaagtctcaggatacaaaatcgatgtgcaaaaattgctagcattcctatacaccaacaacagacaagcagagagccaaatcatgaatgaactacagttcacaattgctacaaagagaagaaaatacctaggaatacagctaacaagggaagtgaagaaccacttaaagaactgcaaaccactgctcaaggaaagcagaaaggacacaaacaaatagaaaaacattccatgctcatggataggaagaatcaatatcgtgaaaatggctatactgcccaa

SEQ ID NO: 868352 - DNA, 663 bp, Homo sapiens
atagatgcagaaaaagcctttgataaaaatccaacatcccttcatgttaaaaactctcaataaactaggtattgaaggaacagacttcaaaataataacagccatctatgacaaacccacagccaatatcatactgaatgagcaaaagctagaagcattttccttgataattggcacaagacaaggatgccctctctcaccacttttattcaacatcatattggaagttctggctggagcaatcaggcaggagaaagcaataaagcatattaaaataggaagagaggtagttaaactgtctttgtttgcagatgacatgatcctgtgtcttgaaaaccctatcatctcagcccaaaagcttctgaagctgataagcaacttcagcaaagtctcaggatacaaaatcgatgtgcaaaaattgctagcattcctatacaccaacaacagacaagcagagagccaaatcatgaatgaactacagktcacaattgctacaaagagaagaaaatacctaggaatacagctaacaagggaagtgaagaaccacttaaagaactgcaaaccactgctcaaggaaagcagaaaggacacaaacaaatagaaaaacattccatgctcatggataggaagaatcaatatcgtgaaaatggctatactgcccaa

SEQ ID NO: 868353 - DNA, 627 bp, Homo sapiens
ctcagcccaaaatttccttaagctgagaggcaacttcagcaaagtctcaggatataaaatgaatgtgcaaaaatcacaagcattcttatacaccaataacagcaaacagccaaatcatgagtgaactcccattcacaattgctacaaagagagtaaaatacctaggaatccagcttacaagggatgtgaaggacctcttcaaggagaaatacaaaccactgctcaacgaaataaaagaggacacaaacaaatggaagaacattccatgctcatggataggaagaatcaatatgaaaatagccatactgccaaaggtagtttatagattcaatgccatccccatcaagctaccaatgactttmttcacagaattagaaaaatctactttaaagttcatatggaaccaaaaaagagcctgcattgccaagacaatcctaagcaaaaagaacaaagctggagacatcacactacctgacttcaaactatactacaaggctacagtaaccaaaacagcatggtactgataccaaaacagacatatagaccaatggaacagaacagagccctcagaaataataccacacatctacgaccatctgatctttgacaaacctgacaaaaacaaga

SEQ ID NO: 868354 - DNA, 562 bp, Homo sapiens
tggtttcactgggatcctatgaggccttttcgtcatggcagaggatgctggaggcatgcctcttcggttgcctgagcaagatgtatggctgtggccatggtactcaaagaaaaataacatatctgactttttttctcttaaaaattacattatcttttaggtgaatgagaatcaagcagattctcctgaaacacatccgcaagctgaaggcagagaaggcctgcaagaagcccctggctaaccagataggcccccaaggttaagaccaaggaagtacaggagtgccccgaggagccacttcaggccaagaaggaggtaaccaagactctgtccaagcmggaagagatgaagacatgaaggcccccctctcttatgtaagcatagtggttaatgtggtttggctctgtgtccccacccaaatctcatttcaagttgtaatccctgtgagtccagggagggtcctggtggcaggtgactgggtcatgggggcagtttcccccatgctgttctcatgatagggagttctcacaagatctgatggtttaaaagtggcagtttcccc

SEQ ID NO: 868355 - DNA, 605 bp, Homo sapiens
ccctttgtccttacattgattgtgggagcctatatagattgacttttattttcctgaccaaactcaaactgtggcaccatatttcataaaacttaagtcatctcaaatgtaacacccaccattattttatttgaaacaagaaaagaaaaaatgtttgctaagtaaactatgatatgttgtacattctaaaaacatcctgatttcagagatatttgactgtttcaaacatgcttgtatatggtatgaagtagagtcaacttttatttttttcccaacagggatacctrattgttttggcactgttgattaaaaatggtatcccttctccactgacctgcagtccagctcttcatatatccagtatctttagtgtgtggtctgattctggactctctagcccattctactggtttgtctagccccataccaataccatgttgccttagttactatattgtcaaaaaaatgtttgatagctagtaagaaaatcttcccaacttgctcttcttcatggcaatcctgaccttttgtatttctatataaatttagaattagattaccaaggtaaacacaaagcactgtggggatcttggttaagatggtgt

SEQ ID NO: 868356 - DNA, 590 bp, Homo sapiens
ggagcaaaaacatgacttaaagttgtaggttatatttaaaagggaagaagagtgtaaaagtttgaaaactttgcaccctagccatgtggcaaagaaagaaaaggctcttttgggagagaaatccaagcaggctgcagagcaactattgctagatagaattgcatgtctataagagagccaagtgctaatagccaagacaatgggaaaaggggacttcaaggcatttcagagattgaggcagccccacacatcacaggtccrgaggcctaggaggaaagaatggtttcatgggccaggcccagagtgccaaagccctgcaccaccttgggaggctgttcccagcatccccactgctccagctccagctgtggctgaaagggccactggtacagcttggactgctgcttcagagggtgcaagctgtaagcgttggagacttccacatgctgttaagcctgcaggtatgcagagtgcaagagtaaaggagacttggcagtgtcgcctagatttcacaggatgtatgaaaaaggctggtatacaggcagaagtctgctaaaggagttgagccctcacagagagcctctactagg

SEQ ID NO: 868357 - DNA, 660 bp, Homo sapiens
cagtagccataaaatctatttacatattcttccacctctcaagtctcatgcaaattaatgtgtaattacatttagatggcgcagctgctctgacactctgctcccagcttttatttctgagtttcaaaggtttcataaggaaaccttgaaagaaaaaagtaaatattttgaaaaggagttacaatttgtcagcagtaatccttccctggataggcaaagaaaggcaaatcttggtagatgagagaattgtggcttttgaaaataatagcattacactgaaatttaatctgctagcgttatttyttccaagcaaaccctctttgcattcaatttgtcatttattacagtaagaagcaacagggtccaaaagagaattgtttgcagtaagcacagagatattctcaacaaaggtagaatttgatagcatgcacaaaacaacacattacttatccagcattctgagtcaccttttcagcaaagaaccttgtgtatttgatagcaaagggagaagaaatcgtgtttattggaatgttaaaatgcgtgatagggcggacattctattttaaagaaatatgagactggaatattgattctgccacatacgaaggctggaaagtattcataaatgatcaattgcctatagtttaatgacggaagata

SEQ ID NO: 868358 - DNA, 562 bp, Homo sapiens
ggtaaatcatagcatctgtttcatttttgtgaacatgttagcagttggtctatttacatacatgtctggcacagagtaaacattctttagatgttaccaattgtagtgacttttcacatctctgaatgtttctcatttgtctaggaagtccttcgcagatggtaccttccacacrttgggtgctcagtaccaactcagactcaattttcaaaaaaaaaaaaaacaaaaaaacattaccttcttggcaaaatgagttcatggctttcagaatttgggctgtcatgacacaatttttcattcgcccgagcttaaaatatcaaggcaattttttagtccttccctcacattcttgtgaaatttagtgtttcatcagtattttttcttgaaacaactcttgactgtccctttgttttcaatcccaatgctgatgctatagtttgggtccatacttttcaactctaaatgcttactggtctctctcaaatccatctgcataaactactagggtaatcattttaacctattttcatcatgcaattctccagatcaataagctttcatg

SEQ ID NO: 868359 - DNA, 636 bp, Homo sapiens
ctgtacagaggcagaaaatggatgtattccattccttaaatctcagaggactctgaaatagaagtctgctagggatggggcagatgtgagaggaataaaattgattatttattcattcacataatatttgttgagtacctacagtgtgcaggcattcttcaggtactaggactataataaatatggtagctaaaacaaagccccgctatcacttttgtgggagaagcaggctttaagagaatgtttatgaataatgtggcagacagcgataaggactcagcaggaaagtacatgaggataaggaggctagagaacaattcaatgggagggcgctattttacagggtggtcatgggggggccttgaatggaaaaaaggaggaaaaacaaacagcaagtggtaatgctctgtaagatggaggtgtgcttagcrtgtccagcaactgacagtgcgtctggactacagtgagtgaggaaaaagagtaaggaggaaagttacagagcaggagggaggagatcagacaggactttgcaggtcatgataagaacttggcttttaatcgggatgaaatagaaagccatggcgaggaggttctgcacagagaaaggacacaatctgaattatatttgaaaaggat

SEQ ID NO: 868360 - DNA, 638 bp, Homo sapiens
tttcggcattaactttctttcagtatacattgaaccaatttcaggcctacagttttaggtgtaatataataaccacaaatatcatttggttttattctacgaggcactgagtgttagatttccacaaatgaatgcatcctgacataagaattgtacytcccgccttgattcctggggagatgtcattgcagatttgccactaatctttaattcattcttccaaacactgcatttcattaggcctttaggcttagggttgggatggtgctttatctgtgctgtcggtcaccacgcatagagtatccgggcgtaaagagataattgattctctttatttcatcctcatagctttgtattgcaaagttttgaggctatgactttaccttgtatttaagtagagattacacaacctgctgaaaggaagttgtcggggattcctaggttgaataagaaagttggactaggaaataagacctcacataataattataattgcctatagcttagtcttacaacttgctggatacttttctaggtaagttgcatacatcatctctaagccttactatagtgcagagagatagattatcagggaggaaaacgggaaaagtggatgcagttgagtaaaatgattatcc

SEQ ID NO: 868361 - DNA, 533 bp, Homo sapiens
caacagctgcctggggtttcaggttcattgaagctgcacgtagagggagacaggaagacagaaacaataaacttgagagaagaattgagctaattcttttactaggtggctgcattctctgataaccatctctgaatagaaatataaaaactgattcttgacagaaaatccttaaaggtggaagtggaggtaactacagagctgacagacaggactgaatctatagagaatacaagaatgaaagatgggggagatggggaaggagaaggacagaagaaatagagatagaagagagaaagaaagaaagtttcctcatcagaattagtaaatraatgaaaataaattttaaaaaatcaggaaaatacatgctaagaaagacagtcaataatgataataattgaaagataaattgacagaagacaaaaattctttaaaaatcagaaacaggactatgaaatgtacatgcttgggattctaaaagaaataaatgttttataatctgaatttaagtgtataaatattttaactaacct

SEQ ID NO: 868362 - DNA, 633 bp, Homo sapiens
aaagcaaacaaattgaaaagctagcagaagacatgaaataactaagatcagagcagaactgaaggagatagagacatgaaaaacccttcaaaaaatcaatgaatccaggaactgttttttttaaaaaacatcagcaaaatagaccactagccagactaataaagaagraaagagagaagaatcgaatagatgcaataaaaaatgacaaaggggatatcaccaccgatcccacagaaatacaaaccaccatcagagaatactataaacacctctatgcaaataaactagaaaatctaaaagaaatggataaattcctggacacatacaccctcccaagactacagcaagaagaatttgaatccctgaatagaccaataacaacttctgaaattaaggcagtaattaatagcttaccatccaaaaaaagtccaggaccagatggattcacagctgaattctaccagaagtacaaagaggagctggtaccgttccttctgaaactattccaaacaatagaagaagagggaatcctccctaattcattttatgaggctagcatcatcctcataacaaaacctgtctcagacacaacaaaaaaagaaaatttcaggccaatatccctgttgaacattg

SEQ ID NO: 868363 - DNA, 605 bp, Homo sapiens
  misc_feature 375: n = A,T,C or G
ttcttgaggctggataatttgtaaagaaaagacacttaattggctcacagttccacaggctgtacaggaagcatgtctggggaagcctcaggaaatgctgaatcatagcagaagacaaaagggaagcaggcacattttacatggctggagttggaggaagagagggaagagggaggtgtcacacacttttaaacaaacacatcttgtgataactcactcactatcatgagaacagcaccaaaggggaaatccatcaccatgatccagtcatttcccaccaggcccccctccatcattggggattacaattttacatgagatttgggcagggacacagacccaaactatatcaaggccttataaaaatagttaaanagtgtttctcccttttctattctctgtgttkgcggaaaatttaggttattttttaaatatttagaagaagccagtccaactgataaagccatccaggtctgaagttttgttgtagattttaaattatgagtcagtttccttaataaatgtcattctattcagatttttctacttctttatgttagcattgataaattgtatttttcaaggaatttatccattttgtctta

SEQ ID NO: 868364 - DNA, 651 bp, Homo sapiens
gacttggaagatttggttgttaatttggagttaaattcagtaaattttagcttttagcacagtgctaactacccactccccacccctggtcccatagtgggcacctgtgttcctggagcagcttgcatatcacttgtgggagctgggataggcaacaaggaccctgtcatccaaattttgaggatttgtgttggttgctgattgttgcttctgatcactgaggtgcggacatagaggaaggcagccattgtttgcacctcctccttccgccattgttgcaacacsctttagctgaagtgacttcaaggggattttttttttttttttgagatggagtctcgctttgtcacccaggcttgagtgcagtggcacaatcttggttcactgcaacctctgcctcccaggttcaagccattctcctgcctcagctccccaagtagctgggactacaggtgagcaccattatgcccagctaatttttgtattttttttttttttagtagagatggggtttcaccatgttggccaggctggtctcaaactcctgacctcaagtgatctgcccacctcggccttccaaagtgctgagattacatgtgtgaaccaccgcgcctagccacttccaggggattaaagggctggtaactcctt

SEQ ID NO: 868365 - DNA, 666 bp, Homo sapiens
tgtgcccaacataccaaaattccagactcccagagggaaacagatgttcaaaatataccacattgtttgcacacagtatagatacagtgaaaaactcttatcagctggggtcatgagaaccctgtagaaatccaagttcccatatgcyagctaagggccaaccttgcaagtaggccattttggagataagcattcacaggtgctctaaattaactatattctgaacagtatattttacaatttttattaactattcattttttactggcatatattaatacaatggacttttatacattgatactatatccagtgaacttgttaaattcacttataatagtgtacatgcagattcttttagattttctaagtatacatcatgtagccattgactttctttcaatataaatttgtgaactctttccccatattgaaacagaagaatgtaatgatttcattaagctacaattttctatccattatcatgtaaacatggtgtgaaatatagtttaaaaaaaaagagttgaatatttccttcctcttccaaacttacaaaaccaaaaagatagagagcttcagacattcacaaattttaaaaaagcaaaaaggtctacttatagtctttggaatacacaccatttagctttatgaatcagagacattatg

SEQ ID NO: 868366 - DNA, 666 bp, Homo sapiens
tgtgcccaacataccaaaattccagactcccagagggaaacagatgttcaaaatataccacattgtttgcacacagtatagatacagtgaaaaactcttatcagctggggtcatgagaaccctgtagaaatccaagttcccatatgccagctaagggccaaccttgcaagtaggccattttggagataagcattcacaggtgctctaaattaactatattctgaacagtatattttacaatttttattaactattcattttttactggcatatattaatacaatggayttttatacattgatactatatccagtgaacttgttaaattcacttataatagtgtacatgcagattcttttagattttctaagtatacatcatgtagccattgactttctttcaatataaatttgtgaactctttccccatattgaaacagaagaatgtaatgatttcattaagctacaattttctatccattatcatgtaaacatggtgtgaaatatagtttaaaaaaaaagagttgaatatttccttcctcttccaaacttacaaaaccaaaaagatagagagcttcagacattcacaaattttaaaaaagcaaaaaggtctacttatagtctttggaatacacaccatttagctttatgaatcagagacattatg

SEQ ID NO: 868367 - DNA, 637 bp, Homo sapiens
agccagttttccttttaagtctctttaaatctttacctcagatttcttaagaaagccacaagctcaacttccacttcatagtatttattcatgtaatattgacaagaactctgatttaagagaaaagagcagtgataggcagaatgaaataattattgataagcagaataatataatgattctcatgtttaatgattttaaatattatatttttacagaatgattggatcwaatgctaattaaaaactgtttacatgttctctatttgaagaaagaatgtaggcccattaagtatcattctataatggaaatgaaaaagtcgactaaattagagaaaagcttttatccactaatatgcagatagcaggcagcatctgttctatcactgctatgaatcagcatgagaaatacctattatactgaaatgacagtagaatccagttcaacatgttgagacccattcacaagttttatgtatttttgtctagataacctttgaaagttcagaaaattaactgagatagcatctgtaagaattctttgtgtgaacccacaaatgttacttctcaactctccaaagatgactttgatcctttgatttcttatatcatcccctctaatatagtttccctccacc

SEQ ID NO: 868368 - DNA, 617 bp, Homo sapiens
ccaacccaaatgtccatcaatgatagactggaatgagaaaatgtggcacatatacaccatggaatattatgtagccataaaaaaggatgagttcatgtcctttgtagggacatggatgaagctggaaaccatcattctcagcaaactatygcaaggacagaaaacaaaacaccacatgttctcactcatagttgggaattgaacaatgagaacacttggacacagggtggggaacatcacacactggggcctgtcctgggtttggggtgggggaggggtagcattgggagatatacctaatgtaaatgatgagttaaagggtgcagcacaccaacatggcacatgtatacatatgtaacaaacctgcacattgtgcacatgtacccaagaacttaacgtataataataataataataataataataataataataaaacctgaatatactgagacttctgtcttgacagatggttcatactcaaaattgcatcaaatgtgggggaggcactatctcagtttagcatttaggaactgttttagtttaaagacctgtcatcattttaggtcttatatagagatggtgtcgttgcctggttttgctgctacaacagaata

SEQ ID NO: 868369 - DNA, 606 bp, Homo sapiens
catcatactcagacagcagtatgagaggcacatgcatatggaaatggctagcaatatattgaaaatgtagttctagttaaaaataggagttgaattgatgggaggaaattgaaatgttttccagtgaagtagtcctgtcatcttcacctgagagtaaactcttggtgttttaggaagacacttaaagtcattcaatcccccttcaatatgtattaaatgaaataaaatatttacaacaaacttccaagggtgtgttgtaagatgaaggaaatatcagtcggactatatcagagtcatttatagagtaaggagtccrctaaaaatagtatttaaggtcacaaaaatctaatgctttagataccaaaacttagagcaaatggactattatgattatagctttaattttcctagatgtaaatttaatctttcccctgctcaaaattcattaactgtcctccatttgccaaaggaaaaaactgaatttctttaccatttcatacaatttcatgatccagaccctgtcttccagtctgattttttttccccacaaatttttttgaatggcccctgaaaaagtatgcacacaccttcttcctccaaaattaa

SEQ ID NO: 868370 - DNA, 614 bp, Homo sapiens
gattccctaagacataacaatttgcaagttacataatatgtttaaggtagcaattactagcacactattcaccttaaaaacatgttaaatgatactattcatcttaaaaatatgttaaatgaatgaatgacgaatcatgraagcaaagggaaatactttgaatacttttttccttggattctgcatacaactgtctttctaatatcacaaattcaatgaataagtatcatagtcaaatatacttttcaaaaattagtagcactcaccacaggctaattgcagagggaaaataacaatgaggagagcaagcagagaaaaatagaacataaatctttggctcttgcagagtcagtgaacaacctaatttcctctcattcattttttttccacgtaagatagccagaaaggattctgtggtttgcatttaaaccctcgtcccctccccaccccaactgacacagtgcctctgcaagatcccagaatatacataggcctggccactcaaagtgtacatggccaccttgtgcatgtggaagtgtttcatatacttgttactcttcttttcctcctgagtaaagagaatgaaggcaagtgcattgcaattattccttttc

SEQ ID NO: 868371 - DNA, 612 bp, Homo sapiens
caattaagtgtgacatgtggaatataattatgcatccattttacaatatgtccacatgccaacaggggcctctctttttagtagtttcattgttgtttccaataaagaatagagagttttcctctcttgttgcagcatattgagacagtgaggtaaattcaacgcaaaaaaatgcatagaaaataattaaaggcaacatgtaaatgggggcttgatgtggcatgtagtactctataggtgctgaggatatggccagagtgggttcccawtaagacagagtctggctgtaagtctaagaatgcatatttaacttgtattcaaatagcatatgacagatgaaaagcacatttcatacattattactttttcctcacaacaacaccatgaactggagattttggctaaaatgttctcaagcaatattccctaaagcagagaatatttttatattcaacaaacattttcaagattttactcactgaaaggcaatataggtggctctaagaacacaatagtaagtaaaaacatggtgtttactcctatagcctagtggaggagattggcattaatcagtttcacacaaatgtaacatctcaaaccataataagggat

SEQ ID NO: 868372 - DNA, 503 bp, Homo sapiens
atacatacaatatttaaaacaatctcaaggccaggcatggtggctcatgcctgtaatcccagcactttgggaggctgaggcatgcagatttcctgaggtcaggagtttaagaccagcctggccaacgtggtgaaatcccatctctactaaaaacacaaaaattagccaggcatggtggtkggtgcctgtagtcccagctactcaggaggctgaggcagaagaatcacttgaacttgggaggcaaaggttgaggtgagccaggatcgcgccactgcattccagcctgggtgacagagtgagacttcgtctcaaaaaaaaaaaaaaaaaaaaagaaatcatggtgtgtgcaggggatggcagtgtatacctctctttctcactcttactattaatttattggaagcttgtttttgtcaggctctaagctgagttctctacatcatcttttataaaactaataatattattattgtgataagaaaattgaagctgacctaagtagc

SEQ ID NO: 868373 - DNA, 593 bp, Homo sapiens
tcatccatgtccctgcaaaggacatgatctcactcctttttatggctttgtagtatttcgtgatgtatctgtaccacattttctttctccagtctatcattgacgggcatttgggttggctccatgactttcctattgttaatagtgttgcagtcaacaaacatgtgcatgtgtctttatagtagaatgatttatattcctttgggtatatacccagtaatgagattgctaggtcaaatggtatttctgtttctagatccttgaggaatcccatactgtcttccacagtggttgaactaatttamgttcccatcaacagtgtaaaagcattcctatttctccacagccacaccagtatctgttatttactgactttttaataatagccattctgactgtaatgagatggtatctcattatggtttttatttgcatttctctaatgatcaatgatattgagctctttttcatatgtttgttagccatgtaaatgtcttcttttgagaagtgtctcttcatatcttctgctcattttttgatggggttgtttatttatttcttgtaaatttgtttaagttgtttgtagattctgg

SEQ ID NO: 868374 - DNA, 637 bp, Homo sapiens
catatgttgaaccagctttgcatcccagggatgaagctgacttgattgtggtggagaagatttttgtgctgctggattcagtctgccagtactttattgaggattttggcatcaatgttcatcagggatattggcctggagttttctttttttgttatctttgcccagttttggtatcaggatgatgctggcttcttaaaatgagtccctctttttcagttgttyggaatagttttagaaaaaatgataccagctactctttgtatttctggtaaaattaggctgtgaatccatctggatctgtgttttttttattggtaggctattaattactgcctcaatttcagaacttgttactctctattcaggtattcaacttcttgctggtttagtcttgggagggtgtatgtgtccaggaatttatccatttctagattttctagtttatttgtgtagaggtgtttagagtattctctgatggtagtttgtatttttgtggggtcagtggtgatatccccttatcatcttttatttattgtgtctatttgattcttctttattagtctagctagccatccattttattaatttttttttaaaagctcctggattcgttgatttttttgaagggtttttc

SEQ ID NO: 868375 - DNA, 587 bp, Homo sapiens
tttcccacttaacactgctttagtggtgtcccagagattccggtacattgtctctttgttctcatgggtttcaaagaaattcttgattctacattaaattcattatttacccaggagtcattgaggtgcaggttgttcaatttccgtgtaattgtgtggttttgagtgaatttcttaatcctgagttctaatttgattgcattgtggtgtgagagactgtttgttaggatttcagctcttttgcatttgctgaggagtgttttatttcccattatgtagtcaattttaaaataagtgccatgtgacactgagaagaatgtatagtctgttggcttggggtggagagttctgtagatatctattaggtcyacttgatcaagagctgagttcaattcctgaataaccttcttaattttctttttctctgaactgtctagtattgacagtggggtgttaaagtctcccactattattgtgtgggagtctaagtctctttgtatgtttccaagaactggttttatgaatctgggtgctcctgtattgtatgcatatatattcagaatagttagctcttcttgttgaattgt

SEQ ID NO: 868376 - DNA, 659 bp, Homo sapiens
caggagaacatccccagcctagcaagacaggccaacattcaaattcaggaaatacagagaacaccacaaagatactccttgagaagaccaactccgagacacatgattgtcagattcaccaaagttgaaatgaaggaaaaaatgttaagtgcagccagagagaaaggtcgggataccaacaaagggaagcccatcagactaacagctgatctctctgcagaaactctataagcaagaagacagtggggaccaatatttaacattcttaaagaaaataattttcaacccagaatttcatacccagccaaactaagcttcataaatgaagaagaaataaaatactttacagacaaacaaatgctgagagattttgtcaccaccaggccttccctacaagggctcccgaaggaagcactcaacatggaaaggaacaattggtactagccactgcaaaaacattccaaattgtaaagaccattgatgctaggaagaaactgcaycaactaacaagcaaaataaccagttaacatcataacgacaggaacaaattcacacataacaatattaaccttaaatgtaaatgggctaagtgctccaattaaaagacacagactggcaaattggatgaagagtcaagacccatcagtgtgctgtattcg

SEQ ID NO: 868377 - DNA, 627 bp, Homo sapiens
tataccctgaacttaaaagttaaaaaaactgtatgtcatacagttatgttttcttttattcattttctcattttattcattagttttaagattatacctgtttatatatttatgagaaaattctatttttcctttattaggaagtctctttatgccctagttacattaacatatttatctaatttcctaatattttactaatatattatttttcctaatatatgggattaagcctgcaacataatttttatgttttaaagttttaagaaaaatgtctcttaggtaaatggtcaaatattgcacagaatcgtctcataaaaaatagtaatacagggatttctggcaagatggctgaataggaacatctctggtctgcagctcccagcgggattgatgcagaagatgagtgatttctgcatttccagctgaggtacctggttcatctcaatgagactggttgracagagggtgcagcccatggagggcgagacgaagcagggcagggtgtcacctcaatcgagaaatgcaaggggtcggggaagccctgagagaccctaccaggagaaatggtacactgctgcccagatactgcacttttcccacagtcttcgcaaccagcagaccagg

SEQ ID NO: 868378 - DNA, 570 bp, Homo sapiens
gctgtactctgcaaagccacagggtcagagctgcccaagaccatgggaatgcacttcttgcatcagtgtgacctggatatgagaccagagtcaaaggagatcattttggagctttaaaatttaactgccctgctggatttcggatttgcatgggctctataacccctttgttttgtccagtttctccaatttggaacggttgtatttacccgatgtctgtatcctcattgtatctaggaagtaactagcttgcttttgattttacaggctcatgagtgaaagggacttgccttgtctcagatgaaactttggactgtggacttttggattaatgctgaaatgagttatgactttgggggaccgttgggaaggcatgattggttttgaaatgtgaggacatgagakttggaggggccaggagtggcattatatggtttggctgtgttccaacccaaatctcagcttgaattctatctcccagcatgtgttgtgggagtgacataggggaggtaattgaatcatgggagccagtctttcctgtgctattctcatgatagtgagtaagtctca

SEQ ID NO: 868379 - DNA, 583 bp, Homo sapiens
caagtcctttgcttaggttctgccctaggaggaacccgaagtgtgatggtcactgtcctgaatatcgtggaagataaagggcttggaagcattttcttatgaacaacattcacagggttctggtacacatattttaatgggattttctaatagtgtgtgacatttagatagtgctttatggttaactacaagctatcagacaaattatttatgttgatccttagaggttagtatacatgcaattattattaacattttacttatgaaaaaatggtgtcagagaggatacatggcttatttaaagtcacagagaagatctgcaaagaaaamccaagtttcccttactatgtgaaattctatccgtacagttaggacatttatcctttactgtcaaatttatggaaagagaattttactaatttttgtttgatttttcctgctgtctttattttggctttctagttgtgggcctcaaaaacagtaatatagttgtttcctgcttttcccagtgaggaatagaaaagagccagttaagtttgtaagttacagttatagtttatgcctatgtacaacaggccagtga

SEQ ID NO: 868380 - DNA, 640 bp, Homo sapiens
gttgaattttgttgaaggacttttctgcatctattgagataatcatgtggcttgtcattggttctgtttatgtaatggattacatttactgctttgcatatgttgaactggccttacatgccagagatgaagccgacttaatcatggtggataagctttttgatatgctsctggattcggtttgccagtattctgttgaggatttttgcagtgatgttcatcaggaatattggcctgaaattttcttttttgttgtgtctctgccaggctttggtatcaggatcatgctggcctcacaaaatgagttagagaggagtccctctttttctattgtgtggaatagtttcagaaggagtggtaccagctcctctttgtacctctggtaaaattcaactgtgaatctgtttggtcctgggcttttgttggttggtaggctattaattactacctcaatttcagagcttgttattggtctattcagggattcagcttcttcctggtttagtcttgggagggtgtatgtgtccaggaatttatctatttcttctagattttctagtttatttgtgtagaggtgtttatagtattctctgatggtagtttgtatgccacagaaatctgtggcatcagatatgtgatc

SEQ ID NO: 868381 - DNA, 583 bp, Homo sapiens
acaaaccactgctcaatgaaattaaagaggacacaaacaaatggaaagacattccatgctcatgggtaggaagaatcaatatcgtgaaaatgaccctactgcccaaggtaatttatagattcaatgccatccccatcaagctaccaatgactttcttcacagaattggaaaaaactactttaaagttcatatggaaccaaaaaagagcccgcatcgccaagacaatcctaagccaaaagaacaaagctggaggcatcacgctacctgacttcaaactatactacatggctatagtaaccaaaacagcatggtactggtaccaaaacagagatatagaccaatggaacagaacagagmctcagaaataataccatacatatacaatcatttgacctttgacaaacctgagaaaaacaagcaatgggaaaaagattccctatttaataaatggtgctgggaaaactggctagacatatgtagaaagctgaaactggatcccttccttacaccttatataaaaattaattcaagatggataaagacttaaatgttaaacccacaaccataaaaaccctagaaaaaa

SEQ ID NO: 868382 - DNA, 611 bp, Homo sapiens
gaacattgatgcaaaaatcctcaataaaatactggcaaaccgaatcaaacagcatattaaaaagcttatccaccacgatcaagtcgtcttcatccctgggacgcaaggctggtttaacatatgcaaatcaataaatgtaatccatcacataaacagaaccaatggcaaaaaccacatgatcatctcaatagatgctgaaaaggactttgataaaattcagcaccacttcttgttaaaaacactcaataaactaggtactgatggagcatatctcaaaataataatagctatttatgaaawacccacagccaatatcttactgaatgggcaaaagctggaagcattccctttgaaaaccggcacaagacaagggtgtcctctctcaccactcctattcaacatagtattgaaagttctggccagggcagtcaggcaagataaataaacaaagcgtattcaaatagaaagagaggaagtcaaattgtctgttttcagatgacatgattgtatatttagaaaaccctatcatctgagcccaaaaactacttaagctgataagcaactttaacaaagtctcaggatacaaaatcaatgtgcaaaaatcacaagca

SEQ ID NO: 868383 - DNA, 560 bp, Homo sapiens
atggccatacttcccaaagcaatttagacattcaatgctattcctatcaaactaccattagctttcttcactggagaaagctaatttaaatttcatatggaaccaaaaaagagcccgtatagtcaagacaatcctaatcaaaaagaacaaagctgcagacatgacgctacctgacttcaaactacactacaaggctacagtaacgaaaacagcatagtactggcaccaaaacagatatatagaccaatggaacagaacagaggcctcagaaataacaccacacatctacaaccatctgatctttgacaaacgtgacaaaaacaagcaatggggaaaggattccctatttaataaatggtgctgggaaaacyggttagccgtgacagtagatttctcatcagaaaacaaggaagtgagaaggaagtggcaaaacatttttcaagtactgaaagaaaagagctatcaaccatgaattttatatcatgtgaaactgtccttcaggaatgaagaggaaataaagacattctgaaaggaaggagaactacaagagtttgcagcta

SEQ ID NO: 868384 - DNA, 616 bp, Homo sapiens
tactcaactaacaaagttgaacctttcttttgatagagcagttttgaaatggtctttttgtggaatctgcaagtggatatttggctagttttgaggatttcgttggaagcgggaattcatacaaattgcagactgcagcgttctgagaaacatctttgtgatgtttgtattcaggacasagagttgaacattccctatcatagagcaggttggaatcactccttttgtagtatctggaagtggacatttggagcgctttcaggcctatgttgaaaaaggaaatatcttcccataacaactagacacaagcattctcagaaacttgtttgtgatgtgtgccctctactgacagagttgaacctttcttttcatagagcagttttgaaacactctttttgtagaatctgcaagaggatatttgcatagctttgaggatttcgtgggaaacgggattgtcttcaggtaaaatctagacagaagcattctcagaaacttctttgggatgtttgcattcaagtcacagagcagaacattccctttggtagagcaggtttgaaacactctttttgtagtatctggaagtggacatttggagcgctttcaggcctatgttgga

SEQ ID NO: 868385 - DNA, 609 bp, Homo sapiens
gtgatgattgcattcaagtcacagaattgaacattccctttcacagagcaggtttgaaacactctttttgtagtgtgtgtaagtggacatttggagcactttccggcctaaggtgaaaaaggaaatatcttcccataaaaactagacagaagcattctcagaaacttactcgtgatgtgtgtcctcaactaaaggagtagaaccttccttttcatagagaagttttgaaacgctctttttgtggaatctgcaagtggatatttggctagttttgaggatttcgttggaagcgggaattcatacaaattgcagactgcagcgttctgagaaacatctttstgatgtttgtattcaggacacagagttgaacattccctatcatagagcaggtttgaatcactccttttgtagtatctggaagtggacatttggagcgctttcaggcctatgttggaaaaggaaatatcttcccataacaactagacagaagcattctcagaaacttatttgagatgtgtgtactcaactaagagaattgaaccaccgttttgaaggagcagttttgaaacactctttttctggaatctgcaagtggatatttggctagct

SEQ ID NO: 868386 - DNA, 655 bp, Homo sapiens
ttcgttggaagcgggaattcatacaaattgcagactgcagcgttctgagaaacatctttgtgatgtttgtattcaggacacagagttgaacattccctatcatagagcaggtttgaatcactccttttgtagtatctggaagtggacatttggagcgctttcaggcctatgttggaaaaggaaatatcttcccataacaactagacagaagcattctcagaaacttatttgagatgtgtgtactcaactaagagaattgaaccaccgttttgaaggagcagttttgaaacactctttttctggaatctgcaagtggatatttggctagctttggrgatttcgctggaagcggaatacatataaaaagcacacagcagcgttgtgagaaactgctttctgatgtttgcattcaagtcaaaagttgaacactccctttcatagagcagtcctgaaacactccttttgtagtatctggaactggacttttggagcgctttcagggctaaggtgaaaaaggaaatatcttcccataaaaactggacagaagcattctcagaaacttgtttatgctgtatctactcaactaacaaagttgaacctttcttttgatagagcagttttgaaatggtctttttgtggaatctgcaagtggata

SEQ ID NO: 868387 - DNA, 655 bp, Homo sapiens
ttcgttggaagcgggaattcatacaaattgcagactgcagcgttctgagaaacatctttgtgatgtttgtattcaggacacagagttgaacattccctatcatagagcaggtttgaatcactccttttgtagtatctggaagtggacatttggagcgctttcaggcctatgttggaaaaggaaatatcttcccataacaactagacagaagcattctcagaaacttatttgagatgtgtgtactcaactaagagaattgaaccaccgttttgaaggagcagttttgaaacactctttttctggaatctgcaagtggatatttggctagctttggggatttcgctggaagcggaatacatataaaaagcacacagcagcgttgtgagaaactgctttctgatgtttgcattcaagtcaaaagttgaacactccctttcatagagcagtcctgaaacactccttttgtagtatctggaactggacttttggagcgctttcagggctaargtgaaaaaggaaatatcttcccataaaaactggacagaagcattctcagaaacttgtttatgctgtatctactcaactaacaaagttgaacctttcttttgatagagcagttttgaaatggtctttttgtggaatctgcaagtggata

SEQ ID NO: 868388 - DNA, 589 bp, Homo sapiens
atagagcaggtttgaatcactccttttgtagtatctggaagtggacatttggagcgctttcaggcctatgttggaaaaggaaatatcttcccataacaactagacagaagcattctcagaaacttatttgagatgtgtgtactcaactaagagaattgaaccaccgttttgaaggagcagttttgaaacactctttttctggaatctgcaagtggatatttggctagctttggggatttcgctggaagcggaatacatataaaaagcacacagcagcgttgtgagaaactgctttctgatgtttgcattcaagtcaaaagttgaacactccctttcatagagcagtcctgaaacactccttttgtagtatctggaactggacttttggagcgctttcagggctaaggtgaaaaagkaaatatcttcccataaaaactggacagaagcattctcagaaacttgtttatgctgtatctactcaactaacaaagttgaacctttcttttgatagagcagttttgaaatggtctttttgtggaatctgcaagtggatatttggctagttttgaggatttcgttggaagcggga

SEQ ID NO: 868389 - DNA, 622 bp, Homo sapiens
tgtatctactcaactaacaaagttgaacctttcttttgatagagcagttttgaaatggtctttttgtggaatctgcaagtggatatttggctagttttgaggatttcgttggaagcgggaattcatacaaattgcagactgcagcgttctgagaaacatctttgtgatgtttgtattcaggacasagagttgaacattccctatcatagagcaggttggaatcactccttttgtagtatctggaagtggacatttggagcgctttcaggcctatgttgaaaaaggaaatatcttcccataacaactagacacaagcattctcagaaacttgtttgtgatgtgtgccctctactgacagagttgaacctttcttttcatagagcagttttgaaacactctttttgtagaatctgcaagaggatatttgcatagctttgaggatttcgtgggaaacgggattgtcttcaggtaaaatctagacagaagcattctcagaaacttctttgggatgtttgcattcaagtcacagagcagaacattccctttggtagagcaggtttgaaacactctttttgtagtatctggaagtggacatttggagcgctttcaggcctatgttgga

SEQ ID NO: 868390 - DNA, 659 bp, Homo sapiens
cagaaagttctttgtgatgattgcattcaagtcacagaattgaacattccctttcacagagcaggtttgaaacactctttttgtagtgtgtgtaagtggacatttggagcgctttccggcctaaggtgaaaaaggaaatatcttcccataaaaactagacagaagcattctcagaaacttactcgtgatgtgtgtcctcaactaaaggagtagaaccttccttttcatagagaagttttgaaacgctctttttgtggaatctgcaagtggatatttggctagttttgaggatttcgttggaagcgggaattcatacaaattgcagactgcagcgttctgagaaacatctttstgatgtttgtattcaggacacagagttgaacattccctatcatagagcaggtttgaatcactccttttgtagtatctggaagtggacatttggagcgctttcaggcctatgttggaaaaggaaatatcttcccataacaactagacagaagcattctcagaaacttatttgagatgtgtgtactcaactaagagaattgaaccaccgttttgaaggagcagttttgaaacactctttttctggaatctgcaagtggatatttggctagctttggggatttcgctggaagcgggaatacatataaaaa

SEQ ID NO: 868391 - DNA, 533 bp, Homo sapiens
tgtttgcattcaagtcacagagcagaacattccctttggtagagcaggtttgaaacactctttttgtagtatctggaagtggacatttggagcgctttcaggcctatgttggaaagggaaatatcttcccgtaacaactaggcagaagcattctcagaaacttatttgagatgtgtgtactcaactaagagaattgaaccaccgttttgaaggagcagttttgaaacactctttttctggaatctgcaagaggatatttgcctagccttgaggatttcgttggaaacgggrttgtcttcagatgaaatctagacagaagcattctcagaaacttctttgggatgtttgcattcaagtcacagagtagaacattccctttggtagagcaggtttgaaacactctttttttagtatatggaagtggacatttggagcgctttcaggcctacgttggaaaaggaaatatcttcccataacaactagacagaagcattctcagaaactggtttctgatgtgtgtcctcaactaacac

SEQ ID NO: 868392 - DNA, 706 bp, Homo sapiens
ccatctggtcctggactctttttcgttggtaagctattgaatattgccacattttcagagcctgttattggtctattcagagagcgaacttcttcctggtttagttttgggagggtgtatgtgtcgaagaatttatccatttcttctagattttctagtttatttgcgtagaggtgtttgtagtattctctgatggtagtttgtatttctgtggtatctgtggtgatatcccctttgtcaytttttattgcatctatttgattcttctctcttttcttctttatcagtcttgctagtggtctatcaattttgttgatcctttcaaaaaaccagctcctggattcattaattttttaaaaaaattgaagtctttcagttacactctcttggatgtacggtataatcacaagaataatactaatagttataataataattactcattttaatacctaacttttaataataatagctaacctttttaggatattttctaggtgccaatacagttttaaatattgtatatatagtgactcgtttagtcatcatgacagtcatttaaccatttacctcatttatcagatgacagaagataactacaaaaaggttaagtaatttgcctgaggaaattagtagcagagccgagaatcaattccagtctcttgaatcctaaaagcccttgctttttaaaagagccaccgtatca

SEQ ID NO: 868393 - DNA, 553 bp, Homo sapiens
caactccctgaagatatgttatgtattctgttgtttacttttactctctgtgcccacactacagtggatgttttgtgacaaccaggactcctgttcattgctgtcttttatgtatctaaaacagtgctgaccacatggtgggatctcaataaacatttattcagtgaatgaaagacccraagtaaaaaatgctaaaataagatttgggagtgaaaaaagcaagggaaaagggattgaggcagatctggaactagagaggtctagtctccacaaggtatacttagaaggcaatagataaaagtagagagtaggagaggagggaagacattcataggcagcagagttgaggcttttcatcatgtttaactagattttgcatccaaagaaacaagatgaaggagtgcaaataatgaagaagttggtgtgggctaggtgaaagacagtgcataaagagcctaatctgcagtgacttgcttgagcattcctcttaggtggagtgaagtgagtccctttggaatgaaaacctttcataaaggaactagctaaactaagt

SEQ ID NO: 868394 - DNA, 568 bp, Homo sapiens
tgggagattttaaaaaatatatacttatagaaatatagacttttgactctatgaatccaccaagcgtttgccaaggggaaaaaattattgaatgtctttcaaaatagatataaagaagcacagattagaactgattaaaaagaataaagcarttctttggttgttggcaaaactagtaaacatgataaattttgcttgtctcctgccccacctgtttaatgtttaaacgtgagctgattgtggtccttgataactgattacctgtctaggacactgcaatcttctgtctattgacaggaaaatatagtttcccctgaagtgccaatatccattcttgcctttgaccatgaaccactctgcaaacacccgggaaggctcaggtgcatctgacaggctctttgagggagagattgattccatttgtatgcctgttagataatgaccttcggcctctgtacccaaagtgacaataaaaaacgccatctcatattcatctcatgtcccaggaaatactatttggtttcctgtaaacagtttacaagctttgggttttccagttgttggtttg

SEQ ID NO: 868395 - DNA, 715 bp, Homo sapiens
ctctttgctaaagcatagcaagagtaacctttattcggttcccagcaagttctgcatctccttctgagactaccactgtctggacttcgctgtccatatcactgtcagcattttggtcaaagccactcaacaagtctctaggaagttccaagctttctcacatctccctgtcttcttctgaaccctccaaactgttccaacctctgcctgctatgcagttccaaagttgcttccacatattgggtatctttacagcagtgccccactaactggtaccaatttactatattagtttattctcacactgctatgaagaaatactcaagacaaggtaatttttaaaggaaatagttttaattgacttacagttctgcagggctggggaggccccaggaaacttacaatcattgcagaagggaaagcaaatatgttcttcttcacatggtgtcagggaggagaagtgcagagtgaagcggggaaaagccccttataaaaccattagatcttgtgagaactcactcactatcacagaaacagcatggcaggaccacccccrtgatctaatcaccttccacgaggtccttttctcaacatgtggggattactattcaaattacaattcaggataagatttgggtggggacacggagccagactgtatgtatcatagggtgttactgtttttcatcaatttagcttcaattgtaaatgtttt

SEQ ID NO: 868396 - DNA, 596 bp, Homo sapiens
cccatatctagttcttcacattggaggtgaggaattgggctctgagacctatgggcaggtaaagtctggccagggcacagttatggccatgcgtgcgtgtgtgtgtgtgtgtgtgtgtgtgtgtgcatgtgtaataagtacgtgcrcatctttatgggtcaataggattataatagtaatgtacacaaattattgtttaaatattctcatgagcttttttttcctataatttttgttaatctaagggatgagataactagttcttccatttcctcaaaaaactactcagtaaaactacaggattcaggcaataaaaatatatggatacattatcaaataaaaatttatttcaggccaggtgcagtggcccacacttttaatcccagcactttgggaggctgaggcagacggatcacttgaggtcaggagttcaagactagcctgtccaacatgatgaaaccctatgtctactaaaaagacaaaaaattagctgggtgtggtggcacaaacctgtaatcccagatagtggagaggctgaggcataagaatcacttgaacctgggaggtggaggttgcagtgagccaagatcgtgcca

SEQ ID NO: 868397 - DNA, 560 bp, Homo sapiens
aagtgactagcctggaatcaccaagtaaactattttggagaaaatactatagtcaagacttctgatctctcaatgaaaatactgtgattaaaattagcaatggtcacaattttaaatttctggtaaaaactgcatatgtaactgtgaatattactatttggtaatygcattgcattgcccaaggagcaataatcaaacaaaataaagtgatatgtggatatattatatcctcagatgagctataaatccctttttatccacatatgttgaccattgtgtttgaacaagttataattgaattaaaagggagaaatggggcagttatttaggaagctttttaggcactactccaaaagaatttagagatcacaaacaaacctatatattctataacttatatcatgcttcctgtttaaacctcaagattttacctcattaaaactgcttgtagtaaaacaatgatttttgttcatattactcaaatattatcataaataaaacaacctggcagatggtatctgatcctttaatttttaaaaaaatcccagcttaaagaaaag

SEQ ID NO: 868398 - DNA, 642 bp, Homo sapiens
aagaggcaacctacagaatggaagaaaaattttgcaatatacccatctgacaaagagctaatatccagaatctacaaagaagttaaacaaatctaaaagaaaaaaaacaaataaccccatcaaaaagtgggctaaggatatgaacagacacttctcaaaagaagacacttacacggacaacaaacatatgaaaaaagctcatcatcactgatcattagggaaatccaaaccacaatgagataccatctcacaccagttagaatgacgatcattaaaaagtcaggaaacaacagatgctagagaggatgtggaggaataggaacccttttatactgttggtggggggtgtaaattagttygaccattgtagaagacagtgtggtgattcctcaaggatctagaactagaaataccatttgactcagcaataccattactgggtatatacccaaaggattttaaatcattctactataaagacacatacatgcacacgtatgtttactgcagcactattcacaatagcaaagacttggaaccaacccaaatgcccaccaatgatagactggataaagaaaatgtggcatatatacaccatggaatactatttagccataaaaaagaatgagtttatgtcctttg

SEQ ID NO: 868399 - DNA, 457 bp, Homo sapiens
cccattctgtaggttgtctgtttactctgatgatagtttcttttgctatgcagaagctgttcagtttagttagatcccatttgtcaaattttgattttgttgcaattggttttggcatttttgtgctgaaatctttgccggtacctatgtcctaaatgatattgcctagattttcctctargatttttatagtttggggttttaaagtttttaatccatcttgagttaatttttgtataaggtgtaaggaaggggtccactttcaatttttgcatatggctagccagttctcccagcaccatttaataaatagggaatcttttccccattacttgtcaggtttgtcaaaaatcagatggttgtagatacatggtcttatttctgatttctctattctgttccattggtccacggtctgtttttataccagtaccatgctgttttggttacttaagtc

SEQ ID NO: 868400 - DNA, 668 bp, Homo sapiens
ctgggctttttgtggttggtaagctatttattactgcctcaaactcagaacttattattggtctattcagggattcagtttcttcctgattcagtcttgggagggtgtatgtgtccagaaatttatccatttcttctagattttctagtttatttgtatagaggtgcttatggtgtactctgatggttgtttgtatttctgtggggtcagtggtattatccttttyagcatactgtattatgttgatttgattttctctgcttctttattagtctagctagcagtccatctatttcattactttttttcaataaaccagatcctggattcattaatttttttatgtttcttttcatgtctctatttccttcagttttgctttgatcttggttatttctcatcttctgctagctttgtagtttgtttgctcttggttctctagttcttttagttgtaatattaagatgtcaacttgagatctttctagctttttgatgtgggcatttagtgctataaatttccttcttaacactgctttagctgtgtcccagagattctggttcactgtctttttgttcttattggtttcaaaaaacttattgatttctgccttaatttcattatttacccaggagtcattcaggagcaggttgttcaattttcatata

SEQ ID NO: 868401 - DNA, 634 bp, Homo sapiens
acctctgcttttttctgctttccatttgcttggtagatttttcctctatccctttattttaagccaatgtgtatctttgaacatgagctgggtctcttgaatacagcacactgatggatcttgactgtttatccagcttgccattctgtgtcttttaattggggcatttagcccatttacatttaaggttaatattgttatgtatgaatttgaccctgtcatcatgaagctagctggttattttgcagacttgttgatgcagttacttcatagtgtcaatggtgtgttacttcarcgtgtttgtgtagtggctggtaatggtttttccttctcatattgaggctttcttcaggagctcttgcaaggcaggcctggtgataatgatttccctcagcattttcttgtctgaaaaggattttatttccccttcgcttctgaagcttagtttagctggatatgagattctgggttgggaattatttttattaataatgttaaatattggccctcaatctcttctggcctgtagggtttctgctgagaggtccactgttattctgatggtcttctctttgtaggtgacctggtctttctctctggctgcccttaatattttttccttcattacaatctt

SEQ ID NO: 868402 - DNA, 591 bp, Homo sapiens
tccaagaaatgagaatgctgagtctcattccaccactaactacctctgatagttaattttgtctctctgagcagttgactttgtctctggctcccatatttcctgtttgtaaaaatcgtgaattatagtatctgcatgtcaaggggagaagccatgaattgtctttcaaatgtaagaaatatatttctcatagagtttggttctagtagagggatttagttctaccacctaaaatgatctccactctccaccctccaccctacctacctacatgtacacatgctcacagactcactgaagacatcctccacatcttaaagcwttccattctttctctctgggactagcctgagggaaaactgggaagtaactaaaatttgtccttgatgctcttggaattatttgtattccatataattattagtatttcatataatactaaccacataagttagttatgttacagataaggacatggagaatcaaaatattttaattcgtttgtctaatgtcacctgaccaatacaatgtagaattggaatttgaacaaggtctgtttgatttcaaagtccatggtctttccatttcatc

SEQ ID NO: 868403 - DNA, 583 bp, Homo sapiens
aagtgattaggtcaggagggctctgtcctcttgaatggggttactggccctataaaagtgacctaaaggaaaatgttagtctcttctgccatgtgaggacacagcaaaaagttgccatatttgaagcagagaggtagcctttagacactgaatgtactggagccttgatcttggccttcctgacctcaagaacagtgagaaataagttctgttgtttataaattacccagtctaaggtgttttattatagcagttcaaatgsattaagacagtgcccatttgccttcgacccacggagagtgacacttctggaaagtgaggttctggttatcataagctacttctccattactttacccttctaatgcagcaacctctagcacatattccttatccagaatactgcggagctatacacataatatttgtatactttaaaatatgcaagctatatctcaattaaagaattaaaaaaatctgcaaaattaattgaatgaaagagtcacctaaattaactgccccacagaaaaatatcaaatcattcttagacttttgcacatagaatactgattattttttaaat

SEQ ID NO: 868404 - DNA, 582 bp, Homo sapiens
attaggaggatgcagggaagagcaattaccagagtccacgagagagaccacatgtgaaatcaagtccacagagccccaggcaggctgccactgagagctctgaatccagatttcagcccggtgggggcagagacctgagggagagaagtgggaagtggtgaaggaggacacggcaacaaacagggataggcttgagaaatctggacactatcatcatcaacaggatgtggctgtgtgatctgaatgggcaggcctgttggctgaatgcatcagcggcatgttggacaccttatgctcattcaagattccyctccctctgtcaggaagagtatggctggctccctgcatcattctgggtgagctacctctcttgaccactccagtggtcctgtgcacccttgccagcatcccagggctgggacctgtctttatgcctacttgagctgatgaattatcccctggggaacctccatagaggttgggctatgtgtgtgggttgctgactgatgatcaacagctgagactcaccaggaatgccaatgatcagtggaaggtggtagtggggctgcatggaggggaaat

SEQ ID NO: 868405 - DNA, 591 bp, Homo sapiens
tgtacccaagggaagccaccaattaattctgcagagatcactgttgctcttaacctatcccatggcttattcctcaatggccagtccactgggtctgcaacaaccagtcagtgctgaggctgcatatctgaggttgtattggagcaccgggagctccctgggggtgtgctgctgcccctggctttgcagagcaactgtgtcactcacagaagctgtgagaggcagctcagcagtgtgaactctgggagctagtctgcctgggttcaaatccctggctgtgccattttctagctataakaccttaagcaagttatttcacctctcaattcctctgtttctttgtctctaaaaggagtacgagaacaatggtaacagtacctactcctagggttgttatgaggattacatgagccgaggctggtaaagtgcttacaatagtagcgagcattagtgttacagtgtgtttgttaaatgaaatgagagaagtcctctctctccctgatctccttctcaccctgaggattactgcacaattggatgggggggattacaggctttgttttgccatcttctaagaggcagcaactgtct

SEQ ID NO: 868406 - DNA, 591 bp, Homo sapiens
tgtacccaagggaagccaccaattaattctgcagagatcactgttgctcttaacctatcccatggcttattcctcaatggccagtccactgggtctgcaacaaccagtcagtgctgaggctgcatatctgaggttgtattggagcaccgggagctccctgggggtgtgctgctgcccctggctttgcagagcaactgtgtcactcacagaagctgtgagaggcagctcagcagtgtgaactctgggagctagtctgcctgggttcaaatccctggctgtgccattttctagctataataccttaagcaagttatttcacctctcaattcctctgtttctttgtctctaaaaggagtacgrgaacaatggtaacagtacctactcctagggttgttatgaggattacatgagccgaggctggtaaagtgcttacaatagtagcgagcattagtgttacagtgtgtttgttaaatgaaatgagagaagtcctctctctccctgatctccttctcaccctgaggattactgcacaattggatgggggggattacaggctttgttttgccatcttctaagaggcagcaactgtct

SEQ ID NO: 868407 - DNA, 650 bp, Homo sapiens
atgttattacacttcatgttttacaaaaggctttcagatacaccccttctttcaatcctcacaatttccctgttaactaaaaattttatgctcattttaaagcctgaagaaactggaaactgacatttagagggccctaactactcaagatcatatagacactcaggagcaaagatggacccaaaaccagaccctgcactatctctacaaccacttctctaatcctagacaagcagacagatggacagatagataggcagacagatagacagataaagaaccctatactttttgcataaagagtgcttagtaattatctgttgatttattggactaaatgtgttttcttttgaatcaaatgtgatgccactgactcaccatcacatgccttagattacttgcccattagaggaacaggtttaacaactatttgtttgagtacctactatggacaaggcactgttgaaagtgttgggggaatacaaagggcgtcctatatcacytatattcttaaagacagtgaagagtgaatgagacatacactgtgcacacaaagctataagcagagtgtgataaatgccattcatttattcaccaaatatttattgccatcaactattaatacattccaggcactgggaattcaatga

SEQ ID NO: 868408 - DNA, 641 bp, Homo sapiens
gggctctgcagaccagttctgctagtcctacttgggatttctcatgaggctgtaatcagttggagtttggcatcctctggaggacctccacctgcatgctgagacagctgggcatctctttttgggctccagttcatcctagsgcctttcctcttcatgtgatctctccagcagggtagctggactgctcacgtgactgctgaggagccgcaaaagctcatgcaagagggataaatcaccaggtgttcttaatatctgctcctagaattcctgaagtgctgctaggtttgttgtctcctggtcaaaggggacaggagctcagtccagaggccagagaggaggggtatgaatgtggagaaaagggtgggcttatctgaggccatctttggagcctggctgtcactataggtacaagtgagggagcagggctgtggcagtaagggcaagaattcccaattctgtggtagagcatcctcatgaattagaaggtcaggaaaggaactcatatgacaaaagataatgagacaaattagcataaaaacacatctcttgaaatttagctggtcctaaaatctagaagttctctttattatttaaagggaatgtaaatgaatatggcattatttttacatttattttaa

SEQ ID NO: 868409 - DNA, 513 bp, Homo sapiens
gaatatccccaaatccaaaaatatcccgaatttcatatatggaatactcaacctgtactactactcagcaataagaaagaattaacaatttacagctacaacatagatgaatctcaaaataacgtaagaagtcagacaaaaggcygggtgcagcagctcacacctgtaatcccagcactttgggaggccgaggtgggtggatcacctgaggtcaggagttcgagaccagcctggccaacatggtgaaaccccatctctactaaaaatacaaaaattagccaggcgtggtggcaaacgcctgtaatcccagctactcaggaggctgaggcaagagaatagcttgaacctgggaggcagaagttgcagtgagctaagatcgtgccattgcactccagactgggggacaagagcgagactttgtctcaaaaaaaaaaaaaaaaaaaaaagaagaagaagtcagaccaaaaaaagtcaatatatttggcagaactcctttttacacacagacaaaaa

SEQ ID NO: 868410 - DNA, 635 bp, Homo sapiens
catgagccaaagcagggtgaggcattgcctcactggggaagcataaggggtcagggagttccctttcctagtcaaagaaacaggtgacagatggcacctggaaaatcaggtcactcccacccgaatactgcgcttttccgacagccttaaaaacrgcacaccaggagatgatacactgtacatggctcagaggatcctacactcatggaatctcgctgactgctagcacagcagtctgagatcaaactgcaaggcggcagtgaggctgggggagtggcacccaccattgcccaggcttgcttaggtaaacaaagcagcggggaagctcaaactgggtggagcccaccacagctcaagggggcctgcctgcctctgtaggctccacctttgggggcagggcacagacaaacaaaaagacagcagtaacctctgcagacttaaatgtccctgtgtgacagctttgaagagagcagtggttctcccagcacgcagctggagatctgagaatgggcagattgcctcctcaagtgggtccctgacccctgacccctgagcagcctaactgggaggcaccccccagtaggggcagactgacacctcacatggctgtgtactcctctgagacaaaacttcca

SEQ ID NO: 868411 - DNA, 635 bp, Homo sapiens
catgagccaaagcagggtgaggcattgcctcactggggaagcataaggggtcagggagttccctttcctagtcaaagaaacaggtgacagatggcacctggaaaatcaggtcactcccacccgaatactgcgcttttccgacagccttaaaaacggcacaccaggagatgatacactgyacatggctcagaggatcctacactcatggaatctcgctgactgctagcacagcagtctgagatcaaactgcaaggcggcagtgaggctgggggagtggcacccaccattgcccaggcttgcttaggtaaacaaagcagcggggaagctcaaactgggtggagcccaccacagctcaagggggcctgcctgcctctgtaggctccacctttgggggcagggcacagacaaacaaaaagacagcagtaacctctgcagacttaaatgtccctgtgtgacagctttgaagagagcagtggttctcccagcacgcagctggagatctgagaatgggcagattgcctcctcaagtgggtccctgacccctgacccctgagcagcctaactgggaggcaccccccagtaggggcagactgacacctcacatggctgtgtactcctctgagacaaaacttcca

SEQ ID NO: 868412 - DNA, 629 bp, Homo sapiens
atagaacattcccagaaaacattttttaaaactaaataatatgttcttatatcaggtgactaaatgttgttaatatgtcaattttctcaaatttattcatagttcaagtccctgcagattatgttttagtaatttctcagtcaattataaaatttatgctgaagttctaaagacctaaaacaatctttaggaaaggagacattgtagggtttacattacctgtttgcaaaatttttgataaagcaaatagtgatagcatttctgatataagaattttaagaatttttgcacctgtggtatagagactgaattctcagcagccaaagaggacttcagcattatgtgaaagaggaatccaggccagacaaaaccagaatctttttcttgataacactgtaaaatggagatttasagacctactgaatagattttacacacacacacacacacatattgatgtatagaatatacaccactacccataacttttaatccacttgaatacttcccaaaagatcacacatgacctaaattatggttaaattgaaacaaacttctaattttaagtggaaaattaactgtgatatagtcagtttcctagcactggctgaatctaagaatgaactgtc

SEQ ID NO: 868413 - DNA, 573 bp, Homo sapiens
agtaacaaataatgagtaataaaaaaggctctcaacaaataaaagtttaggactgaatggcttcactgttgaaatcttcaaaacattcaaatctgctaacactgttgccagtgtacaccaccctgggaccccagaactaacaccaattctccttaaagtattttaaaaagttgaagagtaaaaaattttctgtaattcattctgcaaggccattttactctgacaccaaaatcagagaaggatgcaacaacaacaaagaaaaaattaccaggaaatattcctgaagaacatagatgcaaaaatcctcaataaaatatgatcatgtcatctgcaaacagagacaatttgacttcctctctttctatttgaatacgctttatttctttctctttcctgattgctctggccagaamttccaatactatgttgaataggagtggtgagagagggcatccttgtcttgtgttggttttcaaagggaatgattctagcttttgaccattcagtaagacattggctgtgagtttgtcaaaaatagctcttcttattttaagatatgttccatcagtacca

SEQ ID NO: 868414 - DNA, 610 bp, Homo sapiens
tactcatctaattacgacacggtagcagtcagtgagaaaaaaactgtaccacgattttcatactacttgaaaattgatgtcattagacattaaattttcttaccacaaacaaatgataagtatatgaggtgactgatatattactttcatttaattattttgccatgtatcaaaatatcatcaaatgtatcaaaatatcatgctgtacaccataaatacgtacaattgtaattgtatagcataccttagtgaagcttggagagaaaaagtgttgctaaaactgytggacctctttgaggaacaataaaagtaacagcctcctagaagtttccttcttagtctttaactttttcgttttctttatttttgatagatcaaatatcatgggactaaatgatgttaaaaacaggttgattaaactcttcaattatctgatgagaaaaaattctagcaagatcaaatgggatgggaaatgctttctaagcatttcatgaagaagctggagtttgaggttcaatctctacagtgataagctctaatccagtaattatctaaaatcccatgtgctttcctaaatacttattctgaagtgatagacctgaagatcacc

SEQ ID NO: 868415 - DNA, 627 bp, Homo sapiens
agtgctatccttcacaattattgacatatttataaaaatttatgtagtggggaaaaatagctgaagaatgaattactaatgccaaaaattttcagatgttatttgaaacatttataattacattttgcttggtgttcatatcatctagaataacaaaattgctttgaaaaggaataaaacacaataaagaacaaaaatgtaggtttgcacaaaacattaaagaaaatgaaaagataaaagtagaactaacaaagaatggcaaactatttttttctaagtaatagatgaaagagaatcactgagagagaattcaattttttgagaacagaaatggcaacctatctgtactaggtcaggatgttgtaaattgaaagtgtagtctgcactacatcttttatagtttggagagattccttacacaactgggtcttcrgtttcctcctatctaagatgaaaaataaaacctgtgccatgaaactctgatttattttgtcctataggagtgaaaagaggaaacatgtaaaatcagtatataaaatttcaataaagttttacactgttaatttcaacaacagagctgtgggaaaatatggcaaaataatcttatagatcacttgatttgtactc

SEQ ID NO: 868416 - DNA, 564 bp, Homo sapiens
agaaggaaaaggttggggaaaggttgtccttccgaactgggacagcctcttacaacctgggccctctgcaggacacagtggtggagctgcgagcttcaccaggtgctgacttggtcctcgcccagtgctatgacttgtcggctcggtttcagttaggaatgctcccaatgaatgtttcaaagaccctgactacagtggcttaagcaaatggaaaaaaacgcctttcttctataatgtgcactcccaggtgaatgggtggatgttcacaggctcaactacatcrgcacccaagtctttcaagtctctctgttttgttttccccattttatgctttgagccacatgcccttactccaggagaaagagggccagagaaaagggcagctcctaatatccggatattaaaggctttcttagaaccccacagcaggcatctgcttacatctcactggccagactatgccacatgcctgaagagggcagaggaactgcgtgtgacttgagccactcaatgaagtcagcctcagagcacaataaatacctggggagagtcaggaagagaaag

SEQ ID NO: 868417 - DNA, 614 bp, Homo sapiens
caggattatgaagaaaaatcccctggcaacctagcccccaccctaaactcaaagtaatatagagaaatcaaacagtccggggtgaactgagggtaatcatagtaacaataaaccccaaacccagctcaattcctgactacatagactaaatgcctcatactaaaagcctagcaaaacagaaggcatgctcagtttgtgccacaaatactatttacttccatctcttctgtcccacataggatgcctagctttcaaccaaaaattaagagacacatagagaagcaaaaaaataagataaattcctaaaaagagaaaataaagggaaacatatatgacccagaagtagaaatgatcaaagaaataaagtaactactataataggtcaaaagattgcatggaaarggtagacacatgcgtggacggatggggaattttagaagacacatggaaactaccaaaaagaattaaccagaaatgccagaaataaaccttaacattgaagcaaaaatgaaaaatacatggattcaacaggcacatctgtaaaattgacagggtaaagactcagtaaaactgaagatacttcaaaagaaattatccaaactgaaatacaaaga

SEQ ID NO: 868418 - DNA, 609 bp, Homo sapiens
actcacctggtttcacaagccattcaaacatcatctcctatcatggtctcctgaattcaggactctcctgctagattcttcctctgtccattgctggaatatagcagatgtgttcctgctacacagaattttcttttgccaggtattcacatgactatttccttttttaccctttgcatctctgctcaaattaccttttcagagaggcatttcatgacaccctttaaaatctcaactataactctttttaactagtgtcccattttgtttcttggtatcacttaccaattctgaactcactttatattctgttctgcttgttcattatctgccttcctctgcytgatgtgagctgtgtgaaaagtggacccagcctgtcttcattgtctgtagtctcagtgcctaaggcagagagctcagaaaatattggctgaatgactggctgactgactgacttggaagcccatcctcttaatgactaaacaaaattgattcctttagaaagattattatattcatttgttagggctgccatcacaaagtaccatcaactgtgtgtcttaaaaaagcagaaatgtattgcttcgtggttctggaggctctgggtgt

SEQ ID NO: 868419 - DNA, 609 bp, Homo sapiens
actcacctggtttcacaagccattcaaacatcatctcctatcatggtctcctgaattcaggactctcctgctagattcttcctctgtccattgctggaatatagcagatgtgttcctgctacacagaattttcttttgccaggtattcacatgactatttccttttttaccctttgcatctctgctcaaattaccttttcagagaggcatttcatgacaccctttaaaatctcaactataactctttttaactagtgtcccattttgtttcttggtatcacttaccaattctgaactcactttatattctgttctgcttgttcattatctgccttcctctgcttgatgtgagctgtgtgaaaagtggacccagcctgtcttcattgtctgtagtctcagtgcctaaggyagagagctcagaaaatattggctgaatgactggctgactgactgacttggaagcccatcctcttaatgactaaacaaaattgattcctttagaaagattattatattcatttgttagggctgccatcacaaagtaccatcaactgtgtgtcttaaaaaagcagaaatgtattgcttcgtggttctggaggctctgggtgt

SEQ ID NO: 868420 - DNA, 629 bp, Homo sapiens
tttttatatgtttattggccatttttatattttcttttgagaattgtctattcatgtccttagtccactttttgatgaaattgttttattcttgaaaatttgcttgagctcgttgtagattctggatattattcctttgtcagaggtatagatgtgaagattttctcccactctgtrggctgcctgtttattctgctgattgttccttttgccttgcaaaagctctttagttaattaagtcccacctatttatctttgtttttattgcatttgcttctgggatcttggtcatgaaatccttgcctaagtcaatgtgtagaagggttttctaatgttgtcttctagaatttttatagtttcaggtcttagatttaagtccctgatccatcttgaattggtttttgtataaggtgagagatgagaatccagtttcactctcctatatgtggcttgccaactataccagcaccatttgttgaatagggtgtcctttccccactttatgattttgtttgctttgtcaaagatcatttggatgtaagtatttgggtttatttctgggttctctattctgttccattggtctatgtgcctatttttataccagtaccatgctgttttggtgacta

SEQ ID NO: 868421 - DNA, 629 bp, Homo sapiens
tttttatatgtttattggccatttttatattttcttttgagaattgtctattcatgtccttagtccactttttgatgaaattgttttattcttgaaaatttgcttgagctcgttgtagattctggatattattcctttgtcagaggtatagatgtgaagattttctcccactctgtgggctgcctgtttattctgctgattgttccttttgccttgcaaaagctctttagttaattaagtcccacctatttatctttgtttttattgcatttgcttctgggatcttggtcatgaaatccttgcctaagtcaatgtgtagaagggttttctaatgttgtcttctagaatttttatagtttcaggtcttagatttaagtccctgatccatcttgaattggtttttgtataaggtgagagatgagaatccagtttcactctcctatatgtggcttgccaactataccagcaccatttgttgaataggrtgtcctttccccactttatgattttgtttgctttgtcaaagatcatttggatgtaagtatttgggtttatttctgggttctctattctgttccattggtctatgtgcctatttttataccagtaccatgctgttttggtgacta

SEQ ID NO: 868422 - DNA, 678 bp, Homo sapiens
aaatattgattaacactaaatatacaatcatgtcatctgaaaacagggacaatttcacttcctcttttcctaattgaatactctttatttctttctcctgcctgatttcctgggccagaacttccaacactacgttaaataggagggtgagagaaggcatccctgtcttgtgccagttttcaaagggaatgctcccagtttttgcccattcagtatcatattggctgtaggtttgtcgtagatagctcttattattttgcgatacgtcccatcaatacataatttattgagaatttttagcatgaagggctgttgaattttgtcaaaggccttttctgcatctattgagataatcatgtggtttttgtctttggttccgtttatatgctggattacatttattgatttgcgtatgttgaaccagccttgcatcccagggatgaagccaacttgatcatggtggataagctttttgatgtgctgctggatttggtttgcyagtattttattgaggatttttgcattgatgttcatcaaggatattggtctaaaattatcttttttttgttgtgtctctaccaggctttggtatgaggatgatgctggcctcataaaatgaattagggaggattccctctttttctattgattggaatagtgtccaaaggaatggtacca

SEQ ID NO: 868423 - DNA, 597 bp, Homo sapiens
aaactattctacaataaaaagtttatttaaaaacagaagtttttaaataagctgggcatggtggctcacacctgtaatccaagcactttgggaggccaaggtgggtggattacttgaggtcaggagttcgagatcatcctggccaacatggtgaaaccctgtctctactaaaaatagaaaaaaattagctgggcgtggtggtacacasctgtaatcccagctacttaggaggctgaggcaggagaatcgcttgaaccccaggaggcagaggttacagtgagctgagatggtgccattgcactccagcctgggtgacagagtgatacttcatctcaaaaaaaaaaaaaaagaaagaaagaaaaaaaaaaaaaaacagaagttgtacagagttagttatacctcccagaggcaaatgaaaaattcgaatccaggactcccaatattttcacagacaaaaccctacagaagatgatcttaaaacctaaaattatgaaaacacaaggaaattaaccaccttgaaagagagagacagagcgagattatagatacaaaaggcagaaaattaaatactctcaaggacttgacataatagaacta

SEQ ID NO: 868424 - DNA, 597 bp, Homo sapiens
aaactattctacaataaaaagtttatttaaaaacagaagtttttaaataagctgggcatggtggctcacacctgtaatccaagcactttgggaggccaaggtgggtggattacttgaggtcaggagttcgagatcatcctggccaacatggtgaaaccctgtctctactaaaaatagaaaaaaattagctgggcgtggtggtacacagctgtaatcccagctacttaggaggctgaggcaggagaatcgcttgaaccccaggaggcagaggttacagtgagctgagatggtgccattgcactccagcctgggtgacagagtgatacttcatctcaaaaaaaaaaaaaaagaaagaaagaaaaaaaaaaaaaaacagaagttgtacagagttagttatacctcccagaggcaaatgaaaaattcgaatccaggactcccamtattttcacagacaaaaccctacagaagatgatcttaaaacctaaaattatgaaaacacaaggaaattaaccaccttgaaagagagagacagagcgagattatagatacaaaaggcagaaaattaaatactctcaaggacttgacataatagaacta

SEQ ID NO: 868425 - DNA, 655 bp, Homo sapiens
ttgtttaggtggattccatgtgtttgctattatgaatagtgctccagtgaacacatgcctgcatgtgtcattatatcagaataacttttattcctctgggtatatacccagtaatgggattgctgggttgaatggtagttctgttttcagttctttgaggaattgccacactgctttccacaatggctgaactaatttacattcccaccaacagtgtataagcaaacgcttttctctctaatcttgccarcacctgttattttttgactttttgataacagccattcttaccggtgtgaggtgatctcattgtggttttggtttgcattgctctaatgatcagtgattttgagctttttttcttatgattgttggctgcacgtatatcttcttttgaagtgtctgttcatctcctttgcccactttttaatggagttgtttgtttttttacttgaaaatttaagtttctaatagatgctggatattacatctttggcagatgcatagtttgcaaaagttttctcccattttgtaagctgtctgtttagtctgttgatggtttcttttgctgtgcagaagctctttagatcaattagactccatttgttaattttttgcttttgttgctgtagcttttagcatctttgtcatgaaa

SEQ ID NO: 868426 - DNA, 590 bp, Homo sapiens
gtttatgtcatctttcatttctttgagcagagttttgtaatctcattgtagagatttttccctccctggttagctgtatttctaggtattttattctttttgtggtaattgtgaatgggattgtgttccttatttggctctcagccttgttgtttttggtgtatgtattagtccattttcatgttgctgataaagacatacctgagacrgggcaatttacaaaagatagaggtttattggacttacagttccacatggctggggaggcctcacaatcatggtggaaggcaaggaggagcaagtcacatcttatgtgaatggtagcaggcaaagagagcttgtgcagaaaactcccatttctaaaaccatcagatctcgtgagacccattcactatcaggagaacagcacaggaaagacctgccctcatgattcaatcatctcccactgggtccctcccacaacacgtgggaattatgcgagctacaagatgagatttggatggggacacagaaccaagccatatcagagtataggaatgctagtgatttttgtatattaattttgtatcctgaaattttgctgaagttgt

SEQ ID NO: 868427 - DNA, 590 bp, Homo sapiens
gtttatgtcatctttcatttctttgagcagagttttgtaatctcattgtagagatttttccctccctggttagctgtatttctaggtattttattctttttgtggtaattgtgaatgggattgtgttccttatttggctctcagccttgttgtttttggtgtatgtattagtccattttcatgttgctgataaagacatacctgagacagggcaatttacaaaagatagaggtttattggacttacagttccacatggctggggaggcctcacaatcatggtggaaggcaaggaggagcaagtcacatcttatgtgaatggtagcaggcaaagagagcttgtgcagaaaactcccatttctaaaaccatcagatctcgtgagacccattcactatcaggagaacagcacaggaaagaccygccctcatgattcaatcatctcccactgggtccctcccacaacacgtgggaattatgcgagctacaagatgagatttggatggggacacagaaccaagccatatcagagtataggaatgctagtgatttttgtatattaattttgtatcctgaaattttgctgaagttgt

SEQ ID NO: 868428 - DNA, 638 bp, Homo sapiens
aaataacatttgggctgagactatggggttttctagatacagaatcatgtcatctgtaaatagggatagtttgacttcctctctttctatttggatgctctttttttctttatcttgcctgattgctctggccagaacttccaatactatattgaataggaatgatgaaagagggcatccttgtcttgtgctggttttcaaaagaaatgcttccagcatttgcccatttaggatgacgttgaccatgggtttatcataaatgtctcttgttattttgaggtatgttccttcgatgcgtactttattgagagtttttaacataaagggatgttgaattttaccaaaagccttttctgcatctattgagatgatcatgtggattttgtctttagttctgtttatgtgatgaatcacattattkatttgcatatgttgaaccaaccttgcatcccagggataaagcctactcgatgcaatggattagctttttatgttactggattctgtttacaagtattttgttgaggatttttgcatcaatattcatcaaggatattggcctagtgtttccttttttattgtatctctgccaggttttggtatcaggaggatgctagtctcatagaatgagttgggga

SEQ ID NO: 868429 - DNA, 577 bp, Homo sapiens
tgtcttagcacatctcgatgatgaaggtttttcaggctcaaagatctcccccgacttcttagagtgggcgagaggttccttgcatatactctgcaacaagaaaagggaatggaatcaggttggaggatccctgagggaagctatttggagttttagtttaccatcttctggaaaccttttcctcattcctttgctagatcaaatgcaaaataaagttgttaaatggaacaggaaaaggtcctcacgattgttgaaaggtgtgataygtatcttcagatttggacaaaaggaaggccatgtcttcagctgctaattagggtagcgctagagggacagtgagtagacacctttgacatttagagaactagaccagatgcttttagcaagttaaaatcagattttggatttatatttatataggtaaatactctcttttttccttctagtggtgttctctatatttatatagctgcattgtgctttggacacaatcactgtgattaccaatgtttatttaaaattaggaaatatttattttgctgtgaattcatttcccccctattttcagatgtggtaa

SEQ ID NO: 868430 - DNA, 611 bp, Homo sapiens
ttggggggtgattaagttatgagggaggagccctcattaatgggattaatttccttataaaagaggctccaaagagacccctggtcccttctaccatttgaggttagagtaagaagacattggtctatgacaaagtggtccctccccagtcaccaaatctgctgacaccttaatcttgacgggtggcttacaaaaacaataacaatcctattgtttataagccacctagtcaaggtattttgttagagcagcccaaatggactawaacaccaagtatttttccattcatattttactgtcccaacccacttttaaaatacaagttacatctgttctatttgataaatactgccttaggtacactgctttaaaattgtgtgcaaaacacaactttgcctattgaatgctctttgccattaatttctcccataaacagccaagcagtcaggcactatttttttttttttttttttgacatggagtttcactattgttgcccaggctggagtgcaatggtgcaatcttggctcactgcaacctccgcctcccaggttcaagaaattctcctgcctcggcctcccaagtagctgggattacaggcatgtaccact

SEQ ID NO: 868431 - DNA, 653 bp, Homo sapiens
aatttagcactcaatatagatgatgttttccaataattatttgatatttgtatattttctgtggccaagtaaagtacaggcccgttaaagacaaggaacatggttttctagctctctggtatattcctgcccttagcataatgcttgatgcttaaacatacatttactgatatgttaaaccaaatgaggcastataaaaaaatggggacaagtcggagaaaatcctttgaggaagcagttttctacaaactaggagagagggtttttaagaaagactgacggggttagttgcgctgcttcttcactttaccagctatgcagcactataacttagtggaatctcttcgtatcactatgcctcagttttctcacttgtgagacagaaataataatagtacctactcagattgttgtaaggagtaaatgtgagtgtgtgtgtgtgtgaattaacacactgcctgttatataatcagcatttaataaacattaattatgcaatttattattttattttattaggttaattaattgttgattagacaaaggcaataaaataagattgagtattaaaagaagactaaaatggcacactatttataacagcaaagagatggaaccaacctaaattcccatcaatgatagattggataaag

SEQ ID NO: 868432 - DNA, 594 bp, Homo sapiens
tcttgttgtgccacttgggtgcattacaaacacatgtataatcagtaggggattcactgacctcaaatttgcctgtaagttctccataccaaaatttctgatgatatgaaccaatacgaattgttttaaatagctgttacatggagttatttttttctgattagtctacatactcattttggaaaatttagaaaatatggacaaggatagaaaaaaataaaagttacctattattccacaacttagagaaaaaacatcatgtattttcctttatacataaaaacatatttttacataactgagaycatatttttattttcttccataactctactttttagttaattttatattatgagccttctttgtataattaaaatagctccatagccatcattttaatggctccacaatttcgtctaatgcatgaaccataagttacttaatcttttccttattgatggccatttgtttcatttttttttgacaatgtaaataatactgtgatggacatttttgcatgtaacaactacttcatttcttatcattttcttagaacaaatccccaaatgtttaattggtatgtcaaaagtt

SEQ ID NO: 868433 - DNA, 624 bp, Homo sapiens
ggtcgcacaagcagaaatttctctgagtaggaagagtaaaaattaaattcctaaatttgagagtctttttcctgttttatttgtaagaagtacatgtaggaaaaggtgtgtgcatatgtgtgtgttggtgagattggaatgctcctttttagtctacacacatatacatataagtatatttatgagactacaaatagatatataaagtatatataagacataagattttatattattatgcctataygtcttgtaaaatactcattgtggtttactggtataccatagatttcattattccaaggttgaacaaaaagtataataacatctctctcactgtgtcatgaaagcccaaataattagtttattatttgtcctgaaacatcagcaacacatggtattgtagcaataactgcctgtattagctatcattgctgggtaacaaggtaccacaaacatagcagtttaaaacaatggccatttattatctcacagtccatttaaacacagcgagttttcaccaagtccaaatgaacttgtctggattctctacttagggcttcttaaggctgaaattgaagtgttagctaggctggactgttatctggatgctctggggaagac

SEQ ID NO: 868434 - DNA, 624 bp, Homo sapiens
ggtcgcacaagcagaaatttctctgagtaggaagagtaaaaattaaattcctaaatttgagagtctttttcctgttttatttgtaagaagtacatgtaggaaaaggtgtgtgcatatgtgtgtgttggtgagattggaatgctcctttttagtctacacacatatacatataagtatatttatgagactacaaatagatatataaagtatatataagacataagattttatattattatgcctatacgtcttgtaaaatactcattgtggtttactggtataccatagatttcattattccaaggttgaacaaaaagtataataacatctctctcactgtgtcatgaaagcccaaataattagtttattatttgtcctgaaacatcagcamcacatggtattgtagcaataactgcctgtattagctatcattgctgggtaacaaggtaccacaaacatagcagtttaaaacaatggccatttattatctcacagtccatttaaacacagcgagttttcaccaagtccaaatgaacttgtctggattctctacttagggcttcttaaggctgaaattgaagtgttagctaggctggactgttatctggatgctctggggaagac

SEQ ID NO: 868435 - DNA, 612 bp, Homo sapiens
aagttgtatcacattcagtgaataccctattttcctcttcccacaaagaatccacaaatttaccttactaaatgttgtgattctgtgtgactaaattactgctttgtttattctgttaccataaacttaattcagagctcttttttcatttctccccttaaatatatctgatcatattaaaagaggatcaaaactatttgaaataaaaacttaggccacgtacggtggctcaggcctgtaatcccagcactttgggaggccaaggtgggaggatcacttgagcccaagagttcaagactagcctgggcaacaaagtgagaccccctctctacaaaaaatagraaaaaaaagttagctgggcatggtggtgcgcacctataatcccagctactccggaggctgaggtgggaggatggtttgagcctgggaggtggaggctgcagtgagtcgtgatcacaccactgcactcctgcctaggtgacagagtgagaccctgtctcaaaaaaaaagtaaataaataataataatagtgataattgaaatggggacctagcaaacaggggcctccatgtcaccattcttgaaaccatctgtcaatagtctttacactgt

SEQ ID NO: 868436 - DNA, 590 bp, Homo sapiens
  misc_feature 94: n = A,T,C or G
ctccaaatctccaggcggcaactcaggccagatcctttcccaggtaatctcaagaatccccgaagtggcaatgacttcctcaagaatacggctnttaattttctttctttccctcaaattcttcttggaggtctattgcccctaagccctaagctgctgctttaagctgctgctgtcgtattagatggtgaagtagagaggctacctgtggcttctccctgtggttacttgggtcccagcacagtgcttcttaagctcagagtctcaaagcattttcatgagcttttactgaatccttgagatgcagtattcagataccatctaatacctcccatttttctactcttgccttttactccttcctagtccccaaaagcctcttcgtttttcaaaaaataataaaaggcagtcacagaggatagtcgcagaggagggstgttgttcatttgccaccttggaaaaagcattcatgttccatctttgcccagccaagataaccttttaggaatattttgacatgcattttactttctgggaactggcaccaaagattggtcatcattactctaattaatcgcttctatttgtaa

SEQ ID NO: 868437 - DNA, 658 bp, Homo sapiens
ttattaggttatgatttgtatgaaaatattagggtcctttaacatgcaaacatgattttacatattcccactttttgacctgctctaaatatttaataccttgaatataatcacctacttttctgtggtgtggttataacatgtgacagatataatattttataacatattccattccaaattaaaacattcatatttacctgagttacattttaaaaaacaaacaaaaagaacaaatttgtttaaaccagacatctgcactagttgttttaccccctggtaagtatgtgttttgagaaaaggcttaactgaaaccatctgttgatgactcattcactcttgaatcatctaaaatattttttctccaatttataccaatgcataacamaatgtctttcaaaatttctgaactacattctttcattaaaaacagaaagccgagcaaagaaaaaaaaaaaaagaatggattaggtacaagtcagagttctaaacactaattttcacttgtttttaagtgagattcatattaacccacttttgtttaaatattgagactttctgttgatttcactgtgatgaaagcctggctgatgcagtagaccattatacttgaaaaactcctcacatatattttaaaagctcatgccttgcagtgtat

SEQ ID NO: 868438 - DNA, 565 bp, Homo sapiens
ggacacagccaaaccatatcattctgcccctggcccctcccaagtcccatgtcctcacatttgaaacccaatcatgccttcctgacagtccctcaatgtcttaattcattccagcattaactcaaaagtccaagtctaaagtttcatctgagacaagtcctttccacctatgagcctgtaaaataaaaaataagttagttacttcctagatacaatgggagtacaggtattgggtgaatacaccctttccaaatgggagaaattggccaaaatgaagaggttacaggccacatgcaagtctgaaatccagcagggcagtcaaatcttaaagctccaaaatgatctcctttgactccatgtctcacatccaggttattttacccaggtaatgatgttgccaaaggtgggttcccatggccttkggcagctccgctcctgtggctttacagggtatatccccatacctggctgttttcatgggctggcattgagtgtatgaggcttttccaagcacacggtacaaactgtccatgattctgccattctggactctgcaggatcatag

SEQ ID NO: 868439 - DNA, 691 bp, Homo sapiens
taaagctccaaaatgatctcctttgactccatgtctcacatccaggttattttacccaggtaatgatgttgccaaaggtgggttcccatggccttgggcagctccgctcctgtggctttacagggtatatccccatacctggctgttttcatgggctggcattgagtgtatgaggcttttccaagcacacggtacaaactgtccatgattctgccattctggactctgcaggatcatagccctcttctcacagctccactagacagtgtcccagtggggactctgtgttggggtttcaaccccacatttctcttccacgctgccctagcagggacccacccctgcagcaaacttctgcctggacacacaggcatttccatacatcctctgacatctatggaggttcacaaacctcaattcttgacttctgtttacccgcaggctcaacatcatgtggaagctgccagggtttggggcttgcatcctctggagccacagcctgagctgtaccttcgtcccttttagctatgactgaagcatctgggacctgggcamtaagtccccaggctacacacagcagggagcgctgggctcggcccacaaaaccaatttttcctcttaggcctctggcttgtgatatgaggggctgctgtgaaggtctctgacatgccctggagacattttcccgatt

SEQ ID NO: 868440 - DNA, 623 bp, Homo sapiens
tttatttagagatattgctaaaacttgtttcattagaagtacaccattttttctcccaccatctatgtatgaaagaacctgtttctccttagtttgggaaagaatattttctcatcattttgcatgtttgttaatcataaatataaaaaataaatcttgctttatttctaatttgcatgtctcacgagtaagtttgaagactcacaaaaattattttttgaaaacatttgaatttatttttctgtgatttctctcttcaatatctcatattttatgtatctgtgaagtatttgcatgtcttagtccatttatgcttctataacaaaacacctgagactggataatttacataaaacagaaatttattttctcacatttctggaggctgggaagtctaagattaaggtgccaacatatycagtgtctggaaaggactgctctctccttccaaaatgatgagttgcatgctgtgtttgtgagaggggaggaatggtatgtccctccatgacagaagatagagagcaaaaaggggtgaacctcctctgtcaagcccttttataatggcattaattcattcacaacggaagggccctcatgacataaacacttccagaaaggcccca

SEQ ID NO: 868441 - DNA, 623 bp, Homo sapiens
tttatttagagatattgctaaaacttgtttcattagaagtacaccattttttctcccaccatctatgtatgaaagaacctgtttctccttagtttgggaaagaatattttctcatcattttgcatgtttgttaatcataaatataaaaaataaatcttgctttatttctaatttgcatgtctcacgagtaagtttgaagactcacaaaaattattttttgaaaacatttgaatttatttttctgtgatttctctcttcaatatctcatattttatgtatctgtgaagtatttgcatgtcttagtccatttatgcttctataacaaaacacctgagactggataatttacataaaacagaaatttattttctcacatttctggaggctgggaagtctaagattaaggtgccaacatatccagtgtctggaaaggactgctctctccttccaaaatgatgmgttgcatgctgtgtttgtgagaggggaggaatggtatgtccctccatgacagaagatagagagcaaaaaggggtgaacctcctctgtcaagcccttttataatggcattaattcattcacaacggaagggccctcatgacataaacacttccagaaaggcccca

SEQ ID NO: 868442 - DNA, 657 bp, Homo sapiens
cagggaaataggagttgtaccccttgcctgtgtattagggtggcttcctaatacaagaggaaaaaaatcaataaactaagacccaaagattctaataagttacatgtggttagcattccagtaaaagtcatagaagtataataaaaaaaakaattctataaaagtttattatttttaatactttctattactagtatgaattttcaggagactggctagcctttacagaatacacttgtggcatacaaaacctttttattttttattcatttatttattcatttagtaaccatttgtaaacgttaataggtaaaatatacagcatttaaaattgcctctgaagttttacagtggactgattaccaatgcacaaaatatggaacattgcagtcttttctaggacagtcatttctaatccacttttaattaagggatttagcagacaaacaagctagttaacatttctcagaggttgctttcacattactagcacaactggaagtatatttttctgggaaagttcagagaagttttgaaaggcctagaaattgttatagttatctaagccaaaatgtctttgagctgaaaatgtctatctgtgtagtggaatatagcttgaaatcattaaagttggaggtgactggagctagcctagcc

SEQ ID NO: 868443 - DNA, 657 bp, Homo sapiens
cagggaaataggagttgtaccccttgcctgtgtattagggtggcttcctaatacaagaggaaaaaaatcaataaactaagacccaaagattctaataagttacatgtggttagcattccagtaaaagtcatagaagtataataaaaaaaataattctataaaagtttattatttttaatactttctattactagtatgaattttcaggagactggctagcctttacagaatacacttgtggcatacaaaacctttttattttttattcatttatttattcatttagtaaccatttgtaaacgttaataggtaaaatatacagcatttaaaattgcctctgaagttttacagtggactgattaccaatgcacaaaatatggaacattgcagtcttttctaggacagtcatttctaatccacttttaattaagggatttagcagacaaacaagctagttaacatttctcagaggttgctttcacattactagsacaactggaagtatatttttctgggaaagttcagagaagttttgaaaggcctagaaattgttatagttatctaagccaaaatgtctttgagctgaaaatgtctatctgtgtagtggaatatagcttgaaatcattaaagttggaggtgactggagctagcctagcc

SEQ ID NO: 868444 - DNA, 593 bp, Homo sapiens
tgcccacaaaagaaagcaggaaagatctaaaatagacactctagcatcacaattaaaagaactagagaagcaagtgcaaacaaattcaaaagctagcagaacacaagaaataactaagttcagagcagaactgagggagatagagacacaaaaaacccttcaaactatcaatgaatccaggagctggttttgaaaaaaataacaaaatagatagcccactagccagactaataaagaagaaaagaaagaagaatcaaatagacmcaataaaaaatgatacaggggatatcaccactcatcccacagaaatacaaactaccatcagagaatactataaacccctctatgcaaataaactagaaaacctagaagaaatggacaaattcctggacacatacaccctccaaaggctaaaccaggaaggagctgaatccctgaatagaccaataacaagttctgaaattgaggcagtaattaatagcctatgaaccaaaaaagaaaaaaaaaaaaaaaaaaaaaaaaaaaaaaggctcaggaccagatggattcacagccaaagtctaccagaggtacaaagaggagctgataccatt

SEQ ID NO: 868445 - DNA, 687 bp, Homo sapiens
tacgaaatcaatgtgcaaaaatcacaagcattcatatacaccaataacagacaaacagagagccaaatcatgagtgaactcccattcacaattgctacaaagagaataaaatacctaggaatacaaaccactggtcaagggaataagagaggacacaaacaaatggaaaaacattccatgctcatggatargaagaatcaatatcatgaaagtggccatactacctaaagtaatttatagattcaatactatccccatcaagctaccattgagtttcttcacagaattagaaaaatctactttaaatttcacacggaaccaaaaaagactccgtatagcaaagacaatcctaagcaaaaagaagaaagctggaggcatcatgctatctgacttcaaactattctacaaggctacagtaaccaaaatgcatggtactggtaccaaaacagatatatagaccaatggaacagaacagaggcctcagacgtaatgtcacacatctgcaaccatctgatctttgacaaacttgacaaaatcaagcaatgaggaaaggatttcgtgtttaataaatagtgttgggaaaactggctagccatatgcaaaacactgaaactggaccccttccttacactttatacaaaaattaactcaagatagattaaagacttaaacataaaatctcggatt

SEQ ID NO: 868446 - DNA, 687 bp, Homo sapiens
tacgaaatcaatgtgcaaaaatcacaagcattcatatacaccaataacagacaaacagagagccaaatcatgagtgaactcccattcacaattgctacaaagagaataaaatacctaggaatacaaaccactggtcaagggaataagagaggacacaaacaaatggaaaaacattccatgctcatggataggaagaatcaatatcatgaaagtggccatactacctaaagtaatttatagattcaatactatccccatcaagctaccattgagtttcttcacagaattagaaaaatctactttaaatttcacacggaaccaaaaaagactccgtatagcaaagacaatcctaagmaaaaagaagaaagctggaggcatcatgctatctgacttcaaactattctacaaggctacagtaaccaaaatgcatggtactggtaccaaaacagatatatagaccaatggaacagaacagaggcctcagacgtaatgtcacacatctgcaaccatctgatctttgacaaacttgacaaaatcaagcaatgaggaaaggatttcgtgtttaataaatagtgttgggaaaactggctagccatatgcaaaacactgaaactggaccccttccttacactttatacaaaaattaactcaagatagattaaagacttaaacataaaatctcggatt

SEQ ID NO: 868447 - DNA, 609 bp, Homo sapiens
aatgtggagaaataggaatgcttttacactgttggtgggagtgtcaattagttcaattattctggaaggcagtgtggccattcctcaaggatctagaactagaaatacattttgacccagcaatcccattactggtataaacccaaacaattataaatcattctactataaagacacatgcacacgtatgtttattgcagcactattcacaatagcaaagacttggaaccaattcaaatgcccatcagtgatatactggataaagaaaatgtggcacatatacaccatgggatactattcatccatataaaagatgagttcatttcctttgcagggacatggatggagctggaaaycatcattctcagcaaatgatttcaagaacagaaaaccaaacaccacaggttttcactcataagcggaagttgaacaaggagaacaaatggactcagggagggaaatatcacacaatggggcctgctgcggggtggggggataggggagggatagcattaggataaatatctaatgtagctgactggttgatgggtgcagcaaaccaccatagcacatgtatacctgtgtaaaaaaaactgcacattctgcaga

SEQ ID NO: 868448 - DNA, 609 bp, Homo sapiens
aatgtggagaaataggaatgcttttacactgttggtgggagtgtcaattagttcaattattctggaaggcagtgtggccattcctcaaggatctagaactagaaatacattttgacccagcaatcccattactggtataaacccaaacaattataaatcattctactataaagacacatgcacacgtatgtttattgcagcactattcacaatagcaaagacttggaaccaattcaaatgcccatcagtgatatactggataaagaaaatgtggcacatatacaccatgggatactattcatccatataaaagatgagttcatttcctttgcagggacatggatggagctggaaaccatcattctcagcaaatgatttcaagaacagaaaaccaaacaccacaggttttcactcataagcggaagttgaacaaggagaacaaatggactcagggagggaaatatcacacaayggggcctgctgcggggtggggggataggggagggatagcattaggataaatatctaatgtagctgactggttgatgggtgcagcaaaccaccatagcacatgtatacctgtgtaaaaaaaactgcacattctgcaga

SEQ ID NO: 868449 - DNA, 657 bp, Homo sapiens
agaaaataaaatactaagaaatagaaaaggattgacaaaagtaaatatttgaaggtactgcgactgattcccaagagagtattcagtaagcatgaaagattgagagctgtaattagacatgaactgtgggagaaaaatggcaagttactggaaacagatacatctacacagggatggaaagatcaaatatttgagaaacttcatcgatcttagattaccagccagataacaattgtcaggtgttttttgaaagcatgaactctgaggtcagaatgccatatcagttccactatttcttgtccatggccttgggaaattattatatatctctcttttcatcaatttcctcatctgttgagtagaacaataatagtattataataatagtttttaactcataggactattgagaaggatccattaaataatgtttgtaaaatatgtatacatgcttataatmgttggatgctaagtttcatccatttacacttagctcttgttcctgaacacaattatatgcaagactctttgctctgttcccagagaatgactagctttggagaacagtcaactgatgacttgatgggaattactagttaacccctttcattttcccctcaagtcagctgctatgatgtctcttagaggtccccaatg

SEQ ID NO: 868450 - DNA, 603 bp, Homo sapiens
aaatttatctactcaaatgattgtttttcttcaacatcataatgttgcaggcctattgatgtatatttttgtgtactaaatagttgggggagctcttcttgaagattatcttcagagctgattaaccagacacaccctccagacatcatagtcacagctgctttgagacagcaacaacctcatccccgcaaatagtatggattcctgtcttattcaataggtctgaattttaaatactcttatcttatttcaagaacggggtctatcctccacaaataaaaatgtgctgccgctcagaatatttaggagaatatgtgatagccaagataccccccccttatttcaaaaattcatctatctccacaaaggaaaatgtttcaccattcagaatattcaagagaattttcttagaaaagaaatccaagattgtattcaytggaataacagacctttcttcaaggtgacttctttcaaaagaacaatatttaggggtatatagaacatcatttttaaaataatttattttgctatatttaccacatttcatgacaccctaaaagattttggctaatgaaatttatacagttcaaatgtgtattcctg

SEQ ID NO: 868451 - DNA, 577 bp, Homo sapiens
tcctttttgttgacgttgatgctattcctttccatttgttagttttccttctaacaggtccctcagctgcagttctgttggagtttgctagaggtccactccagaccctgtttgcctgagtatcaccagaggaggctgcagaacagcaaatattgctgcctaatccttcctctggaagcttggtcccagaggagcacctggctgtatgaggagtcagtcagtccctactgggaggtgtctcctagttaggctacactggggtcagggatccactggaggaggcagtctctctgttctcagagctcaaacgccatgytgggagaaccactactctctttagagctgtcagacagggaagtttaagtctgcagaagtttctgctgccttttgttctgctatgccctgcccccagaggtggagtcaacagaggcagcaggccttgctgagctgtggtgggctccacccacttcgagcttccctggctgctttgtttacctactcaagcctcagcaatggtggacgcccctccccctgccaggctgctgtcccgcaggtcaatctcggactgctgtgctag

SEQ ID NO: 868452 - DNA, 621 bp, Homo sapiens
tcatccctcttccttgggtcccctttgccccttcttccctgcaacatcgatgcattatctggagctgctacaacagtcctgactccctggggcacagcaaatacacaggctaagagtcgaaggcaggaagagaatgctggggaccttgacggcatcgccaccaagctctggacagcctgtcctggaagataaatacatgtttttattgaattttctgttgcttgcagtgaaagcatccttactgatacacatagtaatattctttatttcttctctccctgctccctcccctttctttcatacacacagcttcttactcaattgctatcacctgtttccctctcccttccttcctcccttctcttggcattctccttgcaagtgctttttgagcactcactctggacccgctctgtmctgcctcacagagagaaagcaggagccaaccacgcactggaccatagagagcaccctcccgtccatcttccttgtgcaccttactcaggcagtgcccagccttgtcagcctccagccacagtcagctttgccttcttcagggtttcctgcacacctccagcacaattagaatctcaggttttctccagtgaagtattgcaatgg

SEQ ID NO: 868453 - DNA, 507 bp, Homo sapiens
cctctccatgtagctctctttagtctcctgctcatcagcacttttagctccatcaggaacacacctgtgtcttaattccctggcacatcaccctgagccacccattccacattgaacacacatttatggagtccctcttgtgttcccagcacagttccaggccctggggggcagcagtgcacacaacacaaagccctgcccctctggagctgtcagccatctgggaatcaraactaacactcttaggacacttatcatgggtggttccaggtagtttttgtgcatttgctcacttaatcctttcccataaaactttgaggcaagagctagtatgttagctaaggaaaccaaggcacagtgaggttaggtacatttccccagattgcacatgcaggacgcagtggaactggggcttgaacccagggaatctgatgacagagcccacaccccaacatcacatactactgccatgggtctttacatgcctaacttctgctaattgggtgc

SEQ ID NO: 868454 - DNA, 540 bp, Homo sapiens
gatattggtctaaaattcttttttttttggttgtgtctctgcccaggctttgatgtcatgatgatgctggcctcataaaatgagttagggaggattccctctttttctattgattggaatagtttcagaaggaatggcaccatctcctctttgtacccctggtagaattcagctgtgaatccatctggtactggactttttttggctggtaggttattaattactgtctcaatttcagagcctgttattgttgtattcagagattcaacttcttcctggtttagtcttgggayggtgtatgtgtcaaggaatttaccaatttcttctagattttctagtttatttgcatagagctgtttgtagtagtctctgatggtagtttgtatttctgtgggattggtggtgatatctcctttatcattttttattgtgtctatttgattcttctctcttttcttctttattagtcttgctagcagtctatcaattttgttggtcttttcaaaaaaccagttcctagattcactgattttttgaagg

SEQ ID NO: 868455 - DNA, 685 bp, Homo sapiens
agggcctattttaagggcacccacaactgggcagctctgtggttgagcctttacatattcctgttcatcaggatggtggcttgggatcttttgaaagcagtcgcaccctcagaactgatgacctggcagactgtgagttgtctctgtctacaccatggcacttccagtcaaagtcactcatctgacaaccaccaacttaacagcaggacactccaggctgacccttcccttgtcaccaggtccatacagcagctgtaatgagacagtctatactactgtcttgttctcccactagccatttctccctcrgcatttggacagaatttgctgcaacaaacaccactgagaagagtgttgaaaagttcacatcagtcataagccaagtgttgtcaggtagtgtgagacacaaatgctcactgccagccactgtgccaagacattcagaggtttgacatgagaaaccaaaaaactgctctgtgtatttctggaatatatgttaaaagttttaatacaaagttgtggatttcatataaaacttagtttcttatacggactttgagagagcaggagaaaagattagggaaaccaccagtagataatcgctaaaatgccagggtttctggaaaatggccaccatctcaggctacaacggtgaagtgaatggttctcaagagctcactggaaa

SEQ ID NO: 868456 - DNA, 564 bp, Homo sapiens
atatgttgtgtatgcttgctgtatataattagggtagccatatgatttgtcatcagaatgggtacactttgagagtaaaaaatgtgctatgataattacaccttatatccagcattgtcctggcaaacctggccatatggtcatactggtctaatactaaagggctcctttgttttcctttgcccctttggacacatatctccctcaggaatattgtgaagagtggctggaaccaggaaataaagacagtacatttccactaatatgcatgagacaaagcctaagccacgttgtgaatcatcaaagtttgtcaaagccactttacaatcgtagcctgccagagttgttaacttctggtttttatgctacagctgcaggtacaggagctaacctgtgagctttcttgttattttttatttcctacttrtgggaaactcaatgccactgtgtgattcatgggtcagagttcctagtagatgcgaatgattagtgggtgtgatataatcaaagaggaatacaataaggccacagtaactaagctggaagtttgactttgacatttaa

SEQ ID NO: 868457 - DNA, 627 bp, Homo sapiens
cctgctgtcagcatataatcaagaatgggcagaaaattttctggtgtcattttatccagaggcgttatctcatatcatacctgatatctaagagaacactacctgataattcctaacatctctgaaaaaataaatgttgtgtaatgtgtaaatattaatggatctargtttttgttgttgttgttgttgttttgtgttttttttttcatcaaagcgtcagaaggtgctgtagccataaacctggacttcttaaaatagtctggaaagaaattgcaggaagtgtagaagacaggagatgcttccattgtagtttatttgcagatctgtgctaatatcagatctttatataattattaatattcctcaaaagtgcttgctacttcttgttcaactttctcttacctgcctagacctaccacatctgatatagtcatcagcttatctgactagcagtcctgcatatccatcacttatctgtctaatcatgtgcccaaagtggcatgaaactctggaggtcacatgttcaaagcccaatattgtgatacttaccctgaccaaataatttctctaaatgttatgtcatatataggaaagccttcatgaagtataagcaaaataaactagtta

SEQ ID NO: 868458 - DNA, 632 bp, Homo sapiens
acaattgcaagtatttgtatatctaaacctgttacaacatagaaaaggtacagtagaaatatgatataaaagataaaaaatggtacatctgtgtatagtccattctcatgttgctataagaaatacccaagactgggtaatttataaagaaaagaggtttaattaactcacagttctgcatggctggggaggcctcaggaaacttacaattatggcagaaggtacctcttcacaggrtggcaggcgagaaaatgaatgccagcaggggaaatgtcagatgcttataaaaccatcagatgtcataagaactcactatcacaagaacagcatgggggaagctgcccccatgattcaattaacttccaccagttccctcccatgacatgtggggattatgggattacatttcaagatgagatttgggtggggacacaaagccaaaccatattattccacccttggtccctcccaaatctcatgtcctcacatttcaaaatataatcattcccttccaacagtctcccaaagtcttaactcattccagcattaacccaaaagtccaagtccaaagtcttatctgagacaaggcaagtcccttctgcctatgagcctgtaaaatcaaaagcaagtta

SEQ ID NO: 868459 - DNA, 512 bp, Homo sapiens
tttaataccataactaggctttgtgtccatgtctttgtgctctgactcctgtaatatttcctctatcttataatagatctcctcatcacctgcatctaaataaccacttatatttgaacaatttcttacagttacaaacacttttacatttttttttttttttgagatggagtctcgctctgtcacccaggctgtagtgcagtggcctgatctctgctccctacaacctcggcctccgggatcaaaattctcctgcctcagtctccygtatacctgggattacaggcacgcaccaccacacctggctaatttttgtatttttagtagagactgggtttcaccatgttggtcaggctggtctcgaactcctgacctcacgatcgcccgccttggtctcccaaagtgctgggattacaggcgtgagccaccgtgcccggcctacatattttatctcataatcagaacagtgtttatgagatatctattacctattttaaagattagaaaacaaa

SEQ ID NO: 868460 - DNA, 512 bp, Homo sapiens
tttaataccataactaggctttgtgtccatgtctttgtgctctgactcctgtaatatttcctctatcttataatagatctcctcatcacctgcatctaaataaccacttatatttgaacaatttcttacagttacaaacacttttacatttttttttttttttgagatggagtctcgctctgtcacccaggctgtagtgcagtggcctgatctctgctccctacaacctcggcctccgggatcaaaattctcctgcctcagtctcccgtatacctgggattacaggcacgcaccaccacrcctggctaatttttgtatttttagtagagactgggtttcaccatgttggtcaggctggtctcgaactcctgacctcacgatcgcccgccttggtctcccaaagtgctgggattacaggcgtgagccaccgtgcccggcctacatattttatctcataatcagaacagtgtttatgagatatctattacctattttaaagattagaaaacaaa

SEQ ID NO: 868461 - DNA, 639 bp, Homo sapiens
accagagagtgggaagggtagttgggggttgaggggaagagcggagggttaatgggtacaaaaagtagttagaaagaatgaataagatctagaatttgccagcacaacagggtgactgtagtaaaaaataatttaattgtacattttaaagtactaaaggtatataattggattgtatgtaacgcaaagggtaaatgcttgaggtgatgagtatcccatttaacctgatgaaattataatgcattgcatgtctgtatcaaaatatctcatgaaacccataaatayatatatactatgtacccacaaaaattaaaaattaaaattaaaaattaaaagaatcaatcatgccagctaacagagtaaaccctttattttttcctgtaatgaaaatttcaaaaaggtcaggaggcattcccgacttcgattttaccagcacctttatatcttctggtggaagctctctttatttatataaaaagacctcccaagcagcagagcctaaagtcactgggacccttctgttgattcccacacatattactcaggtgtttcatgatatctataagaaaagtctggagaatctttgtgcatagttttcacaaagacttgcttctataactggcacaaggatcaagctag

SEQ ID NO: 868462 - DNA, 639 bp, Homo sapiens
accagagagtgggaagggtagttgggggttgaggggaagagcggagggttaatgggtacaaaaagtagttagaaagaatgaataagatctagaatttgccagcacaacagggtgactgtagtaaaaaataatttaattgtacattttaaagtactaaaggtatataattggattgtatgtaacgcaaagggtaaatgcttgaggtgatgagtatcccatttaacctgatgaaattataatgcattgcatgtctgtatcaaaatatctcatgaaacccataaatacatatatactatgtacccacaaaaattaaaaattaaaattaaaaattaaaagaatcaatcatgccagctaacagagtaamccctttattttttcctgtaatgaaaatttcaaaaaggtcaggaggcattcccgacttcgattttaccagcacctttatatcttctggtggaagctctctttatttatataaaaagacctcccaagcagcagagcctaaagtcactgggacccttctgttgattcccacacatattactcaggtgtttcatgatatctataagaaaagtctggagaatctttgtgcatagttttcacaaagacttgcttctataactggcacaaggatcaagctag

SEQ ID NO: 868463 - DNA, 639 bp, Homo sapiens
accagagagtgggaagggtagttgggggttgaggggaagagcggagggttaatgggtacaaaaagtagttagaaagaatgaataagatctagaatttgccagcacaacagggtgactgtagtaaaaaataatttaattgtacattttaaagtactaaaggtatataattggattgtatgtaacgcaaagggtaaatgcttgaggtgatgagtatcccatttaacctgatgaaattataatgcattgcatgtctgtatcaaaatatctcatgaaacccataaatacatatatactatgtacccacaaaaattaaaaattaaaattaaaaattaaaagaatcaatcatgccagctaacagagtaaaccctttattttttcctgtaatgaaaatttcaaaaaggtcaggaggcattcccgacttcgattttaccagcacctttatatcttctggtggaagctctctttatttatrtaaaaagacctcccaagcagcagagcctaaagtcactgggacccttctgttgattcccacacatattactcaggtgtttcatgatatctataagaaaagtctggagaatctttgtgcatagttttcacaaagacttgcttctataactggcacaaggatcaagctag

SEQ ID NO: 868464 - DNA, 538 bp, Homo sapiens
aataacagattaccataaactgggtgacttgaaagacaaacatttatttctcatagttctggaggctcagaattctaagattaaggagctagtagacgtgatgtctgatgaggacttttttgttgttgttgttgttgttgttgttgagacagagtctcactctgtcaccaggcwggagtgcagtggcatgatctcagctcactgcaaccttgactccctgtttcaagtgattatcctgcctcagcctcctgagtaggtgggattgcaggcacgtgccaccacacccagctaatttttgtatttttagtagagacggggtttcaccatgttgaccaggctggtctcgatctcctgacctcgtgatctgcctgcctcagcctcccaaagtgctgggattacaggtgttagccactgtgccagccgatgaggaccttctttctagtgtgcaaatgactgtcttctccttgtatccttacatggcagagacgagataaaggaagtaaactctatcaagtttcttcttataaggagactaatc

SEQ ID NO: 868465 - DNA, 683 bp, Homo sapiens
tgtttaaaagcttgggctgcagagtcaagcagggttcaagaccttccatcacttgctgtgtgacctggagcaaattgcttaatcagtatgcatttttttctctgttgtaaaatgaaggtgataatagctggacctatctaataagctgttatggagatgaaaagagataatggatgtacagctgctggaaatcagtaaaatctcaggaaatgtttcctattatttttactgagtactatctactctagcagataataggttcctgaagaacatggaacatgactcagagaagttacagtgaataaactcattacagacatctcagattggcttgccttacatgtagtcatgttcttttttctcatacactagcttaaactcctctagaacaggacctacaacttattcattgtaatattcctcacacagcataacactgggttttargttacatagatgggttataatctcattttattaatgagttgaagccactgaggaagtcttgccctttctcgtttagcgatgctcaaagcaaaccaaagataacttctataaactccccctatgaattctcttacttctagggtgaccaaccattctagttcatgaagggctgtcctggttttggcactgaaagttccgtgattccagaaacccctcagtcctagacaaaccagacc

SEQ ID NO: 868466 - DNA, 623 bp, Homo sapiens
  misc_feature 570: n = A,T,C or G
aaaccatgttccttctttaattcttagtcttttctatccaaatccatctgactctattaatgctagaagtctttttgattgatgtatgtgcaatatgagaaatatttatggagtacctactacattcatacttgaactgcaagctgggaataaaatgtaaggcagtctcctattctagtgacactatttctagccaagtacacattctagtgggttggataaactatcatctttatttcttaagccctcctgattggaccataagctccttttccacaccacaatgcctccaaataaactaaggatacaatgggtgaaatttcatcctgttaataagttcccaatccaaaacttttatcaagaacacatttatatatatatatatatatatttttttttttttctgagacagagtctcrctctgtcacccagactggagtgcagaggcatgatcttggctcactgcaacctccacctcctgggttcaagcgattctcttgcctcagcctcctgagtagctgggactacagacatgcaccaccacgccgggctaattttatattttttgtngagacagggtttcgctttgttggccaggcgtggccgtcgactcctgccccaag

SEQ ID NO: 868467 - DNA, 626 bp, Homo sapiens
tgtacaaggtgagtctttggagactctgaaaaacccattaacggaaaagttattaatgtcttttttaatgcagctatagtgcagaggcagaccccaaagaaaccaatccacattatgaaacattttacagaaatccacttttaaaaataggaaaacgctattcatgaatcttgaggtgggaactgagtacatgcctggcctcctgggccagttgtggattttctaaagaataaaaggaaattctactttcacctctactttgagacagagaaatagaacaaaattgcccactgtaaaatttgattatcatttttatttctctttctcagatttaattttctttctttctcttttgtactttccctaatcaactstaatatcttcaggcctctgttaacttgaattcagctttaaacatatcaggttattaaaacttcatcaggtatggctatgatgcccagtcaggtgagtttctctacaaacggtggtggaactctggtcccatgaataagatgcctctgtcctattgtcagaagggaataaacttggatatttttttctcctttagaggttgacagatttgcattcatttccattagactaagagctcttggtaaacataaact

SEQ ID NO: 868468 - DNA, 612 bp, Homo sapiens
ctcatctctatctgagaccacctcagcctggaccttttcattcatatcattatcagcattttggtaaaggcaatcaacaagtctctccggagttccaaactttcccacattttcctgtcttcttctgagccctccaaaytgttccaacctctgcttgttacccagttccaaagttgcttctacattttcaggtatcttttcagcagcacccgattccactggtgccaatttactgaattagtccaatttcatgctgctggtaatgacatactcgagactgggaagaaaaagaggtttaattggacttacagttcgacatggctggggaggcctcagaatcatggcaggaggcaaaaggcacttcttacatgatggtggcaagagaaaatgaagggatgcaaagtggaaaccattgataaagccatcagatcttgtgagacttattcactgccatgagaacagtatgggggatacctcccccatgattcaaattatctcccaccgggtctctcccacagcatgtgggaattatgagagcacaattgaagatgagatttgggtggggacacagaatcaaaccatattacctggcatctgaatcactggacataa

SEQ ID NO: 868469 - DNA, 571 bp, Homo sapiens
caaggccactaaagaaataatgacggaccgagcctttcgttgggagttcagaagcctgaaaccaggcaggcaccttcaggttccaacccacagtgctacttcttgcacacccgccgggcccacctgcacgtctacgccacagcgccccctgcccgaaggctgtgggcccaaaccccgcaggggagcggcgcgtctggggtctggacctggagatgggggcgctaggattcaaactccgcacgtcaatcaattggcaaaatggagctgactctccggctccagtaactactcaggaagcaactcgaaaactagtgaatgtcggtcccaaaccctgggggstgggagatgaagagaagcagcgacccccgcccaaacggtgcgccccggccctcaggctgggctcccacccacgcggccgggcaggcgtctcgccaccctgctccgggaacacgcgtgggccgccctgagagggcgtagggtgcggtggggttgggcccaggctggggtgggtggcgtgacccggggttgtcacctgtcggagggcttggtccagctgcgacgccgaggacag

SEQ ID NO: 868470 - DNA, 608 bp, Homo sapiens
ccagttttcaaagggattgcttccagattttgtccattcagtacgatattggctgtgggtttttcttaaatagcttttattattttgagatacattccatcaatacctagttgattgttttcattatgaaggggtgttgagttttgttgaaggccttttctgcatctattgtggtaatcatgtggttgttgtcattggttctgtttatgtgatggattacgtttattgatttgagtatgttgaaccagccctgcatcccagggatgaagccgacttgatcatggtggataagcttttaaaagtgctgctggattcagtttgccagtattctattgaggattttcgcattgatgttcatcacggatattggcctgaaatttttttkttgttgttgtggctctgccaggtttggtatcaggatgatgctggcctcataaaatgaattagggaggagtccctctttttctattgtttggaatagttttagaaggaatggtaccagctcctctttgtacctctggtagaattcggctaccagaatctgtctggtcctgggctttttttttggttggtagaatattaatcactacctcaatttcagaacttgt

SEQ ID NO: 868471 - DNA, 608 bp, Homo sapiens
ccagttttcaaagggattgcttccagattttgtccattcagtacgatattggctgtgggtttttcttaaatagcttttattattttgagatacattccatcaatacctagttgattgttttcattatgaaggggtgttgagttttgttgaaggccttttctgcatctattgtggtaatcatgtggttgttgtcattggttctgtttatgtgatggattacgtttattgatttgagtatgttgaaccagccctgcatcccagggatgaagccgacttgatcatggtggataagcttttaaaagtgctgctggattcagtttgccagtattctattgaggattttcgcattgatgttcatcacggatattggcctgaaattttttttttgttgttgtggctctgccaggtttggtatcaggatgatgctggcctcataaaatgaattagggaggagtccctctttttctrttgtttggaatagttttagaaggaatggtaccagctcctctttgtacctctggtagaattcggctaccagaatctgtctggtcctgggctttttttttggttggtagaatattaatcactacctcaatttcagaacttgt

SEQ ID NO: 868472 - DNA, 624 bp, Homo sapiens
gatcatggtggataagcttttaaaagtgctgctggattcagtttgccagtattctattgaggattttcgcattgatgttcatcacggatattggcctgaaattttttttttgttgttgtggctctgccaggtttggtatcaggatgatgctggcctcataaaatgaattagggaggagtccctctttttctattgtttggaatrgttttagaaggaatggtaccagctcctctttgtacctctggtagaattcggctaccagaatctgtctggtcctgggctttttttttggttggtagaatattaatcactacctcaatttcagaacttgttattggtctattcagggattcaacttcttcctggtttagtcttgggagggtgtatgtgtccaggaatttatccatttcttctagattttctagtttatttgcgtagaggtgtttatagtattatctggtggtagtttgcatttctgtgggatcagtggtgatatcccctttatcattttttattgtgtctatttgattcttctctcttttcttctttattagtctggctagtggtctacctattttgttaatcttttcagaaaactaactcttggattcattgattttctga

SEQ ID NO: 868473 - DNA, 555 bp, Homo sapiens
ataacccacagatgactcatctccactgtacttcctaactttcctcagatgccatctttaataaccatcaaaacacaatccctttgaatgaacggaggctttggaacctgtgcagtgcatacaaaggaagtatgtttaccagaaatatatcttcccagctgatctatacttatcctctttcatctttatccacatttcatacaaagaaaataggcattgctgttaccacagaaaagcatgaatgctacaattytcaaagattctgtgctttcaaagatagctctaaaagaaccctgacaggatataaagggttaactctctattgggttgggcagaaaagaaggtttatccaagggggtaagctcagccatcctccctcccttccatagacacatccaaccacgactccctcactggattacgctgcccagttcacagccaggggcatttccacagctgttaaacctgcatcaggaaacaaacggccttatttttagctttcagtggtttgtgtaaaaccccataataattaggcctcattactctgtgcagctc

SEQ ID NO: 868474 - DNA, 600 bp, Homo sapiens
taacctgagcattcatcttatgaaactagaaaagcaaaaacaaaatagacccaaactaagtggaaggaaataaaaattgcaagcagcataagtcaaggaaattgaaaacagaaaagcagtagagaaagtcaatgaaacaaaaatctgattcttttaaaagaccagtaaaatttattaactccttgcaagagtgaaagtaaaaaagagagagcaaaagttcctaccaatatcaaaaattaaaatgaatggaatatgagtactatacacacaaatatcatttcctcttctatctttccacaggcctgtgcacctttttcaaggagaaggacaagggtagagatgttagtaccctttatctccataacataggattgtgggtgctgaatggagcttacttacagctgtattcctcatgtcaaaaacttcccaggactttgaattcgactsatttgttttaattaaatcattagccaaagtttacctcttcagctggaacaactcactttggctatttcagttcttctcataatcatggagaaagttatgtaatgatttaaaatattctcaaaggttcttctttcactaaaacgttactaaatc

SEQ ID NO: 868475 - DNA, 508 bp, Homo sapiens
ccagacgtactgtttcctcagaagcatggaacgtgctcacctcaagacctctgctcttaccacttgttggtccagataactgctagggatttgtattatcaggttcaagaaaataaatgcgtggttccactcattatctcagcattattatttcagaagaatagttcacacatattattagattaaattttattcacctaaattgcgtttgagaaaatttctttattatccattttgagtaacgagtgggaatcctaggaggkgctcgagcaacaccaggtggttactgccatgaaaagggatgtgagtccctctggggaggcaggactggaaaaatctgaggagtagtcagtgaatttctatactgtgtaaaataaagggaaagagaaacaaaacaaaaactccaaaaatggtactggcccaaccatgatgggaatgggtattagagaaacgttcagaagtcctaactttatttcacttcttttaatcctctctccacccagctttc

SEQ ID NO: 868476 - DNA, 634 bp, Homo sapiens
tttctttaagttccaattccaagtcggctcagattttatttctatccctcttactgcctaatcccttgattacagccacttacccacaaaggattactttgttttttagttttgtttttttgttttttttttttgagatggagtctcacgctgtcaccaggctgcaatgcagtggcgcgatctcggcacactgcaacctctgcctcctgggttcaaacgattctcctgcctcagtctcccgagtagctgttactacaggcrcgtgccaccatgctgagccaatttttgtatttttagtagagacagagtttcaccatgttggccagtatggtctccatctcctgaccttgtgatccgcccgcctcggcctcccaaagtgctggaattacaggtgtgagccaccgcacccagctgaaggattacttttataatagtaataaactacacaaactaatctgccttccaatttattgtatagtattgcatagttcctccttttctaatcagagcacagttaaattcacagggctgaaaatcttcccatgttcctccttgctgagtgtgatttatgtaaccttgtattttgtgccacaaactctgaactttgggaatgaaacttatggctctcagtcat

SEQ ID NO: 868477 - DNA, 635 bp, Homo sapiens
ggcatctaatacttatggaagtaaccctatttccgtgtatatcgggtacacaatttgggggtcagtaatggtgagtagagtatcttttgatataattgaagataacataaagcagttgtcaataccctgatctttggaatcctattctaaccgtatcttgtaattctgtaaatctgagagtggtatctaaccatttcttactcaattttctcatatttaaagtactacaaataatatagtattatattaaatctaggcagattaaatatttatatatgtcagttagatatattacagcagcacattgccaaagacccaaaccagaatggcttaaacattggaagcactgattatttcacaacaagactagtggcttrtcatttctaggatggcttcattcagtggtgcaaggatttcatcaaggattgctagcagaccacatcagaggggagatggttgacacatccaacttttggtaaatatttcatatacatattcccaaatcaactgtcagtaaggataacggacttgccattattggcttggactaatcaagatttacctctgtagctgggaggagtctaccctacctttagctcatgagaaactgaacaaaatgatggtttagttagcaa

SEQ ID NO: 868478 - DNA, 632 bp, Homo sapiens
ttttttatatttaacattggcagtttccaatctgtgaacaaattgtattctgaaattatcagccaggggagtttgaaaagcatgcggtttgcacagagactgctgtgtttgaatctctatcattttttagagatgttaaattgggaaacttaattattatgattctcaaattttttatttataaagtgaagataataatatctgtatggaagctgttttttgaatacatgcctgaaatgtagtcactcaacaaatgcacttccctttcctccaaaaaatctttattttgatagtattcaaaactaacaacccaatttcctatttaaaacartaaatttcctggtggtgtatatgtatttcaaaacatcatgctatataccttgaatacatacaataaaaaattgcagttcagccaatacatccgtgtcgttcacaattcactggaaagattacactaagaatgttattccaactcctcacacctcatagtcctagtattgcttccacaggataataaaacttcagttacaacttggtacaacaaggacacgtgctgtaaggcccagaagtgagaacgctctctgctctcctgttttcagtgcccgtcagcttggcaatgagctctctgtaag

SEQ ID NO: 868479 - DNA, 699 bp, Homo sapiens
ttgcatacatttatgaaagtccctaaggagattttgcccattaatggacttaaaaaaaagacagcatacctcttttatgaataataattggtggtgtacagtgacatttttcttttagggttttcttttttaaatttttttaaaattttactttaagttctgggrtacatgtgcagaacgtggaggtttgctacataggtatacgtgtgccatggtggtgtgctgcatctattaacccatcctctaagtttcctccccttgccctgacgtgtgttgttcccctccccgtgtccatgtgttcttcttgttcacctcccacttatgagtgagaacatgcagtgtctggttttctgttcctgtgttagtttgctgaggatgatggcttccagcttcatccatgtccccgcaaaggacatgatctcatttctttttatggcttcatagtattccatggtgtaaatgtaccacatttcctttatccattctatcattgatgggcatttgggttgttggttccatgactttgctattgtaaatagtgccgcagtaaacatacatgtgcatgtgtctttatagcagaatgatttatattcctttgggtatatacccagtaatgggattgctgggtcaaatggtatttctggttctagatccttgaggaatcgccatactgtcttccacaatggttgaactgattta

SEQ ID NO: 868480 - DNA, 699 bp, Homo sapiens
ttgcatacatttatgaaagtccctaaggagattttgcccattaatggacttaaaaaaaagacagcatacctcttttatgaataataattggtggtgtacagtgacatttttcttttagggttttcttttttaaatttttttaaaattttactttaagttctggggtacatgtgcagaacgtggaggtttgctacataggtatacgtgtgccatggtggtgtgctgcatctattaacccatcctctaagtttcctccccttgccctgacgtgtgttgttcccctccccgtgtccatgtgttcttmttgttcacctcccacttatgagtgagaacatgcagtgtctggttttctgttcctgtgttagtttgctgaggatgatggcttccagcttcatccatgtccccgcaaaggacatgatctcatttctttttatggcttcatagtattccatggtgtaaatgtaccacatttcctttatccattctatcattgatgggcatttgggttgttggttccatgactttgctattgtaaatagtgccgcagtaaacatacatgtgcatgtgtctttatagcagaatgatttatattcctttgggtatatacccagtaatgggattgctgggtcaaatggtatttctggttctagatccttgaggaatcgccatactgtcttccacaatggttgaactgattta

SEQ ID NO: 868481 - DNA, 699 bp, Homo sapiens
ttgcatacatttatgaaagtccctaaggagattttgcccattaatggacttaaaaaaaagacagcatacctcttttatgaataataattggtggtgtacagtgacatttttcttttagggttttcttttttaaatttttttaaaattttactttaagttctggggtacatgtgcagaacgtggaggtttgctacataggtatacgtgtgccatggtggtgtgctgcatctattaacccatcctctaagtttcctccccttgccctgacgtgtgttgttcccctccccgtgtccatgtgttcttctkgttcacctcccacttatgagtgagaacatgcagtgtctggttttctgttcctgtgttagtttgctgaggatgatggcttccagcttcatccatgtccccgcaaaggacatgatctcatttctttttatggcttcatagtattccatggtgtaaatgtaccacatttcctttatccattctatcattgatgggcatttgggttgttggttccatgactttgctattgtaaatagtgccgcagtaaacatacatgtgcatgtgtctttatagcagaatgatttatattcctttgggtatatacccagtaatgggattgctgggtcaaatggtatttctggttctagatccttgaggaatcgccatactgtcttccacaatggttgaactgattta

SEQ ID NO: 868482 - DNA, 580 bp, Homo sapiens
tttttcttttttaagacagggtctcactctgttgccaaggctggagtgcagtggcacgaccacagctcactgcaacctctgcctcctgggctaaagtgatcctcccacctcagcctcccgagtatctgggactacaggtgcatgccaccatacccggctaatttttgtatttattgtagagttgaggtttcaccatgttgtccaggctggtctcaaactcctgagctcaaatgatcctcccacctcggcctcccaaagtgctgggattaaggcgtgagccaccacgcctggccaaaaaagcctatttctttcacacaagaattctggctccttctttctttccagggctttcargcaaggctcattcctgcaagcagtcttccagcttttctgcatatgtgagtcttagaggaaaatctgctcagctaagctcctaggctaataagcacctcttttcttctaattcttgagagcttttgtctatggctgttgtcaggactgctttacttcctgttttctggaaacatacaccaaactgtggcagctgaatgaccaaagctatcagccagactcactctat

SEQ ID NO: 868483 - DNA, 580 bp, Homo sapiens
tttttcttttttaagacagggtctcactctgttgccaaggctggagtgcagtggcacgaccacagctcactgcaacctctgcctcctgggctaaagtgatcctcccacctcagcctcccgagtatctgggactacaggtgcatgccaccatacccggctaatttttgtatttattgtagagttgaggtttcaccatgttgtccaggctggtctcaaactcctgagctcaaatgatcctcccacctcggcctcccaaagtgctgggattaaggcgtgagccaccacgcctggccaaaaaagcctatttctttcacacaagaattctggctccttctttctttccagggctttcaggcaaggctcattcctgcaagcagtcttccagcttttctgcatatgtgagtcttagaggaaaatctgctcagctaagctcctargctaataagcacctcttttcttctaattcttgagagcttttgtctatggctgttgtcaggactgctttacttcctgttttctggaaacatacaccaaactgtggcagctgaatgaccaaagctatcagccagactcactctat

SEQ ID NO: 868484 - DNA, 600 bp, Homo sapiens
aaggagaatgaggagttactgtttaatgggtacagagtttcagtttaggaagatgaagaaagctctggaaatgaatggtgtagatggctgcacaacaaggtgaatgtacttaatgtcaatgaattgtacatttcagatgattaaatactaaattttatgttatgtagattttgccaaacttaaataaaacttagaatgttcagatatgtttcattctttttttttttttttttttttgagatggagtctcactctgttgcccaggctggagtgcagtggcacaatcttggctcactgcaagctctgcctcccaggttcacgccattctcckgcctcagcctctcgagtagtgttttattcttaataatcaaaaacttgaaacaactaaatattcatcaacacttaaaaggatctgtaaactgtgatatactcatacagtgaaatactatacagcaatgaaaaagaaataactactgctagagacaacaagatgaatgaatctcacagacattatactgactgagaaaagttacacacaaaagaatacagagtccattatcccatttacatgaagttttaaaagcaggcaaaaacgggcta

SEQ ID NO: 868485 - DNA, 681 bp, Homo sapiens
gtcacactgtgtgcctcagacagaggtggagacaatacatctatactgtcctgttcctaccctaactcctgcccggcaacccagccagtggaggggtgttcctgagggagaggacccccacccccatcaccttagccgctctactgggtcatcaccgggggccattgaagggctgatgagccatggcggtgggctctgcaggatgatggaggccctgtgcagttgctctgggcatcttctcttgcttggccscacttcttgacactcctccagttgtacactgatctccccctgggagaggccctctttccccttttctgaggcaggaatgaatccacagcagtggcagaggctgggagcaaccagaaactgccctgtgccaccttcctcctaaatgaggcaccccagagtcctgtgcctgcactttatgaagagttttctcagtttcagggacagggagttggggccactgagcagggtcagggagcctgggcaggaggcccgagggctgcagaagcccctgtctgcctccactggaactgtctgagggaggcaccatgttcaagagcaggccagagcccccagctcccgcccccacctcgatggagagtttaataggaagcacaaatgagaaacagccttctggaatttggctttggttcctttctctcagtttcctca

SEQ ID NO: 868486 - DNA, 655 bp, Homo sapiens
ctctactaaaaatacaaaaattagctgggcatggtggcacatgcctataatcccagctactcaggaggctgaggcagcagaatcatttgaacctgggtggcagaggttgcagtgagccaagatcgtgccactgcactccagcctgggcaacagaacgagagactctgtctcaataaataaataaatagtgctgggaaaactgaatagccacatgtagaagaatgaaactggatccctaattctcaccctatacaaaaatcaactcaagatgtatcaaagacttaagacctgaaaccaaaaaattctagaagataaccttggaaaaactcttccaaacatcagcytaggcaaagaatttattactaagacttcagaagcaaatgcaacaagaacaaaactaaataaatggaacctaattaaactaggtgaagtaactcaggaatgggaaaccaaattccatatcttctcatttataagtgtgagctcagctatgaggacacaaagacatatagagtggtaccaagaactttggagactcagaagtggggagagtaggaaggaaatgagagacaaaaaaaactacatatcagatacaatgtatactatttggcttatgggtacattaaacctcagaattcaccactatacaattcaa

SEQ ID NO: 868487 - DNA, 596 bp, Homo sapiens
aacttcatttcatgttaaaaactctcaaaaactaggaactgaagaagcatacctcaaaataataagagacatttatgacaaacccacagtcaatatcattctgaatgagcaaaagctggaagcattccccttgaaatctggcacaagacaaggatgccctctctcaccactcctgttcaacatagttttcaaagttccagytagggcaatcaggcaagataaagaaataaagcatattcaagtaggaaaagacaaattcaaattatcattttttgcagatgacatgatcctatatctagaaaactccatcatctcagcttaaaagattcttaagctaataagcaacttcagcgaagtgtcaggatacaaaatcaatgtgcaaaaatcagaagcattgctatacacaaacaatagagaagcagagagtcaaatcatgaatcaactcccattcacaattgctacaaagagaataaattagctatgaatacatctaacaaggaaagtgaaggaccacttcaaggagaactacaaaccactgtcaaggaaatcagagagaacacaaagaaatgaaaataatattccatagtcatggatag

SEQ ID NO: 868488 - DNA, 596 bp, Homo sapiens
aacttcatttcatgttaaaaactctcaaaaactaggaactgaagaagcatacctcaaaataataagagacatttatgacaaacccacagtcaatatcattctgaatgagcaaaagctggaagcattccccttgaaatctggcacaagacaaggatgccctctctcaccactcctgttcaacatagttttcaaagttccagctagggcaatcaggcaagataaagaaataaagcrtattcaagtaggaaaagacaaattcaaattatcattttttgcagatgacatgatcctatatctagaaaactccatcatctcagcttaaaagattcttaagctaataagcaacttcagcgaagtgtcaggatacaaaatcaatgtgcaaaaatcagaagcattgctatacacaaacaatagagaagcagagagtcaaatcatgaatcaactcccattcacaattgctacaaagagaataaattagctatgaatacatctaacaaggaaagtgaaggaccacttcaaggagaactacaaaccactgtcaaggaaatcagagagaacacaaagaaatgaaaataatattccatagtcatggatag

SEQ ID NO: 868489 - DNA, 589 bp, Homo sapiens
acttcagcgaagtgtcaggatacaaaatcaatgtgcaaaaatcagaagcattgctatacacaaacaatagagaagcagagagtcaaatcatgaatcaactcccattcacaattgctacaaagagaataaattagctatgaatacatctaacaaggaaagtgaaggaccacttcaaggagaactacaaaccactgtcaaggaaatcagagagaacacaaagaaatgaaaataatattccatagtcatggataggaagaatagatatcatgaaatgacyataccacccgaagtaatttatagattcagtgctattcccattaaattacaattgacattcttcacagaattagaaaaaaaaactattttacaattcatatggaactacaaaggagttcatataatcaagacaatcctaaccaaaaagaacaaagctggaagcatcacactaccttacttcaaaatatactagaagactacagtaaccaaacagcatagtactggtacaaaaacagacacataaaccaatggaacagaatagaaaactcagaaataatactgcttatctgcaaccatctgatcttcaacaaac

SEQ ID NO: 868490 - DNA, 589 bp, Homo sapiens
acttcagcgaagtgtcaggatacaaaatcaatgtgcaaaaatcagaagcattgctatacacaaacaatagagaagcagagagtcaaatcatgaatcaactcccattcacaattgctacaaagagaataaattagctatgaatacatctaacaaggaaagtgaaggaccacttcaaggagaactacaaaccactgtcaaggaaatcagagagaacacaaagaaatgaaaataatattccatagtcatggataggaagaatagatatcatgaaatgaccataccacccraagtaatttatagattcagtgctattcccattaaattacaattgacattcttcacagaattagaaaaaaaaactattttacaattcatatggaactacaaaggagttcatataatcaagacaatcctaaccaaaaagaacaaagctggaagcatcacactaccttacttcaaaatatactagaagactacagtaaccaaacagcatagtactggtacaaaaacagacacataaaccaatggaacagaatagaaaactcagaaataatactgcttatctgcaaccatctgatcttcaacaaac

SEQ ID NO: 868491 - DNA, 604 bp, Homo sapiens
tcaattactagagctaaaccaggaggcatagaagcaagtaggaaattcagaatgctcagatgtttagaggttgacaagctaagagccaacagaggaaatgagagagaaagtggctggcaaagaataagaaagccagaagggcaagtggtgtcacagaaagccagacaagaaagtgcctcttaaaatagggaatggacatcagcctcagtgctgtgaaagggcaataaatgagatsgtatgagaaaaacacctattacacttccagacatgtagcaggtattcagtaaatgttacttcccttaactttctgttttctttctaacagtgtttagtggttaagagtgtaggcataggagctgatctgcctgagttcaaattcttcctctgccattccataactgtgtgaccttaggcaagtcatttaacttctcagtaccttagtttctatattttatttttattttttggggatggagtctccctctgtcacccaggttggagtgcaatggcaccatctcggctcactgcagcttcggctcactgaaccctcaactgggttcaagcaattctcatgccttagcctcctgagtaactgggattacag

SEQ ID NO: 868492 - DNA, 572 bp, Homo sapiens
ttctccacatcctctgcagcatctgttgtttcctaactttttaatgatcaccactctaactggcatgagatggtatctcattgtggttttgatttgcttttttttctactgatgagtgatgatgagatttttttcatatgtttgttagctgcataagtgtcttcttttgagaaatgtctgttcatatcctttgcccactttttgatggggctgtttttttttcttgtaaatttgtgtaagttctttgtagattctggatattagtcctttttcagctggtagattgcaaaaattttctcccattctgtaggttgcctgttcactctgmtgatagtttcctttgctgtgcagaagctctttagtttaattagatcccatctgtctattttgacttttgttgccattgcttttggtgttttagtcatgaagtctttgcccatgcctatgtcctgaatggtattccctagattttcttctaggatttttatggttttaggtcttacatttaaatctttaatccatcttcagttaattttcgtataaggtgtaaggaaggggtccagtttcagttt

SEQ ID NO: 868493 - DNA, 494 bp, Homo sapiens
tggagaggatacttgtagctcccccatcaagagccccagctgggctcccagcctgcaaccaccacttactgctagccacgtgagtgaaacatcttggatgttgttatgaactgaatatttgtgtcctttcaatatcagtattttaaaatcctaatcctcaatatgaaagtatttagagattaggccttttggagggatttaggtcttgataagattagtgccctcagragatataggagaaagcttgcttcttctctctccccaccatgtgaggatacaatgagaagacggctgtctgcaaacctcatcataaactgaaacaattggcaccttgatcttggacttcccagcctccagaactgtgagaaatacatttctattatttaagcacacagtcttcattcaacagcctgaactgagagagacatccagcccagtggagccttcaaatgacttcagccccagtttccatctgactataaccacatgataga

SEQ ID NO: 868494 - DNA, 618 bp, Homo sapiens
ggccttcacttgcagaactacataaccaagagggagaaaggactcatgacatcctggactggttaaataagaacacagtgttcaccaccagaaaagcccatcacacacaacaaacacacccagatcgaagagggaaactagaatactgtcgactcctccccacatccgagaaaaaggtacgaccaatgcctagcagtttctagggaacacagctcaggaaatactgtagttctttaatgtataaatggcctccaaaytcatgcaaggggagttatcccaggaatgaatactacacctatgccctccccttcacgtcttcccaggaaacttcatttatctatcttatctatctacctatctatctatctattatctatcatttatctatcttctatatatcatctatgtaatctatctatatgcgtgtgtgtgtgtgtataagacctcacgaagagattccatcacagacatcacagagtcggaaaaatgacgctttacccaaaacaaactcctacaggctcacggaaaaaaacgaacaaacaaacaaaaaaaaacaaaaaaacacttctaccccgttcacacttatagttggtcacaacagtgctgtcacacgatcac

SEQ ID NO: 868495 - DNA, 618 bp, Homo sapiens
ggccttcacttgcagaactacataaccaagagggagaaaggactcatgacatcctggactggttaaataagaacacagtgttcaccaccagaaaagcccatcacacacaacaaacacacccagatcgaagagggaaactagaatactgtcgactcctccccacatccgagaaaaaggtacgaccaatgcctagcagtttctagggaacacagctcaggaaatactgtagttctttaatgtataaatggcctccaaattcatgcaaggggagttatcccaggaatgaatactacacctatgccctccccttcacgtcttcccaggaaacttcatttatctatcttatctatctayctatctatctatctattatctatcatttatctatcttctatatatcatctatgtaatctatctatatgcgtgtgtgtgtgtgtataagacctcacgaagagattccatcacagacatcacagagtcggaaaaatgacgctttacccaaaacaaactcctacaggctcacggaaaaaaacgaacaaacaaacaaaaaaaaacaaaaaaacacttctaccccgttcacacttatagttggtcacaacagtgctgtcacacgatcac

SEQ ID NO: 868496 - DNA, 581 bp, Homo sapiens
tttctcttctgctcacttatcttttttttttttttttgggtggggcggggggacagagtttcgctcttgttgcccaggctggagtgcaatggcacaatctcagctcactacaacctctgcctcccaggttcaagcaattctcctgcctcagcctcctgagtagctgggattacaggcatgtaccaccatgcccagctaattttgaatttttagtagagacagggtttcaccatgttggccaggctggtctcaaactcctgacctcargtgatccgcccgccttggcctcccagagtgttgggattacagccatgagccactgcgcccggccatccttgtgtttcctataccttctcagtgcagcttatatttataacatgccaaagatatgagtgttttttgcttatgccagtttttcttcattttaacagagtagcaagatttgtatttatgtttatacattttccctaccaagaggtaatttattctggcctttttgtagatcacggtagtgagatagtcccaccatagtttgtctgtatgtatacccaatccatagcatttatgtgaagactcacagt

SEQ ID NO: 868497 - DNA, 596 bp, Homo sapiens
tgaggctgatatgtggggatagtctagtctggagtttacagggaaggtaaagtatttaaattatatttgacatttcaggatatgtttacgtctcaatggtcaaccagaagaaagatgcagtgttcaagttcttttcaagaacagtattcccttttttaattttcaagttttctcctactaccggataatttttcaacagaaaaaaacatgttatttctcccttcttaaaaacaaatttacatataaacacacagacatgcaaacacacaaactcttgactctactgttcacttttagccagtgttctatttacttactggcctttacatccaaactcttcaaaggagtgaaccatgttaaaagacttcaattcctctttcagctattctaagtcaagtaacactttaccctcctctattctagcaaaatagtttttatcaaggcatttgatcctcygtgattccaaaagcaggctaatttggttttcaaattctttgactcatcaatagcatttagtataatcttactaaatcagtgataatgtcctcattaacaaactatattcaatagactattaatatagcacatcaccttaa

SEQ ID NO: 868498 - DNA, 567 bp, Homo sapiens
acagggcggaagacgccctgtaggagagggctgcctcctccttttcttcttcttcttttttttttcatcgttttgtagtgcgtcactcaaaaactgtaagaaaagtaagtatagaagctctttgggtggagccgcagttggttgaattgctttcatgaaaggttgaaaagaatgaaaagtagttagtacttgggttctggtttttagacaaaagcaggacaaatatgtagccaccccccmacttttttttttttttttaaacggagccggaatctgttattggtagtaatgtgtcatgtgagaatactttgattccagagcctgtaacacgagcaggtatatggtggcgcttatgccttcccctcgcacagcactttacaactacaggggtgttgctgccagagtaatattgtattcttaaggctctctggggccgggagagtatgcggctgttgggattctggggtgtatttccgtggagtatgtctccccaggattaaagttaagaagctgccggaaaggttgttgccgctgacttcactttgtgtgcccaccagcacaggcaca

SEQ ID NO: 868499 - DNA, 632 bp, Homo sapiens
gcttagttatagttgcttgttaagctgcttcatgggttgagacaaactaccagcacttcaaagagctcagttctctgctcaactctcttctctagttacattattttttttcctctgcaaaaggatagtccaccaaaagaggaagttatgaaataacagtcattatgctttatccattttatggggcatggaaaattattcataaagcttacacttgaaatcacagcaacaggctataattggtgcctgtacacwtatataattaaagtatatgcatgtttatatgtgtaagcaaattttagaaaagttaagctattgaaacctatagttggcctggcacggtggctgacgcctgtaatcccagcactttgggaggctgaagcgggcagattacctgaggtcaggagttcaagaccagcctggccaacatagtgaaactccgtctctactaaaaatacaaaagttagcctggcatggtggcaggcgtctgaatcccacttactcaggagactgaggcaggagaatcgcttgaactcaggaggcggaggttgcagtgagctgagatcgcggccattgctttccaggctgggagacacagtgagactccatttcaaaaaagaaaagaaaagaaa

SEQ ID NO: 868500 - DNA, 626 bp, Homo sapiens
actcgttggaccactaaaattctaatattgtatagtgtttgctagacaatcttttcagagctttccatgttttatctcatttaaaccctactaactctttgagttaggtactgataccatttctatttcaaagctgcagaaaaagaggcagaaatgcatgtaaattggccatggtgagatagctggtcagtggtggrtcgtagatgtctacctaagcaatctgactacagagtctgtacttttcatatttttattttaaaattactatgtctttaaaccatgtgcagtactatgtttttaagccatgtgcagtggcttatgactgtaatctcagcactttaggaggccgaggtgagaggatcatttgagcccaggagttcgagaccagcctgggcaacatggcgaaatcccatctctaccaaataaataaataaataaataaataaaacaattagcctgtaatcccagcaacttggtaggctgaagtgggaggattgcttgagcctgggaggttgaggctgcagtgaacccagtcaaaccactgcactccagcctgggaaacagagcaagaccctgtctcaaataaataagtaatatgcaaataaaataatgatgtctttattttt

SEQ ID NO: 868501 - DNA, 621 bp, Homo sapiens
tcagtgtataccgctcgggtgatgggtgcaccaaaatctcacaaatcaccactaaagaacttattcctgttaccaaataccacctgtttcccaaaaacctatggagagaaaaaaaaaagaaaaagaaaatcaggcctgggatgatccagtctttgcttcacagtgatagaggagaaactgtggctcagagagcagcactgatacctggatgtctggctcctgggccacttcttactgccacctggttgtcccatgagtatcrttcctctccagagtgggagaataacttgcctaccccatcagatttttctctgacttccttctctcctttcctttcaagggcttgggaagaaccaggctcctaaaatttgacttgagcatccattggtgaagctgctttcctagaaaagaactgggtccagagcctcctgaaaacttgaggtctctgtgtaaaggtggagcaggggccatccctccgtggggactgaggctgtcttctacatatggcttagaggtcttatggtttctttgaggtcacctctgggctggtggatggagctctgggaggagccagaaggctgctggtgataaagaatacaaactatggcagcaactggtcaa

SEQ ID NO: 868502 - DNA, 558 bp, Homo sapiens
gctacatcgtctttttaaggtgtctcaagctaatactgagcgaccatgagcctgggccacagttgctagcttggaccaaagcagcccttcatcatttctagcaaaataagtgtttcctacttggctggagagcattgctccaccattctggggacctctgggtctctttccttccagctgaggcatcaagtaccttgagtaccctagcttggctactaatttcacccatytagacttcatcaggccctgcacctgaaaaaaaaaaaaaaagacaaaaagcaaggaataaggaacatcagacaaagcacaaaatgtttcccttctcttactccaaaccacatctcaaaaatggatcttattaatgaggcatatttctctgtactgacttgacagataaattaagtgaagatatattaagtaaagaattggaaaatgccacacactctgctccatccacctccactttctaaaagtatatacctagaataaaatgctgaggaactatgtcttagtctgtttcctgctgctatagcagagtaccccagactgggtaatttt

SEQ ID NO: 868503 - DNA, 606 bp, Homo sapiens
aagacagaccaacattcaaattcaggaaatgcagaaaactccagtaagatactccacgagaagatcaaccccaagacacataatcctcagagtctccaaggtctacatgaaagaaaaaaatgttaagggcagccagaaagaaaggctaggtcacttacaaaggaaaacccatcagactaacagcaaacctctcagtggaaaccatacaagccagaagagattgagggccaatattcaacattcttaaagaaaagaatttccaaccyggaattttatatctagccaagctaagcttcatatgcaaaggagaactaagacccttttcagagaagcaaatgcttagggaatttatcaccaccaggcctgccttgcaagagctcctgaaggaagcactaaatatggaaaagaaaaccactaccagccactataaaaatacagtgaagtacacagaccagtgacaatatgaagcaaccacataaacaaggtctgcaaaataaccagctagcatcatgatgacaggatcaaattcacacataacaacactaaccttaaatgttaatgggctaaatgccccaattaaaagacacagaatggcaaactggataa

SEQ ID NO: 868504 - DNA, 599 bp, Homo sapiens
gagatgccctgaatggaggatccctgtatggcatcctttccaagagtggagcaaaagccacagataggagagggctctgtgggcttctatcggctttgtccttcctttagagaatgcaggggtgaaacttctgagcgaggaaatatccccatagcctttctgtccaaggggaagccttgaatctacctcccaaataataatggccagagggacttgatctcagctctaggccttggagagtgagggaggtccctggagaggtccttaagcaggaggcctgttytgattctgaacgggttctccagggccaactacttctcccttgtatcattctcatttcagtgggttgcatcatcaagagggccctagggtggccaataatttcattttttcaagtctactattatgttttaaagtatctttgaaaaaaaatttttttacggtattttcaaattacatactattcctattgagcatgtatggcagcttaactacccgaatacaaagtttaagaagccaaaactaatctagctttgttttaaaaaattgtgctattgttgtaatggttaacaaagcgaggagaagcaccactcaaatca

SEQ ID NO: 868505 - DNA, 635 bp, Homo sapiens
tgatgttgagcctgtgggagcacagaagtcaagaactggggtttgggaacctctacttagatttcagaggatgtatggaaatgcctgaatgcccaggcagaagtttgctgtaggggtggggccctcatggagaacctctggtagggcaaggcagaagggaaatgtgggctggagcccccactcagagtccctactggggcactgcctagtggagmtatgagaatagggccaccatcctccagaccccagaatggcagatccaccaacagcttgcactgctcacctggaaaagccacagacactcaatgcctgactgctaaagcagctgggagggaggctgtatactgcaaagccacaggagcagagcttctcaagaccatgggagcccaccttttgcatcagcatgaccttgatgtgagacatggagtcaaaggagatcattttggagctttaagatttgacagcccctctggatttcaaacttacatggggcctgtagctccattgttttggccaatttttcccatttggaatgagcatatttccccaatgcctgtatcctcattgtatctaggaaacaactaacttttgattttactggctcataggcagaagggacttgccttatcttggat

SEQ ID NO: 868506 - DNA, 635 bp, Homo sapiens
tgatgttgagcctgtgggagcacagaagtcaagaactggggtttgggaacctctacttagatttcagaggatgtatggaaatgcctgaatgcccaggcagaagtttgctgtaggggtggggccctcatggagaacctctggtagggcaaggcagaagggaaatgtgggctggagcccccactcagagtccctactggggcactgcctagtggagctatgagaatagggccaccatcctccagaccccagaatggcagatccaccaacagcttgcactgctcacctggaaaagccacagacactcaatgcctgactgctaaagcagctgggagggaggctgtatactgcaaagccacaggagcagagcttctcaagaccatgggagcccaccttttgcatcagcatgaccttgatgtgagacatggagtcaaaggagatsattttggagctttaagatttgacagcccctctggatttcaaacttacatggggcctgtagctccattgttttggccaatttttcccatttggaatgagcatatttccccaatgcctgtatcctcattgtatctaggaaacaactaacttttgattttactggctcataggcagaagggacttgccttatcttggat

SEQ ID NO: 868507 - DNA, 637 bp, Homo sapiens
ttttttgacttaatgatcatagccattctgactggtgtaagatgatatctcattgtggctttgatttgcatttctctaatgatcagtgatgttgagcttttttcatatgattgtcggccgcatgtatgccatgccttcttttgaaatgtgtctattcatgtcctttgcccacttgaggttgtttgtttttattcttgtaaatttaagttccttatagatatatattagacctttgtcagatgcatagtttgcaaaaattttctcccattctgtaggttgyctgttcactctgttggcagtttcctttgctgttctttagtttaaatagatcccctttgccaatttttgcttttgttgcaattacttttggtgtctttgtcatgaaatctttgcttgttcctatgtccagaatggtattgcctaggttgtcttccagggtttttatagttttgggttttacatttaagtctttaatcaatcttgagtttatttttgtatatggtgtaaggaaagggtctagtttcaatcttctgcatatggctagccagttcccccagtaccatttattgaatagggagtcattttcccattgcttgtttttgtcagctttgtcgaagattagatggttgtaggtgtg

SEQ ID NO: 868508 - DNA, 688 bp, Homo sapiens
gtgttaactctggcctgatccaagacaggaggaaaggcaggtcccaagttccaccacattaggatgcacttccccattgtacatgattttggctgctcctaaaatacttcacacacataaaggtctgtatctggaagaattttcagttttattacttttgctgaaggtgtcttcccatgcttaaaaatgcacttcatgctctttccctgcaattactctgaagttacacagtcagtagtgcataycatcacaggtactatgacccacagtctcctcctgacattctccgagggcttactcattaggacctcacaaagatgtcactgtcctctctcattaggcatgtttcttcatgaagaatattctcatgttgccttcattcactcaatccatcaattattattattattttttgagacaaggtcttgctgttacccaggatggagtgcagtggtgcaattgcggcaggtcaggtctcactaacacaggtctgcataacaactgttttagccctgactgagtggagaagttaaacattaaaagctgaaagagccagtgtccttatataaaggctggaatgtaacaaaagcccaccaagagttttgcccaggcctttcctgggccttgaagcctacaagacaaggaaggaattcttaacaggacccgtttaggattaaacaagttttac

SEQ ID NO: 868509 - DNA, 585 bp, Homo sapiens
aatcacataaacaataatttcccatttagtttttggaaacaacaatttcccaattgagtttttggctacctgcaattaaagagaccaatgctaaataatatattttaaatcaattattggcatttcaatagcttaggcttcaccaaatagtttcagyaacagatttatttctgagtctttcagaatttgtttttttcttcttatttttctatatacagtctatacctacaaccatattatagacacacatattatgttattcactgccctatcacctctcttatctatgggcactaaaacatttatattttattccaggtaaaaacctgtaaacaagtaacaaaatgaaaacaaaatcttcaatgttaattgttgaaacacttcttattaaattatcttaattctctttaaatattatagtccttccactcccacacagactatgagcttttaaagggcaggttgtaattcctataattctttgccttttccttagagtcttgcctttaacaaaacaggaactcaataaaagatgtgctgatggattggaaacaagaagtaaatgacaaaggagcaacaaaagag

SEQ ID NO: 868510 - DNA, 645 bp, Homo sapiens
tctatataaagacacaaaacagaattgctgctagaaggaaaccgggttggggaaggaggacccaacctgccctggacccatagagtagcccctaagacaagagaggtaggggccgggcacagtagctcatgcctgtaatcccagcactttgggagatggaggtgggtggatcacctgaggtcaggagtttgagaccagcctggctaacatggtgaaaccccatctcttccaaaaatacaaaacttagytgtgcgtggtggagcacacctgtaatcccagctactcaggaggctgaggcaggagaattgcttgaacccaggaggtggaggttgccaagagccaagatcatgccattgcactccatctcaaaaaaaaaaaaaaaaaaaagggtgagatgtgtgtgtgcatgctcaggtagggttgtgtgcatgaacatatgtgtgtatgtaaattccaaaacagaattgcattagctgcaaaacttaataaaaatttctaccgagagtgaggtcatgtcttcccggacctctgctttagaggctgcacaagggaaaaggtgtagaatttaagtgactaggacagtgattcactgcttgggaaaagggcggatcataggttgagataagctctctctggtctgcaaag

SEQ ID NO: 868511 - DNA, 589 bp, Homo sapiens
taaagacaactaagtaaatcaactgtagctacaagcaaataaatgtcaaactattgatttttctctctctctcttctttgcagttttaaaatgcttatttacagaacaagacttagaatgacagcatgaggaactgcatgaacgctcttccaatcaaatcaactatcaccaatgaaaacatgttttttaactatttcgaatctctggaaattgttctcagatcaacaccaagtgaaaatacacatttattcaataaaatctaccaaatcttaagtagaaacagcagattcctgtggttcctgagacttgcccacctcttgcctcattcatcttccaacttagcataatggaaattccaccacaagtcggcgtggccaaggagatggggctccctctyctgcaggctccaagttgagggctgcggtatcctccttggacagggagtctgacagcatcactcatcccccgccagctctgtgctgtagaggctaaatttcaagcaagcatgactgagagggttggggcttccctcttactcctagaccagagtgtgaaggttctgccaagagcatgacaggccaagaatatt

SEQ ID NO: 868512 - DNA, 589 bp, Homo sapiens
taaagacaactaagtaaatcaactgtagctacaagcaaataaatgtcaaactattgatttttctctctctctcttctttgcagttttaaaatgcttatttacagaacaagacttagaatgacagcatgaggaactgcatgaacgctcttccaatcaaatcaactatcaccaatgaaaacatgttttttaactatttcgaatctctggaaattgttctcagatcaacaccaagtgaaaatacacatttattcaataaaatctaccaaatcttaagtagaaacagcagattcctgtggttcctgagacttgcccacctcttgcctcattcatcttccaacttagcataatggaaattccaccacaagtcggcgtggccaaggagatggggctccctctcctgcaggctccaagttgagggctgcggtmtcctccttggacagggagtctgacagcatcactcatcccccgccagctctgtgctgtagaggctaaatttcaagcaagcatgactgagagggttggggcttccctcttactcctagaccagagtgtgaaggttctgccaagagcatgacaggccaagaatatt

SEQ ID NO: 868513 - DNA, 592 bp, Homo sapiens
cattcctttattttgagcctatgtgtgtgtctttgcacatgagatgggtttcctgaatacagcacattgatgtgtcttgactctttatacaatttgccagtctgtgtcttttaattggggcatttagcctatttacatttgaggttttattgttatgtgtgaatttgatcctgtcatcatgatgctagtggctattttgcataccagttgatgcagtttcttcacagtgtcattggtctttatattttggtatgtttttgcagtggctggtactggyttttcttttctgtatttagtgcttcctccaggagctcttgcagggtgggcctggtggtgatgaaatcccttggcatttcttgtccagaaagaattttatttctccttcgcttatgaagcttagtttggctggatataaaattctgggttgaaagttcttttctttaagaatgttgaatattgcccccaccgtcttctggcttgtagggtttctgctgaaagatatgctgttagtctgatgggcttccctttgtaggtgatccaaactttctggctgcccttaacttgttttccttcatttcgaccttggagaatc

SEQ ID NO: 868514 - DNA, 592 bp, Homo sapiens
cattcctttattttgagcctatgtgtgtgtctttgcacatgagatgggtttcctgaatacagcacattgatgtgtcttgactctttatacaatttgccagtctgtgtcttttaattggggcatttagcctatttacatttgaggttttattgttatgtgtgaatttgatcctgtcatcatgatgctagtggctattttgcataccagttgatgcagtttcttcacagtgtcattggtctttatattttggtatgtttttgcagtggctggtactggcttttcttktctgtatttagtgcttcctccaggagctcttgcagggtgggcctggtggtgatgaaatcccttggcatttcttgtccagaaagaattttatttctccttcgcttatgaagcttagtttggctggatataaaattctgggttgaaagttcttttctttaagaatgttgaatattgcccccaccgtcttctggcttgtagggtttctgctgaaagatatgctgttagtctgatgggcttccctttgtaggtgatccaaactttctggctgcccttaacttgttttccttcatttcgaccttggagaatc

SEQ ID NO: 868515 - DNA, 592 bp, Homo sapiens
cattcctttattttgagcctatgtgtgtgtctttgcacatgagatgggtttcctgaatacagcacattgatgtgtcttgactctttatacaatttgccagtctgtgtcttttaattggggcatttagcctatttacatttgaggttttattgttatgtgtgaatttgatcctgtcatcatgatgctagtggctattttgcataccagttgatgcagtttcttcacagtgtcattggtctttatattttggtatgtttttgcagtggctggtactggcttttcttttctgtatttagtgcttcctccaggagctcttgcagggtgggcctggtggtgatgaaatcccttggcatttcttgtccagaaagaattttatttctccttcrcttatgaagcttagtttggctggatataaaattctgggttgaaagttcttttctttaagaatgttgaatattgcccccaccgtcttctggcttgtagggtttctgctgaaagatatgctgttagtctgatgggcttccctttgtaggtgatccaaactttctggctgcccttaacttgttttccttcatttcgaccttggagaatc

SEQ ID NO: 868516 - DNA, 588 bp, Homo sapiens
tcccacccctaccccaccaacaggccccagtgtgtgttgttcctgctcatgtgtccatgtgttctcatcattcagctcccacttataagtaagaacatgcagtgcttcgttttctgttcctgcattagtttgttgaggataaggccttccaactccattcatgtccctacaaaggacatgatctccttcctttttatggctgaatagtattccatgatatatttgtaccccattttctttatccagtctatcactgatgggcatataggttgatcccatttctttgctattgtgaatagtgctgtaatgaacatactatgcatgtatctttataatagaatgatttctattccttagggtatatacccagtaataacattgttggggcaaatggtatttctgccgctaggtttttgaagaattttctccacaatggttgcaytaattcacactcccaccaacagcgtaaaagcattcttgtctctccataaccttgccagcatctgttgttttttgactttttaataatagccatcctgactggtgtgagatggtatctcattgtagttttgatttgcatttctctaa

SEQ ID NO: 868517 - DNA, 589 bp, Homo sapiens
attttgaagtattggaagcttctggccgtttttagacttttattccatttcattaatggtcatccaaggtatggccatacagtaatttggtaccaagtattgggagaaattgggttgttaacatacactggaagaagaaggactatgtctggaaccttggagtttcactagggtacctcattttactcccttgcttaatagtcctggtcaaggccaggcacggtggctcacgtctataatcccagcactttgggaggctgaggcaggcggatcatgaggtcaggatttcgagaccagcctgaccaacatggtgaaaccctgcctctactaaaaatacaaaaattacccaggcgtggtggcacgcacctgtartcccagctacttgggaggctgaggcaggaaaatcacttgaacctggaggtggaggttcttggcagtgagccaagattgtgccatttcactccagcctgagtgacagagtgagactccctctcaaaaaaaaaaaaaaaaaaaaaatagtcctggtcaagagaacactgcatcattccaataaggtcaagacaaccaaggactaaattctataataatg

SEQ ID NO: 868518 - DNA, 610 bp, Homo sapiens
aaatagtatgcattttcctatttaattttgcctttgcttgtacacttacaaaggttttgccatactaagataagtaatggatattaacatcaaaacacaatatctaattaaaggattatatgtgctaagaaatctgggcaccagcaatatgccatgactgagaatctacatagttaacattagaatttctccacacggtcacaaaacacatttgattatttaatattgkcgtgcatgaaaacaatgtatcaataaaaacatatgccaatgtctgttgaacagtaaaactaaaagaacatgctaataggaaataaggattaggccaaatgtcaaaggatatgctttgaaagattcataaatagtgattaaaaatgtagattaaaataaaactatctgagtgtaatgttcctgtgttaaattatccaagaaaatttggtcaccattactctctacaatttaaattgattgttgtcaacatgtttgcataacattagaatacccacaaaatgttgaattactctgttttagaggttagtgtttcagttccttttctctaagaacatgcattaaaagacttaagtttttattgtttctgaatgactaattttta

SEQ ID NO: 868519 - DNA, 688 bp, Homo sapiens
acaattcaacatcccttcatgttaaaaattctcaaaaactaagtattaaagggacgtaatacaaagtaataagagtcatctatgacaaaaccacagccaacatcatactgaaagggaaaaagctggaagcattcctcttgaaaaccaacacaagacaaggatgccctcttggaagtcctagccaaagcaatcaggcaagagaaagaaataaagggtatccaaataagaacagaggaagtcaaagtatccttgtttgaagaccacatgactctctatctagaaaacytcatagtctccgcccaaaattttttcagctgataaacaatcaacagtttcaggatacaaaatcaatgtacaaaaatcactagcattcttatacactaacaacagccaagccaagaaaaaatcaagaaggcagtcctattcacaattgccacagaaagaataaaatacggaggcatacagctaaccagggaggtgaaagatatctacaatgagaattacagaacactgctcaaagaaatgagagaagacacaaacaaatggaaaaacactccatgcacatggataagaagaatcaatatcatgaaaatgcccatactgcccaaagcattctatagatccagtgctgctcctttcaaactaccaacaacattcttcacaaaactagaaaaataaaaactatttt

SEQ ID NO: 868520 - DNA, 646 bp, Homo sapiens
accagggaggtgaaagatatctacaatgagaattacagaacactgctcaaagaaatgagagaagacacaaacaaatggaaaaacactccatgcacatggataagaagaatcaatatcatgaaaatgcccatactgcccaaagcattctatagatccagtgctgctcctttcaaactaccaacaacattcttcacaaaactagaaaaataaaaactattttaaaatagtttggaaccaaaaaagagcctgaatagccatgactatactaagcaaaaacaacaaaactggaggcatcatgttacttgacttcaaactatattacaagactacmataaccaaagcagcatggtacttgtactaaaacagggacatggataaatggaacagaatagagagctgatatataagatgatatacctatgaccatgtaatctttgacaaagctgacaaaaacaaccaatggggaaaagactccctattccataaatggtgctgggaaaactggctagccatatgcagaaaatgttcgttgcagcactattcacaatagcaaacacatggaatcaacttaaatgcccatcaatggtacgctggataaagaaaacatggtatacatacactatgaaatactatgcagccataacaa

SEQ ID NO: 868521 - DNA, 599 bp, Homo sapiens
atgagcaggtgaacaggagaaagcagagctagttgatcaagaaaataaaaaaagaatcagatgagagttagaagacaatgttggggccgggtgcagtggctcatgcctgtaattccagcactttgggaggctgaggtgggtggatcacaagatcaggagatcgagaccatcctggctaacaaggtgaaaccctgtctctactaaaaacacaaaaaattagccaggagtggtggcagtcgcctgtagtcccagctactcgggagactgaggcaggagaatcgtgaacccgggaggcggagtttgcagtgagctgagattgagtcactgcactccagcctgggtgacagagctagactctatcttaaaaaaaaaaaaaaaaaagaaaagaaaaaaargaagacagtgttggtagcagagtcaatgaggtgaagttttgcacaaacacagttgtgatattacgtacttcgttggatcagtggcataattcttgcctctcacccaggttcgattattaataatatactttatcttacccaccactgtcccaaatatgacataaagtagtgcagataatcagctatgctttccttatatatgat

SEQ ID NO: 868522 - DNA, 630 bp, Homo sapiens
tgattttaaagacagactgcttgggttcaagtccatattattttcattattagttgtgtaattgtgagcaagttctgatcctcagttttcttacttatcaaataggaataataatagtagtagtaataattaaaaatagtaaaaaataatagtagtggtaaaatacttataagaataacagtagtagtaacaataatacaaaaccccatagtgcagttatgaaaattaaatatattaattaatatgaagtacttagaacaatgcctactgccagtaagttatgttagctaagagtattgytaagatgtaatcaaagacagtaacttaatcaaatcacaaaatagggccactgtatctatctcaaaagaaaaagtcaatgatgttcttaagaactgatatatttgattggagatcattcagtaataattgattgaaatattaactagaatcatcaacataaatggtggcattctacatagggtgccactagttatatatatgactatactggagaagatgatgaaatttttctttgaaaacaaccaaaacgcttaagtatcactgaccaggaattgaaacatttcttttgttataagcctttggaatttagttgagtagtgatcattttat

SEQ ID NO: 868523 - DNA, 623 bp, Homo sapiens
gggcagaatggccactttcaccatattgattcttcctatccataagcatggaatgtttttccatttgtttgtgtcctctcttatttccttgagcagtggtttgtagttctccttgaagaggtccttcacattccttgtaagttgtattcctaggtattttattctctttatagcaattgtgaatgggagttcactcatgatttggctccctgtttgtctattattggtgtataggaatgcttgtgatttttgcacattgattttgtatcctgagactttgctgaagttgcttatcagcttaaggagatttggggctgagacaatggggttttctaaatatacaatcatgtcatctgcaaacagggacaatttgacttcctctcatcctatttgaatatgctttatttctttctcttgcctgattgccctggccagaacttccaataatatgttgaataggagtggtgagagagggcgtcyttatcttgtgccggttttcaaagggaatgcatccagcttttgcccattcagtatgatattggctgtgggtttgtcataaatagctcttattattttgagatacattccatcaatacctagtttattgggagtcttcatttttt

SEQ ID NO: 868524 - DNA, 613 bp, Homo sapiens
gtacacccgttaagtatacatatgttagttactgctgtgtaacaaactaacccagaacttggtggctcaaagcaacaaccatcttacttgagtctagttgtctagttgtctagagacaagttgtctagttctactgatgtgggctaggtacagctgtcttactcatgcatctgtggtcagcggrtaggttggctgggggctggctggtttaggatgtcctcagctgggatgactcatacctttccagtagagggtgttgtcatggtggtgactagcagaaaaaaaaaaaaaaaacgacaaaacaaaacacagtttccagtgtctgaagtgagtttgttaccaccccattgtccaaaacaggtcacatgctcaagccacaaactgtgtagggcactaccaaaggttataggcacagggagacatcaaaatgagatgcatgtctccaatcaatttactagagggtagaaactgcacaggtagctattcaacaatagtatgctagctacatacagaaaacaaaatgaaaagtttggaaaattatctgatcatccccttgatcagtcatcagaaaacattttagtaaagagctaggtagtaaaattgcaggcttgca

SEQ ID NO: 868525 - DNA, 613 bp, Homo sapiens
gtacacccgttaagtatacatatgttagttactgctgtgtaacaaactaacccagaacttggtggctcaaagcaacaaccatcttacttgagtctagttgtctagttgtctagagacaagttgtctagttctactgatgtgggctaggtacagctgtcttactcatgcatctgtggtcagcggataggttggctgggggctggctggtttargatgtcctcagctgggatgactcatacctttccagtagagggtgttgtcatggtggtgactagcagaaaaaaaaaaaaaaaacgacaaaacaaaacacagtttccagtgtctgaagtgagtttgttaccaccccattgtccaaaacaggtcacatgctcaagccacaaactgtgtagggcactaccaaaggttataggcacagggagacatcaaaatgagatgcatgtctccaatcaatttactagagggtagaaactgcacaggtagctattcaacaatagtatgctagctacatacagaaaacaaaatgaaaagtttggaaaattatctgatcatccccttgatcagtcatcagaaaacattttagtaaagagctaggtagtaaaattgcaggcttgca

SEQ ID NO: 868526 - DNA, 610 bp, Homo sapiens
agtgacttatttgcttagaatggaagtgaggtgaccacgtaaagctcatagatcaagaacatataccaggccagtgctcaatatatagaagtggttatttatagcgtaatagtggtataatttaatactgaaaacaagctcaaagagatatttgcttacctctatctttgacataaatactattactatttctactaccacaaccaataataataatctaacaagacagtcacacgtgcgaaagccaagcccactcttatctcaaactggtattttggtgtctgcatatgtttgcttggggacagaagttaaaatacacagagacgtgaattccgcagtaccaaataaatagttggtgaattaacaaatgaattgtactttccaactacctgtcyttgggcaggctactgtgcctgtgcaagcctcagcttcctcatcatgtcatttggggtaataatagctattccatggagttgtggttgtagtgaagatagacagagacaatgtgtttgaaagcagtggtttggtatatagaactccttcagcaaatattgtcttttctaattttattctctctccagcgcctgtggtggaaccatacttggaagta

SEQ ID NO: 868527 - DNA, 630 bp, Homo sapiens
gtacaatgcaaatcctttggccttcactgtttattacaatcagatttctaagcttgatagagctagtttggccctaattcacctgagatcactttttgaaatgatgctattcaactttctttcaaaaaactttattttttaagttagaaaacctcttagagtttattattgaaaatgtacaagacagctgggcgtggtggctcatgcctgtaatgccagcactttgggaggccgaggcaggcagatcacaaggtcaggagatcgagaccatcctggctaacacagtgaaaacccatctctactaaaaaaaaaaaaaaaatacaaaaaaattagccaggcatggtggtgggcacctgtagtcccaactacttgggaggctgagacagaagaatggcgtgracccaggaggtagagcttgcagtgagccgagatcgcgccactgtactccagcctgggtgacagagcaagactccgtctcaaaaaaaaaaaagaaaaagaagacatacaagacaacacagatagattaaaattacacttgttccccgagagagtactgctaatattttgttgtcttgtcttctaggtacccgagattgggtaacttataaacaagagatgtttatttgagtc

SEQ ID NO: 868528 - DNA, 630 bp, Homo sapiens
ctgtctggaaggcatttccccgagactgtcccaccaccagctcgctagtcttccctctgaataccctaatcccgaaactcctccccaacctggtatcagataatgtaccacaccaggctttatctgagagtcaggagaggaaattccaatgactgttttttccactgaccttgggcaatttttttttttttttttttttttttgagatggagtcttgctctgtcctccaggctggagtgcagtggcatgatcttggctcactgcaacctccacctcccgggttccagcgattctcccgcctcagcctcctgagtagctggaattacagatgcgcgccrctacacctggctaatttttgtatttttagtagaaacggggtttcaccatattggccaagctggtctcaaactcctgacctagtgatccgcccgcctgggcctccctaagttctgggattacaggtgtgagccactgcaccaggcctgaccttgggcattctttttgtccttggttctcagtttcctcccctttaaaaggaggtgattgaacctccataagttcaatgaattagtccgaattctccaggaagcagactaagacaggattaaacattcaggggttttattagag

SEQ ID NO: 868529 - DNA, 591 bp, Homo sapiens
cccaggctggggcgcagtggtgcaaagacagttcacttcagtctcaaacttctgggctcaagtgatccttccacctcagctccccaagtacctgggactgcaggcatgcaccaccatgccttgctaatttttgtatcttttttagacacagggtttcgccatgtttcccaggctggccttgaactcctgagctcaagcgatctgcccacctcggcctcccaaatgctgggattgcaggcatgagccaatgcacctcagtttcttgtctgccaaatggagtgaaaataattatcctgaatcttgatatgaatgttatatatttccaaaatcccaagcacattatgtgtgctaattaaatgctagttactayagtaataaggagaaaaatgtagaccaaaacatataaaaataatcaaaaagtaccagattgtaagctcaagggcagagactctgtctcatttatctttgcacccctagcacactacagattcttggcatatagtaggcagccccttgaatgttttttgcattaaactgagctgatttgttgagtatcacctatgtgtagaaattgtttcagtgctgcttagt

SEQ ID NO: 868530 - DNA, 552 bp, Homo sapiens
atctcagccctgcctgccatgccacctgaacaacacagtacaggtagccataataccatttggaccatagctccagtggcctgagaaccaccctgctgtctcccacaatggcctctgcaagccccagtgaggagagtctggcagctcaaacccacctaaccctgtccccacatgatggtttttctctaccyatcctggtagctgaagggatacaaaagggataatctcttggaagctctatggccccgcccatcacctgagaaacttgaatacttatcctggccaatttagggcaagcttatattccccttctaccaccacagctggtgctctcttgaaagtgccacctcctggctggaggccaaccaactcaagccattacagcaactcataacagaacaagtcggctccaaagaaggagaaaacaacagctgtttctgctgcctgcaacatcctagctaaccagaggtcctgaatatgtccacatgacaacttcactgttagcataaccagcattcgagaaaagcagcacattaaacaaaactatagcca

SEQ ID NO: 868531 - DNA, 604 bp, Homo sapiens
cctaatgctatccctcccctagcccccaacccatgacaggccccaatgtgtgatgttaccctccttgtgtccatgtgttctcattcttcaactcccacttatgagtgaaaacatgcggtgtttggttttctcttgtgttactttgctgagaatgatggtttccagtttcatccwtgtccctgcaaaggacgtgaactcatcctttttttatggctgcatagtattccatggtatatatgtgccacatttgcttaatccagtctatcattgatgggcatttgggttggttccaagactttgctattgtgaacagtgctgcaataaacatacatgtgcatgtgtctttatagtagaatgatttataatcctttaggtatatactcagtaatgggattggtgggtcaaatggtatttctagttctagatcccgaggaatcgctgcactgtcttccacaatggttgaaataatttacactcccaccaacagtgtaaaagcattcctatttctccacatcctctccaacatctgttgtttcctgactttttaatgatcaccattctaactggcatgagatggtatctcattgtggttttgatttgcatt

SEQ ID NO: 868532 - DNA, 604 bp, Homo sapiens
cctaatgctatccctcccctagcccccaacccatgacaggccccaatgtgtgatgttaccctccttgtgtccatgtgttctcattcttcaactcccacttatgagtgaaaacatgcggtgtttggttttctcttgtgttactttgctgagaatgatggtttccagtttcatccttgtccctgcaaaggacgtgaactcatcctttttttatggctgcatagtattccatggtrtatatgtgccacatttgcttaatccagtctatcattgatgggcatttgggttggttccaagactttgctattgtgaacagtgctgcaataaacatacatgtgcatgtgtctttatagtagaatgatttataatcctttaggtatatactcagtaatgggattggtgggtcaaatggtatttctagttctagatcccgaggaatcgctgcactgtcttccacaatggttgaaataatttacactcccaccaacagtgtaaaagcattcctatttctccacatcctctccaacatctgttgtttcctgactttttaatgatcaccattctaactggcatgagatggtatctcattgtggttttgatttgcatt

SEQ ID NO: 868533 - DNA, 561 bp, Homo sapiens
aagattatataacccaccacttagaaggtacgaatagagcaaaagaacaagaggctgtaaggacatagaagcaaaaagatttctcctagtggggcccatgctgaaagttcaggtatagctgtgaatgtttcctcattgtttggttcagctcatcaatacagctaatgaggatttggaagcagatctgattatttcaaaaattargaagcaaagtaggtttactgtaaaaatgtccttttaatttatttttccaggacattgcaatgcgggaagcaggtgataggatgggattttgagtctaattgaggagagggaatcctaatataacaggagtcaaaaactttactgtaactcagagaggcgaagacaaccaatactcaccaggagttgggaagagactactaaataccaagccgaatttaaaacttagctcaattggataattcatatgatttctctatgtcattaataccgtttctctggaaaaagagaaagcttagtttgatcagcttttcttcctaaatgtatctacagagcagtgtcttctttctgccttgtcac

SEQ ID NO: 868534 - DNA, 573 bp, Homo sapiens
acttgtgcctgtgctggtgggcacacaaagtgaagtcagcggcaacaacctttccggcagcttcttaactttaatcctggggagacatactccacggaaatacaccccagaatcccaacagccgcatactctcccggccccagagagccttaagaatacaatattactctggcagcaacacccctgtagttgtaaagtgctgtgcgaggggaaggcataagcgccaccatatacctgctcgtgttacaggctctggaatcaaagtattctcacatgacacattactaccaataacagattccggctccgtttaaaaaaaaaaaaaaaagtkggggggtggctacatatttgtcctgcttttgtctaaaaaccagaacccaagtactaactacttttcattcttttcaacctttcatgaaagcaattcaaccaactgcggctccacccaaagagcttctatacttacttttcttacagtttttgagtgacgcactacaaaacgatgaaaaaaaaaagaagaagaagaaaaggaggaggcagccctctcctacagggcgtcttccgccctgtaaa

SEQ ID NO: 868535 - DNA, 579 bp, Homo sapiens
caccattcaaatcatggggagaagatggagtcccaagactcttggaattttttgctgtataagaatagagtatcattgtttcttctctgttgtcttctgatgtcggaagtttgcagagtcatcctgtgccaccaggataaataccaattgtggtgtkgccaggctgaaaataaatagaggagggcaattatttatgtttgtcaatggttcagaaccatatgaatgaacataagaaatagagaagaaagaaacagcttaggactgcttgatatggttggctctgcctccacccaagctatcatcttgaattataattcccataatccccatgtgtcaacgggtggaccaggtggaggtaatcggatcatgagggcagtttcccctatgcttttcttgtgatagtgagtgagtcttaggagatctgatggctttaaaagcatctggtgtttcccctgcctgcagtcactccatcttgccactctgtgaagaaggtgcctccttctctgttaccttccaccataaatgtaagtttcctgaggcctctcaagccatgaggaactgtgagtcaattaaaacttt

SEQ ID NO: 868536 - DNA, 615 bp, Homo sapiens
aatagacttagactctgacacaataatagtggggatctttaacaccccactgataacattaggcagatgatacagacagaaaattaacaaagatattcagaacttaaactcagcactggatcaaatggagctgatagatatctacagaactgtccaccaaaaacaacagactatacattcttctcattgtcatctggcacacattctaaaattgatcacattataggaagtaaaaaactcctcagcaaatgcaaaagaactgaaatcataacaaacaatctctcagaccacagcacaatcaaattagaaatcaagactaagacattcactcaaaaccatatagttacatgaaaactgaataacctgctcctgaataacatctgggtaaataatgaaataaagacagaaatcaggaatttatttgaaattaatgagaacaacgatacaacatatccaaatctctggaacacagcraaggcagtgttaagagggaaatttatagtactaaatgtccacctgaaaaagttggaaagatctcaagctaacaattaacaccaaaactaaaataattacagaaccaagagcaaatacataccaaagctagcagagacaaga

SEQ ID NO: 868537 - DNA, 636 bp, Homo sapiens
aactgcaacctctgcctcccgggtacaaacaattctcctgcctcagcctcctgagtagctgagactacaagcacatgttaccacacctggctaatttttgtatttttagtagagatggggtttcgctgtgtttcccaggctggtcttgaactcctggcctcaagtgatcctcccaccttggcctcacaaaatgctgggattacaggcatgaaccaccatgcctggccttcatcttcatcttaatttacccagacatcaccatttgcatttgggcatttttgtcagaacctttctgtgatccacatgctattcatagatgaaacctctcatccatcaggctgaaaaatgtctttatcctaaaaacagacaggaacgtgatactttgcctctccagctggattrttaatatttggactcaaacctaactctatttttgttgttttcttttagttccaggggtacatatgcaagtttgttatataggtaatttgcatgtcgaggggattttgcgtatggattattttatcacccaggtaataagcatagtacctgattggtagcttttcaatcctcaccctcttcccaccctgctccaggcccagtatctattgttcccttctgtgtgtctatatgtac

SEQ ID NO: 868538 - DNA, 640 bp, Homo sapiens
agcattaaatctattaattgctttggacagtatagccatttttacgatatagattcttcctatccatgagcatgagatgtttttccatttgtttgtgtcatctctgatttgagcagtgttttttagttctcattgtagagatctatcacctccatagttacctgtattcgtaggttttttattctttttgtggcaattgtgaatgggatagcatttctgatttggctctyggcttgactgttgtttgtgtataggaatggtactaattttggcacattggttgtgtatccttagactttgctgaatttgtttatcagcttcaggagcttttggaccaagactatggggttttctagatataggatcatgtcgtctccaaacagagatagtttgatttcctctcttcctatttggatgtactttcttttttctcttgcttgatttgccctggccaggacatccaatactatacctaataggagtggtgagagagggcatccctgtctcatgccgattttcaaagagaaagtttcagctttcgcccattctgtatgattttggctgtggatttgttacagatggctagttttattttgagacatgctccttcaatacctactttattgagagtttttaacat

SEQ ID NO: 868539 - DNA, 616 bp, Homo sapiens
gctatgattttatcttttctaaatttacatataaatggaattatacattattcaagcttttgagtctgcctttttttacttatgatattctagagaaacatttatattgttgtgtttgtctttcttttttattgctgagtagtatgccatggtttgggtgtagcacattttgtttacttattcatcagctgatggacacttgagttcttttcatttcttttgggaaaatacctagaaatagaatttctggtcatatggcaagtgtattagcccatgttcatgctgctgataaagacgttcccgagactgggcaatttacaaaagaaagaggtttaatggacttacagttccacatggctggggatgcctcacaatcatggtggaagataaaaggcacatctcacatggcagcagacaagaggagggagcttgtgcagggaaactccagtttttaaaaccatyagatcttgtgagacttactcactatcatgagaacaacacgggaaagacccacccccgtgattcaattacctcccaccaggttcctcccaagacacataagaattgtgggagctacagttcaagatgaaatttgggtggggacagagccaaacca

SEQ ID NO: 868540 - DNA, 615 bp, Homo sapiens
acctctgacatacctggagacatttttcccattgtcttggggattaacattcaactcctcattacttatgcaaatttctgcagccagcttgaatttctcctcagaaaatgggtttttgtttttctatcattgtcaaattttacgaacttttatgctctgctttccttataaaactgaatgcctttaacagcacccaartcacatcttgaatgctttgctgcttagaaatttcttctgccagataccctaaatcatgtctctccagttcaaagttccacaaatctctaagacaggggcaaaatgccaccagtctttttgccaaaacataacaaaagtcacctttgctccagttcccaacaagttcctcatctccatctgaggccacctcagcctggactttattgtgcatatcactgtcagcattttggtcaaagccattcaacaagtctctaagaagttccaaactttcccatatttttctgtcttcttctgagccctctaaactgttccaacccatgcctgttacccagttccaaagttgcttcaacattttcaggtatctacagcagtgcccaactttactggtaccgatttactgtattagtctgttttcat

SEQ ID NO: 868541 - DNA, 615 bp, Homo sapiens
acctctgacatacctggagacatttttcccattgtcttggggattaacattcaactcctcattacttatgcaaatttctgcagccagcttgaatttctcctcagaaaatgggtttttgtttttctatcattgtcaaattttacgaacttttatgctctgctttccttataaaactgaatgcctttaacagcacccaagtcacatcttgaatgctttgctgcttagaaatttcttctgccagataccctaaatcatgtctctccagttcaaagttccacaaatctctaagacaggggcaaaatgccaccagtctttttgccaaaacataacaaaagtcacctttgctccagttcccaacaagttcctcatctccatctgaggccacctcagcctggactttattgtgcatatcactrtcagcattttggtcaaagccattcaacaagtctctaagaagttccaaactttcccatatttttctgtcttcttctgagccctctaaactgttccaacccatgcctgttacccagttccaaagttgcttcaacattttcaggtatctacagcagtgcccaactttactggtaccgatttactgtattagtctgttttcat

SEQ ID NO: 868542 - DNA, 625 bp, Homo sapiens
atctttttgacctctagacaaaatcatgcctgatgctagatttaccttcaaacttcaaaatcatgtgaaccatttttttttaacacaagccaagatgggtaccttttccatcatgaaaagaataataaaataagaaatatttagtttaccaggaagatgacatagaatagcagtcaaaaatataaaataataaattatttaacatttcctttttttcttattttgctgctaatattggtctgtgcacattatggcaaacctgttgactaaacagtcaagtttctctgaagtctgtgtcaatgtaaagtcagcatttcctctgcctttggkgaggtgctgaaaagagaaaccacaaagctaagatgaagatgtgctgaatctccttggatctcacctgcagttctagtcacagtactcaaaataaacatggtgtaactagggaagttttaagaaaagggcattgagatgactaaggggaggttgaggcagtcattgcttgataatgactgagatgtgtaagccatgcttagacaggacagagaaagacgtgaaacaggcagtgtgtctggaggccatgcttaactgaaagtgctatatgcccgacatcaagccaggcacttgaaga

SEQ ID NO: 868543 - DNA, 581 bp, Homo sapiens
ctgctgtctactttttatacgtaatcccgtctccaacgaaatcctcagagctattctaatatccacttgcggattccacaaaaagagctttttaaaactgatctctaaatagaaaggttcaactctgttagttgagtacatatatcccaaagaagtttcttagaatgcttctgtctagtttttatgggaagacatttcctttttcaccaaaggcgtcaaagcgctccaagtgtccacttccagatactacaaaaagagagtttcaaacctgctctaagaaagggaatgttcaactctgtgacttgaatgcasatatcacaaagcagtttctgagagtgcctctgtctagatttcatatgaaggtattcccgtatccatcgaaatcgctagagctatccaaatatcctcttgcagattctacaaaaagagtgtttccaaactgatgtatcaaaagacaggttgtactctgttagttgaggacgcacatcacgaagaagtttccgagaatgcctctgtctagattttacctgaagatattccggtttccagtgaaatccttaaagatctccagatatccactt

SEQ ID NO: 868544 - DNA, 581 bp, Homo sapiens
ctgctgtctactttttatacgtaatcccgtctccaacgaaatcctcagagctattctaatatccacttgcggattccacaaaaagagctttttaaaactgatctctaaatagaaaggttcaactctgttagttgagtacatatatcccaaagaagtttcttagaatgcttctgtctagtttttatgggaagacatttcctttttcaccaaaggcgtcaaagcgctccaagtgtccacttccagatactacaaaaagagagtttcaaacctgctctaagaaagggaatgttcaactctgtgacttgaatgcagatatcacaaagcagtttctgagagtgcctctgtctagatttcatatgaaggtattcccgtatccatcgaaatcgctagagctatccaaatatyctcttgcagattctacaaaaagagtgtttccaaactgatgtatcaaaagacaggttgtactctgttagttgaggacgcacatcacgaagaagtttccgagaatgcctctgtctagattttacctgaagatattccggtttccagtgaaatccttaaagatctccagatatccactt

SEQ ID NO: 868545 - DNA, 678 bp, Homo sapiens
atttgctccctgtggaatgaaacttgaccactgcgatgagagttgggaggaaaccgctttctcatcctttctgctctctttgtacagctttggggtgcagattttctaccaaattgtattagttttctagagccaccctaacaaaatrccacaaaatagggggcttagacaacagaaatttatttcttcccagtactggaggctggaagttcaagattaaggtgtcgacatggttggtctctcctgagggctctctccatggcatatggatggctgctttctcactgtgtcattgcatggtctttccttatgcactagcatctctggggtccctttttgcatacaatgtcttggaaggataccagacagattggattaggcctactaacagggccttgtttcaactgaattgactgtttaaaggctccatctccaaatgtaattacattcagagctactcagggttagggcttcccacttgtgaagttttgggggggggtcacaattcagcccataaaacacacctctggagaagaccccgatgggaatcaagcacacctgctgggagtgagctggctatgttttctaacaactcaagggtaaagccctgggtggcagggtagtgatgtatcacacgacattaccctgctccttacttactttatttccatccttttc

SEQ ID NO: 868546 - DNA, 628 bp, Homo sapiens
cagccctgaatattttttcataggaattctatcacatttgcaaaaatcaagaatcccaactgctcctgaaactatgttacagcacagaaaagcaaagaaaatcctccagttcttttctataaagaatgtgtcattaaaaccaaaaactaactgcatcaaaaaaagaagacagatcaatcttactaaagaatatcaaagagtgccaggtgcagtggcaggtacctgtygtcccagctactcaggaggctgatgtgagaggatcacttgagcccagagatagtgcactgtaaacgtacttgtgaatagccactgcactccagtctggaaaatgtaatgagacctcatatcttcaaaaagtatatacatatatcaaataaagcattagtaaacagaatctgtcagcataaacaaataaacaactaaaaagcaaaaaacaacagtggttttcctggcatgttgcatccaggaatgcaaagatggttcaacactatgaaatctcttaatagaacccatcattatagctaaggagggaaaaaaatgacatacttatcttccatttactaactatatctcaaattcaccactcatctatgtaaaaattattcaacaaaataagagctgacagtta

SEQ ID NO: 868547 - DNA, 572 bp, Homo sapiens
gctttaccctcctgagtagctgtgattacaggcgtgtgccaccacgtccagctaatttttgtatttttagtagagacttggtcaggctggtctcgaactcctgacctcatgatcctccagccttggcctcccaaagtgctgggattacaggcgtgaaccaccgtgcctggccttttttttttttttttttttgagatggagtcttgctctgtcatccaggctggagtgtaatggtaagatctcarctcactgcgacctctgcctcccaggttcaaatgattctcatgcctcagcctcctgagtagctggtactataggcatgcaccacaacactggactaatttttgtagttttagtggacggggtttcaccccattgtccaggctggtctcgaactcctgacctcaagtgatcctcccacctcaacatcccaaagtgctgggattacaggcatgagccactgcgcctgaccctgaaagatgattattaatatgtgtgcatgtcttctatagacagataaagcattggaaaatttactcattttcacttttcccaaaaagaataattttcac

SEQ ID NO: 868548 - DNA, 424 bp, Homo sapiens
gctcactgcgacctctgcctcccaggttcaaatgattctcatgcctcagcctcctgagtagctggtactataggcatgcaccacaacactggactaatttttgtagttttagtggacggggtttcaccccattgtccaggctggtctcgaactcctgacctcaagtgatcctcccacctcaacmtcccaaagtgctgggattacaggcatgagccactgcgcctgaccctgaaagatgattattaatatgtgtgcatgtcttctatagacagataaagcattggaaaatttactcattttcacttttcccaaaaagaataattttcactacataaatacaaatgatatatatttatacattttagaaaagcaaattgttttcaaccactttcaactaatttggaagtcttattttgctaatgag

SEQ ID NO: 868549 - DNA, 580 bp, Homo sapiens
attatttaggcatgcaacaatgctactagccagaatatccacatttcccaaaatctcagatataaatcaccttaatgatattaatatttttgtatttacttaacatgtggtaagtggttttctagaaataagctatagaatcagaaatatccgttcattagggaattgattcatgaagcactattttggtttaagttccattcargtctggtttataaaatttgccagggactgtgtgcatcttgaactctatgactatttagtctcttagttggcctggcttactcttctgctttcttttcaaggaatcttgcgaagctaaagtaaagccatttgagctatttgaatctttgtgaattagatgaaaaaaaaaaaaccttagaaaatatggaaatacaaaacatctttacttgagttataattaagggtgtatataaaatagttacaatttttttaaatgtgatttctaccctaacatggatacagtgaaagtgtaccagggaactcggccagtgttggaactggacctgttcctgtttgccaagaggggtttatttgccacagcgtacgtagcatttct

SEQ ID NO: 868550 - DNA, 662 bp, Homo sapiens
ttctagactcagacagcctgtgtttctatcccaactttgtcaataattagcttagtaatattggcaactgatttaacctactgcaaccataatttgcttagctgtaacttggggatttagctgctagaatgatggtgatagcattttagggtttagtacatagtaaggtgtaaataaaaattagtttttggtattagttttccttttattattatatttttatagctaccactactcagtcatcttaaagtgtgcttgggaaagtcctagtgtgtcacaaagctttgggggcttcctctgcctttgagtctgaaagctacagttcctgattaccctctaaaataacttyggctagaaaaactctgatgttggccgggcacggtggctcacgcctgtaatcccacactttgggaggccgaggtgggcagatcacctgaggttaggagttcaagaccagcctgaccaacatggagaaaccccgtccctactaaaaagatatatatatatatataaaattagctgggcagtggtggcaaatgcctgtaatcccagctactagggagactgaggcaggagaatcacttgaactcgggaggcagaggttgcagtgagccgagatagagccactgcactccagcctgagggacaagagtgaaactcca

SEQ ID NO: 868551 - DNA, 627 bp, Homo sapiens
attcccacaactccattaggcattgccctaattgcgactctttgcagtggccccactattatagcagccctttgcctgggttctgtgtccaaggctcaggagttccatccttcaaattccaggtgaaggtggccatagcccattgctcaggcacttttgtggtgatagcagagatggcaccttgaggtttacagtttgtgccctctggtgtcgtggtcaccccagcccaaactgcatctggtcccactggagtcacatmtgaggtggccaatgagtactataccagaatttggagagtgcagctttgaagtctatgcatgctccaggatcttgtagtctggctcatgctaagaggggcagccccagtgatctctgaaatttatttggaaatattcttccattgtcttggagaaaaagtcctggtttctgtttagatggcagatcaaactaatctctatcaaaaggtccctcagggacaaccttgttctctcccaaacaagctttctcttttctttcaatatagataactgaaaattttccctttttttaaggttctattcttttgattaaaaatcccaactttaaactgtctctcttttcacactttactataagtactcaagagaa

SEQ ID NO: 868552 - DNA, 583 bp, Homo sapiens
tgacttgcagacaccacagtgaccactgttcttaggcctacattccatggcctttccccacaaatttactgaactaacttaatcacagaagatgtcttctctgccagaaatatcacctgtcacctacttgtatgagtcacaaacacacataggaaatgtctttttcttgcactttgtagtgtgcaaaaccctatcatacatagtgtctcactcagtcattccatatctttaatattcatcttttctatttttataaacttttctattttagaatagttttagtkctatagaaaagttgtgaaggtagttcccacacacccatattcataatagtttcttttattattatcatcctaaaaatggttcgtttgccataattagtgaacaaatattgactattattaactaaagtttatattttacttatatgtctctagttttgcctgctgtcctttttttctcacagaatcccatccagaataacagtatatttagttatcaagcctctttaggctccttgtggctacgacagtttctcagactttctattgtgatgccctggacagttttgaagggtattggt

SEQ ID NO: 868553 - DNA, 631 bp, Homo sapiens
tttcaaataaacgggatatataatatgtagccatctgtgcttggcttctttcacttattttccaggttcacccttggagcatgtatcagtacttcattccttatatttagtggcgctaaataatgcgccactaaaatccattaaaaatggatatactggccrggtgtggtggctcacgcctgtaatcccagcactttgggaggccaaggcaggcagatcacgaggtcaggagatcgagaccttcctgggtaacatggtgaaaccctgtctctactaaaaatacaaaaaaattagccgggcgtggtggcaggcacctgtagtcccagctacttgggaggctgaggtgggaggattgctagagcctgggaggcagagcttgcaatgaacagagattgcgccactgcactccagcctgggcgacagagcaagactctgtctcaagaacaaaaaacaaaaaaaccaaacccaaaaaaaaaaggatataccacttttgttgatccatgtccttaaatttatacttaagtattttattctttttgatagtattataaatcaatgttttctttgtctatcctgcaaatttaactgaactcatttattagcttgacagtctgttgttgtatttcttaag

SEQ ID NO: 868554 - DNA, 574 bp, Homo sapiens
cttatttatttatttatttacttttccccagtattttatttattgggttgatggttcaggcttcagggaagtagagaaggtgtccttgggtatgaactggttgtggctaaagcaggtgggtcaatgtaatacccaatggtgggcagaggttcagcattgaacaggtttctgagggagctctcggtgagatgctgcaaagtcttctcagtgggaagagcgggagctacctcagctgccctgctaggccagcaggaaagstatccacttcccagacacactcctatctcagtgttctggctgttcaggtcagacaggcacctcttttcatttgtaagaatgttgatgttccaagtagggaagatttgtgactctgcctattgtgcaagctgagcctggaagatgctcttcctgtgaggatgcaatcaccctgaagtattccagagaggctggttataggtgtacccacaccacatacctgtgtgagaagcccccgctatgcctgcagtggtgaatgaggaagataagaagcccccttctccataacccttcatgaggaccagggctgccttactgt

SEQ ID NO: 868555 - DNA, 596 bp, Homo sapiens
ccctggcttcttgtactctcccagaatagaattcaagagagatgaccagacacagcaaagagaaagtgaaagtttatggagcttgtgcacacaggagccagcaccacggaagaaggactggctgctccctgagggtagtaggtgggcctttctgtatgggagcatttcgccagggcatgtttaagaggggtttctctagtgcttgcacaatggcttcccatgctttctctttttttttttttctttttttttgagcggagtcttgctctgctgcccaggctggagtgcagtggcccgatcttggctcactgcaagctctgcctcccaggttcacgccattctcctgcctcagcctcccaagtagctgggactacaagcrcccaccaccacacccggctaattttcttgtatgttttttagtagagacggggtttcaccatgttagccaggatggtctcgatcttctgacctcgtgatccgcccacctcggcctcccaaagtgctgggattacaggcgtgagccaccgcgccctgccctcatgctttttcatacattgcacgtaacattagcagtttaaatttccacacctgggtgt

SEQ ID NO: 868556 - DNA, 675 bp, Homo sapiens
aagtaaatagcccaggatcatatgattagcaaatgtgagaaccctattcagtctacttccaaatcccataaataccatcaggatgtactatttttcaaaaagtttttctagataaatatccaaaatcataaacccatataatctcacgtttaataaagttttaatggttatcgaatacaaccctccattcagttgattgaattctattctaacacagccacatccatcacttcttgtgttgcttattatttgtcgttttatmcttaggcagtttttctctggcctgcaatgttattgaatactactcaacaatgtgccagatattcatccaagtcctaaacatttaataataagacaatagatatggttactgttccagtggaacttaactttctaataaaagagacaaaggcaacaaggttttttgatagagattgggagctattttagattggaggccagaggtctctttaaggccatatacattgaaacagttatgtcaagaaaaagccaaccacatgaagataagggtaaaaaaacactcaacaaccccctaaatgttctaaggcatacaattaaattgacatgttttaggaaaagaaatatgcctgcatgtctggagcaacgtgatgaatgggaaatcatcaagaaattttggagatgcaaacaaggaag

SEQ ID NO: 868557 - DNA, 600 bp, Homo sapiens
tcacagtattataatcagagaaaaaataagcttaaaatgacatatctcattgtgttgcacatcacaacctgtcacatatgaacacatacacatacatccttgtctttagttaagaatggaattttccctggctaaacagtgcagcccataaatccactgtytctacttgaccaaataccctgggtgtattttccttgtcatctacctgtatagatgactaactctagtcagcagctgatacccatatgtctatgctttccaaggagagagctatggatacagacagtcctgcgttctgatttaagcttccctacttcccagctgtgtgacctggggcccaaaaatgcctgtttcctttccctactgtcaacatggtgtttgttctttttctaatttttacatccaaataggcaaaaactcaattctcagtactatttatatttgaatttacttaattgttttgtttattgtttgtttacctaatcattggtcatttctattttgtttgtggatatgtcacttctactcaaactttattggccaaagctagtccatggcaatacccaaatccaagggagctgggaagagcaagcctaccat

SEQ ID NO: 868558 - DNA, 600 bp, Homo sapiens
tcacagtattataatcagagaaaaaataagcttaaaatgacatatctcattgtgttgcacatcacaacctgtcacatatgaacacatacacatacatccttgtctttagttaagaatggaattttccctggctaaacagtgcagcccataaatccactgtctytacttgaccaaataccctgggtgtattttccttgtcatctacctgtatagatgactaactctagtcagcagctgatacccatatgtctatgctttccaaggagagagctatggatacagacagtcctgcgttctgatttaagcttccctacttcccagctgtgtgacctggggcccaaaaatgcctgtttcctttccctactgtcaacatggtgtttgttctttttctaatttttacatccaaataggcaaaaactcaattctcagtactatttatatttgaatttacttaattgttttgtttattgtttgtttacctaatcattggtcatttctattttgtttgtggatatgtcacttctactcaaactttattggccaaagctagtccatggcaatacccaaatccaagggagctgggaagagcaagcctaccat

SEQ ID NO: 868559 - DNA, 588 bp, Homo sapiens
gttgttggattggggaggcgataaggaaaataaggtgtttctttcatttgaacagcacaaagatctatataggcagtgaaattttattggaatatctgccttttactctgctttttatttttgtatggaatagagggaaagattgtggaagtaaaaccctccttcctctttgtactgttaactctgctatacaagagaaaaccttctttgtcagagtaaacagatatggcacattccactcccattgttcagagtgcctccttttgctatagtacttcaatgctaccctaaactgaactctataacactaaagaatatggttaagaaaaggaaaaatatacccagctaatgtggtaaaagaaatttcagaaggctctgttagatttatgtgaaaatgggaamaccaaataagatgacaccgtcaattcaaatgaagaaacgatacttacttttccattaatttcagtaccaagaagcccaaaattccacttagttttgcggtcatttctattgttttctttcttttttttttcttttcacagatggaattaaagtggtgacctataggtccagcttactttaagcaaa

SEQ ID NO: 868560 - DNA, 577 bp, Homo sapiens
gtgtggtctatgatggtcttttggggatggactgactgcaaagtagagctatggctaggaatcatgtccatgggtaatattatgcagccatttaaaaaatatatttacagaggcaaaagtctgagcttagaattcttaggatctttaatacatggagaaaatctggggaataataataacgaagcaattcaaagaacagtgtaggcatttctccctaaaaacctagagaaggaagtatgaaaaaccactaatgttgaccaaagtattcataggccttaaaaacatttattttaagcaacaagggaagaaaatattactgtttaatagagtgccacttcagaaggaaaggggcaaaatacttggttaacagcacatgacttgtactagcatccrtattcttggagataggctaaggaaggccaccattaacagccaaagttagtgtcatagccctagtcacagcagcctccacccccttcaccttctgcaggagcagaaggcaggaatccatgctcgggctatctaaggagccaaaccttcaaagtgtgttgggagactaaaatcccccagcctatac

SEQ ID NO: 868561 - DNA, 613 bp, Homo sapiens
  misc_feature 356: n = A,T,C or G
aaaaaccaaacaaacaagaaaattacttttgcaccaaccctttaatagtttattcccactaacatcccaattcctaaaatatttctggtcctttgggactgaaaattagttaatctgatgccaccaccttttcactgtcccgcactcacctcgcgtccttaccctgtgtagattctacagtccatcagtataaattcccttgcatacactttcaactctcttgcccttctctcctttcattgtattttcttgaaaaggacccagtcctggcttaattcaattccccacacatgatgtttgcacatgcctgcagcttaatatggcaggagaaaatacacatccaaaccaggcggtcntgatttaaactcgttatcactcacctccggtgagacttttgtgctattcagcaatcccactacatcttcctagtctatttactgccmcattctccttgtttagttcctctcccaccctcctaaatgactattttgtatcttttcctacaatatctccttttccaccctcatttcaagttcatgcccttacctccaaattcactaagaaaattaaagcaacctgaaaatgcccctcctcattcccatcaccacattca

SEQ ID NO: 868562 - DNA, 502 bp, Homo sapiens
acttgtacttctgtttctttgctggttgtcagccaggggccattctcaacattcagaggccacccaggcacctcactccatgatccctccacatgttttttgttttgttttgttttgttttgttttgttttgttttgagatagkctcactctgttgcccaggctggagtgcagtggctcaatctcggctcactgcaagctccgcctcccgggttcaggccattctcctgccccagcctctcgagtagctgggactacaggcacccgccaccatgcctggctaattttttgtatttttagtagagctggggtttcaccgtatcagccaggatggtcttgatctcctgacctcatgatctgcccgcctcccagagtgctgggattacaggcgtgagccaccgtactcggctgacccctctacatctttaaagccagctgtggagagtctccctcctgtcaaatccctctcatgcttcaaatccactttgccaaggagagcctag

SEQ ID NO: 868563 - DNA, 554 bp, Homo sapiens
accattctggggtctggaggacagttgccctctcctcacagctccactaggcagtgccccagtagggactctgtgggggctctggccccacatttccctttcacactgctccaatagagtttctccatgagcaccccacccctgcagaaaacttctgcctgggagtttccatgtatcttctgaaacctaggcagaggttctcaaaccctaattcttgacttatgtgtactcgcaggctcaacaccacgtggaagctgccaaggcttggggcttgcaccttctgaagccatggcccaagctctatgttggcccctttcagccatggctggaacagctgggacacagagcatcaagtccctaggctgcacacagcacrgggaccctgggcccagcccattaaaccattttctcctaagtctctgggcctgtgatgggaggggctgtcatgaagacctctgatatgccctggagacattttccctgttgttttggggattaacattctgttcctcattacttatgcaaatttctgctgccagcttgaatttcatgtc

SEQ ID NO: 868564 - DNA, 626 bp, Homo sapiens
aaccctgaatagaccaataatgacttccaaaattgaatgagtaataaagaaacctaccaaccaaaaagttgcaggccagatggattcacagccaaattctaccagacatacaaaaaagacttggtatcaatcctactaaaactatttcaaaaaatcargaagcgtctcctccctaactcattctagaaagccagcatcaccctgataccaaaatctgacagacacaatgaaaaaagaaaactacaggccaatattcgtgataaacatagacacaaaattcctcaacaaaacactagcaaaccaaatccaacagcacatgaaaaagtgaattcactatgatcaaatagtgcaaggatgcaaggttgcttcaacatatataaatcaataaatgtgattcactacataaacagaattaaaaacaaaaaccatatgatcacctcaatagactcagaaaaagcttttgataaaatccaacatcccttcataataaaaaccctcaagaaaataggtatcaaaggaacatgcctcaacataataagagtgatcgatgacaaacccacagtcaacatgacactaaagaggcaaaaagtagaagcaatctccttgagaactggaacaagacaagg

SEQ ID NO: 868565 - DNA, 532 bp, Homo sapiens
ccacagacagaattcaaggaaatacagccaagaaagcaaaagaatgcaaaggttaaaaaccaaagaatatgacgcagaaaagactattttctttcctttggttttaatattggaagagataatgtgaaaaaccagagacaccaacatgtatttaatttttattttttctctcttaattcacttgccagccaggggctaccatgattgctccagcaacagcagtagtcatgaaaactctcatggaaagttactccataggattgaagagcaagarggtaaatttccctcagcagtggggtcagtggtaagatggaggctggtttcaatgactaactcatctaaaatcctgcaagtttcaactgcagagatgtcaaagctgatgatgatacctgaaggatttctgctggatgtgcccatggggacaaagccagaagtttgactcagaagtttcagcaatgtgaagaaaggaaatcaggtatttatcaccagacattatgtcgtcactcaaaaggactctaatttttagaagatt

SEQ ID NO: 868566 - DNA, 575 bp, Homo sapiens
atgctgagagattttgtcactaccaggcctgccctaaaagagctcttgaaggaggcactaaacatggaaaggaaaaacttctaccagccactgcaaaaacatgccaaattataaagatcattgatgctaggatgaaattgcaacaattaacaagcaaawtaatcagctaacatcataatgacaggatcaaattcacacataacaatattaaccttaaatgtaaatgggctaaatgctccaattaaaagacacagactggcaaattggataaagagtcaagacccatcagtgtgctgtattcaggaaacccatctcatgtgcacagacacacgtaggctcaaaataaagggatgaaggaagatctaccaagcaaatggaaaacaaaaaaaggcagggattgcaatcctagtctctgataaaacagactttaaaccaacaaagatcaaaagagacaaagaaggccattacttaatggtaaagggatcaattcaacaagaggagctaactttcctaaatatatatgcacccaatacaggagcacccagattcataaagcaagtccttagagacctaca

SEQ ID NO: 868567 - DNA, 360 bp, Homo sapiens
ctcaagtgctcttcccacctcagcctcttgaatagctggaaccacaggtgtgtgccaccacacccagctaatttgttctgtttttggtagagatggggttttgccatgttgcccaggttggtctcaaactcctgagctcaagcartacacctaccttagcctcacaaaatattgggattacaggcataagccaccatgcttggcctgggattacatttcaacatgaaatttggaaaggacaaatatccaaatcatgttaataattgtctcatggggagttttttttttctctctctctctctctttctctttctctgtctcatgaagtagagccttagtctcttatccagtaagaattct

SEQ ID NO: 868568 - DNA, 699 bp, Homo sapiens
ccctttattctcatacctgagaatcagaggacgtttcctataatctcttcctcctggcactgttgattggtccagagacaggcacaatccctgaaatgatcaagaggagtccttagaacagttttagaaatggaaactcagaaatggaagtttctatcttttaatatgccaggaatgtacctataaagataggagtgctgggagcaattaggatcatgttttctaccctgagaatgagagaaggtaggagtcttcrctagtctgatatttaagtcaaactagtcataaaatatattcaaggtccagtaaatgtcatttaaatctaataagaaacataaaaaagaaatatgaaatgcaattaggtggtgaaaaaagttagctaaaccctcagatagcagaattcatttattgaaatacaatgaaaatattaagtaaaggggtgtcttgagccctgttgtcagtagcaggagaggtatcaatctgcatgacccttctttcaggtctctcatccttgccccaaatcacacaagtcaataagcacttttaacatactgagattgtaatactatttccttcttcagttaaaaaaattgactttttggggaggtttagaattaaatatagaaatagttaagtatataaaatctatagtattaaggctctggtattaaaataagagcaatatgttcatatttggtt

SEQ ID NO: 868569 - DNA, 600 bp, Homo sapiens
tcccacacagaatggtgggaaagtcttgcttcacaagttccatctgtgcttatcagtgtccgtaccacccaaatgtccttctgggactagtgttaagacctcaagattaagcctctgtccaagcggaatttctgagcaaatgtagattgtcacggaagtctgctgttacactgagacagaatagtcccgaaatgttaaatttacattatgctcaccctgtaattcattttagaccctcttagtcctgctcttgttaagggcaggactcactgtcacagactgatttggggtgttaattaatgcctcttctctcttcctcaagggacaccctgagttttcaaaggcctctgctagccacgctcagtgcaacctgcaggctccaccctccagccctgacacagawttagcccaaattagacatgatggagaagaaagggagggaggctgaaggagccctgtgggtcctgggctttgtgaatgcgtttgagcaagagcgttgctagagtgcttctgatctcagaaaataccagataggcaaatcaccagagatgaaaaaaacaaacacaacacaacaaaaaaaccttttttaaggtaaaacta

SEQ ID NO: 868570 - DNA, 602 bp, Homo sapiens
aaaagaattgggagattgatagtgtcagtttttccaaaccaatctgtagatcctatgtaattctaatcaaatccctagcagatttcctttttgttttatttattcatttaatttgtttgttttgtgtgtgcctaacttgactgatgtatttaagtttaataaggaattaaaataaaattaacattattaaaatgtctataytacccaaagtgacatatggattaaatgtaatttatattaaaataccaatggcattcttcacataaataaaaaaattctaaaattcatatggaattacaaaatgtacacaaattgtgaaagtaatcctgagccaaaagaagaagttggaggtatcaccctagccgacttgaaaatatactacaactctattagtaagcaatatagcatagtactggcattaaaaacagatacataaacaaatggaacagcacagagacccagaaataaatttgcacatttatagccagttgatttcagcaaatgtgccaaggacatacaacggggaaaggacaggtttttcaataattgacattgggaaaccagatactcacatgctgaagagtgaaattagatgtttatca

SEQ ID NO: 868571 - DNA, 688 bp, Homo sapiens
aacgtttcaatgaaaataaaattatcatcaggcttcactgattttgatgtggaatgcctgtctgaaaaatccatcacaccttttgaagagtgatgaaccttcttaagacttttcttcctccttcaacttttccaataaacttgcattatattgctttttatgtgcaaatatgtatttatttactttcaaattggtgtacattacctacaaaaattagttgtaatgatgtagttkataatctttgtctgtgaaaattgtttgggtgtctaggattgtcatagaatgcaacataatttttctcttcaaaaatattatttttttcatctaagggtttttcattttgtgtcagcatttctgggaatgaattaaagtcattcagtgaaagagagttatgaacatcaatcagcaataagtgtcctacaagtgaaaccagtatttaaatatgattattttgttcaatagggagtagtgaaccgtgtctgaatgcaaagatcaagggtcaggaactacagaaaaaagaggaaggaaaagaaaggaaaacaagtgaggtaagcagaatgatgccaaaattcccaggtacaaatatggaaaggtaagtggtgtgtgccccagcacagatccatgccagaagcatcataacctcaatgaaattcagaggctaagtgtttttaaccttttaatgtagtaa

SEQ ID NO: 868572 - DNA, 639 bp, Homo sapiens
tgtacatccactctaagcaccttggtggaagcttgtatcccaggatggctacagcagcttaggcatggcctcctcatgaaacaacacccagagtccatttctcaaatgtttttgttcatattatgttagactatttaacatttaccccgtaaaagtaaagatggggccaaccttccccaatacacaagtaagaacatgtaaacmtgaacacagccatggttgtgtcaccatgaaaaaaaaaaaaaggcgaagctttgttgacatagccagtgcctagaacaaacacgagataattggaaacaacatcaaagatcattttgtcctatcctggtattttaatttcagtaggtattttatatctgtgtatgttttgagttcttacttttataacatttctaagttttattaaagttaatgaattattgggatcaaatgacttgtatagcacagtgcttttctcaagaaaaagcttattgtgcagactagcagaattgaaacaggagcatattgatttttgcatttgtaacattaagttcatactcttcaaaacaaatagactattggctaaacatcctcattattttgataccattttgactaaggctgtatccttacatatgcttatgtatatacttacat

SEQ ID NO: 868573 - DNA, 600 bp, Homo sapiens
gaatataataaatttcatgtagattatttttggatttttatgcatataatcatatagtcttgttattttattttacttattcctttccctccttataacttttttcttaacttattagcactgaatatcaattcccatacaatattgtataataytgaagagaagttataaaagcttatacgtttgtctcattcgtaatctcatgtgtaaagctgtcaaaaacccctcacaaaatatgcaattgccgttttttgtgattatttttattaatttacaaaatgtttcttttattctaacttgctctgaggttttggcatagatgataaattttatcacatgaatgtgctgtatctaacagcatcataagatacaaggggaaatgtctctttttcataggctagaacattttttgttacaatggtgtttttgttcttaaatatggaataattaatcataagcctttgttttgtttttattgcattttgtttaaagaaagagttttagtataaagatttaacttctttcatataaataaataatatgcagattttctatgtccttatttttgttatattatggtttttccttattttaatattt

SEQ ID NO: 868574 - DNA, 600 bp, Homo sapiens
gaatataataaatttcatgtagattatttttggatttttatgcatataatcatatagtcttgttattttattttacttattcctttccctccttataacttttttcttaacttattagcactgaatatcaattcccatacaatattgtataatactgaagagaagttataaaagcttatacgtttgtctcattcgtaatctcatgtgtaaagctgtcaaaaacccctcacaaaatatgcaattgccgttttttgtgattatttttattaatttacaaaatgtttcttttattctaacttgctctgaggttttggcatagatgataaattttatcacatgaatgtgctgtatctaacagcatcataagatacaaggggaaatgtctctttttcataggctagaacattttttgtwacaatggtgtttttgttcttaaatatggaataattaatcataagcctttgttttgtttttattgcattttgtttaaagaaagagttttagtataaagatttaacttctttcatataaataaataatatgcagattttctatgtccttatttttgttatattatggtttttccttattttaatattt

SEQ ID NO: 868575 - DNA, 597 bp, Homo sapiens
ttaataaaataaattagaaaatatttgtttttgctcaaagtagcagatttaaattgaagaaaaatactaatttgtgtttatgtgaggattagtgcatagtgttttgtttttattgtattttgttgcatttatgttttattaaaacaaaacatacaagacatttacaccatttttaaaaatgtgtattattattggttattttgttttttttttctaaatagaagcattgacagtgttyaaattaattacacaggacctgccaataaatcattgttatcccaaagaacgtgtttgagagtacaggatcaggataaaaaggcagagaacaggccgtgaagggatgagttgagaagttgacgtagtctggataaaatagaacatagtacaattcagtgttagaagacaacctcttttctaacaggtgtggctgcaataactgcaccttcagcagcagttttttatcacctcagtataatgtttgccataaaaattttacattttttatatgtcttattaagtaaacttattaagatatgatgcctattaaaattgtatcattatcactttcctccattttgactgctatatacatactat

SEQ ID NO: 868576 - DNA, 597 bp, Homo sapiens
ttaataaaataaattagaaaatatttgtttttgctcaaagtagcagatttaaattgaagaaaaatactaatttgtgtttatgtgaggattagtgcatagtgttttgtttttattgtattttgttgcatttatgttttattaaaacaaaacatacaagacatttacaccatttttaaaaatgtgtattattattggttattttgttttttttttctaaatagaagcattgacagtgtttaaattaattacacaggacctgccaataaatcattgttatcccaaagaacgtgtttgagagtacaggatcaggataaaaaggcagagaacaggccgtgaakggatgagttgagaagttgacgtagtctggataaaatagaacatagtacaattcagtgttagaagacaacctcttttctaacaggtgtggctgcaataactgcaccttcagcagcagttttttatcacctcagtataatgtttgccataaaaattttacattttttatatgtcttattaagtaaacttattaagatatgatgcctattaaaattgtatcattatcactttcctccattttgactgctatatacatactat

SEQ ID NO: 868577 - DNA, 543 bp, Homo sapiens
cttaagtataaccatgtgctttatcctaagtgaaaacattaatattggatatttggtagatgaaaaatctggcttaatgttaagtttatattagtctgaagagaaaaataaagtgagggaaaaaagtgtatgtagttttsataatgtagtctacttctgtaaaatgataagtggaccaaataattttgaaggatacctacatcaaaaaaaatgctcacctttttggtagtattttccagatttaattcctacatacacaatttactctaatatttcaatgatctacaatctctccataaagcccaacagttccatccaattaagaattatacctatagagaagccataattatgtgtgaaactgtattttaaaatattttctgtagaaggcttatgatattacaaatatttattataaataatggctatcagaaggtgaaagcttttaaaaccacacttttctaattattttcctgccatggtttatgaattttgtgaaagtagaaaatatgataaaacttctggacctgtggtatgtagggg

SEQ ID NO: 868578 - DNA, 637 bp, Homo sapiens
aggggaaactggtagcgcctgggtgctgcggcaacctgaaggcagagaagcttcatgggctgtagagttcatgagtggaggagacacccatctgcagtacccggacactgggatgactgcacagcccaggagcacagaaagcagacacaggagtcctgcaagcaaaacacctttactcctgcagtgtccctccagcgccctctactgacaaagcatcatgccagctggcaaggaaaaacttttgaaagggtcagggtccatttttagggaggcaggcaaaatcatggatttagagatgaaagacgataaatggattactagcacattccctttgggaaacaagaatctcccagctatttgttgttgttgctaataatatagcttgaagtgggtttctctcatttccaatgcagagtcttgccaaatgcaatcaagaatggtctttgactggcttgcaaaatactgaatacagtaaaagccgttatgattattgcaatggtcyaggcatttagttatgatgcagttatctaactggttgctgtaaagaacaatctttggcaaatagtgaccacaaataaatatttttttaaataaattagaaataattgggctgggtgcagtggctcacgcctgtaat

SEQ ID NO: 868579 - DNA, 550 bp, Homo sapiens
tgggatgactgggtcaaatggtatttctagttctagatccctgaggaatcgccacaccaacttccacaatggttgaactagtttacagtccaaccaacagtgtaaaagtgttcctatttctccacatcctctccagcacstgttgtttcctgactttttaatgatagccattctaactggtgtgagatggtatctcattgtggttttgatttgcatttctctgatggtcagtgatgagcattttttcatgtgtcttttggctgcataaatgtcttcttttgagaagtgcctgttcatatcctttgcccaatttttgatggggttgtttgtttttttcttgtagatttgtttgagttcattatagattctggatattagccctttgtcagataagtagattgcaaaaattttctcccattctgtaggttgcctgttcactctgatggtagtttcttttgctgtgcagaagctctttagttgaattagatcccatttgtcaattttggcttttgttgccattgtttttggtgttttagacatgaagtccttg

SEQ ID NO: 868580 - DNA, 616 bp, Homo sapiens
ctaacttttgtaaacttctgcatgaatactgtcttcattgctactgtcctgaaactctgaaacatctctctgggacttttctcccttgtattcttttagagaatcaataagccaagcagcagcaaagcaagaaacaaactaaaccaaataccagggcytcagtggcctacacacacaggtacacatacaggtatagcacaggttatacacgacctggcagggccatgcactccggtgacagtaagaatgaaggcctctggagttgtgcccaaataagcaccaggcccttgcataaagttcagcaatgagaaagagcaaaactgtccattacagtataaacacattattggacctttaactttaccattaggattaactttagaacaaacatctccccttccccaacattcagatatttaatgtaaaaagggggaaaaaatgtgttccctgttaaagtgcccgttgggggcaaaataatttgtgggtagaattttccttaaccaggtgcctactacattctgcaactttgtgaagccagctttgtttgcatgcaggcattacttggtttatgtcacaccatgggctgagtgctttaggggatctaaccaaagggtaa

SEQ ID NO: 868581 - DNA, 712 bp, Homo sapiens
tccccaaagacaagacttcttgtcttgtcaatgtcatcactgcttacaataaccttcaaggccagttacttaatgactttatgttccagggggaaagggagactctgtgtaagtgcccttcccaggacaaatcagatacacaactagagtcagaactcctgaacttttggctctcagtttattcaactggaaaatagtgcatcatcctgcttttaattgcagccaggaccattcagaaggtaaaatgtagtgttgtggttgtgggcctgtttttcaactttaataaatgggcatgcttatcatatataggtggcccatcactggggtttggtctttcaayttagctacacgctgaagtttacatctggagagggtccagggcactgcatgagattacaataattagaggctttttgtctggaagctttaaaaatcagaaataatgtgaaaaatgcaaaaagtacacttcttgtcatatgtggagcagaataacctagttaatgaacatgcagcctgtcccactggcacgtaagcacctttggccatagtcccaacacatcttagtgactattcaaggtcaagttttgtcaacacttgggtggaaatcatccagagaaaaccctaggtgtggcaagagatatgttgatgattcattagttggcattctcctttctgagtcgatgattaaccccagcatgctattattggcatt

SEQ ID NO: 868582 - DNA, 627 bp, Homo sapiens
aaaggttatctcgaaatatctgatgcaaatctttgcaatcaccagcacctcctctatgttcctcccttgtacctggcatatttgtatttccagttaaaatgtacttgatacagctttctgagaccttcaagttgtgtcaaacttaaggcaagattgcaaagcatcaggtatgcaaatacttacattttggacttcaaagttgtgtagtcttaacatttatgtgagagaatcaacagcataataaaatttattgtcagttatgtttaaaacaaattattaatctacaaatrcaaatatgagttcgagctgtataaacaactttagatgacaatatataggcaataaattacagagtgaaatttatttcttaaaaatgcaaatgaacccatctggaaaatatgataaaatgctagtaattcagcaagagaaaggaatctggaaagcagtaatgatggagagttttctagatgaataatcgttggtactggataaaaaattaaaaataagcatttgactttgggggttggtaaagtacatcttttgagttgcctataacagtacaaatctgttaaagcccacaggtacagatcattctcttatgattacagaggtatagtttcaattttg

SEQ ID NO: 868583 - DNA, 672 bp, Homo sapiens
aaatacattttaattagccaaatcaaaaccaatagggagcaaatactacaaaagagccatgacaccttcttgagatgtgtgagaaactataaagcagtaagaacaaagtaaaaattaacatctcgagaaattatccttgctacccggkgctaaataaaagtgattttttttaagtcagctaattctagacacacaatagagaccaaaaagaaaaaaatcacttagaagtacatttcatttggctaaactgcttccccacttctgcctagctactttggaagcacaaaagttacccctttccatcctttgcccttccctggttggtacatctagttacgagatagacgggcaccacttaacaaatcactcccttttgactacaggttgtttctcttccatatttgatgaggctggcaacggctcccgaatcttggcctagcacatcacaaattgggaagctaaagctttagcttagaatgccaagtgacaaggacatggctgaagcaggaggggcaattctggaacaagtgcctctgggcaaacctcacaaccgaggtttttaaattagtggtcattttctagaactagagaacacattcaggacaaacagttctgatgggagagggaatggctatgagtacatagagatcaggctgtgaccgtgaccataac

SEQ ID NO: 868584 - DNA, 572 bp, Homo sapiens
taaatcaaagtttgacaaccatataacacaacccattttaatctgacttccatctctactacattaaatatctctaaactgcagttatcagtgtctataaatctgattgccatttttcagttcttattctactctctaatagatccaacatagctgaccttactacctctstaagtaaacctggcttcagtgacaccatactcactgctttattgtgaattctttagtatcttgcagacatcccctttacccaagcattaaatgtctcatggccaagtcatacactggtagattgttctattattaatcccaattcttcatactttaccagggacaatgcttccccttgactgtgaccttgattttgtcacttgatttggaaaattcaatgtcagaggacacaatatgagcagaagccttaaaagattactcctttacactcctgtgagaaacaatatgccttgggtagctgctgatccaaaataaaaaaaaaaaatgaagaaatgtgcagcaggcctaaactcaaacagcagcatgaagtgaagcccacctaatcccagcagagtgcagca

SEQ ID NO: 868585 - DNA, 640 bp, Homo sapiens
acaaatgttgtttacatcaaattggacagggatgcagacactgtccatggctcgttctatttttgttcaaatcatttgaagttgaagctgtggacggtttgttgtgtctatttcagattagtaatttacagagaaatcacagacttttgctacaaatcgtgtgcatcaagtgtctcwgataatcctcccatcagtgttctgtttctagaacttgtagaaccagtgttactgtttgtatcagggaagtggagaatctaagtgtaaaaaagaaataactaagactcctattccttggagggacccttctggtgccctttgggaataaagctgtagcactgcagggaagacagtgattcatgttcaaccccacaaacaagcatttttttcacaacatgtgtgtttgtttgtaatatgcaatatgaagtgtttttttttaaaggtattattattatttacaggtattctggtaaaatgatttttttaaatttctatttttgttagcagtgctgtttgttagtatttggttattgactagacctgtcccaccttttcacctatcaaggtgggtgtggtcatcagtttaattcaacatgcatcacttccttgaccttttacctttcccttattccaccccagaaag

SEQ ID NO: 868586 - DNA, 589 bp, Homo sapiens
tacaaataagaagacaatttttggccaggcatgatggctcatgcctgtaatcccagcactttgggaggccgaggtggatggatcacctgaggtcaggagttcaagaccagcctggccaacatggtgaaaccccaactctactaaaaatataaaaattagccaggtgtggtggtggactcctgtaataccagctactagggaggttgaggcagaattgcttgaacctggggacgcagaggttgagatgagccaagattctgggccactgcacttcagcctgggtaacaagaacagaactctgtcttgaaaaaaaaaaaaaaaamattttttttgaaatttatttagaaataatttcatttggtggtttagtgatgttgtgcacaactacttcatagaatcactcagctggaagaagaagaacagtcatcaaatttagccacttctaatgttacagattaagaaacacagatattattattgagaaatgaataatttgcccaaggtcaagtaatgattcctctttgttcttagtttattttgtccattataggactctaattgattcttagaggtagaagaaaaataatct

SEQ ID NO: 868587 - DNA, 589 bp, Homo sapiens
tacaaataagaagacaatttttggccaggcatgatggctcatgcctgtaatcccagcactttgggaggccgaggtggatggatcacctgaggtcaggagttcaagaccagcctggccaacatggtgaaaccccaactctactaaaaatataaaaattagccaggtgtggtggtggactcctgtaataccagctactagggaggttgaggcagaattgcttgaacctggggacgcagaggttgagatgagccaagattctgggccactgcacttcagcctgggtaacaagaacagaactctgtcttgaaaaaaaaaaaaaaaacawtttttttgaaatttatttagaaataatttcatttggtggtttagtgatgttgtgcacaactacttcatagaatcactcagctggaagaagaagaacagtcatcaaatttagccacttctaatgttacagattaagaaacacagatattattattgagaaatgaataatttgcccaaggtcaagtaatgattcctctttgttcttagtttattttgtccattataggactctaattgattcttagaggtagaagaaaaataatct

SEQ ID NO: 868588 - DNA, 592 bp, Homo sapiens
aactctctagcattcagtaagcattttaattaattttaacatttttattattttgtttttatgttaaatttcttcattgacttttaaaattacatctgtctacctttgtgatttaagtaaatatacaacatttccttttcttggtatcttaaacttcctctttgactacttttaaaattctacttgatgcatttaactttttttaaatgtcatttataaattaacttggaaaaaagactgaagtaggcgtgatttataatttgaccttccttactaataaatgtgttcactttatattttcttcaacacttgggaaataaagcagtatctcctctaagttaaatttytaccagaactagaagatttatttgatgactaataaataaaatacattatattattatattatgtaacatatcataatttcttatttatattaattataaaatatttatacgtgagtatataatatagagccaggcacagtagtggatacctatagtcctggctacgtggggaggctgaggtgggaggcttgtttgagtccaggaatttgaggctatagtgtgcaatgattgcacctatgaagagc

SEQ ID NO: 868589 - DNA, 682 bp, Homo sapiens
attgcatgatggagaaatgtttctgagaagtcttataaaggtcattttttaaatgccacaataccacatatctcttagatgtggatggtttttctcacaagcattacgtgtaaattaagtctgatactgaaaaagatcctataggaaacgtctattttattcatgtgttcctttatatttgaattatttttactcggtttctacgaaaattcattttacagattttctacttgcatagaatgtatggaaattaattatgaatacactatgtcttagaatagatttttaaawttttaataaaaggaataatttcaaagcttgtattgaaacaattgacattaacttttggggaaaaaagggtagaggactatgaatatctttctcactgaggataaagcttaatattttctgtaataaattagtaagtacttagtaattactttcacttaaagcaatacttatcacttcattctaatgatgttgtagctttattttagggatgacagtatgtactatcaccattttagtgagaaatccgcatatatttacatcaagtatttgttacagaagccaaataggagagaaaaaaagaaaaagcaagatgcattgaattgtttaaatgtgctcttcttagatttatttcaagtaaacctgttggcttttttggcttccactttgctaa

SEQ ID NO: 868590 - DNA, 682 bp, Homo sapiens
attgcatgatggagaaatgtttctgagaagtcttataaaggtcattttttaaatgccacaataccacatatctcttagatgtggatggtttttctcacaagcattacgtgtaaattaagtctgatactgaaaaagatcctataggaaacgtctattttattcatgtgttcctttatatttgaattatttttactcggtttctacgaaaattcattttacagattttctacttgcatagaatgtatggaaattaattatgaatacactatgtcttagaatagatttttaaaattttaataaaaggaataatttcaaagcttgtattgaaacaattgacattaacttttggggaaaaaagggtagaggactatgaatatctttctcwctgaggataaagcttaatattttctgtaataaattagtaagtacttagtaattactttcacttaaagcaatacttatcacttcattctaatgatgttgtagctttattttagggatgacagtatgtactatcaccattttagtgagaaatccgcatatatttacatcaagtatttgttacagaagccaaataggagagaaaaaaagaaaaagcaagatgcattgaattgtttaaatgtgctcttcttagatttatttcaagtaaacctgttggcttttttggcttccactttgctaa

SEQ ID NO: 868591 - DNA, 682 bp, Homo sapiens
attgcatgatggagaaatgtttctgagaagtcttataaaggtcattttttaaatgccacaataccacatatctcttagatgtggatggtttttctcacaagcattacgtgtaaattaagtctgatactgaaaaagatcctataggaaacgtctattttattcatgtgttcctttatatttgaattatttttactcggtttctacgaaaattcattttacagattttctacttgcatagaatgtatggaaattaattatgaatacactatgtcttagaatagatttttaaaattttaataaaaggaataatttcaaagcttgtattgaaacaattgacattaacttttggggaaaaaagggtagaggactatgaatatctttctcactgaggataaagcttaatattttctgtaataaattagtaagtacttagtaattactttcacttaaagcaatacttatcacttcattctaatgatgttgtagctttattttagggatgacagtatgtactatcaccattttagtgagaaatccrcatatatttacatcaagtatttgttacagaagccaaataggagagaaaaaaagaaaaagcaagatgcattgaattgtttaaatgtgctcttcttagatttatttcaagtaaacctgttggcttttttggcttccactttgctaa

SEQ ID NO: 868592 - DNA, 625 bp, Homo sapiens
ttttgttttacttataattgacacataataactatactatatgcctagtacagtgagctgtttcaatacatgcatatattgtatgacgattatatcagggtaattagcatatctatcactttaaacatttataatttatttgtggtgatggctttcaaaatcctctctcttagctatcttgaaatatgcaatacattactattatctatagttgccctattgtgcaacagaacaccataacttattctttctgtcaaactataacttcacatttgttgaccaacctctttccattcttccctcctccgtaccctcaccagcctctggtaaccactattctactctttacttctatgagatcaactttcctaaattctatgtatgaatgakaattggcactatttatctttttgtgcctggcttatttcacttaatataatgtcatccaggttcattcatgtaactgcaaattacaggatttcattctgttttatggctgaatagtattccaatgtacagttgccctttaaaccacatttgaactgtgcagagacagttatacaaggatcttcttttgcctctgccatcctgaaatcacagcaagaccaacccctcctcttatttc

SEQ ID NO: 868593 - DNA, 631 bp, Homo sapiens
tattgtctgcagacgagggatgactgtaaatatacaatcatgaatttagggacaaaatcaggttttatcggtttagtgatatcacatagtgtcatgggactgagtgagataacttgggaggaaagggagaacaggtgtggagccttagtgcatgccaagtcagatgtcatgaggaaaaggaaaacccagcaaagggacacattgcaagaagaacattaagaaagtgggagcctagaacagtgcttctcaaagtgtggtctgtggacttgtagcaggtatgggctgggagctctttagaaatgtaagcactcagaccacacccaaactcactaagtaagaaactctggaggtggatctcaggaatctgtgttttgttttttgagayggggtctctctctgtcacctgggctgaagtgcagtggcacgatcatagctcactgcagcctcaacttcccaggctcaagtgatcctcctacctcagcctcctaagtagctgggaccacaggcatgcgccaccatgcctggctaattttttatttgtagagacggggtctctctgtgttgctcaagcctctcctgggctcaagtgatcgtcctgcctcagcctcacaaatgctgggattacaggcgt

SEQ ID NO: 868594 - DNA, 459 bp, Homo sapiens
atcatcacttaccccacaaaaatacaaacagccatcagagaatactgtaaacacctctatacatatataacttagaaaatctagaagacattgataaattcctggacacatatcccctcccaacactgaatcaggaagaaattaaatccctgaatacaccaataatgagttctcaaactgagggagyaatatatagcctatctaccaaataaatgcccaggaccaggtggatttatagctgaattctaccagaggtgcaaagaagagctggcaccttttctactgaaactattccaaaaaattgaaaaggagggattcctccctaactcattctatgaggcaggccagcatcattctgataccaaaacctggcagagatacaacaaaaaaagaaaacttaatgccaatatcctttataaacatcaatggaaagatcctcaataaaatactggcaaacca

SEQ ID NO: 868595 - DNA, 627 bp, Homo sapiens
tatcggtgtatagcaatgcttgcggattttgcacattgattttgtgtcctgagactttgctgaagttgcttatgagcttaaggagtttttgggctgagatgatgaggctttctaagtatgcaatcctgtcatctgcagacaaagacaatttgacttcatctgttcctatttgaatatgctttatgtttttctcttgcctgattgccctggccagaactttcaatactgtgttaaataggagtggtgagatagggcatccttgtcttgtgccagttttccaagggaatgcttcccgcttttgcccattattatgatattggctgtgggtttgtcataaatagctcttattattttgaggyacattccttcagtacctagtttattgaatgtttttagcatgaagaggtgtggaattttattgaaagccttgtcttcatctattgtggtaatcatgttgtttttgtcattggttctgtttatgtgatggattatgtttatgatttgcatatgttgaaccagccttgcatcccagggatgaagccaacttgattgtggtggataacctttttaatatgctgctggatttggtttgccagtattttattaaggattttcacattgatgttc

SEQ ID NO: 868596 - DNA, 607 bp, Homo sapiens
accatctcaaaaataaataaaataaaataaaataaaaaaatcagacaaattaaaattcagaagcattctatgatatatatggcttgtattcttacaacatatcagaaagaacaagaaagtctgagaaggttccagattaaaaatacacytaaagctatttaaacagtgatgtgctacaggtgaattcagattggattttgaactaagtaaatattcataaaagatgttaggacaattcacaaaatgtaaatatggaatgggttagctaatagtagtatatattaatattaacttctctaattttgagaattttaccaggttgtataatagaatatcctttttctgaaataccagtgatacattcaggattaaagagataatatgtctgcaacttcctctcaaatgggaaagagaaaaacaaagaaaagagagcacacaaatggggcaaaataaaaataagttttgagtcttagaaaaggacatattagttccatttattatgcctacacaattttgtaaccttgaaataacattaaaatgaaattatttttaaaatattctgggaatgcttcttgaacaaagagaagttaacatactttccctcatt

SEQ ID NO: 868597 - DNA, 659 bp, Homo sapiens
tgctttaatgtaagaccaaggttattctgcatagcatgacagcatacccactaaaatattctcccttctctaattctcactaaaacaacaaaatattttatacaaattttaaatcttgacattttcaatattaaacatgtaaacttttattaaatctttatatactagtgccatagtatatagtatattttaataccttttttcttactatgcagatgtaatttttactacatattattattatgtagtatgggtgcaccttagtctgctagcctatgttctatcttctgggtcagcagcttacttttcacttgtattcattctatctaggatttatcataacaagtattgtttctgttatcagttaagatatcctcrgctctgaaaaagagaaactggctcaatgatgcctccaaatgttcatttctttttttttgtcatattgtttatttgtttgatatttgatcatttatttctgctttgttttgctgtgttttactcttgttttgtatgattttaagcttgctttcccttgtggttttagaatggcagtcagcagagtttggaactaaatgcttttgtttcaagtccagaagaaatgagagggaaaacaaatgagcaagacaaaaaaaaaaaaaagtaagcataaaagtcaccca

SEQ ID NO: 868598 - DNA, 623 bp, Homo sapiens
accaattgcttatcttaggtaaagttctatgtttttgcgggtgaaatctatatgctgccactagccactaaccgaggaagaaaccgcttttgtagtggtaactgcaacatataccaatgaggttagcccccaccatatccctaatcaagttcatttctctggggcacctgaatgacatactattgtcagctactccatattggatctttgctatgttttgttattgttgttgtggggtgtaggtgtgtgtttgtcatattcagtattgtaaatggagcaagagcatccaatacagtacccttatcaatcacactgttctcagaagtaaacatttcagaaatgttgccagtagccaagagagtaattttatagtcaaatattcttagaattgtgatttttwaaaagagaagaggaaaaaaatcaccttaaatttacatctcccttaccactcttgtctcaggatgctggtataagcaagaagtagagaaaatatatatattttttaaattagaaatttaaaaacaaagagactaataaaatttccggagtgctggatactagtaaactacttttgatatcagtggaagggccacagcagtaattcagccacaatatagacaggt

SEQ ID NO: 868599 - DNA, 623 bp, Homo sapiens
accaattgcttatcttaggtaaagttctatgtttttgcgggtgaaatctatatgctgccactagccactaaccgaggaagaaaccgcttttgtagtggtaactgcaacatataccaatgaggttagcccccaccatatccctaatcaagttcatttctctggggcacctgaatgacatactattgtcagctactccatattggatctttgctatgttttgttattgttgttgtggggtgtaggtgtgtgtttgtcatattcagtattgtaaatggagcaagagcatccaatacagtacccttatcaatcacactgttctcagaagtaaacatttcagaaatgttgccagtagccaagagagtaattttatagtcaaatattcttagaattgtgattttttaaaagagaagaggaaaaaartcaccttaaatttacatctcccttaccactcttgtctcaggatgctggtataagcaagaagtagagaaaatatatatattttttaaattagaaatttaaaaacaaagagactaataaaatttccggagtgctggatactagtaaactacttttgatatcagtggaagggccacagcagtaattcagccacaatatagacaggt

SEQ ID NO: 868600 - DNA, 659 bp, Homo sapiens
cctccagctttgttcttttggcttaggattatcttggctatatgggctcttttttgatttcatatgaaatttaaatttaaagtagttttttctaattctgtgaagaaagtcaatggtggcttgatgggaatagcattgaatctataaattactttgggcagtatggccattttcacaatagtgattcttcctatcagtgagcatgaaatatttttccatttgtttgtgtcctctcttatctccttgagcagaggtttggagttctccttgaacagacccttcacatgccttgtaagttgtattcctaggtattttgttctctttgtagcaattgtgaatgggagttcacgcatgatttcrctctctgattgtctgttattggtgtataggaatgcttgtgatttttgcacattgattttgtatctcgagactttgctgaagttgcttatcagcttaaggagattttgggctgagatgatggggttttctaaatatacaatcatgtcatctgcaaacagagacaatttgacttcctctcttcctatttgaatacgctttatttctttctcttgcctgattgccctggccagaacttccaatactatgttgaataagagtggtgaaagagggcatccttgtcttgtgctggttttcaaagg

SEQ ID NO: 868601 - DNA, 631 bp, Homo sapiens
caaaaatattcttcagaaatgaagaaataaagtcttttctagacaagtaaaaactgaagaaatccattaccactagagcaaccttataagaaaggcttatgggagtcttacatctggaagtaaaaggacaaaatttaacatcatgaaagcatatgaaagtatraaattaactgacagagcagatacacaaggatgagaaaggaatcaaaccctatcactacagaaaaccaccaaagataaacaataagagaggaagaaaagaacaaatgatacacaaaacaaccagaaaacaacaaaataacaggagtgtgctctcacctatcaatagtaatcctgaatataaatggttggtttcaattctccaataaaagatatagagttgctgaatagatttttttaaaaaaagaaacaagacccagttatatgcatataagaaactcatttcacctataaagaacacacagactgaacatgaagggatgaacaagaatattctacacaaagagaaaccaaaactaaatgggagtagctatatttatattagataaaatgaatttttaagtcaaaaactataaaaagagaaaaaaagtcattatataatgataaagagatcaattcagccagaaaatat

SEQ ID NO: 868602 - DNA, 625 bp, Homo sapiens
gggggaaacaaataaaataatcatacaattgaaccagcttattgccaggagaacttacagattgtgacgcgaaaagcatgaagcaaggtggaacctagaagtctctctaagtagaggaactgggcctggaaatcaaagagaccaagacgcctagagtttgcagggcagaatagcaaagaggtgaaagctgcaaggacaaagaattctggagatgttcaggcttactccttgagtgtgcagctgagtaccgatcaacccatgcatatgagtaaactactagagaaccaactgaaaggattataggaaataatcctaactctcacatagttttagaacagctcctcctgttcacaatggtcagagtagaaagccttataattaacaggatatcaggtagaaaacttagaaggcttttgcctcagtaggaggtaaaactagccctgaactaaatgctgctctggtcctacctgaraaagcagaaagacagacataaaagggtcaaactctttccaagtgatttaactgtatcccttaacaagctcaagagtacgaaaatatctggaccaaaaagggtaatattacaatgtctggcctctaatcaaaaattactagacatgtaaagaaa

SEQ ID NO: 868603 - DNA, 565 bp, Homo sapiens
tatcatcagagtgaacaggcaacctaaagaatgggagaaattttttgtaatctatccatctgacagagggctaataaccagaatctacaaagaacttaaacaaatttacaagaaaggaacaaccccatcaaaaagtaggtgaaggatatgaatagacacttctcaaaagaagacatttatgcagccagcagacacatgaaaaaatgctcatcatcactggtcattatagaaatgcaaatcaaaaccacaatgagatrccatctcacaccagttagaatggcgattattaaaaagtcaggaaacaacagatgctggagaggatgtggagaaataggaatgcttttacactgttgatgggagtgtaaattagttcaatgattgtggaagacagtgtggcgattcctcaaggatctagaaccagaaataccatttgacccagcaatctcattactgggtatatacccaaaggattataaatcattgtactataaagacacatgcactatgtttattgcagcactattcacaatagcaaagacttggaaccaacctaaatgttcatcaa

SEQ ID NO: 868604 - DNA, 534 bp, Homo sapiens
aaaagaatcaaaaagttttaaaattaaaaagtttataaagaaaaaagttacggtaagctaagtttaatttattatttaaggggaaaaaaataggatgggtgcagtggctcacacttctaagtccacactttgggaggcttaaaaaagaggatttcttgagtccaggagttcgtgaccagccttggcaacaaggtgaaacctcatctctaccgataatgcaagacattagctgagtgtgttggcacaggcctgtagtcccagctacttgggagactgaggtgggaggactgcttatggccaggaggtgaagggcaaaggttgcagtgaactgtgattgtractccagcctggatgacagagcaggactctgtctccaaaaataaaaatggaaagaaaaaagaaaaaaaattgttttaaaatacatttagtgtaacctaagtatacaatgtttataaggcctacagtagtgtacaataatttcctaggccttcacattcactcaccactcactcaccgactcacccagagcaactt

SEQ ID NO: 868605 - DNA, 642 bp, Homo sapiens
ctggtaaggccaccctgctggtgaggccactctgcagggaggaaactggggctaaagagcctctttgcccaaattagttttggtgtggatggtatggggcagggcaaaaaacactcacgctggcctctgcctgctaatgtgaacaggggaacccagcaggaaacagagcaacctgatctaaccccaggtgaggtgtgtcacatacctggcagtggcagcagctgcataatgaaagtgagacttagggccacctggatacaggcgctcctggtgctcactgatgcatcaggagccatgcagagaagcccaggacatgggaaagaacccagatagtctgtctcttccaggcacacaccagctgaggagsccaggtggctgcatgagctccagtccaccccagcccttgactgcaagccacttcctatctctgggcctcctctgtgaaatgggggtaggctgcttctcacaggattgcagcaatgtttacacggggcagtgcctgcagagggcccatcacagggcctggcacacagggacaaattcctgaatgcttagaaacagaaatgtttggaagcaatgcttctaaaatgaaatgcccagatgtctaatggcatccaccactctgccccagccctgttccct

SEQ ID NO: 868606 - DNA, 621 bp, Homo sapiens
aatccaatgatgtatatatccaaccttgtcagggaatcaagagtcccaccaactgaattttccagaaaaatggaagcttaatcaatttttgaccaacttttatttttatgaaagaaatttttctatcctttctacctcataaaataataattttaaaatcttatttgtttcctgatgaatcaaggttgtcattaagtacagtaaagttgggctgttacaaaaatagtagctgagatgctgttaggtggtggtgatttgcttctctgtttaaatttttcagacagatttttaaaagagtttttctaggcccctttttgccatctttatcttctcttgctgttgtcagtgagtctacctctagctctatgaactcctygcccatctctttcagtctgctggttttgatcagatatggattgacttaaaatacatgcattcatgaaacctatgacttctagttttcaaacatttgtaaaccgactgatatgtctgctctctggagtctcccctacagaagtcactacttcttcattgtacccctcttccttttagttcagctcagaagccatattctccaggttaccagctgtcttctaaatgggttcacttgtttttgacttc

SEQ ID NO: 868607 - DNA, 610 bp, Homo sapiens
gtgaaaaagtgtagttccctcttccccagtttagcattccaaagacaaacacttggaactcttagtggtttgtgttagtatttaccttcctgtttgaaaatgttatactactttttgttgacttatcaatttcagaaacagtttctcgaataccttttatggtagacaggatttactttacttaaactctccacctcccacatttttcttcccccayccctcccaaaatagatttatattcacacaacttttagttagaacaaactttttgtgaaatagatagacataaatgtagttcactgatgtaccacatggttaactatcattatttcctttttactagaatgttattttttctggggttggtattgcctgattttcaaatttgcttagtttttaatgtacctgtcacaatgactatccaaaggcttaaatgctgaaaaacatcagataatcgtatcaattctcttaaaaaagtttttaaaaatattttgtcatcctttagggacatttcttccacagtccttcatcttctgccatttgtactgttgccctccaggcctgttctatggttcagcagtcattctgaaactccctttagtttttagtc

SEQ ID NO: 868608 - DNA, 555 bp, Homo sapiens
ctataaagctgcctgctttactgtaacatttagggattgctttaggagtaatgtagtattttacaagtaagattgaacacttgggttatgctttgaaatgcctctgtatatgaatcagggtcatcagaggacttgcttgtttcctgctatttgtgtaaggccctgaaatgagaagaaaacttgaactctagtagcaccacatctatcgattatttcctgcaggggcagcagtgaagttggaagtttccttggtggcacaagaagaaaagctgatgaaatggctgttggagggcctgcataagggtggcaggtagggcatttagaagtcacatttgagggttcctgaggggtttgtctctgactttaataaattattgttttaaacttgcctgatrtgactgccaagagggcagtcaattttacaatgtttatgacgatctgggttgtctccaaaatcaaagtaagcttatacatagaaaatttcaaagtgttttttttcccatctcaagaaaagatctagttgttgaacagtattaaaatgaacacttccctcag

SEQ ID NO: 868609 - DNA, 679 bp, Homo sapiens
gaataagagcaagagagagaaatgggggaaggtggcacttttaaacaaccaggtctcatgagaacccactcactatcacaagaacagcacggaggagaaaattcacccccatgatccaatcacctcccaccaggccccacctccaatactgaggattacaatcctacatgagatttgggtggggacacagattcaaaccatatcaactagtttaagtagatacttcccataattttgtattgtgtgtgtggtgtgtctatatttttattgtatttgttaaacattttattgaagtataactacatgtaccaaagtgtacaaatctaaatgtatatagcttgatgaatttccacaaagtaaacgtactttgtaacctgaacctaaactaagaaacagaacattaccagtcactcagaagcctccctcctatcctctcaagggtaaccactgtcctgrtttttaacccatagaatgatttgcctgtttttaaactttatataaatggaatcacatagtatgtaatctttcatgtctatcttcctttgcccaacattatttttgtacagttcatctacatcattgtgtttagttgtgatttgttaattctcatttctgcatagtattgtattatgtgaatattctataatttatttattctaatgagtacttagatagtttc

SEQ ID NO: 868610 - DNA, 530 bp, Homo sapiens
gagtatttgaattctttgctgtaagggttgcaacaaaagtgtttaaaaagaccaattatattaaaaagattaggtgaagcattactctgacttggaatgattctagattagacctgtcttctctaccacagggttatataattgaacatgtatacctagattcagggacctgactttctatacttacygttgtcagacatttgggtgaaatcttcggaaagtgtgtgtctgtgtttatgtgtgtatgtgcagtacatatatatctatatatgtagatagatggatagataatatgactcagaaacagataaatagtttagtgaaactatttagtgaataaagtacaaaacagaccgatgtttatggaatgtgataaccagagaggtattttaaattagtgggaaaagtttgaattggtgagaaattgggacattttcctttggaaaaaaattagatatatatctatatataattctaaatggattaatgttctaaatgttaatatttgaaatcattagaaaaaaatgtag

SEQ ID NO: 868611 - DNA, 589 bp, Homo sapiens
tggaagatgagatgaagaaccagagcatttaaagagaataactgcaaatccctagagccttatcgtgcaggtgaaaaacagttacatcctctctttgaacacataatcaaaaacacatagtgaagaaaggtcagctagaaatggatacctttatgtcagtctgggaggtatttgatctgtctccaaacccaatctaaactcaaatttctgagctatctcttgccttcacagaaggagaagcttcctcagacacaagaatcaatggattaagtggcttgtctgcaaatgttgaaggtctttgtagagaggactctgtcttattttgttcttcaacctcttagcctactacagagccacacacatcatgctatcaacacatctatgctgaattaaccaagtttagagaactgaattgatgsagtcacatagatgtctggatggtaaaacaattgccactctcttctttatctcttaagaccatttctcttcctttctttttctgcggttattttttttcttgctgtagattacaaagaactagggatgagaatacattgttttccttttggtttgtaagcacatacattat

SEQ ID NO: 868612 - DNA, 741 bp, Homo sapiens
aatgataaatacataaataagtaaaagattttggggacctccacctagatttcagtagttgtatggaaatgcctggatgcccaagcagaagtttgcagcaggggtggtgccctcatagagaacctctgctagggcagtaaagaagagaaatgtggagktagagaccccacacagagtccctactggggaaccacatattggagctgtgagaagagggccaccatcctccagaccccaggatggtagatccaccaacagctttccccatgcacagggaaaagccacagacactgattgccagaccatgaaagcagtcaggaggaaggctgtatcctgaaaagccacaggggtagagctgcccaacaccatgggagcccacttcttgcatcagcatgacctggatgtgagacatggtcaaaggagaccattttggacctttaagatttgactgccccactggatttcaaacttgcatgaggcttgtagtccctttgtttaagccaatttgtcccatttggaatggctacatttacccaaatgcctgtacccccattaaatctgggaaataactaacttgctttttattttataggctcataggtggaaagaacttgccttgtcttggatgagactttggactgtggacttttaagttaatgctgtaatgaattaagactttggagaactgctgggaaggcatgattgcttttaaaatatgtaaggacatgagatttaggaggg

SEQ ID NO: 868613 - DNA, 612 bp, Homo sapiens
ataaacacgggagtgtaggtatctttaaaagaaggtggtgatttcatctcttctgtgtatgtatccaaaatagggtcactgttgggttataaggtggttaggttttgaatttctttaggaacctccatactgttttccataatgggtgcaccaatcatcattcccaccaacaatgtacaagtgttttattttcttcacaccctcatcaatatttatctcttgtcttttttataatagccatcctaaagactgtaaggcrttttatttctaatctcagatttcactgtagaaacagtgatgacacagtctccagcttccctgtctttgtctctggagaaaaaagccaccctgacttgcagggccagtcagtgttagcagctactaagcctggtaccagaagaaacctgagcgggctcccaggctcctcatctatggtacagccctgatttgtgatagtgggtcaggacagggcttactctcaccatcggcaggctggagcctgaagatttgcacttcatcactgttatcagcatagtagttggtgtcccatactgattcaacatgcaacaaaaacctccaggagacctaaggtgtttatttgattataccacc

SEQ ID NO: 868614 - DNA, 612 bp, Homo sapiens
ataaacacgggagtgtaggtatctttaaaagaaggtggtgatttcatctcttctgtgtatgtatccaaaatagggtcactgttgggttataaggtggttaggttttgaatttctttaggaacctccatactgttttccataatgggtgcaccaatcatcattcccaccaacaatgtacaagtgttttattttcttcacaccctcatcaatatttatctcttgtcttttttataatagccatcctaaagactgtaaggcattttatttctaatctcagatttcactgtagaaacagtgatgacacagtctccagcttccctgtctttgtctctggagaaaaaagccaccctgacttgcagggccagtcagtgttagcagctactaagcctggtaccagaagaaacctgagcgggytcccaggctcctcatctatggtacagccctgatttgtgatagtgggtcaggacagggcttactctcaccatcggcaggctggagcctgaagatttgcacttcatcactgttatcagcatagtagttggtgtcccatactgattcaacatgcaacaaaaacctccaggagacctaaggtgtttatttgattataccacc

SEQ ID NO: 868615 - DNA, 552 bp, Homo sapiens
ggaattattcaagatcatccagctagttgaagagcatcacttagaattctggtgacccctttttaggacaaagctgttcctaaataattctaaagatgtgccagtaacttgctaagaacattgaagtacaagtttttgtgtagatatatgttttcctttttcttgggtccacacttaagagcttcctggatcatrtggtaactctatgtttaaccacttgaattgcagactgttttccaaacctgctgcaccatttttcatttccaccagcagtgcaaagattctattttattgccaacctatgcaatgagaagaaaaacctctgagtgaggaggtatttagaagaactagaatatatccagatgtaagaaaataaatccaaggtagcttagagatgcccattaaatagtttttaaatttttcctagtcttcccaaacctggttacatgtttttactacctggtggatggcactcactcgcaatggtgtttagagttgggaatggactcaggaagtggaaaagttccttcagacaaggaagaactggttcaa

SEQ ID NO: 868616 - DNA, 552 bp, Homo sapiens
ggaattattcaagatcatccagctagttgaagagcatcacttagaattctggtgacccctttttaggacaaagctgttcctaaataattctaaagatgtgccagtaacttgctaagaacattgaagtacaagtttttgtgtagatatatgttttcctttttcttgggtccacacttaagagcttcctggatcatgtggtaactctatgtttaaccacttgaattgcagactgttttccaaacctgctgcaccatttttcatttccaccagcagtgcaaagattctattttattgccaacctatgcaatgagaagaaaaacctctgagtgaggaggyatttagaagaactagaatatatccagatgtaagaaaataaatccaaggtagcttagagatgcccattaaatagtttttaaatttttcctagtcttcccaaacctggttacatgtttttactacctggtggatggcactcactcgcaatggtgtttagagttgggaatggactcaggaagtggaaaagttccttcagacaaggaagaactggttcaa

SEQ ID NO: 868617 - DNA, 509 bp, Homo sapiens
ataaaattctccacattcttcttttactttgcttccctcaactctaaatccccaaattctgttagtatggtaactgacctcataatcttgatccattttgtatggaacattcccaggttaggttcataccaagaaaatgactctgtattcaagccacttgaattaatagctgtatcagtgattattatttatgatgaccatggtcttataaggttcatataacatgcttgtggtcacttgcattagtcatcaycagaacaagaccagctgcagctgaggactgaggaaatgttgtggtgatttggagtattattaagcgaggggttccacatagtccctctacagactgaagacactggggaaggagcatccgtgtgtgtgtgacagctgtgaaataatctgttctggaacaagaagctccaaaatatcacagcctgggatgactttgtgtgctttccatagagcatttggctacatatcaaagccgttattagtgggctgttccctgg

SEQ ID NO: 868618 - DNA, 509 bp, Homo sapiens
ataaaattctccacattcttcttttactttgcttccctcaactctaaatccccaaattctgttagtatggtaactgacctcataatcttgatccattttgtatggaacattcccaggttaggttcataccaagaaaatgactctgtattcaagccacttgaattaatagctgtatcagtgattattatttatgatgaccatggtcttataaggttcatataacatgcttgtggtcacttgcattagtcatcatcagaacaagaccagctgcagctgaggactgaggaaatgttgtggtgatttggagtattattaagygaggggttccacatagtccctctacagactgaagacactggggaaggagcatccgtgtgtgtgtgacagctgtgaaataatctgttctggaacaagaagctccaaaatatcacagcctgggatgactttgtgtgctttccatagagcatttggctacatatcaaagccgttattagtgggctgttccctgg

SEQ ID NO: 868619 - DNA, 527 bp, Homo sapiens
agtaattgaatacttataaaatgtttataactttcaaatgtattaaacactaaataattactaataatcattataattttgctacatctcttaattatgtagatccagtgtttccccaaatactgttttctttgaygttatttacaaaattatgatttttcccctaaaactcccactatgttaaatagcagataaatttatttcatgccaagctgctaaaaacagatataaaaagctggacaaaatataaaaagctgatactctaaggtaccatgtaccttcgaataagtgctatgtaataagcatctgactccatttttgatgtttgatcagtgacagctttcaatcaccacctcccactttcccttccaccacatatttgtgcaactgcctgcaggacagtcaaacctcatagatcctcagcaatgcaagatagcatatctccagtccaactataaaaactcagccctctgtgtaactcgagccagcttataccagcttgtgcatatcctgctttcccccagatt

SEQ ID NO: 868620 - DNA, 564 bp, Homo sapiens
tctgagggttctgtcccatgggtgcctcagttgtacgtcaggcaaaacctgttcacagccctgtcagctgcaacagccttggcatggcataagccataggaaaccagaggtgatcccagtgcctgcacaggtaatagactgccctgagggagagcttaagaaaatcctattccaatcttccctgccttgcctgcattgggaaataagacttaaagaggtaaataaccagacaagtaacccagatttgttgcaacacttgaatatatcttgaggtttagcartttaaagtctatatttaggaggataatatgtggtaatatcccaaaattgaacttttcaactttcctaacttcttatttttctctttcaccacctatcttcccaccacatattgatggtggaaagagccttccgcacaagctgtcatcatgaggagctggatgagggcaattagtgaaaatcttggatttcagcctcagaatggacttttgtaaattggtgagagatagaaaatatgaatgctaaaattattttattcgcttcaattgtgtcttgctgacagaa

SEQ ID NO: 868621 - DNA, 565 bp, Homo sapiens
gctactgagctaggctgggatgtcctgggccaagctgaaaatgtgaaaaataagagtatgaatatttattaagttttatctggatctaagatacttatccatgaaccagtcctgcagctgtgcccagcctgctccattccctgctgatttgcatgttcccagagcacaaccccctgttctgaagacttcttaataggctggtcacaccctgtgcaggagtcagtctcagtcaggacacagcatggacatgagggtccccactcagctccaggggctcctgctgctccggctcccaggtamggatggagaacactaggaatttactcagccaatgtgctcagtacagcctggcctttcagggaaatcatcttacaaatagttgtgtggattatttgtttttatgtcccaggagtcagatgtgatttccagatgactcagtctccatcctccctgactgcatctgtaggagagagagtcaccatcacttgctgggcgagtcagggcatttgcaattatttaagctagtatcagtagaaactagagaatcctcctaagctcctgatct

SEQ ID NO: 868622 - DNA, 580 bp, Homo sapiens
cacaagattcatcatgttttcatatttgtgtttcaatcatctgttaaagacaatcctggctcccattatgtagagaatattcacttacttggtcaattctagaatatgcataaggcatattttacagatttgtagtgcattccctgaaaatgtgaaatctagtgattagagttacatatatatttttattttattttattttattttattttattttattttattttattattttattttatttattttattttactttactttgacagagtctcactctgttgcccaggctggagtgcagtggygcgatctcggctcactgcagcctccgcctcccaggttcaggcgattttcctatctcagccccctgagtagctgggactacaggtgtgcgtcaccaagcctggctaattttttgtatttttagtagagatggggtttcaccatgttggccaggctggtctcaaactcctgacctcaggtgatctgcccacctcaacctcccaaagtgctggcattacagtcatgagccaccgtccccagccaagagttaatatttgttaagtgcacgatttctctt

SEQ ID NO: 868623 - DNA, 678 bp, Homo sapiens
atacatatattacattgatttataatatagatgcaaaatttaagaagatacttactttcagaataaaaaagtgaataaaatgtcacacatcaggattgatatgcccaccaaggctttgacttgtcttggtgcatgattgaattaggwtctaatagaaggaggcagagaagaaggttagaaatggactgttattccttaggttctcttaagggggtggaggccaaataattcacaggttgtcagaaaataccccagggctctttctcagttgcctggtaacaaactggctgaagtttggtgcttcttttccctggaaagaggtgctatgattttccatagcttccaggttgccaggagctgaatgcctggcatatccaggccttcctcaaaaagctggttcctgagctcagagtgcttggggcctgcacataatattccttccctgtgctgatggacagctctaggctaggagaagccaggggagaaggagaggctggtgtggggctagagaagtgaacatttctctctgcttattgttttgtatttttagtatattttccattcaatgtgttatacatatcgtatgttcacaattatgtttattttatgtaaatatcatcctgtgaaatatgtcattatgctcactgtttttctactgagatgtatgagttaaaatat

SEQ ID NO: 868624 - DNA, 574 bp, Homo sapiens
gtgctattgctggttttaaatgttcatgctcaatttatcaaatttgaaatcataccttataccaacagttatatctatttctatataaatatacatattatgtagatgtataatatagatacatattatatacagatacatcaataatttatatccataatattatatctatttaatttaaaagtttacayagtatgtccatatattcattatttttgtagcatgtgttccttttatttctaagcagaacagaggctcgctgagtaaagtctgtggacatttgctgactctccctctttggctccaacagggtcctggtgtctcaggaccagtgaggacagagctgaggacagccagccccaggagcccaggcccagccctaaggctctggtctcagagactttcatcctcacctcgggctctgggcttggtgtggcacccgtgggtgtgtgagcagtttccttctctgaagccccattccatgcagccccgtggatagggcctgtggttccccccaggtcctcagccccatggttcaggagagaagctgctactgccacagaccagggccagt

SEQ ID NO: 868625 - DNA, 574 bp, Homo sapiens
gtgctattgctggttttaaatgttcatgctcaatttatcaaatttgaaatcataccttataccaacagttatatctatttctatataaatatacatattatgtagatgtataatatagatacatattatatacagatacatcaataatttatatccataatattatatctatttaatttaaaagtttacatagtatgtccatatattcattatttttgtagcatgtgttccttttatttctaagcagaacagaggctcgctgagtaaagtctgtggacatttgytgactctccctctttggctccaacagggtcctggtgtctcaggaccagtgaggacagagctgaggacagccagccccaggagcccaggcccagccctaaggctctggtctcagagactttcatcctcacctcgggctctgggcttggtgtggcacccgtgggtgtgtgagcagtttccttctctgaagccccattccatgcagccccgtggatagggcctgtggttccccccaggtcctcagccccatggttcaggagagaagctgctactgccacagaccagggccagt

SEQ ID NO: 868626 - DNA, 574 bp, Homo sapiens
gtgctattgctggttttaaatgttcatgctcaatttatcaaatttgaaatcataccttataccaacagttatatctatttctatataaatatacatattatgtagatgtataatatagatacatattatatacagatacatcaataatttatatccataatattatatctatttaatttaaaagtttacatagtatgtccatatattcattatttttgtagcatgtgttccttttatttctaagcagaacagaggctcgctgagtaaagtctgtggacatttgctgactctccctctttggctccaacagggtcctggtgtctcaggaccagtgaggacagagctgaggacagccagccccaggagcccaggcccagccctaaggctctggtctcagagactttcatcctcacctcgggcwctgggcttggtgtggcacccgtgggtgtgtgagcagtttccttctctgaagccccattccatgcagccccgtggatagggcctgtggttccccccaggtcctcagccccatggttcaggagagaagctgctactgccacagaccagggccagt

SEQ ID NO: 868627 - DNA, 636 bp, Homo sapiens
attcatatggaagtattaaaatatagtaagactttttgaagctcagaccacttttcaattcctagctatacatttgaaacacatgtaatccacagctaatctgggaatgaactcatagaccagagtatgattagtacattgtagcagttcaatcactcgggaaccttctctgtgtcaggaactcttatattttaaataaaacagtttctacctttgaaggtctcaaattttgtggaagatgaggagagagacacataaagtactttcaaaaatatagtaaagggctgggtgcggtggtttacacctgtaatcccagcactttgggaggccaaggcgggcagatcgcctgaggtcagaagttcaaaaccagcctggccaacatggtgaaactctgtgtctactaaaaatacaaaaattagctgggcctggtggcgggtgcctgtaatcccagctactcgggaggctgaggcaggagagtygcttgaacctgggaggtggaggttgcagtgagccaagattgcaccactgcactccagcctgggcaacagagcgagcctctgtctcaaaaataaaataaaataaaatatggaaaagggtcaagaccaaggtatgtaggctgggcacagtggctcacac

SEQ ID NO: 868628 - DNA, 697 bp, Homo sapiens
accaaaaggaacacttaagtgcttatattttatatttactgttagtcatttagaaatgatacaatttgaattatagatgtaattgacaaatttgtactttcattgacctgattggttaagatacttaatcatatgataccacttttcctctttaaacggtaataaccattcattgcaaattactaatatactgacttactcatagttttcactagtcagcactgaakcatactgcatgtgtattttgttctcagcatggaaaagtacatgtcaaatagtaaaccctagtatgccaatcatttagtaacttcaagattactaattaccataatgttgaagtgctaagattatcagggtataatgcattcattatgttaatgattctttatcttatccaagaatcacacattttccctgggagcaaaaagaatcaaaagaaccaactggaagcttttaataaaagtttatgcatttaagcgtgtgattaaccgacaatcatattacaagtgctttattttaaaggaaataataaaaagaaaaaactgtttataacgggtaagattttctttctaaacataattgacatttcactaactgaaattggaattaccaaagaagtgtaagacatgtcttgtgccctcaagggggaagaaatattacatacaaataatgaaactaattatagtctaaactcata

SEQ ID NO: 868629 - DNA, 697 bp, Homo sapiens
accaaaaggaacacttaagtgcttatattttatatttactgttagtcatttagaaatgatacaatttgaattatagatgtaattgacaaatttgtactttcattgacctgattggttaagatacttaatcatatgataccacttttcctctttaaacggtaataaccattcattgcaaattactaatatactgacttactcatagttttcactagtcagcactgaatcatactgcrtgtgtattttgttctcagcatggaaaagtacatgtcaaatagtaaaccctagtatgccaatcatttagtaacttcaagattactaattaccataatgttgaagtgctaagattatcagggtataatgcattcattatgttaatgattctttatcttatccaagaatcacacattttccctgggagcaaaaagaatcaaaagaaccaactggaagcttttaataaaagtttatgcatttaagcgtgtgattaaccgacaatcatattacaagtgctttattttaaaggaaataataaaaagaaaaaactgtttataacgggtaagattttctttctaaacataattgacatttcactaactgaaattggaattaccaaagaagtgtaagacatgtcttgtgccctcaagggggaagaaatattacatacaaataatgaaactaattatagtctaaactcata

SEQ ID NO: 868630 - DNA, 657 bp, Homo sapiens
taaaatcactacttcaaactggtcctctgaggaaatcaaaataggacaatccatttccatggattcccaacttccaaaagtattctaattttcccagacatggctttcttatttaaattaaaggctcagtttcctgtcttcttttcctgcctaactccagaaaacttctaagggagcaaagtaatagagggctccaattatctctagcacactctgggagcctttataagggcaaaatacaattcgttytacagcaaagcacctctaacacatggtctctaagagaactttgatcatgtgccttcgatttttttttttttttgcctatcagaaatattctatacttcttttttcctgcagagtcaacacataatattaaacagcctgtctgcagtatctaattaacaaactgactgcagatcacttacaacataaaatattaaatcatctaaaaaactaatattctccacacctcataaattaaaataaccaagagactgaaatgaaataaaaccctgatgcatatcgttctgggcctttgccccccaaagaggctctattccttgaagcatttaaccatttcaaagaaaaaaaatatatatgcacacacacagagagacacgcacacatacatgtatatcaagcaatttcaaaatg

SEQ ID NO: 868631 - DNA, 644 bp, Homo sapiens
gcttccttcaggagctcttgtagggcaggcctgatggtgacaaaatctctcagcatttgcttgtctgtaaagtattttatttctccttcacttatgaagcttagtttggctggatatgaaaatctgggttgaaaattcttttctttaagaatgttgaatattggccctcactctcttctggcttgtagagtttctgccaagagatccactgttagtctgatgggcttccctttgtgggtaacccgacctttctctctggctgcccttracattttttccttcatttcaactttggtgaatctgacaattatgtgtcttggagttgctcttctcgaggagtatctttgtggtgttctctgtatttcctgaatttgaatgttggcctgccttgctaggtttgggaagttctcctggataatatcctgcagagtgttttccaccttggttccattctctcagtcactttcaggtacaccagtcagacgtagatttggttttttcacatagtcccatatttcttggaggctttgttcgtttctttttactctttttttctctaaacttctcttctcacttcatttcattcatttgatctttaatcaatgataccctttcttccagttgatcaaattggttactgaagc

SEQ ID NO: 868632 - DNA, 594 bp, Homo sapiens
tattagataaatgcaaaccaaaaccacaacgagatactatgttacaccgttcagaatggccattattacaaagtcaaaaaataacagatgctggcagggttgcagagaaaagggaatgcatatacattgctgatgggagtgtaaattagttcaactactgtggaaagcagcgtggtgattcctcaaagaactaaaaacagaactacaatttgacccagcaatcccattactggatacatacccaaaggaatataaatcattctgttataaagacacacrcacatgtatgttcactgcagcactgttcacaatagcaaagacatggaatcaacctgaatgtccatcaatggtagattgaataaagaaaatatagtacatatacaccatggaatactatgcagccataaaaagaatgagatcatgtcctttgcaggaacatggatggaactggaggccattatccttagcagactaacacagaaacagaaaagcaaatattgtatgttctcacttataagtaggagctaaataatgataacacatggacagaatgagggagacatcagacactggagcctacttgagggagaaggg

SEQ ID NO: 868633 - DNA, 661 bp, Homo sapiens
ctgaacaacccatttgaccaccagtcttaatgcagccattctgtaaatccttcaaaaaccggcatttttaaacagaagttaagtgtgctaaattcatttgccaaagtacatccaagttacttatttagaatacgggagggtgggtctgcttccttctgtcttgtacagtcttcagttacacagaaatggtttccctcaagattagaggtgtttcctatktataactgaggattccttttctttgaaaagctccctggaagatttctggatgacttggaagctaaatcaactaaaagtttttaacgatcttttaatcctgcttttgtctgctcttgagccactgaaatcaagattcttccacaggcagagaaccaaagtgattcctctcagcaaactctttgacttactgtccaggttctgacacattcctctgccaacagcaaataagtgagaatgcttccaatgagcagtggcatctcttctcatttgtaaaagggagtgtcagactgaaaatagtggccaactgttttaacccaaaaagcaagaatttcaggccaactgcagccaagtgggctattcttagctatgcataggagactgggaggtctctctgtgggttgtgggtagatggttcagggtttgtgacttttaagttgctctt

SEQ ID NO: 868634 - DNA, 573 bp, Homo sapiens
cttcctatacacagccttaaccaccaatatgaccaaaatgagattcacataatctaaatccagcaacttcagattcctaaaggcaaggatgtctgggttagaaatgaaacatgtccttcctcatgaaagacttgaatatctgaggttagccccaatgaacaatatatgaattcctctttggagaaagcctagtaggtatctattttaaaggaaacacaatattcattgcaaaaacaaaaaaccaaataccataccttgagtgggttatggtattaaggaagaaagcaacacatactcaaacaaatatttattgtgtcacgcattgttctaagccagtggttctgaaatgagggtactttgcctaccacgggatgtctgacaatgttcagagatgtttttggttgccataattgatagaggcaggagtactggcctytaatagatagaggccagggatgctgctggacatcctgcaatgcataggaccctccacaacaaggaattatctggcccaaaatatcaatagcactgaggttgagaaactttgttctaggctctggggacacaatagtg

SEQ ID NO: 868635 - DNA, 571 bp, Homo sapiens
cctttatcaaagagtacaggttttttgtttttaagtatcttttaggccaggtgggatggttcatgcctctaatcccagcactttgggaggccaaggtgggtggatcacctgaggtcaggagtttaagaccagcctggccaacatgatgaaaccccatctctactaaaaatacaaaaattagctgggcatggtggtgcatgcctgtagtcccagctactcgggaggctgagccaggagaatcacttgaacccaggaagcggaggttgcagtgagccgagatggtgccatcacactccagcctgggygacagagtgagactttgtctcaaaaaacaaacaaacaaataaaaagaatcttttaattatcactttggttaaatgaatgactattgttttatggtgacctgtgattctattttggtcaagtgttttaaacctttgacatatttgtcaggcttcccaaaaatcagatttcagcttcaaaattaagtcttttttgacctttaactttgggatgctacagaggttccctgaagcatccaaaagagaggtaaacagaattatttgacatg

SEQ ID NO: 868636 - DNA, 642 bp, Homo sapiens
atgtgagatgggtcttctgaatacagcacactgctaggtcttgactcttcatgctatttgccagtctctgtcttttaattggggtatttagcccatttacatttaaggttaatattattatgtgttaatttgatgccatcattatgatgctagctggttattttgcccattagtttatgcagtttcttcatagcatcaatastctttacaatttggcatgtttttgtgatggctggtaccagtttttcctttccatgtttagtgcttccttcaggagctcttgtaaagcaggcccggtggtgacaaaatctctcagcatttgcttgtctgtaagggattttatttctccttcacttatgaagctaagtatggctggatgtgaaattctaggttgaaaattcttttctttaagaatgttgaatatgggctcccactctctacttgcttctagagtttctgctgagagatccactcttagtctggtgggcttccctttgtgggcaatcgacctttctctctggctgcccttaacattttttccttcatttcagccttggtgaatctgatgattatgcatgttcaggttgctcttcttgaggaatatctttgtggtgttctctgtatttcctgaatgtgaatgtt

SEQ ID NO: 868637 - DNA, 642 bp, Homo sapiens
atgtgagatgggtcttctgaatacagcacactgctaggtcttgactcttcatgctatttgccagtctctgtcttttaattggggtatttagcccatttacatttaaggttaatattattatgtgttaatttgatgccatcattatgatgctagctggttattttgcccattagtttatgcagtttcttcatagcatcaatagtctttacaatttggcatgtttttgtgatggctggtaccagttkttcctttccatgtttagtgcttccttcaggagctcttgtaaagcaggcccggtggtgacaaaatctctcagcatttgcttgtctgtaagggattttatttctccttcacttatgaagctaagtatggctggatgtgaaattctaggttgaaaattcttttctttaagaatgttgaatatgggctcccactctctacttgcttctagagtttctgctgagagatccactcttagtctggtgggcttccctttgtgggcaatcgacctttctctctggctgcccttaacattttttccttcatttcagccttggtgaatctgatgattatgcatgttcaggttgctcttcttgaggaatatctttgtggtgttctctgtatttcctgaatgtgaatgtt

SEQ ID NO: 868638 - DNA, 619 bp, Homo sapiens
gtattgtgttcttggtgttctcattttattctcacaatgaccttatacatcattacctctgttttctgagtgaggcaactgacactttgagaggctaggaaaatcctccaaggccaagcaattaggaggagctaaggcaagatttggaacgtatcagtctcactgcaagcccatattgttaactgaccacatgaccttgcttctttaacaaaaacaaaacttcttggaggtttgggtgctatatacatacatatatgtgtttatattacattatataattttatatatatatatatatwttttttttttttgagacaaagtcttattctgtgagccaggctggagtgcagtggcacactctcagctcactgcaacttctgcctcccaggttcaagcaattctcctgcctcagcatccagagcagctgggattacaagcatgtgccaccatatgcggctaattttttttttctttttttaagtatagatgaggtttcaccatgttggccaggctggtctcgaactcctgacctcaggtgatccacctgccttgaccacccaaagggttcaatatattggaaagtgatggtcttttgagcaagcataagcctgatttcatg

SEQ ID NO: 868639 - DNA, 696 bp, Homo sapiens
aagacacatccttgagatgctgtttgttggtttcaaagaacatctttatttctggcttcctttcgttatgtacacagtagtcattcaggaagagatggttcagtttccatgtagttgagcggttttgagtgaattttctaatcctgagttttagtttgattgcactgtggtctgagagagttttttgtaatttctgttcctttacatttgctgaggagtcctttacttccaactgtgtggtcagttttggaataggtgtggtgtggtgctgtaaagaatgtatattctgttgatttggggtggagagttctstatatgtctattacgtcagcttggtgcagagctgagttcaatcttggatatccctgttaactttgtctgtctaattttgatggtagggtgttaaattctcccactattattgtgtgggagtctaagtctctttgtatgtctctaaggacttgctttataaatctgggtgctcgtgtactgggtgcatatatatttaggatagttagctcttcttgttgaattgatccctttaccattatgtaatggccttctttgtctcttttgatctttgttggttaaaagtctgttttaccagagtctaggcttgcaacccgtgtctatttttgttttccatttgcttggtagatcttcctccatccctttattttgagcctatgtgtgtct

SEQ ID NO: 868640 - DNA, 647 bp, Homo sapiens
aaatttttgattgaaatgagaaagattttccactgtagaaattcacctccttttggatttatcttaacattttcagaaattgttcctattacatcagtttcctcattcattgatttttattttctcttattgtctaatatgcattttttgtgaatgcatacttttattaygttggcaaagaactaatgattctgatcaaagctgtccactatgcaaacttctatcaaataatttttttaaaagtaggagatacttgaatattggttctactaaacaactttagcaaaattgaaaatcctataaccccagctataatccttgcaaactttgtttccatttgacttgcttattgtaatatcccaggatcattcatgactatattatgactaggatcattcatgactgtattatggatacacattgtgctttctgaacgcacaatgtgtatccataatatagtgtgccaatgcacctgtatgcacgtgtattatttatgcctttcaactgtatgaaagattagctccatcccaaataccattcattgagatttctcccttggtacctccaaaacagaggctgactagggttttattttttcacactcatgttttacaaaaatattgaaaaagcaattggaaggaaaagca

SEQ ID NO: 868641 - DNA, 639 bp, Homo sapiens
ttcttctacaaacagttaaaccaaccctcagtagatcctacatactgttttctacacaacactcttctccagcagaaagtatccagaaagaccaatgcccaatctcctaacagaagttagagttttcatttctgagggaggacaaagacaacttaaccagcttttcccatgtaaacagcaaggaatgggttcctggaagacctccagtaaacaagtaagggcctgattccaacataacataataaccaggccaaaaaaaacgtgtgtgtaccagtaagagatttaacacagaaggttgtgcctgacagcatggctgcagcaacacagataacagaaccttcagtccattcagataaaatcttgtacaaacctcccactgattcagatggggaaccaatgcctggcataggcttgttgttttctgtatacwcagagggctttcagaaaataaagttgttttttgttttgttttgttttttttttgtgggcataaacgcagtgggatctagcgggtattggatgaaatatttatttttgtatttcactggttgctcaacccatatgaatcatcacttcagtccctgactggtcctgagccagcatcccagaacaagcttttactttaggtcctgtaccaag

SEQ ID NO: 868642 - DNA, 441 bp, Homo sapiens
caaaatcaatgtgcaaaagtcacaagcattcttaaacaccaataacagacaaacagaggaccaaatcatgagtgaactcccattcacaattgcttcaaagagaataaaatacctaggaatccaacttacaagggatgtgaaagacatcttctaggagaactgcaaaccactgctcaatgaaataaaagaggatacaagcaaatggaagaacattccatgcccatgggtaggaaaaatcaatatcgtgaaaatggccacactgcytaaggtaatttatagattcaatgccatccccatcaagctaccaatgactttcttcacagaattgggaaaatctactttgaagttcatacggaagcaaaaggagcccacattgccaagacaatcctaagtcaaaagaacaaagctggaggcattacgctaccagacttcaaattatac

SEQ ID NO: 868643 - DNA, 628 bp, Homo sapiens
cctggctaatttttttatttttgtagagacaaggtctccttatgttgcccaggctggtcataaactcctggtctcaagcgatcctcctgcctcagcctccaaaagtgctgggattacagacatgagccattgtgcccggcctcatgaaacctttaaaaagaatgagctagactggtacaagttcctccaataatttcatctttagttaataattatatacattaaatatctrtgtttctatacaaggagaaaaggtctataagatatataaccaatgtttaagtgttggttaaatcttatactttttcagttttaaaattatatttattattttaatctgaagtttatattttttcaattaaaaaataaatcaaaaacacagaaggatatacagggaagactcctcccttttcctgtccatagcctcccagtttttcttcacaatggcagccacggctttccatttattatgtgtctttttagaaagtgtcaatgctcagactccaattaggagagagagttttctttttagtgcgtacttgtttagtatccattgcttgaatttttcacaagcatggttttaaaaaaatcaaagataacaaaacataatcattaaagggcacaacta

SEQ ID NO: 868644 - DNA, 617 bp, Homo sapiens
cgggatctatcataggtcaaagggttagggtacaagtagagtgtagagttggactctgtgcaaagctcatctccaaaaaggcattccaggcttcagcttcacgggaaaggggcaagtttgagaacgaagggaacagaactagggaccaagcccagcaagcttggtttagtccactaatgtctggagaccaggaggataaagaatttggatttgacttgcctggctttaagatatgagagagagcatgggttattgtcaacgtagccagtgattacaaaagtgagaatatattatgtttctgaaagaartcccggaggcagagagctggggataaagggctgcttttaggcgagacccaattacaaccagtctggactggtcacatctttcctgaaagtgggtcagaggcaatggaattggtctacccagctctttctggattacattcctatataagaggggcaggtctctggcatcggaaaatgctgaattcctacctttgctcttaactctgtgaacttgggaaagccccagttgtacccactgtaaaatagggattaaaacctctacttatattaaatttttaatatggcagagactatgcaaggtgggctgtt

SEQ ID NO: 868645 - DNA, 606 bp, Homo sapiens
aggaacagggtggcttgtagagtaataaacaaaatgactaagaagataaatgagagaaccatggatgctgccatctccttcctgaacaggccaagaataaatggaaagaagaaatcgggaaagaagtcatgtcttgggctctaagtgggggtgaaggaggcttgctctgcaacatcactttgcaggggccttccttgagttgcctcttgagtgaaggccatcaggacaactatctggttttcagtgacttcctttgaaaatcttgcctaagtgatttagtactctgytttgatatttggagatcctttgaaatctgtgatcttagagctttagccaaaccaagggtccactttgtcatgttgctactcttggacagtggtgctcagttggggcaggagatggtaattttgccctctagtgggcatttgacaatgtctagtgagttgccacaactgatggatggtgctgttggcatctagtgggtagaggccagagatgctgctaaatatcccgtaacgcctaggatagcccctagcaacaaagaattatccagccctaagtgtcaatagtagcaaagctgagaaaccctgatgtaaggcaagttaa

SEQ ID NO: 868646 - DNA, 601 bp, Homo sapiens
acagccccttactctcagctcctgtgctaacacccatacccaccagctgggcgttgggacctctcccgtcatatggctgccacttgcttgggaaggaattctccagactccttttactttgtatgtgtttctaggggaattctgagggaagaagctttgcagcaacctctgtgcccagaacatacggctcacaagtcctttgtgccgacagggaatctatctaattgttttagtgtgtgaggctcattgtcagcctagatttccctgaaactctgggccagcagcccycaggagcatcagtaggacccagcatttcccctggcaccaaagtggacctctttgcaccttgcagccgggagaactgacttagagggccctggtgttggctctggaacctgggctgagatggattcggggagaggctgggtggagcttggcctctacggtctgttcttgcagattcaggagagaaagtggtatgagagcagtgtggtttgtaagttccccaacttccccgctggctcacactgtctccccagaccaatggcctattagcccccaaaaagttagtccaaccccaggccagctgcctttgctctgc

SEQ ID NO: 868647 - DNA, 614 bp, Homo sapiens
gggggaaaaatacttcatttgaaatatttaccatttagaacccagtcacgctcttgttgactcttgtcaccatggatacccatggcaggccacctaagttaaaagacaagttgtgttattaaactcacattgaaaacctcagactccagtgcttgaccacttttggtcacagatctctttaatttcgccagaaatgaaaaagttaaattcactatcagatatgaaaaaaatccactgctcgtgatccaagtttgccctttcctaagctgttttaatcaatctgcttcaatggaggagctcacacatacccatctctcctcatttttctggtaagctcatcacatcttcttttggtttccacaaaaacaatggttttattctccttctcactcatgatmtcttccattagacgaataagtctaataataggagagagaaaggaaaaatcctgagttttaaaagaccattgctagggccacacatttatggtcagcaaaacattaagttcaatttacatggctggaagtcaaagaggaaacgcctgctaatccacttatcgagcagttcgacccttggtccttaagtcaaccaggggacacatgaattccttctat

SEQ ID NO: 868648 - DNA, 589 bp, Homo sapiens
gttggttttctggagagacttcaaacaaaaagaaacccatttttattagcaatgtctgatgttttgcaggcttgtggggatgtgctctacttttttctattttgattcattttgttatcagggctccttggttcagagctctgtattttgtcagttctgcccttctgtgtagtttcctttatgatatcttttgagtggttgtggtaggcagggttggcttgtcttgcttatcattgatttctgcaggatccttaatttttcaatcttagtcccaacttttcyttgaatacttggtctccaagaggtaccacctcttctgtcttatctgattctcctccaaaatcacagtttccccgaggtagctggactgtgaattaccaagggctgatctgtgctcagtgtctttgcatttattgtctcacttatactcgtttctgagggtggttttttctgtgttccctgtgggtccttggctcctccctgctctccctcacaaagtcttttctgcctcttctcctccactccgtgtatccacaggctaggaatgctgtgttagaattagtttgtttgctctttcttctgcttacag

SEQ ID NO: 868649 - DNA, 622 bp, Homo sapiens
gaaaacatctattatattaaactttataagtaccaggaatcctatgtttttagattgccaaactctggagtgagatcctccgggttgaatgccttggtctgctatttcctaaatatgctttgggaacattgcttagttcctctgggcctcagtttctccatctataaaaaaagagtaataataggccctgactcaccagattcctgggtggtatgaatgagttaatactgtcaacagataattttcaaagaaaggaaaaattgtaactytcatacacctataaattgaacacatgttaaagattttaatgaactcattgatgagtgtatatgaattgcctaagattgccataacaaagtaccacaaactgagtggcttaaaacaacagaaatttactctctcacagttctggaagctaaaagttggaaatcaaggtattggcagggtcatgcttcctctgaaggctcttgggacaaatcctttctggctcttcctaggggctggttgctgttggcaatccatggcattccctgcatcactccaattattggttttaggctcaccctcattcactatggactcaacttaactcattacatctacaaacattgtatttccaagt

SEQ ID NO: 868650 - DNA, 616 bp, Homo sapiens
acctgctggcgagtccacagaatatccttgtccaggatggatatctgtagtgttgtaagacctgctgggctgggctgtatggcccacatggcagggaagctggcatttcagcctgaatctgttatagactcttgtaggtcctacctgaaactggcagccttctgagttatctgataaatgggaaaatgggttacactgctgccaaaagccaagacgcccagcaagtgctgtacttctttgtaaaaggtagaaagggcaagatacaactgtatgtcctataccttagaagggatttttttgtgagacagggtctcactctgtcacccagactgcagtgcagcagtagttcattttttggctggcattagcttggcttrtggcaacctctgcctccaaggcccaagcaattaccctgcctcagcctcccaagtagctgggattacaggcacatgccactactgcctggctaatttttgtatttttagtagagacgggtggccaggttggtcttgaactcctgacctcaaatgacccacccacctcggcctcccaaagtgctgggattacaagcgtgagccaccatacctggccagaagggattttttagaatgccgca

SEQ ID NO: 868651 - DNA, 616 bp, Homo sapiens
acctgctggcgagtccacagaatatccttgtccaggatggatatctgtagtgttgtaagacctgctgggctgggctgtatggcccacatggcagggaagctggcatttcagcctgaatctgttatagactcttgtaggtcctacctgaaactggcagccttctgagttatctgataaatgggaaaatgggttacactgctgccaaaagccaagacgcccagcaagtgctgtacttctttgtaaaaggtagaaagggcaagatacaactgtatgtcctataccttagaagggatttttttgtgagacagggtctcactctgtcacccagactgcagtgcagcagtagttcattttttggctggcattagcttggcttatggcaacctctgcctccaaggcccaagcaattaccctgcctcagcctcccaagtagctgggattacaggcacatgccactactgccyggctaatttttgtatttttagtagagacgggtggccaggttggtcttgaactcctgacctcaaatgacccacccacctcggcctcccaaagtgctgggattacaagcgtgagccaccatacctggccagaagggattttttagaatgccgca

SEQ ID NO: 868652 - DNA, 691 bp, Homo sapiens
tagaactcaggattaagaaattctctcaaaactgcacaactacatggaaactgaacaatctacccctgaatgactactaggtaaataacaaaattaaggcagaaatcaagaagttctttgaaaccaatgagaacaaagacacaacgtaccagaatgtctgggatacagctaaagcagtgtttagagggaaatttaaagtactaaatgcccacatcagaaagtgcaaaagacctaaaatcgataccctaacatcataattaaaagaactagagaagtaagggcaaaagaattcaaaagctaggagaagacaagaaataactaagatcagagcagaactgaaggagatagagacacaaaaaaaccttcgaaaaatcaaggaattcaggagctggttttttgaaaaaattagcaaaacagatagactgctagccagactaataaagaagaaaagagagatgaatcaaatagacacaataagaaatgataaaaggggtatcaccactgatcccacagaaatacayactaccatcagagaatactataaatacctctatgtaaatataccagaaaatctagaagaaatggataaattcctggacacaaacaccctcccaagactaaaccaggaagaagttgaatccctgaatagaccaataacaagtttggaaattgaagcagtaattaatagcct

SEQ ID NO: 868653 - DNA, 656 bp, Homo sapiens
ctgcccatcattcgtggtgtggttccctgccttccagcgtcactccgcctttaattaggaacagtgtcctctccttccccagcaactgtggatcagctatggccccagtaactcagtaagtctctccaccattcagggagctatagccacacctccaacaaggtaggaatcccagmcttgcagagagccccctctaagtttatatctcctttgggcactgtctgtcagcccaggggattctttagagtcatctctgtccttttacagataatccccttatagttaattatatcaggagtcagcaaattttttttctctgcccaactgtgagcctctgccagctgtagcacaaaagcacagacaattataaatgaatggggtagcttgatttgacctgtggtaagctaaatttagcccatgggatatggcttatcaacctctgctgtatgttaagctttccctgttaaaattactatgggacatctgtctcatctgtttaggggcaaatgctgagtgaactctgagggacaaatccaacaaatacgtcaagtaggaaaaggaatagaaagtatcctttggaagtgctagtgactgtatcaaaagcagtctcagtaaaatgcttaggtgaggacgatgccaggttgtggagtaaatag

SEQ ID NO: 868654 - DNA, 656 bp, Homo sapiens
ctgcccatcattcgtggtgtggttccctgccttccagcgtcactccgcctttaattaggaacagtgtcctctccttccccagcaactgtggatcagctatggccccagtaactcagtaagtctctccaccattcagggagctatagccacacctccaacaaggtaggaatcccagccttgcagagagccccctctaagtttrtatctcctttgggcactgtctgtcagcccaggggattctttagagtcatctctgtccttttacagataatccccttatagttaattatatcaggagtcagcaaattttttttctctgcccaactgtgagcctctgccagctgtagcacaaaagcacagacaattataaatgaatggggtagcttgatttgacctgtggtaagctaaatttagcccatgggatatggcttatcaacctctgctgtatgttaagctttccctgttaaaattactatgggacatctgtctcatctgtttaggggcaaatgctgagtgaactctgagggacaaatccaacaaatacgtcaagtaggaaaaggaatagaaagtatcctttggaagtgctagtgactgtatcaaaagcagtctcagtaaaatgcttaggtgaggacgatgccaggttgtggagtaaatag

SEQ ID NO: 868655 - DNA, 599 bp, Homo sapiens
catttgttacatttaaaaggattctgtgcgtgtgtttaagggaactgagtgcacttttctctttatttaacctgatcacaaagattggtcatcatcttatctcatgtgtttatttgccccattttaaaagttatgctaaggaaagaaaattgtcttattaattgtcatagcaatttgttgagcaatttgttgagcagactattagaacatggttagccctaaggcatgttccaatttgctgaactgaaactgtaggcataagagtttttgcctacattataattgccactaagccaatttcatgctgtctaaatcttgatataaaatgttataggtttcagcataccacttttgttcccagcaaaggtggagtaacagagaccagatttaccctcccaccagaattataccaaaaaaacaggcaagatayacgaagcaatgcttttcaaggcagcggctatcataccaagaaagaccatgatccctgaaagacaggaaacaaataaagcaagccttatgattgccacaacttactgccttgagagagtttccaagtcatggtgcaaggagagcgaacccaggcagagtccagtggattc

SEQ ID NO: 868656 - DNA, 436 bp, Homo sapiens
gacccaccataatggcctaatttttaacttaattcgtttttaaagttccttagtccaaacacagtcacattctgaggtactcaaagttaggacttcaacatatgaacttgaagggtatgcaattcagctgataatagtaccttgcaacctctaatactgaattcatttatcagatttaggaatcttctggcagartctttagagatttctaggcataaagtcatattatcagccaacagaagtaggttgacttcctacatttttttgtcagtttggatgttctttatttctttctcttgcctgattgctctgggtaggactttcagtactatgttgaatagaagtgctgaaagtgggcatctttgtcttgttccagttctgaaggtaaatgctttcaccttttccacgtcaagtatgatgatggctgtgtgtttgt

SEQ ID NO: 868657 - DNA, 597 bp, Homo sapiens
ttcaaaataacaagcagccacttagtagatgtgtgggaggacatttgggtattttgtaattaactcaaaggcttttgtatgaaaaaagtgatgtcaaaaaaatctgaaaattatgttcatgtgtattgagatgagtgcattgggaaatttatgaaaacagaatcatttgcaggattaagaaaaaagaataaataaaatgctacataatatgatctacatttctgaatgtttatgactaatcaaatattgatgcttgttaaaaagcctttaaaaaaatacaaatagagcaaaggaagagcaagattgtgaaatataagcctasgctgtttatcccccaaaaggaataccaaattttaacaagtatctttacacacacacacacacacaccactgtcataagaaccaaaatttaagtgagcaatcatagtacatggttttaatatcatatcattaaaagaggcactgaggaggggagaagagacagtcttgaattactgatgccacctctccttcatctaatagcagaggtcttgtggtgcagaaagagaaactgtgcactttagggaggaatattgcagtgactggggactttacatt

SEQ ID NO: 868658 - DNA, 458 bp, Homo sapiens
cattgtttctatgactatcagcattgtggtcacaacaatttaaccagtcactaaaaagtttcaaacattccctcatcttcctgtcttcttctgaaccctccacactcttccagtttctgtctgctacccaattccaaagttgtttccagatttcaggtatctttagaaaaattcccaactccttggtaccgtgtttttttttttttttttttttttttttttttttttttttgtraaatagctgacactgggaaatttataaagtaaaaaggtttaattgtctcactgttatacaggctgcacagaaagcatgatgctggcatatgctcagcatctgggaaggcctcagaaaacttacaatcatggtcaaaggcaatgggggagcaattatgtcacatggcaaaagcatgagcaagagagtgaggagagaggtgcaacacacttttaaatggctagat

SEQ ID NO: 868659 - DNA, 548 bp, Homo sapiens
gaagaagaaataaagacattcccagacaaacaaaagctgagagatttcatcaacaccaaacctatcctacatgaaatgctgaaaggtgtttttcagtttgaaagaaaaatatattaatgtgctaaaagaaaccatcttaagataaaaaactcactggtaatagtaagcacacagaaaaacagaatagtacaacactgtaatggtggtgtgtaaactgctcttaagtagaaagactaaataacaaaccaataaaaaataatgatgaaaacgaggaaactactagaactgataaacaaattcagtacagttgcaggatacraagtcagcatacaaaaatcaatagcatttctatatgtcaccaggagacaatctgaaaaagaaataaaataatactcccatctacaatagccacaagtaaaattaaatatctaggaattggcaaaaaaagtgaaaagtctccacaataaactcataaaattctgataaaagtaactgaagaggacaccaaaaaatggaaatatatttcatgttcatggattggaagaatc

SEQ ID NO: 868660 - DNA, 610 bp, Homo sapiens
ctacgacagtttcaacacataaagcaaaatcagcatgttttaaatcaccttgtaatgggttgagaaagaacttcttatttctattttcttttctctttaatggattaaagtagcaaataatttcaagttagcagaacaaaacagtcaaaagattattctagaggaagattgtaatattaaaaatttcactttagagaatgtaaccactaagaagaaaaatcacaatataatwtaatgaagcatggggattattttgctggtggtagtcaagcctgaaacaaaacaaagtagaataaaaccccaaagcctaaagtcaaagagacctcccaaggcccagtttacctgttaaaccagtcatctgtgtaccgagggtaaggataggggtcgttgctgctgaagtcgtaacttgcttcggcattctgaaaaacacaaggcatctcattaggtccgtacagccagaggcgcagtaaagggaaagcgctgggagactttaaacatttctagtcctccctggagtgctggattagtgtgctgcactggaccaaacctcacaaaattgtgttggagccaaagcatgtctttggggttttccatcctctcttgatattct

SEQ ID NO: 868661 - DNA, 610 bp, Homo sapiens
ctacgacagtttcaacacataaagcaaaatcagcatgttttaaatcaccttgtaatgggttgagaaagaacttcttatttctattttcttttctctttaatggattaaagtagcaaataatttcaagttagcagaacaaaacagtcaaaagattattctagaggaagattgtaatattaaaaatttcactttagagaatgtaaccactaagaagaaaaatcacaatataatttaatgaagcatggggattattttgctggtggtagtcaagcctgaaacaaaacaaagtagaataaaaccccaaagcctaaagtcaaagagacctcccaaggcccagtttacctgttaaaccagtcatctgtgtaccgagggtaaggataggggtcgttgctgctgaagtcgtaacttgcttcggcattctgaaaaacacaaggcatctcattaggtccrtacagccagaggcgcagtaaagggaaagcgctgggagactttaaacatttctagtcctccctggagtgctggattagtgtgctgcactggaccaaacctcacaaaattgtgttggagccaaagcatgtctttggggttttccatcctctcttgatattct

SEQ ID NO: 868662 - DNA, 701 bp, Homo sapiens
agtacaaaaaatgtgaccttctgactcagaaagcattctcttctctctgcactgcatgacatctgcagctcatttttatgataaaaagtaaagaaaaaaatgtacaagactgtgaacaccttgcttatcccagcacactcagcactgagtgagaacattaagacctaagttgtattaaatgatagcaaaatcaggactaccgtcatgaaaggtggactcagggacttgagtttctactcatttttgcatccataataaaccaacccccgaaatttgtaagyaatcttctcgcttatttgttttttcttgtaacagttaatctttgctttgatgattctttttaggataacattgctaagagaagatgcaaatagagtgtcgtgaccttgggagataaacagaaagaagtacaaggcactttgtaaatatctcagtgtttataatagctggggaaaaaaaaagttaagtagatcggttctctttcaggaagaagtagtttgaacctttgaacaagaccaagtttatgttcccagctaatgtgaaatgtgacaaaaaagaactgatccccaactgttctgaagaaagattaaatgcacttctggttcttttcacagctattcatcattttaattggttttgaagccaaaaaacttggacagcatttgggatgggaatccaacttcataattcataaactatgg

SEQ ID NO: 868663 - DNA, 664 bp, Homo sapiens
ttcaagagcacattgaaaatgccagcccttcctttcaataagaaacaaaggttatttaagcctcagtttcatatgcaatattaatgtgcttatttaaatattcataggcctaaaagccagaagcaatgtatgtgatcaatacttcataacatctgagtcattcggggctgagtactgtgccggtttcttgctgtcgcccttttatcatggaggccacatgccccctggggcccaatgtgcacacttctgtcaagctcaaggtacttcctgtgctggcagctcttctgagctctcagcaggcacccacttcagagacagtcacctgtcaggacccatctaaagaatggaaaagtgcaggaatgtaggggtgggcctttttctcttatgatcacttctgttggtgaaatagcaaccctggaacataaataatgttccaaattttgaacggaaccaaagaacataatttgtcctctcctatctaggaacctaattgcatttccagcaacttgagrgattctagacattaaagaaaagaaatagcttgtagttatttgcctgtggattattcacctctcgaatcgtattctctccaggcttgcagccataggaactcagttaggttccagggtcctctctttccttagtatcatgcatgatgaaggag

SEQ ID NO: 868664 - DNA, 626 bp, Homo sapiens
gggagctgcccttgtcccaaatgtgctcattttgctattcaacagtgaacttggatacttttcttcagttatcatatggaatagcatgtgatgcattaaaaatggccacaaattcagagtttatttcctttccacttgaatctggattggccctgggaccattcatccaacataagtggcagagttaccggtgcccattccaggtctagcctttaagaggactggcagcttctgcttcttctcttttggaaggcctactcttgggagtcctgagccacctataagaaatccatctaccttgctggaggcctcatgtgagaggagaggtcctcagactccatggaaagggagggaggctgagccttttcagcctcccattggagcctctagttgactccagggtcaacttccttctgactccacctgcatgatagactccagtggaacttgcagaactgcccagmtgaactccagcaacccacagaaccgtgagagataataatatggttgttttttaaaccactcaatgttgggattctttgttctgcagcagtaattgactaaaatgaagaagaaaccaggaattgtaattggggggcagagtttacttttgtgggaacccaaag

SEQ ID NO: 868665 - DNA, 679 bp, Homo sapiens
cgttgatctgagcaaattttcttgagcaatactccacaaacacaaaccaacaaagcaaaagtgaacaaatgggatcatgtcaagtgaaagggcttctgcacagcaaaggatacaatcaacaaaatgaagagacaaccaagataataggggaaartatttgcaaattacacatctaacaagggatgaataaccagaatatataagaaactcaaacaactctatagaaaaaaactaataatgtgatcaaaaagtgggcaaaagatttaaatagttatttctaaaaagaagacacacaaatgacaagcaggcatttgaaaaggttctcaacatcattgatcatcagagaaatgcaaatcaaatatacaatgagatatcatctctccccaagtaaaattgcttatatccaaaacaggcaataaaaaccgctggagaagatagagagaaaggaaacccttgtatactgttagtgggaatgtaaattagtacaaccactatggagaacagtttagaggtttctcaaaaaactaaaaattgagctaacatatgttccagaaatctcatttctggatacatatgcaaaagaaaggaaatcagtatatcaaaaagatatctgcactcctatttttgttgcagcactgtttacaatagcgaagatttggaagcaacctgtgtccatcaa

SEQ ID NO: 868666 - DNA, 579 bp, Homo sapiens
ttatagctgggagaaacatattttcttcttacacatatattgtctgtaactgttggcagggttggaactactatcagaagttaggaatagaggtgttatagatccccatcagccactattctaataccaatgaggccttgggatatagcctgacatacatgtgagatagccatcccttctcacctttaaacctgargctcaggaaaattgcttcaaccctgtcaagtaaggatgaccttacttgagaatattggctcttctatccatttagaagcatattgaggccaggtgtggtggcacacacctactgtaatcccagcagtttgggaggctgaggtgggaggatggcttgagctcctgaggttgaagcttcaatgagccctgattgtgccactgcactccaacctgggtgactcaaaacaaacaaacaaacaaacaaacaaacaaacaaacagagcatatggagaatagtggactctttcatgatcttcaatctttataaacgactttttgttgcccttttgactactttgcaagtcaagattgactttgatgtagaaaagtatccagctcttcctc

SEQ ID NO: 868667 - DNA, 781 bp, Homo sapiens
acttttctttttttaatttcatgaatgttgtcaattacaggcaggcaactggtgggacattgtggtgtaagatatgcagatctcactgcattcacaatagaaatttggaaatatttgctaaagagtctaacattacatatttgaaaacaaacaaagaaaaatcttattaagttagatatttgatgcttcaactgtttgtgactaattaatgccacgtatctttaaatactcccatgtcccaaataccaggaaatctgccaggtgtctcgacatatcattggaatgatgtccttgtttgctattgacattttatatcactttgaatgactttaccaagcagaaaccgtagcgtatatttttcctatttttttgatagacagtgtcatcaaaattatatatatgaaatccaggagggggaaaaaatctgagagacaagttgaatccaattcaaatatttgtgtatcaagagcaaattgggtatttccagaaagtgagcaaatttaattattcatgaggctctggttaagtcagcacatctctatcttaaccagatcctttctagcagtttgcatagtracaatataaagtacaattaagatttataaatatatgtcaacagagacaaaaagattggtaattcggtaaatcaatatatttgcaaaataattttcctgatgcaataattctcatattttcaaaatggataaacaaaaaaaattgttcaacaatattgtgaagccttgaaggatattcagaaaatcaagaatcagaggaaaactag

SEQ ID NO: 868668 - DNA, 679 bp, Homo sapiens
aaaattgaaaagttgacactgaaatccgatatgacttcttcgacatataaagccagagggagatggccccaagaacaccaggcaccacctgcatttacatcgtcgaaatgaaaaagtgaaaaaggaacaaatgtggtctcattactttccataaagggaaagctctttaccacaacaatgcctattataccagattatcaaacacagaatcacattgtaacttctggaaagtatggaatatgtatacacagaacagagccaaaagaactccagacaggtatgcctcaccctcagggactcatgtgttacagaaaatgttgggaaaactgaataatagggacaaaagaaactcgcyatgttaaggttttctaaactgaaattattcttacttgttttaatttacttttcttacaatgcttaattctcatattttttaagtaagttgcatttatacctttgttaaatgtaggccttttgatataagaagtcagtttggcagaattgcattgatacatatttgatgacattcgttcaaatattttcattattccaaatagggggaggattccataatagcccctggtttataaaaaatcctaggttcacagccgtggatgagaatgagtgaaagtacctaaaacctactattttcaagatccatgggaaaactgttttatat

SEQ ID NO: 868669 - DNA, 641 bp, Homo sapiens
ggacgtggcactcgctgccgccggagagccgggccgcacagcccgccgggagatcgtctctgctgcagcccgggccgctgcgacgccgcagacagcgccacctgccgcgagccactggaaggggcccgagcgctcgcgggccgggagggcggagagggagggccggaggaggactgggaggcaccgcgtcgtgctcgcgagagaacagaaatgcgcttcccccagctttggcgccttgctacggggccctggattggactagatttatgcagacgcgttcccgctcgcctgaaagaacacatacttggttgcaggtccccctggtggccagagrcggggaaagggctgctgatgaacaggagcgaactcaacacacaccaagctctctgttctccgggtgtgtaggtattttcccaaactgtacagctgaggggaatagtggcctcctgtgggctgcctagcatctgctcagctaaattttataaaaggaaacgctccctttataaaacagtagtctcacagagtcacctaccaacttcttttttggtttgggtttgtttttttttcttcctccctaattgtgagaataagattagaggattggtcataatcagagcgatgccagcgtgggaagcacggtt

SEQ ID NO: 868670 - DNA, 375 bp, Homo sapiens
agaatagaactatatagtaaaatgtatggagactatacaaattattcctgaaactatttcaaaaggaacaagtaacttttttggttatcattaattatatacaaacttccccagttattacttaataaaagcttgtagttgtaaagagattaatttcctrtctttaaaaagttgttaatttgaggcaaagcttctaaatgatcctattttatctacctgtgcccatgtggaatcgtgggttcaaggaaaccaaccaaaaaccagtttgctcttatagttgatcaggttttgatacctgtctctgataagttctaattatgggaaaacaatttatctttgtgattcagaagctctgctaggttgattatatagtca

SEQ ID NO: 868671 - DNA, 577 bp, Homo sapiens
catggcttcaataaactgagacatcctgattcctacatttgaaagcaatttaaaagaatgtttattaaacaacttctgggccttttattagaaaagatcaattttgggcctggcacagtggctcacgcctgtaataccagcactttgggaggccgaggcctgtggatcagctgaggtcagcagttcgagaccagcttgaccaatagggtgaaagcccatctctactaaaaatacaaaaattagcygggcacggtggcaggaacctgtaatcccagccactctggaggctgaggcaggagaattgcttggacttcggaggcggaggttgcagtgagctgagattgcacaactgcactccagccgtggcaacagagcgagactccatctcacaaacaaacaaacaaacaaaaaagaaaaaaaaggagagatcaattctgggggcagggtcagactcttcaggtttcacaattataactttatatatagaaaacaataccaaataaccctactgttttctttttacccattgtttccagaatgagtgagaagggagccagagtgagatttctgtgttagg

SEQ ID NO: 868672 - DNA, 512 bp, Homo sapiens
taagtctcatgagatctgattgttttattaggggtttctgcttttgcatcttcctcattttctctttgcctgctgcaatccatataagatgggacttgttccttcttaccttccgccatgattgtgagagttcctcagtcacatggaaaagtccaattaaatctctttcttttgtaaactgctcagtcttgggtatgtctttatcagcagtgtgaaaatggactaattcagtaaattggtaccaggagtggggtgctactgaaaaggtacccaaaaatgtggaagcggctttggaactgggtaacatacagaggctggaacagtttgaagggctcagaagaagacagaaraatgtgggaaagtttggaactccctagagacttgttgaatggctttgaccaaaatacactgataatgatatggacaatgaaatccaggctggcatggactcagaaggagatgaagaactcatcaggaactggagcaaaggtgactcctgttatgttttagca

SEQ ID NO: 868673 - DNA, 500 bp, Homo sapiens
acaagtcagacagaactgaatagtcctgtgaagactttggacactgaactgactttggaaccagactgcagaatggaggggtgggaacttgtggcttgaacctaatcaggtagattgcctggccaaaatgaaaatacctatcatctccataggatttaatttcattcaatgattttttttttagtaaatttgcaatgttttacagccatccccaaaatctaattccaaaatatctctatcaccccaacaagagactccattcaggttggcagtcacatgcactcccagatttcccctcygcccagcccttggcaatcactagtctactttctgtgtctttgagtttgcctactctggatatttcatataaatgaaatgatatatgaggttttgtgattggcacctttcatttagaataatgttttcaaggctgattcatgttgtagtatgcattggtacttcattattttttatgcaaaagtaatattctattgtatggc

SEQ ID NO: 868674 - DNA, 500 bp, Homo sapiens
acaagtcagacagaactgaatagtcctgtgaagactttggacactgaactgactttggaaccagactgcagaatggaggggtgggaacttgtggcttgaacctaatcaggtagattgcctggccaaaatgaaaatacctatcatctccataggatttaatttcattcaatgattttttttttagtaaatttgcaatgttttacagccatccccaaaatctaattccaaaatatctctatcaccccaacaagagactccattcaggttggcagtcacatgcactcccagatttcccctctrcccagcccttggcaatcactagtctactttctgtgtctttgagtttgcctactctggatatttcatataaatgaaatgatatatgaggttttgtgattggcacctttcatttagaataatgttttcaaggctgattcatgttgtagtatgcattggtacttcattattttttatgcaaaagtaatattctattgtatggc

SEQ ID NO: 868675 - DNA, 667 bp, Homo sapiens
aatttagaccccagacacaccaagttatgcaccttgctttactaaattctataaagcttagtcaatgaatactagacagacatatggctattgggaatgcagttatatggagctgtgtacattgaccttcatgacatttacatatgggataatggatgtggatttaatgcaatagttcatggtttgttaacttggagttatgaactcatgtttccattgaacgttggggactaaaataggagtttctaagaaataacttctactcttgagtggctatattagtttgttagggctgccatgcaaaatagcacagactgggaggcttaaacaacagaaatttattgtctcacagttctggaggctggaagtccaagaccaaggcgttggcagtattggtttcttctgaggyctctctcctcagcttgaatatggccaccttctcactgcgtcttcacatggtctttcctctgtgaacgacctctctggtatctctgtgtcttaatcttctcttcctataagtacatcactcagattggattgggatccaccctaaggacctcatttacctaaattaccttttaaagactctatctccaaatacagtcacattctgaggtactaggggttggggcttcaacatatgaatttgggggtaggggcacaatta

SEQ ID NO: 868676 - DNA, 635 bp, Homo sapiens
aatcatataattcatccttctaaagctgcaaaatctcctctctgctagattcatttaaaaactgggtaacttggaaactctactgattcagactgctttaattttgttaaacattttttaacaagaaaattagaaaagtaatgaagacttattgcaaaatatttaacaaatggagaaaagtataaaggcgaaaacaaagccaacttcaaacttaggcgtaaacctgtcctgagcctctattccagtgaagtttaggagtaaaatgtgataaattctagaatttcccagtcatctcaccaaacctggagcytcatagcgacagtcactgtcacaagatttgtccatctccatggaagagggcaatgacttttcaagctctaagttcaaagccaaaaccactctgctggtttgaatgtttcataactgttccttcttgtgtacagaaattactcttttctagaagggccacattctgagttcatccaaatgtattaaattaatgtcttgatgaagtaattgaaattgactgtaaaaagaggaaattttattctaactggaacagcctgctaggatcaatgattttaagtcatgacacttatcttgatcggtcatacacatgacttatcagtttgctt

SEQ ID NO: 868677 - DNA, 577 bp, Homo sapiens
caagtgtgatactgagagcactccctagtaaactacctgcatgcaaaccattagatagattgaagggttctggggaccaagaggtggaagtaggagtgaccctgctttctgtcactcccagtgactgacttggagaatttgtggtttttggcttcacaactctggcttttgtggttcagaggtcctggttcccagaatggaaatgcatccaccacaggacatagcaagtagcccactaaacctcagactatggcttccacctggttgtggcaagcttcttatgccaggcaaagagaggagtcaccattctagctggaataactgaccctgatcatcagaaggaaggagagctggaaaaagtgagtggcaccaggtgatctgcttggatgcctcctgactctcttgccccactttgatgagaaatgaacaagagcagyatccatggcttgagaagtacatagtgaccaggcacctaagctactcggggatgagagtatggaccactccccaggtaaaccatctaaaccattaaggcactagctagagaagatgatggggatctagaatggatagtaaa

SEQ ID NO: 868678 - DNA, 622 bp, Homo sapiens
aatgcaaggaagctaagaaccttgaaaaaaggttagaggaattgcaaactagaataaccagtttagagaagaacataaatgacctgatggagctcaaaaacacagcacaagaatgtcgtgaagcatacacaagtatcaatagctgaatcaatcaagtggaagaaaggatatcagagattgaagatcaacttaatgaaataaagaatgaagacaagattagagaaaaaagaatgaaaaggaacaaagcctcgatgaaatatgggactctgtgaaaagaccaaatctatgtttgattggtgtaccggaaagtgacgaggacaatggaaccaagttggaaaacactctttaggatattayccaggagaacttccccaacctagcaagacaggccaacattcaaattcaggaaatacagagaacaccacaaagatattcctcaagaagagcaaccccaagacacataatcatcagattcaacaaggtagaaatgagggaaaaaatgttaagggcagccagatgggaaggtcggattacccaaaaagggaatcccatcagactaacagtggatctctcttcagaaatgctacaatccaggacagagtgggggccaatattcaacatt

SEQ ID NO: 868679 - DNA, 524 bp, Homo sapiens
ttaatgaattataatttttgttgcttgggaaaaagaatagacacacacgtgacagtgcatcacttcaccccatcatttcatctcatcatttcatcatttcatctcatcattttatctcatttcatctcatcccatctcatctcatcatttcatatcatctcatcatttcatctcatcatttcatcaaatctcatmtcatctcatttccatttcattttcattatttcatttcatcatttcatttcactatttcatttcatttcatctaatttcatttaattcattatgtcatttcatataatctcatttcatttcatctcatatttttgatatcatttttcatctcatttcatctcaattcatctcatcatttcatctcctcatctcatttcctcctttcattacaacatttcatctcatttcttctcatctcatttcaatttcattatttcatctcatttcattatttcacctaatttcattatttcatctcatctcatctcagttcatctgatctcatttca

SEQ ID NO: 868680 - DNA, 524 bp, Homo sapiens
ttaatgaattataatttttgttgcttgggaaaaagaatagacacacacgtgacagtgcatcacttcaccccatcatttcatctcatcatttcatcatttcatctcatcattttatctcatttcatctcatcccatctcatctcatcatttcatatcatctcatcatttcatctcatcatttcatcaaatctcatatcatctcatttccatttcattttcattatttcatttcatcatttcatttcactatttcatttcatttcatctaatttcatttawttcattatgtcatttcatataatctcatttcatttcatctcatatttttgatatcatttttcatctcatttcatctcaattcatctcatcatttcatctcctcatctcatttcctcctttcattacaacatttcatctcatttcttctcatctcatttcaatttcattatttcatctcatttcattatttcacctaatttcattatttcatctcatctcatctcagttcatctgatctcatttca

SEQ ID NO: 868681 - DNA, 507 bp, Homo sapiens
acttcaaagtcatgactttatttttatagcaacgaggttgccacgaactgagtcaaaatgtgagggaacacagcacctgcaatgagaaggaggacggatgcacttacataggacagaagcaaataggcaccaccatgacaagtaaagctggaataatcaataaattcctaaagacaaagtggggctggtgagattgggagacsgctgacagctgcagaagttgggaaagatccatcatcttgaaaactttttccccacaaacccactgcgatctctcaagcaattggtaaggaatccaagagagtctgtatatgacacagatcagggagagcagaacacttgggaggtgaccaggtcttgggggtcgagcccatatgaatgggattagtgcctttataaaagaagctcaatggagttcttgtgtgccttccactatgtgaggccatagaaagcaggcaccacctatgaaccatgaaatgggctctcatcaacactgaatttgtgagc

SEQ ID NO: 868682 - DNA, 650 bp, Homo sapiens
aactggaatgtggtccttgccacttaaagatattttttataagcttaagaatggtgtaaacattgggttaaactgcttagtcatataagattttctagcctattggctattctagaattacatcacttgcatctgagaaatttgtacatttatcttacttatcaaaaaacttatttcacaacttcttgctagaaaacataaatcagttcaagttccgtaatgtattgtcattttttgtcattatatgacatcaccatttttgtttattttatttctttgtcaaataacttatagtttttatttatttatttctgagacaggrtcttgctttgttgctgaggctggagtgtagtgctaactgaagcctcaaacacctgggctcgtgatcctactgtgtcagccttccaagtagctaagactataatcatgtgacaccacacccgcatttttttttcagagatgggatcttgctatattgcccaggctaatctcaaatcctgtcctcagatgatccacccaccttggactcccaaagttttgggattacaaaagtgagaaagtgttcctggctgtattatactttttaaaatgagtattctattgcttcacaattctctgtttcttgtcattttatacttggtaagtttttc

SEQ ID NO: 868683 - DNA, 648 bp, Homo sapiens
ctctactgtatcattcttttggcaaacaatcacagcagtgtctccattagtgggcactatgcaaatgaaataggctacaataaacatatcactaactctgactgcattagtccactcttgcactgctataaagaaatgcctaagactgggtaatttataaagaaaagatgtttaattgactcatggttctgcaggctgtacaggaagcatagcagtttctgcttctggggtagtctcaggaaacttacaatcatggtgaaaagtgaagggaaagcaggcatgccctacatggmtggagcaggagcaagagataaattggggaagtggtacacacttttaaaccaccagatttcataagaactcactattgcaatgacagcaccaaggaagatggtgttaaaccatgacaaactgcccctgtgatccaatcacctccctccagcccctatctcaaaccttggggatcacaattcaacatgagatttgggtggggacacatatccaatatgtcaacatactactggcagaaagcattaataataccacctctgccctagatgtgtagagattagtctaaactcattggcagagttagtgatgggcaactgcattgctctagatttcttatctagacagtgtctgttccat

SEQ ID NO: 868684 - DNA, 671 bp, Homo sapiens
ataaatgggatctaactaaactaaagagctgctgcacagcaaaagaaactaccatcagagtgaacaggcaacctataaaatgggagaaaatttttgcaacctactcatctgacaaagggctaatatccagaatctacaatgaactcaaacaaatttacaagaaaaaaacaaacaaccccatcaaaaagtgggcgaaggatatgaacagacacttctcaaaagaagacatttatgcagccaaaacacacatgaaaaagatgctcatcatcactggccatcagagaaatgctaatcaaaaccacatgagataccacctcacaccagttagaatggcgatcattgaaaagtcaggaaacaacaggtgctggagaggatgtggagaaatagaaacacttttacatggttggtgggactgtaaactagttcaaccattgtggaagtcagtgtggcgattcctcagggatctasaactagaaataccatttgacccagccatcccattactgggtatatacccaaaggattacaaaacatgctgttataaacacacatactcacgtatgtttattgtggcactattcacaatagcaaagacttggagccaacccaaatgtccaacaatgatagactggattaagaaaatgtggcacatatacaccatggaatactat

SEQ ID NO: 868685 - DNA, 659 bp, Homo sapiens
cctctatggccaacatcattgcgtctctgctgagaacccatagccttttttgattctgggcactgagacataaacaagacctaaagacaaatgccagcttcttattagattttaacctttctttcagattttctttggaatactgaatggactaatcaattttcctattttcattctagaaactcaaatagtacttgccaggtagagatgaaaagacagtaggttccagaaccctttctttcttctaggacatacacggggcacacaagcagttttataagttacaaacatatgcagagaataaaattttaacataaaagaaaagtgtgaaatgcctcataacattaacttttattcatgtatggagaaaaatcactatttccccctatttgcttcatttaaaaatttcctccagtgaaatacaattagttgctgaaaaaaggtaaccctaggaacaaaatgctgtgcacctgtgtcttctagacttycagtggtgttgctgtgccaccctcagctgtcaggtcaaagattagttaggatgaaacttttctggggcagaatgaatgcataattgcatttaaaaatgaatctgcttgatactcaagattacttgcctgctccatccgtgagattcataaagaaattaggtcactcagtag

SEQ ID NO: 868686 - DNA, 654 bp, Homo sapiens
tgaggtggtggtctctgatggagatgaggaacttgttgggaactggagcaaaggtgactcttgttaagttttagcaaagagactggtggcattttgcccctgccctagagaggtgtgaaaatttcaacttgagagagaygatttaaggtatctgcaagagaaatttctaagcagcaaagcattcaagaggtgacttggttgctgttaaaggcattcagttttataagggaagcaaagcataaaagtttgaaaaatttgcagcctgacagtgcaatagaaaagaaaatcccattttctgtggagaaatttaagcccagtgtagaaatctgcataagtaacaaggagccagatgttaatccccaagaaaatggagaaaatgtctccagggcatttcagaggtctttgtggcagtccctcccattacaggtctgaaggcctaggagaaacaaatggtttcatgggctgggcccaggttccccatggtgtgtgcagcctagggacttggtgctctgcatccaagccactccagccatgactaaaagggaccaaggtgcagttcaggctgtggcttcagagggtgcaagccccaagccttggcaggttccatgtggtgtttagcttgtggatgcacagaagtcaagaattaaggtttgg

SEQ ID NO: 868687 - DNA, 615 bp, Homo sapiens
atatctaaaattagttgactttaaataaaagatatttttaacatgagttgattcgacagtttttgaatctaatgtactttacaagagcttaggaatcttattttacctgtatcttgacatattttgctttgaatcaccttagaatgttaatcataaattatttcaagcaacacctaagagagaataaaataaaaatgaaattaaatcactagaataatgcagtggtaatataaattatcaatattacatcatcgttcagttttttagtgagttgtacaattttatcatttttcaggaagttataaaatagtctaatagcatgatcttgtagccttctttaaaatagcrttaaacaaacatcagaaatcagaatttttataaagaattctaccaaaatggcaaaaagaatgatatccttaattattatgtgaatcaaagtgtgaatgcaaagagatgtatagtagcacttaagatactagtgataacagtaaaactcattatgttagtgaaatttcagactataggtcatcagaaagaatattctagatgaattttctcaaattcaataatcaatgagtaaaccataatatatttccaagaatgaaaaattaatac

SEQ ID NO: 868688 - DNA, 627 bp, Homo sapiens
tgtaacttattcaaacaaaagcaaacatacacgtttattccacaagtattccttgagcaattcctgtctctttggcacgatgctagatttgggggatggatgcaaggaagaagacagatatcatcagtccacaccattgtggagcttaaatgacattggatgggacagacaatgaacaagacaacaagcaagaaaagaaacctttacaagccagtgatccccgtggagaaggagatgaacagagttttgcaatagaaataatgaaggggttatttaggaggttctgttttcaattaagtggtcagaaaactcctcttctgtggcaaattagtagacaatattcagtagacatactaataattctccaaaccttgagaattgagttggtttttccatttacgytggcattctttgtattttgaatacattttgagcagcatgtaactagatataacttcattacaaagatatcatgtacttaatgtgttacaacattcttataacagggttatatgtaaccaaataggttgttattattctttattaaaattttcagggcagccaggttcaatattgtatacccacttaaactaataaacttttaatacatatattttaaattattcc

SEQ ID NO: 868689 - DNA, 687 bp, Homo sapiens
tttacccaggatatcacttctggcttgcaacatgaaattacaaagcatactaaaagacaaaatcagttggaagagacaggtaagcatccaaaccagacccagatatgacagacatgttgggattactagtcctagaatttwaaacaactatgataaatatgctaagggctctaattttaaaagtcaaaaatcatgcaaaaacagatagataatgtaagaagagtgcctgaaactctaagaaagaataaaaaggaaataccagaaatcaaatacatgttaataatgttcatcaaaagactgtacgcagcagaagaaagaatcagtgatctccaagtaatgtcaatagaaacttccaaaacaaaaaggcaaagagaaagaagaatgaaatggcaggacaaaatgttcaagaatgaaggagaatcacaaaagctgtgaggtatgcagaagaagaatacaaggaggagaagaaaggaagagaaaaagtatttgaagtaataataagtgagaatttcccccaaattaatgataaatatgaaacaacagatccaggaatttcagagaacagaaagccggctaaataccacaaaatttacacatagatatataattttcaaactgcagaaaatcaaagaaaatgacaaaatcttgaaaaccagaggagggaaataaaaaaggaaaacaatacct

SEQ ID NO: 868690 - DNA, 568 bp, Homo sapiens
caaacaatcttaattggactctattcagaaatgtagagcctttttagttaagcaaggatagttcctagtttgtcaaattccataagatgtcattcatttcaaaacagatgctggttgagtaagaagcaaaacttcaccagcataggtatgttttaagaagtataaccttgaaccctctcctctcagtctgtttcttgtacatacatatttatcgtcaattgaaaggttttgagcgggaggtggtgattaaatgagactattagcaaagctcaagtcaggacggcctgatttcacttctacaccctgtaaaatgacrgctgttgaaccgtgtggtctttatgccattagcctatgtaaagtatagataaagaaacagcccacgaaatgccatctcctatggacttgcatgatgctcagcctcatcattcagttgtgaaaaacattgcaaaggtagtgtagagttcccatttaccacacactcggttcccccttattcaccgtttaacatcaatatgaatatggtacatatgcgtgatttaaaaaccaataccaatttgttaagtataat

SEQ ID NO: 868691 - DNA, 630 bp, Homo sapiens
tcatcattcagttgtgaaaaacattgcaaaggtagtgtagagttcccatttaccacacactcggttcccccttattcaccgtttaacatcaatatgaatatggtacatatgcgtgatttaaaaaccaataccaatttgttaagtataatcaattatatctttagattttcttaacataatgtccagatagcacattacatttagtcaccatctcttcttagatgcctctgggctgtracagtttctcagggcttccttgtttttgatgatcttgacagttttgacttgtgctagtctggtattttgtaaaatgttcttctatcgccatttgatgtttttctcatggttacagtggagtcatgtgttctgggcagcaagacaacagaggtaagctgctgttttcatcacattatatcaaaggtgcatactaatcgcatgattcatcactgctgatgttgaagtgatcacctggctaaggcagtattttccaggtttctccactgtaaggtgattcctcagccttttcatactgtcctcctgggaaggaagtcactgtgcacagcccacattgtaagaattgtagaaagtagagggttctgctctactccctttggaactttttgtgtggga

SEQ ID NO: 868692 - DNA, 630 bp, Homo sapiens
tcatcattcagttgtgaaaaacattgcaaaggtagtgtagagttcccatttaccacacactcggttcccccttattcaccgtttaacatcaatatgaatatggtacatatgcgtgatttaaaaaccaataccaatttgttaagtataatcaattatatctttagattttcttaacataatgtccagatagcacattacatttagtcaccatctcttcttagatgcctctgggctgtaacagtttctcagggcttccttgtttttgatgatcttgacagttttgacttgtgctagtctggtattttgtaaaatgttcttctatcgccatttgatgtttttctcatggttacagtggagtcatgtgttctgggcagcaagacaacakaggtaagctgctgttttcatcacattatatcaaaggtgcatactaatcgcatgattcatcactgctgatgttgaagtgatcacctggctaaggcagtattttccaggtttctccactgtaaggtgattcctcagccttttcatactgtcctcctgggaaggaagtcactgtgcacagcccacattgtaagaattgtagaaagtagagggttctgctctactccctttggaactttttgtgtggga

SEQ ID NO: 868693 - DNA, 684 bp, Homo sapiens
acatcattttaatgtccatgggatcaatagttattacctctttttcatttcagtattggcaattggtgtcttttgtcttttcttttttgttagcctagatagatatttatcagttttattgatcttttcaaaaaaaatcttttagttacattgattttctctgtaaattcttattttcaattttattkatttttgctctaatttttgctaatccttttcatctgcttgctttagacataaatttttctactttttctagttttccaagatggaaatttaggttactgattttagatttctgcttatataacatatgcattaattgctgtaagtttgcttctaagtattacttcatcgcatcccacaattttcataaatttgcattttcatttagttcaaaatattttaattgttgttgaaactcctgtgacctatatattacatgaaactaagttgtttaatttctaggtatctgaggattttccagctatattatgttattatttaataatttaatcccattgtggtctgagaacatactttattttatttctatttttgtatagtagttaggatatattttatggccttgaatgtggcctatattgatggatacttcatgcaagcttgagaagaatttgtgctgtggtgttgttggagggagtattctataaatgtcaatta

SEQ ID NO: 868694 - DNA, 645 bp, Homo sapiens
cttcatttggatctattgctgggaagctagcacaatctttctggggtgttatagagccctgttttgccttttttttttttaaatagaatcttgctctgtcacccaggctggagtgcagtaacatgatctcagctcactgtaacctctgcctctcaggtttaagtgattctcctgagctcagcctcccaagtagttgggattacaggcatctgtcaccatgcctggctaattrttgtatttttagtagagacagggtttcgccatgttggacaggctggtctcaaactcctgacctcaggtgatccacccacctcggcctcctatagtgtagggattacaggcatgagccactgcacctggcccctgttttgccatattacttttctggtcccttctcatttgggtagactatttcttctaattgttcttgaatttattttgattcacctgttttttaattttttcctctcttaaggacgtgacttttatatagtttattatagcctaatttggttcttagtgcttttaagggtgaagattctgtctaagttccttggttatatagagtctaagtgtgatgattctctcactgattgtagtagctttcttactggttatagttgctatatactctgcatgtgggca

SEQ ID NO: 868695 - DNA, 645 bp, Homo sapiens
cttcatttggatctattgctgggaagctagcacaatctttctggggtgttatagagccctgttttgccttttttttttttaaatagaatcttgctctgtcacccaggctggagtgcagtaacatgatctcagctcactgtaacctctgcctctcaggtttaagtgattctcctgagctcagcctcccaagtagttgggattacaggcatctgtcaccatgcctggctaattattgtatttttagtagagacagggtttcgccatgttggacaggctggtctcaaactcctgacctcaggtgatccacccacctcggcctcctatagtgtagggattacaggcatgagccactgcmcctggcccctgttttgccatattacttttctggtcccttctcatttgggtagactatttcttctaattgttcttgaatttattttgattcacctgttttttaattttttcctctcttaaggacgtgacttttatatagtttattatagcctaatttggttcttagtgcttttaagggtgaagattctgtctaagttccttggttatatagagtctaagtgtgatgattctctcactgattgtagtagctttcttactggttatagttgctatatactctgcatgtgggca

SEQ ID NO: 868696 - DNA, 673 bp, Homo sapiens
agatgccaatgcaattgcaaaaaagtaaaattgacaaatgggatctaattaaactaaagagcttctgcacagcaatacaaatgatcattggagtgaacagacaacctacggaaagggagaaaatctttgcaagctatgcatccaacaaaggtcttatgtccagcatctatatggaagttatatttacaagaaaaatacaaacaaatccataaaaagtgggcaaaggacatgaataggcacttttcaaaagaagacacacatgtggccaataatcatataaaaatactcaatatcactaatcattagagaaatgcaaaagaaaacaaaaatgagatatcatcttacagcagtcagaatggctattattaaaaagtcaataaataacagatgctggtgaggttgtggagaaaaaggaatgcttacacactgttagtgggagtgtaaattagttcaaccattgtggaagacagtgtggtgattcctcaaagacctaaagrcagagataccattcgacctagcaatcccattactgggtgtatacccgaaggatgtaaatcattctgttataaagacacatgcatgcatatgctcattgcagcactatgcacaatagcaaagacatggagtcaacctaaatgtccatcaatgatagactggctaaagaaaatgtggt

SEQ ID NO: 868697 - DNA, 638 bp, Homo sapiens
gggaaaactttcagctttaatcatgaagtatgatgctagctgtggccttgtaatatgtgtccattattatgttgagacaaattcttctctatcatatttgctgacagttgtaatcagaaaagaatgtttaatttttacaaatgatttttctgcatctattgagatgattatatgatttttatcmttcagtctgttaatgtgatatatcacatttattgatttgtatgttgaaataaccttgcatttcagggataaatcccacttgatcatcatgagtaatattttaagtgagctactgaatttcatattttcttgagttttttgcatctgtgttcatcgtagatattggcttctaatttccttattttgtattatacatgtctggatattgtaagaggataataaaatgagtttgaaagcatttctacctcttcaattttttggaagagtttgagaaggattgaagtgaattatttttaaaattttagctagacttcagctgagaagctctctgtttctaggattttctttgttgggaggttttttattattgattcaatttccttactagttattattccacccagattttctatttcttcatgatttagtcttggtaagttgtatatttctagaaa

SEQ ID NO: 868698 - DNA, 638 bp, Homo sapiens
gggaaaactttcagctttaatcatgaagtatgatgctagctgtggccttgtaatatgtgtccattattatgttgagacaaattcttctctatcatatttgctgacagttgtaatcagaaaagaatgtttaatttttacaaatgatttttctgcatctattgagatgattatatgatttttatcattcagtctgttaatgtgatatatcacatttattgatttgtatgttgaaataaccttgcatttcagggataaatcccacttgatcatcatgagtaatattttaagtgagctactgaatttcatattttcttgagttttttgcatctgtgttcatcgtagatattggcttctaatttccttattttgtattatacatgtctggatattgtaagaggataataaaatgagtttgaaagcatttctacctcttcarttttttggaagagtttgagaaggattgaagtgaattatttttaaaattttagctagacttcagctgagaagctctctgtttctaggattttctttgttgggaggttttttattattgattcaatttccttactagttattattccacccagattttctatttcttcatgatttagtcttggtaagttgtatatttctagaaa

SEQ ID NO: 868699 - DNA, 638 bp, Homo sapiens
gggaaaactttcagctttaatcatgaagtatgatgctagctgtggccttgtaatatgtgtccattattatgttgagacaaattcttctctatcatatttgctgacagttgtaatcagaaaagaatgtttaatttttacaaatgatttttctgcatctattgagatgattatatgatttttatcattcagtctgttaatgtgatatatcacatttattgatttgtatgttgaaataaccttgcatttcagggataaatcccacttgatcatcatgagtaatattttaagtgagctactgaatttcatattttcttgagttttttgcatctgtgttcatcgtagatattggcttctaatttccttattttgtattatacatgtctggatattgtaagaggataataaaatgagtttgaaagcatttctacctcttcaattttttggaagagtttgagaaggattgaagtgaattatttttaaaattttagctagamttcagctgagaagctctctgtttctaggattttctttgttgggaggttttttattattgattcaatttccttactagttattattccacccagattttctatttcttcatgatttagtcttggtaagttgtatatttctagaaa

SEQ ID NO: 868700 - DNA, 671 bp, Homo sapiens
gtgcttttataggaaagttccttgagattagtagctctctttaaagctacaaattttcctaaaggacttgattttaatgcttgcattttgccttatcgtggcaaacttatgagaaatcacctccagaaatatgtgacaaacccagtgaattaatacaaccttctataataacaatttatcacctctgagccaggtgagctcagaggataaaaaacaaaaaaatctctttcatcmtttctctcttacctaatccccaaacctacattcagggagcagcttgctaaaactaaggttaataaatgtcactatctaccttaatgattggcaggctcagagtagaagggctgttggattctcattctcatcactgctgtctcttgcatcacttagtgtcaatttcttgatgatgatttaagagtatttttatttcaaataattaaagttatttatttctcatcagaaataaactttaaaaattatacagaaactgctgggttaatattggaagtcaaagttcacagacgaccctcagctcatacccaatgctatggcaaagccaggcttaaaggtcttgagagtcttagtcttaatctttgctttacaatccctcatactttctgaaatggactttcttcctcctgttgctattagtttttagactgcaaaaggaa

SEQ ID NO: 868701 - DNA, 663 bp, Homo sapiens
aggagtaggaaataagttgactcaaaaatagataaatgttaggacaaaagggaaatcataaggtgataattgcaagggcctacagagaaagttaacatgacaggtgatgacagcgtgtccttcgggataagacagaggcaatgagattagagagatctgaaatgaaacagctaaggaaagagatttattcaaggaagtattaaaaaatggaaatatttttctaaaatgtgtggatgtatgttagccaacatcagatatttctaaactagaaatggaaattgaagattatgtctagccatcagcaaaaatcgtatacaaaatagtgaaacacagagaggtgacctttgctttaacaaggtgaagcttattagtggaagaattatacccatagagcagcccttgtaatagcttttgcagcattattcaagcatatttgggtttaaatggcaagcttggtaatagtcratgtctttagacatatcatgtaatagcacacattttgttgaatggcagaaatattcaaggttacaacatttcagacaagaataatatctacagggctggttcctagtcttaaattttttatattttatttattctcaaaagataggttagctagttcctttactcattttatacagaagaaccattaattagcagtcc

SEQ ID NO: 868702 - DNA, 544 bp, Homo sapiens
gaggtaagaaacttaaaagatgagggaagaacaactgaaaaagtgtagagcaggggcatccaagcatgtggctttcctgggccacattggaagaagaattgtctcagactacacagaaaatacattaccactaaagatagctaatgaactaaaaaaagtcacacaaaaaaatctcataatgttttaagaaagattacaaatttgtgttgggccttactcaaagccatcctgggctgcatggaacctgggttggacaagtagagtgttcaattagattttaatcactaaaataaacaggctgattaaccaccttttttgccttaaaaatcacctttatcaargttttagaagtttcattcaaaggaaaatttgctcctgactttaaggatatcacttcatcattttatctatcatggaataaaatattgagacacaattctgacattctggtttagaaccggttgtcttttagctcaagctctcacaatttctagttgtttagcaagcatttaaaactatgaagaaaaatgtttacataaataaa

SEQ ID NO: 868703 - DNA, 677 bp, Homo sapiens
gcgacgtgtaagaaacagtcaaacaggtttgcaatgtaatatgttgtttatatcaccaaatgtaagctcctcaaaagcatggaccttgtccagtttgttcactgctgaatttcaagttctgtcagagtcccttttacatatcaaagctaacttgttaaaccagtaaaaaaaatgaataagtgccacgttattttgtcttactttgtgtatgccaaacaatttagggcagccttctcaatctaagatgaaccacttttagagaataatgtgtcctcagaggaagtttactttatatttaatggtacgtttgtttgaaaagcgcgcgygtgtgtgtgtgtgtgtgtgcctatactcatatttactaatatacaaggtttgtagataaggcttgactaaatctgaaggtaagatttacacctggagcatcttcgtacacccagcatagagacaacagatcatttacgttttctggtttaccacataaactgctgattactttcctattttggactgatacagttcagaaaaaaatgtaactcttaatattcctctgcctgactatttgctattttacttataaagattatgccttccaggtaatgatatgttttgatacccctttctatctttttcccggatattttctgagatttttatcttagaatggatttacaggg

SEQ ID NO: 868704 - DNA, 638 bp, Homo sapiens
gccacctctggctcattttcacttgccattccatttgataatctagtaacttcattttgccaacttgatgaatttggttctaagtagtttaaaaatttaaggacatactatgtcagtatttacaggtgcttcttatttattcttcrgtattctcaaatgttcaatttgaggtcaagttttgctaaaaacaactcattgcaaatagtagatgttttataaatataagataaatttcttaaaattcgtgctgagttctaaagagaaaacttaggttaccaagtaacatgattttcagaacaccaccaatttgctatttcaagtctaattttatattagaccgattcccaaagcttttccattgttacaaaattttcaaaatactgtacttttattatacaaggtttgtggcctagttttattaatattccaaaagacaaaatattcaaacattcaattgtttcatcaataatttaaactaaatttactattttgattaaagatacaatgagtatctttgcatgaaatagattactaaattctatttgaaaactaatgtacacttttattctagtttttaaggcaacatatgtttattttgaactttattttaagaaaacataccaaaacaatgccaaatt

SEQ ID NO: 868705 - DNA, 689 bp, Homo sapiens
gcaacggtttcttatacatgagactaaaagcacaagtgacaaaagaaaaaagttagagtagattcttcatcaaaattaaatctaagtttgtaggtagagcaccaaaggagaaacaggcaatatgataaggcaaagacttttgaccatttacagagaaaagctaaaatgtcaggttgattctaagttagaagagaagcaaattcacattttctagagaagaactacagtgtccataggtaactgagaatgaggggaagcaaatagtgaaaaaaatataaaaagataaaccattggaatatgagtcttgaaggaataaaaatatggtaacaaaagttttaacatagatgaaaatgaaagctgatgtttatcaaattattttgaaatcacattcctactcattcatttgcaaaaaaaaaaaaaaaaaaaaaaaaaaaaaaaaaaaaaaggatttgttcaaatccctccaagcagctcctgtgtcctggccactatgggggatgtaaacactggttttcatgcttagtgtctctttcttgcctgcmcctggtcagtgtatcatttctggaggaagaaaaactgactgggtgactatttcattctaaccaatgatctcattcaaacaatttttttttcatcaaatagtcccttttcaattttttttaatttttaaaaaagtttttagacaagac

SEQ ID NO: 868706 - DNA, 646 bp, Homo sapiens
ccattggtgttaaaaaggactccacgactaaattcatttgttaatcaatttaggaaaacaattcacttctgattgtatcttgtttgatagctttgacaataatagatattaaaataccattataattatcataagctcatacttttttttaaaggattctaaaatttgaacggccattctaattttaatatgacagcaagaaatttctttagtggtataaatatgctattactaaaattaaaagatttgaaacataaaaatcatatgatagggtttttatacttagggaagtttccttgtcccagtttgtattcctagcgccatcatgtggtcatttgatgaaaactttctttttcaattatggaaaatttttgttttggcagtaaactatagtggaaagaatattggatcttaatgtaggaaacttatattctagtcctggaccctttatctgattcctctagagcttagtaaggccttatttccctgakttttaaaatatagtgataaactaatttttagggtccctttcagttttataattctgttatgtctgttcatttgttttagctaccacttagagtatatttacttacgtaccgtgactgttccaagcatttccaatacattaactcatttaatctgc

SEQ ID NO: 868707 - DNA, 647 bp, Homo sapiens
ggactccgaatgtctggtcttaatttcctatctgatcaggatgagccaattctttgctaggctctctggtcacagctcaaaagaaggcctacaggacttctatttcttaagaacaaaatggcagtaacaataggcgcagcattggaccctcatcaagtattgttcttaatttgcttaacttttatttaaaagttacactaggaaaatcttatctcatatataaaagcagtaaggcaaactgccttttcatgcctaaatttctgttgggtgatttcatatatttttttctaactaaaaccctaaaccatagccaagatttactttctttttacaagttacacatgatgttggttgcattgctttccagagtgacaacaagggtgyctactttatgaagtttacatttagctaatggccttaaattatgtgaacaaagattaatgatggaatctaattcctgatttaccacttataatatttatcatttaaaatcaccaagaaggtctttataaaagacccatgcaagtaatataaatcctgctaaaatcttgaataattctgatttaattctacaggtttgtaacagaatttgtaaacctaggcaatttttcagctcttcgcactttcagagtcttgagagctttgaa

SEQ ID NO: 868708 - DNA, 647 bp, Homo sapiens
ggactccgaatgtctggtcttaatttcctatctgatcaggatgagccaattctttgctaggctctctggtcacagctcaaaagaaggcctacaggacttctatttcttaagaacaaaatggcagtaacaataggcgcagcattggaccctcatcaagtattgttcttaatttgcttaacttttatttaaaagttacactaggaaaatcttatctcatatataaaagcagtaaggcaaactgccttttcatgcctaaatttctgttgggtgatttcatatatttttttctaactaaaaccctaaaccatagccaagatttactttctttttacaagttacacatgatgttggttgcattgctttccagagtgacaacaagggtgtctactttatgaagtttacatttagctaatggccttaaattatgtgaacaaagattaatgatggaatctaattcctgatttrccacttataatatttatcatttaaaatcaccaagaaggtctttataaaagacccatgcaagtaatataaatcctgctaaaatcttgaataattctgatttaattctacaggtttgtaacagaatttgtaaacctaggcaatttttcagctcttcgcactttcagagtcttgagagctttgaa

SEQ ID NO: 868709 - DNA, 582 bp, Homo sapiens
cctgtccctaaaaaaaggaccacatttgttttcttcataaataggaacagtgaatacatcctgcacacactattctgtcatatgtaatataatgagaccttttattgcataattaaattaatctcgttcaaaggttacaaaaaaactattacatacacccactgcttactgaaaactgccaagagaaaagtacttttggaatttaagacaacgttatgtaatggaaagtgtatttttgttatcagaaaaaaaacccagtttgaatgtcaactcagctactcaccgatgaccttagacaagttgtttaatttgtacaagctgyggttagttcatctgtaagaagctgagataacattcattatagcagtggaaagagatggagcaggttaaggttaagttgcacctaacaaagtactcaacaagttagatcccgcctgccttcagttgtcaggagtacattttaagtaaactgggcattactgatccttaagaaaatgggtaagtcagaaaacttccccagtcaatttttaaaagtcttcggcgatggttttctcacgttgagagccatggttcgccccaact

SEQ ID NO: 868710 - DNA, 624 bp, Homo sapiens
agcacaaaaagtttgggacacaaaagggcgtaaatattcaccaaaagatgaagaatggtacaggtgaaacaactcacccatacttcttgctgaattacagccatcatatttttaaagacagggtttcagtctgtcacccaggctggaatgcagtggcatgaacatggctcactgttgccttgacttcctgggctcgagctatcctcccacctcagcctcctgactaggtggaacacgccatcatgattggctaatttgtaaattttttgtagatatggggtctcaccatgttgcccagcctggtctcaaactcctggcctcaagcaatcctcctgcctcagcctcctgaagtgttgggattacaggtgcgasccactgcacctggcctacagttatcatttttaacacatgtgcatgatctaacttactggagtcctgccaaaatggttgcccaggaaaaacagtattactggaaaccttctccaacgatagctcataaggtatacaagcagtcatatttgcccaaaatataatccaggaaaagcattacttacttcccaaagacactttcctttatctgagactccctttgaaatacagcaactagatttttttctaattgcc

SEQ ID NO: 868711 - DNA, 656 bp, Homo sapiens
cccaatttataagagacaggaaaacatgtaaaacaaccaccacatgtgaacaacaaaatcaaaattgtgagaaattctccaggacaaaagattcagcttcttcaacaacaataacacatgaatcatgagagacataggagaaatgtcaataaatcacaatgtttaggctatatttggattatgattaaaacaaactattgaaaaatttaccttaccatcacaaagcagatgagaaagaaagaaaatgaaattttaaaaaaaaatttacctgataatcagaaatctgggaacactggatagtcgatgctaaggaattaattatgtgagtgtgacaataatattgtggtcatcttatctttgagaggcacatatcaaagtattccgatgtgatgtctgagatttagttcaaaataacattgaagagggtagagttgacamaatacttcccagacattcttggttgtaattgtgtatggtatgtatgaataagtaatgatacatcgggtccactgtactgttttttctacatatatttgaaattttcaataatataacagttttttaataaactcaaagactcctatgaaatagcctcctttctcttccaaacttggggacaaattatatttagtgatattataagatctgaccagaag

SEQ ID NO: 868712 - DNA, 625 bp, Homo sapiens
tttttttctctttctacctcatttcttcaggatttggaaactatttgtgagtattcatatggcaatatagtcattttgcataagtgcaataattttttttttacaacaaaacacagctggggaaactggttgttttaccaaggctttgactggaataccatgcttttctttaaggaatcaagcttgacttatatagccaataatagatggtcggaaaaactggcctcatattttgtctacacagtccttgtacagggatcctaacctgcagtgagctaaaaaaaaaaaaaaaaaaaaaaaagtcagtttctaacarattcagtggccccaagatttcctgggaccacaggagaagagaaatctacccaactcataggtatttagggataaatgtgaaaatggttttcttgctgcactttatgcaattaattacattaagcataataagactaaagcttattttgcaaacaaaccagtaacattattatttctttcgttctaacaaaaatgagaattaaacaaaaaagtttgtttccaaagttaaatatacctactagtagactctactagtagattctagattcagcaattatttatgagatttgtcttcattttagactagccc

SEQ ID NO: 868713 - DNA, 565 bp, Homo sapiens
ctacttctgcaaggttccaaggagcactagcactctaaaatattttcatttactttcagaaacttaatgaacctgtagtccctatgaacacctgcttctggttcctttactctagaggtttagatttagccttttggattytagatcaaagtgagaggggtttcaacaagtatccttcccctaacggaccctagaaagcaatccctgccacttctcactgagacactgtctaaagcactaagtgtctttagacacttagtgtctaatccatctaatcctttctcttggcctttctcttgggaaccactgtaagccctcaagggaataagtgagcctctgctctcagattctttattgtcctatcagttctctggtagcatggaccaggtagttcagatttttttttttttttcactttttctagttgtccttatggtagatttgatgtttgttatttatctagaaaaagattttctttctccttagaatttgttagtctcataaggagatgcctggcagctggaatattcttgagtcttaagtccattcttccctctggaaagaa

SEQ ID NO: 868714 - DNA, 565 bp, Homo sapiens
ctacttctgcaaggttccaaggagcactagcactctaaaatattttcatttactttcagaaacttaatgaacctgtagtccctatgaacacctgcttctggttcctttactctagaggtttagatttagccttttggattctagatcaaagtgagaggggtttcaacaagtatccttcccctaacggaccctagaaagcaatccctgccacttctcactgagacactgtytaaagcactaagtgtctttagacacttagtgtctaatccatctaatcctttctcttggcctttctcttgggaaccactgtaagccctcaagggaataagtgagcctctgctctcagattctttattgtcctatcagttctctggtagcatggaccaggtagttcagatttttttttttttttcactttttctagttgtccttatggtagatttgatgtttgttatttatctagaaaaagattttctttctccttagaatttgttagtctcataaggagatgcctggcagctggaatattcttgagtcttaagtccattcttccctctggaaagaa

SEQ ID NO: 868715 - DNA, 628 bp, Homo sapiens
ataaactcaagtcataaaacatgtttttccttgaaaagtagaaatgatgtaatgcgtgtcttaattgaataactgtctttgtttctcacttctgtaatatgcttgtccctgcacagatctacccccaacccacaaaatgcttaaaatgtaacttacctctttgttcagtgctcagtcctttgcatgttaatctgactggactggtgcacctaaaaaataaatatcctcctcaaccccatcagtctttctgattccttatcaatcccactacagtatgataaagatattttcaaacactttgatatttttaaggtttttaattgctcctaagttttaaagttctaatatcaggctttaaggtctaagcaaacytgtaattattttttaatgtaattacttatttaaattttataatttgtacaagatactttactaaaatgtttacctttcttcattcatgaataaattatgtttccataaatgtctgtttggtctcactttttttttgttggtaggtaaacctatcctagcatcagtattatgctcttctaagatttaacagtaaggcatatggaatctcgtggaacacatcttccaccttcatcatttccataaagggtttcttggt

SEQ ID NO: 868716 - DNA, 558 bp, Homo sapiens
tcactcacttatactcattgagggctttcaatgtatcaggcactgctccaagtgtgtcacatggatgatttcattacacccacaataggagtaacagacaggtactcttattcccattttacaaatgaggaagcggaagcacagagaggtttagaaagttgtccgtgctaggaagtgatgaygcatggtttcaaaaccaggtcatggggctccaccactgttgctctgaaccaaaccaacacccagggatccttccagaccctccacaggtgctcaggcattggcagagttacaaatcttcagcccagaggccataactgccaaatgggaaaggacaaaggtttgccctccctgtactggatatgagattgggtaacacttgcttagagcctacgatttgccaggttccatgtttagtgctttatatatatgatatcatttggttctcacagtagtcctgggagaaaggaatagttgtcctcttaagtagaaaaacttgtgccagaaaacttacttaccctactcaaggacatacagttaataaatagcagggcagga

SEQ ID NO: 868717 - DNA, 657 bp, Homo sapiens
ttggtttttttgtttgtttctgcactggcgggcatacccagcagcaatgctgtccctcgccttcctgcagctgatctttattaatgtttactgttcactggtataaactgtgcaactccgaattggattagggggagatctggtctcgattaaagctgtgataaatgagcactgtttacatttsctcacaccctcccttctccacacacacacacacatcaaattattctgaaaatgaaatgcaaaataaaatgaggaagggttctgttcttcattaatgtgtaattataaagtgctggggctcccctgctgggtggaaaagtaaaacccataggaggggtgagaatgcttaaggggggacattcttcattgctattaactatgggtgaattattgttttcacatttttacaaagagatgaatgaaaatgaggacttggataagatctgtaccccctcatggaatcataatggggagagaaaagcaagtgggcagaactgttcacattgcaaaaccagagcccagtggtctactctcttttgatttccttgctcttacttttcaaaaagtaagctaaatttaataagtgccttgtaagtcagctttaattcctgattttaaatcacctagtcttttgtgaaaatgcagtagaggtgt

SEQ ID NO: 868718 - DNA, 668 bp, Homo sapiens
tcttactcagtggttctcaaccttgactgaacattagaatcatttagagttattttttcttccctttttactgatgtattacatatagaaaagtacatatatctaggggagcttttagaaactgctaatgccccctataatggttaaaatttaaaatactgacaatatttggtgttgtgacaaatatgtaggacaactgaacactcacacatcactggtggaagtgcaaaacagtacaactactttgaaaaatgttttggaggccaggcacagtggctcatgcctgcaatcccagcactytgggagactgaggcgggcagatcacgaggttaggagttcaagaccagcctggccaacatggtgaaaccccgcctctactaaaaatacaaaaattagcagggcatggtggcacatgcccgtaatcccagctactcggaaggctgaggcaggagaattgcttgaacctgggaggtggaggttgcagtgagccgagatcatgccactgcactccagtctgggagacagagcgagactccgtcttgggggaaaaaaaaaaaaaaaaaaagaaagaaagaaagatggtttggaagtttcttataaagttaaacagacacttactacatgacccagaaattccactcctatgcatttacccaagagaaatgaaa

SEQ ID NO: 868719 - DNA, 502 bp, Homo sapiens
ttgcccgacttcttctaaagtgatgcactcttttatcctggaaaagacagaaagagtccttttactttactgaaaatttctgattactactatagatctgaaagttgtcaaaaacttaaaccatttgttttgggtttaaacattataaataatgagaaaaaagattattctttttgagaagcattcttgaacactgggataacatatataccaggatggctagttttatwaaacagtttagttaaaaaagaaatcaattaaaaaaaaagaaatcccattaaactcagaaataacaggacttagactcaatatcattttatgtacttcttaattaatgattttgcagtaatgtcccaaagacagctggtagaaaatgtaattctaaaaaatactgttttcactgactgaactgcatctaataggaaccacggcttgtgaacagctctccaatctgaaatttcatgtttttaggttaaaagatgtaagttttggcatttaaaga

SEQ ID NO: 868720 - DNA, 654 bp, Homo sapiens
tttaaattacctgataattatatacaggcaactgatatccagtgatgacctgaactggtgaatttgggtaagtaggatatgcctgaaaatcaagtttacagaaagaatgaataatataaaacattttttaaaattagaaatattattcccaatataacaaaaatatgaaaacttttaaaatatttttctatatacaacaatgcagaattctaaatgcatgactgactttatraagaaagaaatattctctgtcaagtgttaccctttgggtggggagggggaacagacaaatgacaaaagaagtgactatttcaacaggcaaagtttatcatatttatactgtgtacttattcccacccagaagttattttttatactggtgataaggctctattcagacagacttcaatgtaagttaaattaatacatttgctatttctttgtcaaaatacttctagacagttttgtgtttgacaatattatagggtaatatgtagtcctcctacagatgctatggctttttctgtacttcatttcgaagaactaagggctgtatataatccaaaactggaaaagaaacagtataatgtcttatatttttcaataaatagctactgattgaaaacatataggtggcagcatacacgaatacac

SEQ ID NO: 868721 - DNA, 627 bp, Homo sapiens
acacaccaaattaaaatttgtcatcatgaagctaccttacccttatttctctaatcagtgtcaagaggcatcaagtgaaagttgatcaaaaacttttcattaccctgccctgtctccaacccttcctgtctgtagytcatgaacctaggtgcccagtcaaaaataaacaggttctaacaagttatgtaagattcctctaagtttggatttttttgaccagaaagtgtatcgtcttccaaattttacacaagactgagtatatcacttgacactaaacattgtatcaattaaacaaatgagatttttctattagattacttacttctactatcttctgcacatccacgtcattaaaaaatgaaacaaatccatagctataaaggcagataaatgaagtataaaatcaccatcatacagtacatggttcagaacttctactatatacggaagtgatcatgactaaaatatgaataatatactatgctaaatatttaagatgtacatgatagatcctctacaaatactgctttttcttcatctgaactatgtcaatcaaaatgtgctaagattagggtagtgtgaaaacttcattgattaacaaagaattcatatccatgaacctgaatt

SEQ ID NO: 868722 - DNA, 606 bp, Homo sapiens
tcctttcagatgtttttctaggtgttttcttttaacacttacatagaacatttgctatttgaacttatagaacatattgatacataaaatatgtggtatttttattatacttgtaatagagaaattatattcatataaaaatgttatatataacttatagaaaatatatgcttacactatatatttatacttaaagggtatatagagggaatatatattattttggggtatatgttcttgaacaaaaatgctgttaaaatgtatgtaacttgattttttttctccaacaatatgactcagaaatatctacattactaggtagatatattttttttcttttttagaaatggaktcttgctatgttgcccaggctggcctggaacctctgggttcaagtgatcctcccacctcagcctctgagtagctgggactaatggggtgtaccatcacacccagttactcagaaatttctaatgtcagcatatagatctacctaattccttttaactttggcataattttacataatatggatacgccacagttattagccattccctggtcaattgatgtttaggtcttttgtactttgtcatggttataaat

SEQ ID NO: 868723 - DNA, 606 bp, Homo sapiens
tcctttcagatgtttttctaggtgttttcttttaacacttacatagaacatttgctatttgaacttatagaacatattgatacataaaatatgtggtatttttattatacttgtaatagagaaattatattcatataaaaatgttatatataacttatagaaaatatatgcttacactatatatttatacttaaagggtatatagagggaatatatattattttggggtatatgttcttgaacaaaaatgctgttaaaatgtatgtaacttgattttttttctccaacaatatgactcagaaatatctacattactaggtagatatattttttttcttttttagaaatggagtcttgctatgttgcccaggctggcctggaacctctgggttcaagtgatcctcccacctcagcctctgagtagctgggactaatggggtgtaccatcacacccagttactcagaaatttmtaatgtcagcatatagatctacctaattccttttaactttggcataattttacataatatggatacgccacagttattagccattccctggtcaattgatgtttaggtcttttgtactttgtcatggttataaat

SEQ ID NO: 868724 - DNA, 522 bp, Homo sapiens
gatggttttataagggattattccaccttcacttggcactttttcctgctgccttgtgaagaaggtgccttgcctccccttcacctgccaccatgattgtaagtttcctgaggcctctccagccatgctaaactgtgagtcaattagacctctttgctttataaattacccagtcttaggcagttctttatagyagtatgaaaatggactaatacagtaagttggtactgcagagggtggggttctgctataaagatacccaaaaatgtggaagcaactttggaactgggtaacaggcagaggttagaacagtttggagggctcagagaagacagggaaatgtgggaaagtttggaacttcctagagacttgttgaatgcctttgaccaaaatgccgatagtgatatggacaatgaagtccaggctgaagtggtctcagatggagatgaggaacttgttgggaaccagaataaaggtgactattgctatactttagcgaagagactggcagcattcattttt

SEQ ID NO: 868725 - DNA, 666 bp, Homo sapiens
gaaaaacaagtctatagagtactctggacattaacctttgtttttcttgtttctatagaaatgcttcttattaaagatctgttttcttgcatgatatatacaggcctagtccatctgcaatagcatctcctggagtgggacacagctgccgaaataaactgatctattctcaggactaagagactgattaagaatgatatacatatatatatataaatgtgctgttttctgcgtatcctaatttggttactttctattcctttgccttttttaatctaataaactctaaccaaaatatcttcaatgctataagccttactttaacatataaaasttcttaaagttttaaagtggaagctgaaagaaaatcaaaatattttaccccaaaatatatttctttgatgtattttgagacacctgtttagaaatccagcaaagagaagtagagaagtaaccctacaaagttgtcttttgtgggggcagatttgcatctgtagagaatctgcattgttgcagccagattttctctgaggcctccttttatccagatctaggaaagatttactgaaagtctgacacttttataggtctgaaaaaaacagttatcatgtattctttctgaggtctgctacctgtgaagtttcatctgcataacaagaccacttt

SEQ ID NO: 868726 - DNA, 574 bp, Homo sapiens
atgaggacaacaccaagccattcatgagggatctgccccagtgatacaaacacctactactgtgcctacctccaatattggaggtcatattttaacatcagatttggagaggataaaacacccaaaccatatcattccatccctggccccccaaattttatgttcttctcagattgcaatataaaattatcccttaccaataatytcccaaagtcttaactagttccaagcattaacttaaatgtccaaaatctcacccaagactctaggtacatttcttccacattttttttttttttttttttttttttttgcctgtagaataaaaaacatactatttacttgcaagatgcaatggtggtacaggcattgagtaggcattcccattccaaaatagagaaaatagccaatagaaaggggcaataggccccccagaagtctgaaacccagcagggcagactttaattcttaaagctccaaaataatccttgaatccatgtcccacatctagggtacactgatgcagggggtgggttcgaaaggccttgggcagctctacccatatggctttgca

SEQ ID NO: 868727 - DNA, 463 bp, Homo sapiens
ctgaaggatctctacaatgagaattataaaacactgaaagaaagaaatcagagatgatacaaacaaatgaaaaaacattccatgctcatgaataggaaggatatatattgttaaaagtcatcatggccaggcacagtggctcatgcctgtaatcccagcactttgggaggctgaggtgggtggatcatgatgtcaggagattgagaccatcctggctaacacggtgaaaccctgtctctactaaaaatacaaaaaattagccrggtgtggtggcaggcgcctgtagtcccagctacttgggaggctgaggcaggaaaatggcgtgaacctgggagatagagcttgcagtgagccgagatcacgccactacattccagcctgggcaacagagcgagactctgtctcaaaaaaaaaaaaacagacaaagtggtcatgctgcccaaagcaatttacagatctaata

SEQ ID NO: 868728 - DNA, 593 bp, Homo sapiens
tgaaacaatattataccaaatctatttcctttttattgactgttgatatgagatctctttcatactcacagtttcacgaacttattttctaaaacttattttgctacttctacaactcattggcaaatgctcaaacattaatttgagctactgattaaataatacaataactaaagaaatctcatgtttatttttattatgctcatccttttctttaataagaatctatacattarctgcacatttacagtcatgacaaaacttcttttatgtttgataccatatacactactgtaataatttgcatattaagcataaagctgtagcaatcatgtaaattaatatataccttttaatatagtcaccatttagactcggaacaattatttagacctcatttttatatcctggttttactgtatctaaaaacaataaagcagtggagccttaaagataaagcctctgcatataaaagctttgttcttaaaggacctagctcaattctgctatcagaatgaagaaagtcggtaagactactcccttcaccaaacttttcaataacattaatgtctataacagaaaccactaatcat

SEQ ID NO: 868729 - DNA, 593 bp, Homo sapiens
tgaaacaatattataccaaatctatttcctttttattgactgttgatatgagatctctttcatactcacagtttcacgaacttattttctaaaacttattttgctacttctacaactcattggcaaatgctcaaacattaatttgagctactgattaaataatacaataactaaagaaatctcatgtttatttttattatgctcatccttttctttaataagaatctatacattagctgcacatttacagtcatgacaaaacttcttttatgtttgataccatatacactactgtaataatttgcatattaagcataaagctgtagcaatcatgtaaattaatatataccttttaatatagtcaccatttagactcggaacaattatttagacctcatttttatatcctggttttactgtatctaaaaacaataaagcagtggagccttamagataaagcctctgcatataaaagctttgttcttaaaggacctagctcaattctgctatcagaatgaagaaagtcggtaagactactcccttcaccaaacttttcaataacattaatgtctataacagaaaccactaatcat

SEQ ID NO: 868730 - DNA, 515 bp, Homo sapiens
aggtttaccctaagcatttcccagcttgacttttttcctttagcttagtgatttgggggtccaaagatttattttcctttcacagggtctagtttcattcttttcatatggatatcaagtttccccagcatcatttgttgaagagacaattttttccccagtgtatgttcttggcatctttgtcaaaaatcaattcattgtagctgtgcgaatttgcttctgaattctctattctgttccattgatctatgtgtctgcttttttgccagcatgctgttttggttaccatggctctgtagtaaaatttgaagtcagacaatgtgasttgtccagttttgttccttttgctcaggatagcatatactattctgggtctttggtggttccatatacatttcacggtttttttttttctatttctgcaaagaatgtcattggtattttgacagggatttcattgaatctgtagattgctttgggaaataaggacattttaacaatattgattcttccaa

SEQ ID NO: 868731 - DNA, 515 bp, Homo sapiens
aggtttaccctaagcatttcccagcttgacttttttcctttagcttagtgatttgggggtccaaagatttattttcctttcacagggtctagtttcattcttttcatatggatatcaagtttccccagcatcatttgttgaagagacaattttttccccagtgtatgttcttggcatctttgtcaaaaatcaattcattgtagctgtgcgaatttgcttctgaattctctattctgttccattgatctatgtgtctgcttttttgccagcatgctgttttggttaccatggctctgtagtaaaatttgaagtcagacaatgtgacttgtccagttttgttccttttgctcaggatagcatatactattctgggtctttggtggttccatatacatttcacggtttttttttttctatttctgcaaagaatgtcattggtattttgacagggatttcattkaatctgtagattgctttgggaaataaggacattttaacaatattgattcttccaa

SEQ ID NO: 868732 - DNA, 601 bp, Homo sapiens
atcacattgattgatttgcatatgttgaaccatccttgcatccaagggataaatcccacttggtcatgttgaatgatctttctaatgtattgttgaatttagtttgataggatttcgttgaggatttttgtataaatatttatcagagatattggcctataggatattggtctatagtattttttttttaatgtgtctttgtcatgtttttgtttctgggtaatactggactcttgaaatgaatttggaagaattcatttcttctctgtttctcagaatagttttaataggagaataggatttacattacttctttaaawgtttggtagaattcagcagtaaagccatcagtgtgcaggacttttttttttctggaagagtccttattatggcttcaatctcattacttgttattggtctgttcatgttttagagttgtttctggttcaatcttggcaggttgaaccagaatctgtccatttcttctggatttttaaaatttattggcatataggtactcatagttgtcactaataatcctttgaatttctgcaatgtcaggtgtaatgcctcctttttcatttctgattttatttattgt

SEQ ID NO: 868733 - DNA, 601 bp, Homo sapiens
atcacattgattgatttgcatatgttgaaccatccttgcatccaagggataaatcccacttggtcatgttgaatgatctttctaatgtattgttgaatttagtttgataggatttcgttgaggatttttgtataaatatttatcagagatattggcctataggatattggtctatagtattttttttttaatgtgtctttgtcatgtttttgtttctgggtaatactggactcttgaaatgaatttggaagaattcatttcttctctgtttctcagaatagttttaataggagaataggatttacattacttctttaaaagtttggtagaattcagcagtaaagccatcagtgtgcaggacttttttttttctggaagagtcyttattatggcttcaatctcattacttgttattggtctgttcatgttttagagttgtttctggttcaatcttggcaggttgaaccagaatctgtccatttcttctggatttttaaaatttattggcatataggtactcatagttgtcactaataatcctttgaatttctgcaatgtcaggtgtaatgcctcctttttcatttctgattttatttattgt

SEQ ID NO: 868734 - DNA, 601 bp, Homo sapiens
atcacattgattgatttgcatatgttgaaccatccttgcatccaagggataaatcccacttggtcatgttgaatgatctttctaatgtattgttgaatttagtttgataggatttcgttgaggatttttgtataaatatttatcagagatattggcctataggatattggtctatagtattttttttttaatgtgtctttgtcatgtttttgtttctgggtaatactggactcttgaaatgaatttggaagaattcatttcttctctgtttctcagaatagttttaataggagaataggatttacattacttctttaaaagtttggtagaattcagcagtaaagccatcagtgtgcaggacttttttttttctggaagagtccttattatggcttcaatctcattacttgttattggtytgttcatgttttagagttgtttctggttcaatcttggcaggttgaaccagaatctgtccatttcttctggatttttaaaatttattggcatataggtactcatagttgtcactaataatcctttgaatttctgcaatgtcaggtgtaatgcctcctttttcatttctgattttatttattgt

SEQ ID NO: 868735 - DNA, 561 bp, Homo sapiens
aaggaaggtgtctcttttggagccatgatctgtgcactttggagttaggtgataggagcactccttttgcttccctagctggtgtctcagtatgttgtgtgcctctgcaatctactgtctctgtggccacttcagtcttaggactcacctgagatttgaagtctttgtggcctagactgcctttcaagtttacttagagactgagagcactttgcccttcatggtgaggtttgcagacactcaagttcagatcactgaggttggtgattcccatctggctagggctggtttaaatgctccctgtgtgggtggtmatcagctaagtttggtgtgattttcctttctgttctaacagaacaatactgtgttcaatgcctcacaattgctgtgttcttcttcccccagcacccagagaagctctctgcaccatgcccccaagcctggggtgggggaggggtggcaccagcgattctggacgtttttttctatcacttcagtgcctcttccagcaatatgaatttaataccagatacctaatttttggttcttatacagattttt

SEQ ID NO: 868736 - DNA, 561 bp, Homo sapiens
aaggaaggtgtctcttttggagccatgatctgtgcactttggagttaggtgataggagcactccttttgcttccctagctggtgtctcagtatgttgtgtgcctctgcaatctactgtctctgtggccacttcagtcttaggactcacctgagatttgaagtctttgtggcctagactgcctttcaagtttacttagagactgagagcactttgcccttcatggtgaggtttgcagacactcaagttcagatcactgaggttggtgattcccatctggctagggctggtttaaatgctccctgtgtgggtggtcatcagctaagtttggtstgattttcctttctgttctaacagaacaatactgtgttcaatgcctcacaattgctgtgttcttcttcccccagcacccagagaagctctctgcaccatgcccccaagcctggggtgggggaggggtggcaccagcgattctggacgtttttttctatcacttcagtgcctcttccagcaatatgaatttaataccagatacctaatttttggttcttatacagattttt

SEQ ID NO: 868737 - DNA, 599 bp, Homo sapiens
aatggtcatgcagtgagcagaaaggtaactgacttggaggctgaaaatatgaaggcccattatacgcagtggcaaaacatttattaacactcttgcctgctataaattggaaggaaaaccatatgcccactgaatatgcagctccaaagagtcagagtcagggtaatagtatatcctgttctgatgttctgcattgagaaagtattcaaagagattaattagaaaaawatttggctagtttgcaagcaaaaatgaacctgtctacttctagatctgcataaagcaaaattctggaagttctttctatgccatgaaagatatattagaaagactttggcctctccatcaatctacaaaagtcagaagaaaattggtctcagagtctaatttgattaataaaaataaataattttaattaacaatgatgtattgtgaccagtagtggattccaactgaagacttaatctctaaatttaagaaagttaaaatccatttgagtagggaaaaaaaaagaataaaagcacaatttaaaagtaactacaaacaagttagttcgatctagataattatatattacagtgcaagtgggtcctctaaat

SEQ ID NO: 868738 - DNA, 599 bp, Homo sapiens
aatggtcatgcagtgagcagaaaggtaactgacttggaggctgaaaatatgaaggcccattatacgcagtggcaaaacatttattaacactcttgcctgctataaattggaaggaaaaccatatgcccactgaatatgcagctccaaagagtcagagtcagggtaatagtatatcctgttctgatgttctgcattgagaaagtattcaaagagattaattagaaaaatatttggctagtttgcaagcaaaaatgaacctgtctacttctagatctgcataaagcaaaattctggaagttctttctatgccatgaaagatatattagaaagactttggcctctccatcaatctacaaaagtcagaagaaaattgktctcagagtctaatttgattaataaaaataaataattttaattaacaatgatgtattgtgaccagtagtggattccaactgaagacttaatctctaaatttaagaaagttaaaatccatttgagtagggaaaaaaaaagaataaaagcacaatttaaaagtaactacaaacaagttagttcgatctagataattatatattacagtgcaagtgggtcctctaaat

SEQ ID NO: 868739 - DNA, 599 bp, Homo sapiens
aatggtcatgcagtgagcagaaaggtaactgacttggaggctgaaaatatgaaggcccattatacgcagtggcaaaacatttattaacactcttgcctgctataaattggaaggaaaaccatatgcccactgaatatgcagctccaaagagtcagagtcagggtaatagtatatcctgttctgatgttctgcattgagaaagtattcaaagagattaattagaaaaatatttggctagtttgcaagcaaaaatgaacctgtctacttctagatctgcataaagcaaaattctggaagttctttctatgccatgaaagatatattagaaagactttggcctctccatcaatctacaaaagtcagaagaaaattggtctcagagtctaatttgattaataaaaataaataattwtaattaacaatgatgtattgtgaccagtagtggattccaactgaagacttaatctctaaatttaagaaagttaaaatccatttgagtagggaaaaaaaaagaataaaagcacaatttaaaagtaactacaaacaagttagttcgatctagataattatatattacagtgcaagtgggtcctctaaat

SEQ ID NO: 868740 - DNA, 595 bp, Homo sapiens
gtcctcaatcccatttctcctgactgggtgagaccttccaattttggtcttcagccacctcttacaggtgcatgtgggtgagcaacaggcctgtacctccctgggacagaggtcctagagggaggagcagactgccatctttgttgttttgcaagccttcactgtgatacctccaggtactggaaaatctgaggygactaagcactggagcagatccccagcattctgcaacagccctacagaaaattggccagactgttacatgggtacttgttcccatatcttctcaccagtcaggtcctctagccaccccttaccagagctattcagccagtatcaactcagcaactccctggacagagcctccaggggcaactgaaagcctctttgccactgcatctaacacgaagccatccttgctaccctctcactaacaaaggagcaagcaccctttgtgcctcattcacacttccaacaagctgcagtcaacccaaggaaaggaggccactacatctcccatgggtcccccacacatctcattgcttactgccacacagggaacccctggtttaggcccacagcacagaccctccat

SEQ ID NO: 868741 - DNA, 595 bp, Homo sapiens
gtcctcaatcccatttctcctgactgggtgagaccttccaattttggtcttcagccacctcttacaggtgcatgtgggtgagcaacaggcctgtacctccctgggacagaggtcctagagggaggagcagactgccatctttgttgttttgcaagccttcactgtgatacctccaggtactggaaaatctgaggtgactaagcactggagcagayccccagcattctgcaacagccctacagaaaattggccagactgttacatgggtacttgttcccatatcttctcaccagtcaggtcctctagccaccccttaccagagctattcagccagtatcaactcagcaactccctggacagagcctccaggggcaactgaaagcctctttgccactgcatctaacacgaagccatccttgctaccctctcactaacaaaggagcaagcaccctttgtgcctcattcacacttccaacaagctgcagtcaacccaaggaaaggaggccactacatctcccatgggtcccccacacatctcattgcttactgccacacagggaacccctggtttaggcccacagcacagaccctccat

SEQ ID NO: 868742 - DNA, 619 bp, Homo sapiens
cccttgcttatattttcaatcacactgacttagaaataatagcctcttaggaacataactttgggacattttaatattgataatgtgtttcaacatacctctaaagtgccatattatgaaaatcactcttaagaactcttaaaactgtttgtgtatttgtgccctggacactataggtcagcctttaaaatcaataatagcccttactattattgttaggaatctgtggcagtgtatccagaataatkactgtagagttgaaaaattatttttatattattgaacatggtcatttgttgacagaataagccttcttctttctctgcacctatttcttttatgcctatctgaggatcataggccagtggaaaatttcctagttacaatagtgaaactttggactatttggataatccttcttcaaatagttacatcaaaagaaaacaatctctaattgcaaaatgtcaaaatactcttttaaatcaagtatatagtgatttattttatctaagatttttctattcctttttatgttggctaaaagacacacacagttaggagacaattatctgtaggtttctcacattgctgcaagtcttgcaaagagagtcattgtctg

SEQ ID NO: 868743 - DNA, 619 bp, Homo sapiens
cccttgcttatattttcaatcacactgacttagaaataatagcctcttaggaacataactttgggacattttaatattgataatgtgtttcaacatacctctaaagtgccatattatgaaaatcactcttaagaactcttaaaactgtttgtgtatttgtgccctggacactataggtcagcctttaaaatcaataatagcccttactattattgttaggaatctgtggcagtgtatccagaataatgactgtagagttgaaaaattatttttatattattgaacatkgtcatttgttgacagaataagccttcttctttctctgcacctatttcttttatgcctatctgaggatcataggccagtggaaaatttcctagttacaatagtgaaactttggactatttggataatccttcttcaaatagttacatcaaaagaaaacaatctctaattgcaaaatgtcaaaatactcttttaaatcaagtatatagtgatttattttatctaagatttttctattcctttttatgttggctaaaagacacacacagttaggagacaattatctgtaggtttctcacattgctgcaagtcttgcaaagagagtcattgtctg

SEQ ID NO: 868744 - DNA, 619 bp, Homo sapiens
cccttgcttatattttcaatcacactgacttagaaataatagcctcttaggaacataactttgggacattttaatattgataatgtgtttcaacatacctctaaagtgccatattatgaaaatcactcttaagaactcttaaaactgtttgtgtatttgtgccctggacactataggtcagcctttaaaatcaataatagcccttactattattgttaggaatctgtggcagtgtatccagaataatgactgtagagttgaaaaattatttttatattattgaacatggtcmtttgttgacagaataagccttcttctttctctgcacctatttcttttatgcctatctgaggatcataggccagtggaaaatttcctagttacaatagtgaaactttggactatttggataatccttcttcaaatagttacatcaaaagaaaacaatctctaattgcaaaatgtcaaaatactcttttaaatcaagtatatagtgatttattttatctaagatttttctattcctttttatgttggctaaaagacacacacagttaggagacaattatctgtaggtttctcacattgctgcaagtcttgcaaagagagtcattgtctg

SEQ ID NO: 868745 - DNA, 619 bp, Homo sapiens
cccttgcttatattttcaatcacactgacttagaaataatagcctcttaggaacataactttgggacattttaatattgataatgtgtttcaacatacctctaaagtgccatattatgaaaatcactcttaagaactcttaaaactgtttgtgtatttgtgccctggacactataggtcagcctttaaaatcaataatagcccttactattattgttaggaatctgtggcagtgtatccagaataatgactgtagagttgaaaaattatttttatattattgaacatggtcatttgttgacagaataagccttcttctttctctrcacctatttcttttatgcctatctgaggatcataggccagtggaaaatttcctagttacaatagtgaaactttggactatttggataatccttcttcaaatagttacatcaaaagaaaacaatctctaattgcaaaatgtcaaaatactcttttaaatcaagtatatagtgatttattttatctaagatttttctattcctttttatgttggctaaaagacacacacagttaggagacaattatctgtaggtttctcacattgctgcaagtcttgcaaagagagtcattgtctg

SEQ ID NO: 868746 - DNA, 593 bp, Homo sapiens
aggcaagtccaattatatgaaggaaaaaatttgcccataacttctatttgatacagatgaatatagcttgtgacctaaaacaaatgaatgcttatctcccatgtaatgagatatattttaacatttattcagtgtccagcatatataaggcctcttgttgggtctaagggtaagaaaagatgaaaatgtgaagatgtgatctttgttctgaaggtgtttttaagccmgtaaaattcatataagttgcaaaacaaagtttgaaagataaaacaagtgagataaactcaaaatggtatagaaacacaataaagtatcatagcaattggacctggggagctccagaaagatagaattatgttatgaagaataggtcaaattttgacagagtgggaaattcatagtctagtttgcctggactatgaggtaaatgctaaagaagcagaagcagaatctggaatagtaatttttaattttggtgataatcatttttttcttttatgcatcatgctttctgtgtcatatctaaaaacacatttatttaacccaaggctaaggtagtaaatacattcccttttgtttcctattatttgttt

SEQ ID NO: 868747 - DNA, 593 bp, Homo sapiens
aggcaagtccaattatatgaaggaaaaaatttgcccataacttctatttgatacagatgaatatagcttgtgacctaaaacaaatgaatgcttatctcccatgtaatgagatatattttaacatttattcagtgtccagcatatataaggcctcttgttgggtctaagggtaagaaaagatgaaaatgtgaagatgtgatctttgttctgaaggtgtttttaagcccgtaaaattcatataagttgcaaaacaaagtttgaaagataaaacaagtgagataaactcaaaatggtatagaaacacaataaagtatcatagcaattggacctggggagctccagaaagatagarttatgttatgaagaataggtcaaattttgacagagtgggaaattcatagtctagtttgcctggactatgaggtaaatgctaaagaagcagaagcagaatctggaatagtaatttttaattttggtgataatcatttttttcttttatgcatcatgctttctgtgtcatatctaaaaacacatttatttaacccaaggctaaggtagtaaatacattcccttttgtttcctattatttgttt

SEQ ID NO: 868748 - DNA, 593 bp, Homo sapiens
aggcaagtccaattatatgaaggaaaaaatttgcccataacttctatttgatacagatgaatatagcttgtgacctaaaacaaatgaatgcttatctcccatgtaatgagatatattttaacatttattcagtgtccagcatatataaggcctcttgttgggtctaagggtaagaaaagatgaaaatgtgaagatgtgatctttgttctgaaggtgtttttaagcccgtaaaattcatataagttgcaaaacaaagtttgaaagataaaacaagtgagataaactcaaaatggtatagaaacacaataaagtatcatagcaattggacctggggagctccagaaagatagaattatgttatgaagaataggtcaaattttgacagagtgggaaattcatagtctagtttgccyggactatgaggtaaatgctaaagaagcagaagcagaatctggaatagtaatttttaattttggtgataatcatttttttcttttatgcatcatgctttctgtgtcatatctaaaaacacatttatttaacccaaggctaaggtagtaaatacattcccttttgtttcctattatttgttt

SEQ ID NO: 868749 - DNA, 600 bp, Homo sapiens
caaacctaataacaacaattaaagttgaaagaatgtatcaacttgtcttaagattcacttatttgttaactattcaatggcccagaatgtacattcttttgggaaacaaattttgtgcttttctttaatgtgtcaagccctgtgtttggaagtttacatgcaatatcagattcacttttcacaataaccttgtgagagaagaattactacttctatttcgtatctgtgtaattgaggggttagataactcacgatcttatagtaaaggagaatcctaggactggctggcactgaatgctatatactcttttcattagactccttgtacagatagatgcaatgcagttaggatgaaagttattttgtactaatcataaacttctaatggaacagtagtttggtaaaaccatttctagcaattacaaaatgacaattttatcaagaagtgcakaataaggattgaagtggcaatgttaaatgaaaacaacaacaaaaaaatctctgttcttcaaataatacttgcaaatgaccattcccaagctcctagcacagtgcatctggtgcacagcgggcactcaatacttattttcttttcttctt

SEQ ID NO: 868750 - DNA, 543 bp, Homo sapiens
cagcaatggttcataaccagttcgaaataactgaaatgatagacatataattcagaatcttgattgcaaaaaagctcaacaagattcaggaagaagttgaaacccaatccaagaaattcagtaaaatcatacaagagctgaaagatgaaatagccattttaagaaagaaccaaactaaactgctagagctgaaattcactacaaggattttataacacaatcagaagtattaacagcagaataaatgaggctgaggaaagaatctgaaagcttgaagcatggttctttkaattaattaaatttttaaaaaagaattgtaaaagatgaacaaaacttttgagaaatatgggattatttaaagagacaaaatctgactcattgatattcctaagaaagaaggagagagaataagtaaattggaaattatacttgaggatatagttcacaaaattgtttctaatttcactagagagattgacatgcaaattcaagaaacacagagaacccaagctagatactaaccataacactatcctcaaggca

SEQ ID NO: 868751 - DNA, 670 bp, Homo sapiens
gtcactgatgaatatatatgcaaaatcatcaaaaaatactagcaaaccaagttcaatatcacattaaaagaatagtacacacttaccaagtaagatttgtccttaagttgaaagaatgtttcagtattacacaatcaatatgataaatcacattttcacaatgaagaatatagtcatatgattatatccacagatgcaggaataatatttgacaaaagtcaacactttttataatacaatctttcaacaaattaggtatagaagaaatgtatcacaacataataaagggcataaatgagaagcccacagctaatatcataggtaatgaaaagaagctgaaaatgtttcttctcagatgaggacaaagtagaggatgaccactcttcccacttttatttaacataatactggaaatcctagccagarcaataagatacaaaaaaaaaaaaatccatattgcaaaagaagaactaaaattatctctgtatgcaaatgatattttatatgtagaaaatccttaaaatctccaccaaaaaaaaaactgttaaaacaaagaaatttagtaaagtttcaggattcaaaattaacatacaaaaatcagttgtgtttatatatactagcagtaaactattcagaaagaaaatttagaaaacaatctcgtttacaatgg

SEQ ID NO: 868752 - DNA, 670 bp, Homo sapiens
gtcactgatgaatatatatgcaaaatcatcaaaaaatactagcaaaccaagttcaatatcacattaaaagaatagtacacacttaccaagtaagatttgtccttaagttgaaagaatgtttcagtattacacaatcaatatgataaatcacattttcacaatgaagaatatagtcatatgattatatccacagatgcaggaataatatttgacaaaagtcaacactttttataatacaatctttcaacaaattaggtatagaagaaatgtatcacaacataataaagggcataaatgagaagcccacagctaatatcataggtaatgaaaagaagctgaaaatgtttcttctcagatgaggacaaagtagaggatgaccactcttcccacttttatttaacataatactggaaatcctagccagagcaataagatacaaaaaaaaaaaaatccatattgcaaaagaagaactaaaattatctctgtatgcaaatgatatyttatatgtagaaaatccttaaaatctccaccaaaaaaaaaactgttaaaacaaagaaatttagtaaagtttcaggattcaaaattaacatacaaaaatcagttgtgtttatatatactagcagtaaactattcagaaagaaaatttagaaaacaatctcgtttacaatgg

SEQ ID NO: 868753 - DNA, 635 bp, Homo sapiens
aattacattaacatttttccgattcatgttttagcctgcaatcatgcactagatctcagaaaactcatatgaaaaataaaacaaaaacaaaccaacatgaaatagacaattgctggtcacagtggtaagataataattttatgccataagaaaacacaaccagaatattttcctaggtaataaactgtgtttccttttgaaatatttactactagacacttmatctcaatccagttgaaacaacatttaaaacatcccaaaggagtgccatactctgttccagagaatttttgtatgtggcttctcttcgacaccccttagtaatctattgctagttttctctctcttatcttctctttttccttgttttgttcaacctgaagtgtctctcttcccacaggctttaaaacatttatattagtgtttgttgggagggaatcttgtaatgaatacattattaataaatcattaataacatttactaatggatcattaatatttgctacctagatatctggctttctttttgtgggtttcattttccatactaccatgtgatcatttaagtcaaagatggaaaatagatttcattttgtgttccatattcatatagatggtagtggcatgctacattg

SEQ ID NO: 868754 - DNA, 635 bp, Homo sapiens
aattacattaacatttttccgattcatgttttagcctgcaatcatgcactagatctcagaaaactcatatgaaaaataaaacaaaaacaaaccaacatgaaatagacaattgctggtcacagtggtaagataataattttatgccataagaaaacacaaccagaatattttcctaggtaataaactgtgtttccttttgaaatatttactactagacacttaatctcaatccagttgaaacaacmtttaaaacatcccaaaggagtgccatactctgttccagagaatttttgtatgtggcttctcttcgacaccccttagtaatctattgctagttttctctctcttatcttctctttttccttgttttgttcaacctgaagtgtctctcttcccacaggctttaaaacatttatattagtgtttgttgggagggaatcttgtaatgaatacattattaataaatcattaataacatttactaatggatcattaatatttgctacctagatatctggctttctttttgtgggtttcattttccatactaccatgtgatcatttaagtcaaagatggaaaatagatttcattttgtgttccatattcatatagatggtagtggcatgctacattg

SEQ ID NO: 868755 - DNA, 653 bp, Homo sapiens
gggcctttgtaggcccttttggggaccctgggcattatgctatatggaatggaaaatcatgatgaatttcatcaaggtgaggatgtaattcgattgttatcttaaaatatttctctgtctgcacatggtaagtggactgtcagaagtcatgggtagagacagaaagaacagttagagagctcctgcacattccaagagagagatgaagacagcctggattcgagtggtggcagagaggtggagggaagttgctggttctgaggtccttggagactgaaccacaaggacttgctaatagattagctatgggaagagaacaagaattagactgctaggtttctgcttcagaaattagatggatagtggagccagatactgagatgatttgataagggaagaaaaggaaacrataatttttattttgaaccggtagtttctgaaatccaacttgctctgagacctctgagcagaagtgtctagtaaaaattaggctatgtgagtctaggatccagagaagatttcagctcagaaaatatctattttagagtttggagagtgagtaaaaggggaggaaaagtccaaggaaaaagctgacatttagagatctagtggaggaaaaatgcagcaaagaaaaccgggaaggaatagccagt

SEQ ID NO: 868756 - DNA, 660 bp, Homo sapiens
agcatggaatgttcttccatttgtttgtatcatcttttatttcattgagtagtggtttgtagttctccttgaagaggtccttcacatcccttgtaagttggattcctaggtattttattctctttgaagcaattgtgaatgagagttcattcatgatttggctctctgtttgcctgttattgctgtataggaatgcctgtgatttctgcacattgattttgtatcctgagactttgctgaagttgcttatcagcttaaggagattttgggctgagacgatggggttttctagatatamaatcacgtcatctgcaaacagggacaatttgacttcctgttttcctaattgaataccctttatttccttctcctgcctgattgccctggccagaacttccaacactatgttgaataggagtggtgaaagagggcatccctgtgttgtgccagttttcatagggaatgcttccagcttttgcccatttggtatgatattggctatgggtttgtcatagatagctcttattattttgagtaagtcccatcaatacctaatttattgagagtttttagcatgaagggttgttgaattttgtcaaaggcgttttctgcatctactgagatagtcatgtggtttttgtctttggtcctgtttatgtg

SEQ ID NO: 868757 - DNA, 584 bp, Homo sapiens
aaacttgtccaagctaaaggaggatgttcgaacccattgcaaggaagctaaaaaccttgaaaagagattagacaaatggctaactagaataaacagtgtagagaagaccttaaatgacctgatggagctgaaaaccatggcacgagaactgtgagacgcatgcacaagcttcagtagccgatttgatcaagtgraagagagggcatcagtgattgaagatcaaattaatgaaataaagcaagaagagaagtttggagaaaaaagagtaaaaagaaatgaccaaagcctccaagaaatgtgggactatgtgaaaagacaaacctatgtttgattggtgtacctgaaagtgacaggaagaatggaaccaagttggaaaacactcttcaggagattatccaggagaacttccccaacctagtgaggcaggccaacattcaaattcaggaaatacagagaacaccacaaagatactccttgagaagagcaacctcaagacacataattgtgagattcaccaaggttgaaatgaaggaaaaattgttaaggacagccagggagaaaggtccggttacccacaaagggta

SEQ ID NO: 868758 - DNA, 635 bp, Homo sapiens
acttaaaaaaaagttgagatttgtgacagagttatagtgaattgctggatcagtttggggaaagcagacatttttattatattgccttttaaccatgaacataatatatctttccatttatttaggccttctttaatggtaatttaatgcatttttataattttatccaaaaatgtctagtacaacttttattatatttagttctagcaattttatgcattattgttctctttacttgaatttttaaaggtacattttctgactggtttttgcttgtatataaatgaaatcgattctcatatacagattttatatccagaaactttgctaaactctcttatgaattatactggcttgagaattctcctggattttctatagagtcaatcatataatttgtgattaattacaattttaattcttctgtctrtatttcttttacttttttattttattttcttgtcttattgccattgactagaaccttcagctgatgttctatgtacttggttatagagagtattcttttctgctcctaattttaaaatgaatgtttttatgttttaccactgatcatcaaatttatcaggtgaacctagttacctgttagaatcttactagttagctgttttttt

SEQ ID NO: 868759 - DNA, 623 bp, Homo sapiens
ggaatgacctgggagttcaacccacctctgaggcttgaaccccgcttctaagaactctgtttagaaacctccagcagtggagcactctccatgtatggagcaacctcttccatttcctaaaagttctgatggcctaattcacacggaattgcacggcagcctttacttatgctcyggggggtgatgttttaggggttagatccctgcaagtgcagcttaggtgatagcgtcaagagtgatctctagaccttactgttctgaaaagtattttagtctgctgctcattctcactggctgtgtttctttgcagacccggccctgctgctgtactgcccagcccagcccctctccccaggtcccaggcatccttttttggtcccttggattctctccaaaatctgtcaactttttgtttttctatgctgggcaatttatttcactttgccttccgtctctcttccgaggccggctttgccaccatgtggtcctccgaggtgcttagtttaacactaaggtatctacttaaaagaggcattatatcataggaaatggaattactgcagttagggtgttaaatgacttttggctcccacccctctccccattcatctagtttttcattt

SEQ ID NO: 868760 - DNA, 623 bp, Homo sapiens
ggaatgacctgggagttcaacccacctctgaggcttgaaccccgcttctaagaactctgtttagaaacctccagcagtggagcactctccatgtatggagcaacctcttccatttcctaaaagttctgatggcctaattcacacggaattgcacggcagcctttacttatgctccggggggtgatgttttaggggttagatccctgcaagtgcagcttaggtgatagcgtcaagagtgatctctagaccttactgttctgaaaagtattttagtctgctgctcattctcactggctgtgtttctttgcagacccrgccctgctgctgtactgcccagcccagcccctctccccaggtcccaggcatccttttttggtcccttggattctctccaaaatctgtcaactttttgtttttctatgctgggcaatttatttcactttgccttccgtctctcttccgaggccggctttgccaccatgtggtcctccgaggtgcttagtttaacactaaggtatctacttaaaagaggcattatatcataggaaatggaattactgcagttagggtgttaaatgacttttggctcccacccctctccccattcatctagtttttcattt

SEQ ID NO: 868761 - DNA, 644 bp, Homo sapiens
gatgggcgagtcggatctgaggctctgggccgtgggctctgggctacctgtgctccacagtccatgcactgatgggtcactctaggacctcacagggctgggaatcagcggagctaagagatgaggagagagaagatgggcttcctggaagcttgggtgaggttgaaggaacaatgcagaggtggacggtgttgggccagctggagacacagcaagttccagcgaatgtggccagtgattgattgaagggttgagatcggcaataygtaaccctggaggtacaggtggagactgagtagtgggggtcttttcatctcaggccaggggagagcagactgatttttttaaaagcggtgagcactgtccagaagtgttgtagcagggcagcagcatggctttgagaaaatcaagggctcaccagaggtggatggtgaggagcttgaggagctccaggggcccagcagccactggcagcgaaggcctgagcaactctgggcgtgggaagaaatagttagcaagactgggagcagagagtgttttgtcaggctcacatcttggctgcgttaccctgggcaagttgctttagtgatctctccaagcccgttttcatggaatctgtaaagtgcagccaagtctggtacctg

SEQ ID NO: 868762 - DNA, 622 bp, Homo sapiens
atgtaaaagaatagaaatcacaataaactgtctctcagaccacagtgtaattaaattagaactcaagattaataaactactcaaaactgcacaactacatggaaactgaacaacctgctcttgaatgagtatgggtaaataacgaaatgaaggcagaaataaatatgttctttgaaaccaatgagaacaaatacacartgtaccagaatctctgggacacatttaaggcagtgtgtagagggaaatttatagcactaaatgcccacaagagaaagcaggaaagatctgcaatgaacaccctaacatcacaattaaaagaactagagaagcaagagaaaacaaattcaaaagctaacagaaagcaagaaacaactaagatcagagcagaactgaaggagatagagacacaaaaaacccatcaaaaaatcaatgaatccaggagcttgttttttgaaaagaccaacaaaatagatagaccactagcaagactagtaaagaagaaaagggagaagaatcaaatagatgcaataaaaaatgatacaggggatatcaccacagatcccacagaaatacaaactaccatcagagaatactataaatgcctctatgcaaataaactaga

SEQ ID NO: 868763 - DNA, 618 bp, Homo sapiens
tcagtgcccaggctccaccccagagagcctgatttaacaagctgggcaagggcccaggcactggtattctctaagagcttcctgggtggtgccaaggggcggccagggccagccaatgaacggtggcccttcatgacrcagagatggaacgccaagggccaggcgtggccacgtgctttcccaccccagctcccagcaggtgattggctagtgggggtgctctcactgttgatttccttcatcacagctctggacattctcccccagttcagactgaaatacacacttgtgctgcacaaggcggggtccctggctgggccatgactgtcattctgtccatccccctgcatgacagcgattctctctcatcagacacagggtgccatggttcactagggagatgtggggattcacgcctcattaacttcaaggctgggatctccagaaaggataccctctcacactggctgaccacctcctttcccaccttgggggcctcagccaccagaggctgtgtatgcccagcagagctctgagccaacaatggcttatgttctctgcaaggaatatttctctgcaaggaatatttcatctcattttatcagtaatacagagcag

SEQ ID NO: 868764 - DNA, 618 bp, Homo sapiens
tcagtgcccaggctccaccccagagagcctgatttaacaagctgggcaagggcccaggcactggtattctctaagagcttcctgggtggtgccaaggggcggccagggccagccaatgaacggtggcccttcatgacacagagatggaacgccaagggccaggcgtggccacgtgctttcccaccccagctcccagcaggtgattggctagtgggggtgctctcactgttgatttccttcatcacagctctggacattctcccccagttcagactgaaatacacacttgtgctgcacaaggcggggtccctggctgggccatgactgtcattctgtccatccccctgcatgacagcgattctctctcatcagacacagggtgccatggttcactagggagrtgtggggattcacgcctcattaacttcaaggctgggatctccagaaaggataccctctcacactggctgaccacctcctttcccaccttgggggcctcagccaccagaggctgtgtatgcccagcagagctctgagccaacaatggcttatgttctctgcaaggaatatttctctgcaaggaatatttcatctcattttatcagtaatacagagcag

SEQ ID NO: 868765 - DNA, 602 bp, Homo sapiens
aaataattccgaaggaggcctcaccgcaccgactctgcctcccctttgccctactgacagcgaggtggcttccaccctgcccacctccaggccaccctcccctgacgcctcgagggtgacctgcggactaaagccgtccagagtggctcaagcccacccaccagtgcctgctccaggggtttcccggtcgcccccctcccctggggccatccgrcatgtccccgcgactacacagctctctcgaccaaacgattttcaccaactttattggctcccgccgggaccctcgccgcccacctccccgctagatgtcaccggccctccatgacatccagcacattcaaaagcattgcgggacgaccatgaaaagggcctttgctgggggagccagctccctgagggcggcgtcagggtcatttgctcttcgtcttctgactctccgtcttcttgggcagcagcacggcctggatgttgggcaggacgccgccctgagcgatggtcactttgcccagcagcttgtttaactcctcgtcgttgcggatggcgagctgcaggtggcggggaattatcctggtcttcttgttgtcacgcgcggcgttgcc

SEQ ID NO: 868766 - DNA, 519 bp, Homo sapiens
ccacagatctctagggcaggggcaaagtgccactgcttgttatgctaaagcataacaagagtcacctttgctccagttcccaacaagttcctcatctccatctgagaccacctcagcctggactttattgtccatatcactatcagcattttggccaaagctattcaacaagtctctaggaggttgcaaacttttctacacctttctgtctttttctgagccctccaaactgttccaacctctgcctgttacctaattccaaagttgcttccacattttcgggtatctttatgcagcaccccactcccagtaccaatttattgtattagtccattctgacrctgctaataaagacatactcaacactgggtaatttgcaaaggaaagaggtttaactgactcattgttccacatggctgtgggggggggtggggcttacaattatgacagaaggtgaaggaggagcagtcacgtcttaatggcagcaggcaaagagagtttgtgcagggaaactcccat

SEQ ID NO: 868767 - DNA, 576 bp, Homo sapiens
gccaccatgctcagctcatttttaaattttttgttgagatagggtctcactatgtttcctaggctggtatcaaactcctgagctcaagcaatccttctgcctcaggctcccaagtagctaagactaaaggagtgcatcaccacacctggctgtgtattatctttttgatgtgctattggattcagttggctagtattttcttgaggacttttacatctatgctcattagggatattgayctgtgtagttttcttttttgttgtttttgttgtgtccttgtctggatttggtatcacggtgatgctggcctcatacaatgagttaggaagaactccctcctccgtttttgggaatagtttctagaggattgatattagttctttgtacgtttggtagaatttggctgttaatccatctggtcctgggcttttctttatgggaagatttttaaaattactgattcaatcttgttattggtctgttcaaggtttctatttctcctagttcaatcaggaagattgtatgtttccaggaatttatccgtatcctatagattttctagttagtgagcatata

SEQ ID NO: 868768 - DNA, 601 bp, Homo sapiens
cggttttttgtttgtttgtttgtttgttttttgaaactgggtcttgctctgtcacccaggctgaaatgtagtagtagctcaattcacagctcagtgtagcctcgatctcctgggctcaggtgatcctcccatctcagcatcctgggtagctggaactataggcatgtgccacmatgcctgactaattttttgtatttttttttttagagatggggtttcactatgttgcctaggctggtcttaaactcctgggcttaagtgatctgcccacctcaacctcccaaaatgctggaattgcaggtgtgagccaccgcacatggcttattgtgtccttttcttgctattgggtacaactaccttgtctttcattttaaaggaatcattacgttatttcccagattactgtatacccagaaacttcaccaaggtgtcaagagttagtatcttcatgggatttatttctcaccttctggcatccatgtgtcttgccaaggactctaggatgcctgctactgcctgctgtttggattctgtaagcatgatatcatcaatgtaacatatgatgtcttgtgggatgttgaaattaactagattcttgtag

SEQ ID NO: 868769 - DNA, 601 bp, Homo sapiens
aggtgggtggattgcttgaggccaggagtttgaggccagcctggccaacatggtgaaaccccacctctactaaaaatacaaaaattagctgggcatggttgtgcacgcctgtaattccagctacttgggaggctgaggcatgagaatcacttgaacccaggaggtgggggttgcagtgagccaagatcatgccactgcattccagcctgggcaacagagtaagactccgtctcaaaaaaaaaaagaatgtcaggatcaagtgaggacaccccaagtgtcaaaaatgtcaacaaagggaggtgccctacattactgcacacaaagcaactgtttgcaaacaaccatgtaaatggtttggtagtcctcaagtgatgtcttatgcactttatgcttaacaggattgrttaattatacacaggtatcttcctgtttttcatcacactttcagaaactgttagaggttttgcatcgctgtgcagtggattgttatactttttcccacataaaataatgggatgtatagcgttgcttagtgttttcatacagaatgtctggttttcaggaatggattactgatgttaatcagaagatgcttatttgt

SEQ ID NO: 868770 - DNA, 639 bp, Homo sapiens
cctttcagggtcacccatgtggggctgtggtacagcagcaatccgtttcaactggtacccacatatcaagccaactcacgcatgaaccaagctctgacttttcccatcctgtgtcagcaggtcataggaacttcttgtggggccaaaggggtgggcggagggagagatgtcggtgcaacagtgatggtgccatgtggggccgccacctcatcacatggcccactcgtgcrctctgccctttgtacacctgatcctgcctccacggcttccatctttgaagaattgctgctgggcctgccaaccttatcaactggtgggtctgacattacccagctcatgatgggcagttctggcaacaaggtcatttgatgtctcatggtcagtctccctcatgggagaagtggacagctttcccactatggggtgatggcacttgggtaggtctgattcgcgtctctggttttgatggggctgagaaatcaacgctctgaagttctgctatttttacagttgggtcctaaagctgcccttcagcacggtctgccttttggctataagagaggagccactatgcctttaaccactgccaaggaagccctctgactttcacagtttgaactgatgatgacttgtcattgg

SEQ ID NO: 868771 - DNA, 639 bp, Homo sapiens
cctttcagggtcacccatgtggggctgtggtacagcagcaatccgtttcaactggtacccacatatcaagccaactcacgcatgaaccaagctctgacttttcccatcctgtgtcagcaggtcataggaacttcttgtggggccaaaggggtgggcggagggagagatgtcggtgcaacagtgatggtgccatgtggggccgccacctcatcacatggcccactcgtgcgctctgccctttgtacacctgatcctgcctccacggcttccatctttgaagaattgctgctgggcctgccaaccttatcaactggtgggtctgacattacccagctcatgatgggcagttctggcaacaaggtcatttgatgtctcatggtcagtctccctcatgggagaagtggacagctttcccactatggggtgatggcacttgggtaggtctgattcgcrtctctggttttgatggggctgagaaatcaacgctctgaagttctgctatttttacagttgggtcctaaagctgcccttcagcacggtctgccttttggctataagagaggagccactatgcctttaaccactgccaaggaagccctctgactttcacagtttgaactgatgatgacttgtcattgg

SEQ ID NO: 868772 - DNA, 614 bp, Homo sapiens
tgtgactgttgggaagagcaaactcatagggaagcaaggaggcacttgccagctgggacctgctggtgtcatcatctagttcccctgaactcacaagatatttgccacccttcaggggacttcgtcaccatgtgccgctcttctccctggggcaattatcctttttaattatgtggcagtgatataactgtgccccatatttgtcaggcacattggtttgtttgcaataattctagctagaggaggtcagaytcagacccaggtgagaattctggctctgttactgtccagcctggtgacttaacctttctggagctctgtttgctcatggaaactgtaaaatggggattattacaccctacctttgtgtcacaataataaaatgggatacagtgagtaaaatgtttagaatagcctcagaccccattgatgcttaatcaagtgtgttctttttctgttctctcttaattattcagcaccattagtgagcatctttttttccttttgtaaccagcctcaaacttgtttatttttccaggtgtacattgtcactagaagccaggcatttaaaataaaacatggttataataaaggttggtcataataaagtgttg

SEQ ID NO: 868773 - DNA, 465 bp, Homo sapiens
gctcactgcaacctccgcctcccaggttcaagagattctctcctgtctcagcctccctagtagctggaactacaggcatgcaggcatgcaccaccaccatgcctggctactttttgtatttttagtggagacagggtttcaccatgttggtcaggctggtctcgaactgctgacctcaaatgatccacctgcctcrgcctcccaaagtgctggaattataggcatgagcccctgtgcccagccaaatctggtttcttagaaagaaacatttaatagggtcttaggaacagaagccatgtctacttctccagtggcagcaagaccagatgggggatccctgcaccatcaccccccaagaccctgggcttatataccacaagggaggggtgggttagaagggacatgtaggtcaattgaagtagataacatcaaggttgcttgatctaagggcaggatttatggtaa

SEQ ID NO: 868774 - DNA, 641 bp, Homo sapiens
taatatctccaaaataggaaatatgggagtgctattaaaaagtcaaaaatgaggccaggcaccatggcgcatgcctataatcccagcactttgggaggccaaggcaggacaattgcttgagctcaggagtttgagaccagcctgggcaccagagcaagatcctgtctctataaaattaaaaaaatcagatgggcggagtggcctctgcctgtagtcccagctacttggaaggctgaggtgtaaagatcacttgagcccaggaggttgaggctgcagtgagccaagatcatgccactgcactccaggctgggcaacaaagtgagactgtctccaaaaaaaaaagtaaaaaatgagtggacctgaatagacacatgataaatgtcycttcctctcactttccccatgctgttttcacttctctctatcagctatcattcctgcgttactatacaaatgttaagtttatgtatgtgaactcaacaatgtaacatcccgaagtctagcatggactttgatgtgaatcttggctccattaagtagctgtgcaactaggtaactcagttaatcctttatgcatctcaattttttcgtcaaattactagaattggttttacaaatgaaatgtggtaatacatatgaaa

SEQ ID NO: 868775 - DNA, 549 bp, Homo sapiens
agttccccagagttacagcatgcaatccaggagtcctgaactgagccttgctcctccctgcctccactgcccccaaatcttctggtaacaaagtcagttgactgaactcaccttataccacaatcaaacctccaaggtcatcgaataggataaaaggaaaaaatcaaaacaacagcagtttctaagagtgaaggaacatcagcccgcaaagatgagaaagaaccagcacaagaactctgacaactcaaagagccagagcatcttctttcctccaaacaatcacaccagttctccagcaagggttcttaatwgggctgagatggctgaaatgacagaaatagaattcagactatggataggaatgaaggtcattgagattcaggagaatgttgaaacctaatctaaggaagctaagaatcacaataaaatgatgcagaagctgacagacaaaatagccagtatagaaaagaacataaccaacctgacagagctgaacaacagtctacaagaatttcgtaatgcaatcacaagtattaacagcagaacaga

SEQ ID NO: 868776 - DNA, 646 bp, Homo sapiens
gatatgaaacagctgaagtgagacagtcagttagagaggactgttgggtcctgaacacacaagagaaaccagatggctaaacttcaacagtgcatgccagcaagtaaggagaagtcagactgacagtagccaagaaggacggagaactttgagaccaaggactctgacagttttctctattaggagttaatggagaccacagttctctagacactatagaggagaggaactggggagaggtggaaaagaagtcttacaattattgagttgtaccaacttacaactggatagggttaaaattattttccctgctttggtcccccactgggggctgttggtgaagacttgatacatgattgaaaaataaaggarctatactttctgtatatatatatatggcctacaatacatgttaagttgcacttcactatatatttcgaatatctctatattcagtgccttccatccaaaagaactgttctgtgaagttgggatctagtgttttatttaatcatgcttcctagtgactaatcgtatttatgactctgattggcccagtgtagaaaaaatgatttcaagaatagaggataaatgaaagacaaacaagggattaactggaataatttcttatatttggaaggtattg

SEQ ID NO: 868777 - DNA, 676 bp, Homo sapiens
tctccacatttttggcaacatttgttattctgtctatatttaatttttagaatgatagccatagtggatataaagaggtatctctttatggttttaatttgtattttcctagtgaataatgattttgagcatattctcatgtgcttactgaccatttatgtatcatctttagaggaatgtctgttgaattcctttgcccatcttttaattcaattgtttatctttttattgttgaattgtaagagttctttacatattttggatctttgatctttatcagatatataatttgcaaatatttactcctgttctgtgrgttgtctcttcatgcatgatagcgtcctgagacacatagaagtttttagttttaataaaatacaatttaaaacattttttggttcattgtgcttctgatgtcatatttaataaattattgcctaatccaaggtcccaaggatttatacctatgtctcctcctaggagttttattattttagctcttacatttgggtttgtaatcgatttgagttaattttttgtatataatgtgtgttaggggtccaactccaatctttcttttgcatatgggtatttgtttttttcatcatttatgttgaaaatattatcctttccccattaaatgttcttggcacccttttcaaaaataaactgacca

SEQ ID NO: 868778 - DNA, 650 bp, Homo sapiens
tccctacctacaggaatacgcttactcaggcactgacacacttaatcacccctttgttttaatgagtgcctacaaccttcccagcactgtgttgggtgaacaggctgcacagacatgattaagatacaggtttggctttcaaagaggtatgagtatatggatgagaggaaaataaatcatttttttcttttttaaaattattatactttaagttcyagggtacatgtgcacaatgtgcaggattgttacatatgtatacacgtgccgtgttggtgtgctgcacccattaactcgtcatttacattaggtatttctcttaatgctatccctcccccatccctccaccccgcgacaggccccagtgtgtgatgttccccatccaagtgttctcattgttcaattcccacctatgagtgagaacatgcggtgtttgcttttctgtccttgtgatagttttgctcagaatgatggtttcccgcttcatccatgttgctacaaaggacatgaactcatcattttttatggctgaatagtattccatggtgtatatgtgccacattttcttaatccagtctatcattgatgaacatttgggttggttccaagtctttgctattgtgaatagtgccacaataagcatacatgtgcat

SEQ ID NO: 868779 - DNA, 650 bp, Homo sapiens
tccctacctacaggaatacgcttactcaggcactgacacacttaatcacccctttgttttaatgagtgcctacaaccttcccagcactgtgttgggtgaacaggctgcacagacatgattaagatacaggtttggctttcaaagaggtatgagtatatggatgagaggaaaataaatcatttttttcttttttaaaattattatactttaagttctagggtacatgtgcacaatgtgcaggattgttacatatgtatacacgtgccgtgttggtgtgctgcacccattaactcgtcatttacattaggtatttctcttaatgctatccctcccccatccctccaccccgcgacaggccccagtgtgtgatgttccccatccaagtgttctcattgttcaattcccacctatgagtgagaacatgcggtgtttgsttttctgtccttgtgatagttttgctcagaatgatggtttcccgcttcatccatgttgctacaaaggacatgaactcatcattttttatggctgaatagtattccatggtgtatatgtgccacattttcttaatccagtctatcattgatgaacatttgggttggttccaagtctttgctattgtgaatagtgccacaataagcatacatgtgcat

SEQ ID NO: 868780 - DNA, 650 bp, Homo sapiens
tccctacctacaggaatacgcttactcaggcactgacacacttaatcacccctttgttttaatgagtgcctacaaccttcccagcactgtgttgggtgaacaggctgcacagacatgattaagatacaggtttggctttcaaagaggtatgagtatatggatgagaggaaaataaatcatttttttcttttttaaaattattatactttaagttctagggtacatgtgcacaatgtgcaggattgttacatatgtatacacgtgccgtgttggtgtgctgcacccattaactcgtcatttacattaggtatttctcttaatgctatccctcccccatccctccaccccgcgacaggccccagtgtgtgatgttccccatccaagtgttctcattgttcaattcccacctatgagtgagaacatgcggtgtttgcttttctgtccttgtgatagttttgctcagaatgatggtttccmgcttcatccatgttgctacaaaggacatgaactcatcattttttatggctgaatagtattccatggtgtatatgtgccacattttcttaatccagtctatcattgatgaacatttgggttggttccaagtctttgctattgtgaatagtgccacaataagcatacatgtgcat

SEQ ID NO: 868781 - DNA, 594 bp, Homo sapiens
tttagcttggagaagtttgttactaccaacttgctgaagcctacttctgtgaactcatcaaagtcactctccatccagctttgttctgttgctggtgaggagctgtgatcttttggaggagaaggggcgctctggtttttagaattttcagcttttctgctctggtttctccccatctttgtggktttatctacctttggtctttgatgatggtgacctacagatggagtttttgtgtggatgtcctttttgttgatgttgatgctattccattctgtttgttagttttccttctaaccatcagtttcctgagctgcacgtctattggagtttgctggaggtccactccagaccctgtttgcctgggtatcatcagcagagcctgcagaacagcaaatattgctgtccgatccttcctctggaagcttcatctcagaggggcacctggctgtttgaggtgtcagtcagcccctactgggagggtctccaagtcaggctacacgggggtcagggacccacatgaaggggtagtgtgtccattctcagagttcaaacaccatgctgggagaaccactgctctcttcagagctgtca

SEQ ID NO: 868782 - DNA, 594 bp, Homo sapiens
tttagcttggagaagtttgttactaccaacttgctgaagcctacttctgtgaactcatcaaagtcactctccatccagctttgttctgttgctggtgaggagctgtgatcttttggaggagaaggggcgctctggtttttagaattttcagcttttctgctctggtttctccccatctttgtgggtttatctacctttggtctttgatgatggtgacctacagatggagtttttgtgtggatgtcctttttgttgatgttgatgctattccattctgtttgttagttttccttctaaccatcagtttcctgagctgcacgtctattggagtttgctggaggtccactccagaccctgtttgcctgggtatcatcagcagagcctgcagaacagcaaatattgctgtcygatccttcctctggaagcttcatctcagaggggcacctggctgtttgaggtgtcagtcagcccctactgggagggtctccaagtcaggctacacgggggtcagggacccacatgaaggggtagtgtgtccattctcagagttcaaacaccatgctgggagaaccactgctctcttcagagctgtca

SEQ ID NO: 868783 - DNA, 584 bp, Homo sapiens
cagcttggtgggaggtatgatgggggtagagagggtatgtgacagtaaattctaaagacaggcctcttggccattggggatgagtggatcctgtgctgtgcacatgagggtctggtctggcccttctgaagagttgcggatattagtacagggagacttcctaatacaaaaggctttgctatggataattttgcccttgcaagggaaccagacagattggtattttccctggcataaatacagatgtacttcaaaggggaatacattactaattggcaattctttctggctctatggaaagtggattggttctagctgagcttcatgagttttatcttargcagagagtagttgtttggtcccagcagatcccactgtattgttgagatttgtgtctcttgtctcacagaccctgttttccataggaactggaaatgagcaatcctgcctaggtggcttaagttagaccatcaggtaacaaaggaatgtcagagaaaaggagcaacaaagaggcaaggatgacattgcctgtttatgtcaccaaccaaggttgctgcagcctgatgcaagacagacttcccctt

SEQ ID NO: 868784 - DNA, 606 bp, Homo sapiens
acttatttgcttagaatggaagtgaggtgaccacgtaaagctcatagatcaagaacatataccaggccagtgctcaatatatagaagtggttatttatagcgtaatagtggtataatttaatactgaaaacaagctcaaagagatatttgcttacctctatctttgacataaatactattactatttctactaccacaaccaataataataatctaacaagacagtcacacgtgcgaaagccaagcccactcttatctcaaactggtattttggtgtctgcatatgtttgcttggggacagaagttaaaatacacagagacgtgaattccgcagtaccaaataaatagttggtgaattaacaaatgaattgtactttccaactacctgtcyttgggcaggctactgtgcctgtgcaagcctcagcttcctcatcatgtcatttggggtaataatagctattccatggagttgtggttgtagtgaagatagacagagacaatgtgtttgaaagcagtggtttggtatatagaactccttcagcaaatattgtcttttctaattttattctctctccagcgcctgtggtggaaccatacttggaagta

SEQ ID NO: 868785 - DNA, 630 bp, Homo sapiens; identical to SEQ ID NO: 868528

SEQ ID NO: 868786 - DNA, 635 bp, Homo sapiens
ttgactcaaataaacatctcttgtttataagttacccaatctcgggtacctagaagacaagacaacaaaatattagcagtactctctcggggaacaagtgtaattttaatctatctgtgttgtcttgtatgtcttctttttcttttttttttttgagacggagtcttgctctgtcacccaggctggagtacagtggcgcgatctcggctcactgcaagctctacctcctgggtycacgccattcttctgtctcagcctcccaagtagttgggactacaggtgcccaccaccatgcctggctaatttttttgtattttttttttttttttagtagagatgggttttcactgtgttagccaggatggtctcgatctcctgaccttgtgatctgcctgcctcggcctcccaaagtgctggcattacaggcatgagccaccacgcccagctgtcttgtacattttcaataataaactctaagaggttttctaacttaaaaaataaagttttttgaaagaaagttgaatagcatcatttcaaaaagtgatctcaggtgaattagggccaaactagctctatcaagcttagaaatctgattgtaataaacagtgaaggccaaaggatttgcattgtacaag

SEQ ID NO: 868787 - DNA, 617 bp, Homo sapiens
  misc_feature 512, 513: n = A,T,C or G
cgttaagtatacatatgttagttactgctgtgtaacaaactaacccagaacttggtggctcaaagcaacaaccatcttacttgagtctagttgtctagttgtctagagacaagttgtctagttctactgatgtgggctaggtacagctgtcttactcatgcatctgtggtcagcggrtaggttggctgggggctggctggtttaggatgtcctcagctgggatgactcatacctttccagtagagggtgttgtcatggtggtgactagcagaaaaaaaaaaaaaaaacgacaaaacaaaacacagtttccagtgtctgaagtgagtttggttaccaccccattgtccaaaacaggtcacatgctcaagccacaaactgtgtagggcactaccaaaggttataggcacagggagacatcaaaatgagatgcatgtctccaatcaatttactagagggtagaaactgcacaggtagctattcaacaatagtatgctagttccatccagaaacannaatgaaaagtttggaaaatatcttgatcatccccttgatcagtcatcagaaaacattttagtaaagagctaggtagtaaaattgcaggcttgcagaacgtgcag

SEQ ID NO: 868788 - DNA, 628 bp, Homo sapiens
gcagggctgtttgcacttgattaaatgttattgtacaaatggagaatgaaggctcaggtcttttccctctcagacacactaatgactcagggtggagaaaagagaaaaaactcaaggcactgtatgtctgattaacccaatttttaaaattaggtctaacttcttactaatatttaaggcattctctcccatgctcagaggatttgcttttttattttagtcttgtatcccaaggcctactgatgatatttgctcttaaaatagtttttcttaaacacagcaaggttataataaatagccttctgaatttcggaataagaaaattctttttctcaattctgcttgccatttcatgttgatataaaattctaatataaaaatatctattttgacttttttttttttttgagatgggggtctcattctgtcgcccaggctggagtgcagtcrcgtaattacggctcactgcagccttgacctcccaggctcaggtgatcctcctgctttagcctctcaagtagctgggagaacaggcatgcaccaccatgcctggctttttaaaaaaaattatttttagggactgggtctccctatgttacacaggttgatcttgaagtcctgggctcaa

SEQ ID NO: 868789 - DNA, 450 bp, Homo sapiens
gttcatttttgccccaactcagaatcagctgtttctttaagagactctggaatcttttagtgcaaatggtgttttaagaccacaatctgaatgtgattttctgtttgtcagttctgtttgccatacttctgtttgccagttcgccagtatactccctgctccagtgactggtatgaagtagctgctgctaaaaaaaaaaaaaaaaaaaaaaaaagcacgtattaaatgcattccacagcaraactgtggttacttcatctacagtttctaaatctcagtcagtcatctgtctatctctgcatgtgagtgtgagaccgtgatggccaacaaaacatttccatgggtcaagtgttctgctgtcactatgttaattttgctttacattcattaccatcattgaatcttcataaccactcctgaggtgttcatatttatcctcattttacaaat

SEQ ID NO: 868790 - DNA, 630 bp, Homo sapiens
taaattaaagaaccatagcaatttctagagtcatcatagcctatgaaaagaggaggtgctaaaataagtggcacaaaaaactgtggggactgaggaggctaatctgatttttcaggatactgaaactttttataacctttttataaccaagccactgcaaatgatcctcttccattcctagggcatggctggtaagaactagagcaccgtgtgagaagttaataagacgcccaatttatggagcacccactgggggctattgtatgttcattatccctacttctcacaacaaattaaatactatgaccccatttcaaaactaaggggactggggctcagggatttgtccaaaatcagttcatgctctttcytccatatcagcaactcagattagaagacattcttgaaaatcattaaaacaaatttctttcctttcctccctccctttactcctcatgtcatttctgaataatgactactattttattggacagttactgccctcctcccacctctctggctggtcgagagaattgaggcccttttgtgattaaggaaattctctatctgctcacagggacaagcccatgtttcttgctttacctgtcttcttctgaatcatgcatattt

SEQ ID NO: 868791 - DNA, 589 bp, Homo sapiens
ccctagcacagcacctaagacatagttggtgctcaaaaactcgttgaatgtgtgaataaacacccttgatttatacgagaccaaccaatgaaaatgaaaatccactcactgccttctgtctttgggcaagtgacccaacctctctatgcctcagtaaaatagggatcattgtgataggatcccttagtgttatgagaacacctggacacagggcaggggacatcacacactggggcttgtcggggggtgcagggctkggggagggatagtgttaggagaaatacctaatgtaaatgacgagttgatgggtgcagtaaaccaacatggcacatgtatacctatgtaacaaacctgcatgttgtgcacgtgtgccctagaacttaaagtataataaaatatatatataaagaatattaagagtaataaacaataggtaacattctaaatacctgcaaccctatacgtgagtcatcatccccattttacagataatgaaactgaggctcaaagtgctttagttattagcccaaggttccccagctactcagtggtagattcagaattttaactgccaagctctgggatggtc

SEQ ID NO: 868792 - DNA, 589 bp, Homo sapiens
ccctagcacagcacctaagacatagttggtgctcaaaaactcgttgaatgtgtgaataaacacccttgatttatacgagaccaaccaatgaaaatgaaaatccactcactgccttctgtctttgggcaagtgacccaacctctctatgcctcagtaaaatagggatcattgtgataggatcccttagtgttatgagaacacctggacacagggcaggggacatcacacactggggcttgtcggggggtgcagggcttggggagggatagtgttaggagaaatacctaatgtaaatgacgagttgatgggtgcagtaaaccaacatggcacatgtatacctatgtaacaaacctgcatgttgtgcacgtgtgccctagaacttaaagtataataaaatatatatataaagaatattaagagtaataaacaayaggtaacattctaaatacctgcaaccctatacgtgagtcatcatccccattttacagataatgaaactgaggctcaaagtgctttagttattagcccaaggttccccagctactcagtggtagattcagaattttaactgccaagctctgggatggtc

SEQ ID NO: 868793 - DNA, 608 bp, Homo sapiens
atccacaactgagtgctgacatgatgcaagttgaaaattttacatctgaccacatgtgtcaggtcagtcaaaacagaggcacaccatttgtgttccaaggggggaaaaacaccctccaagcctcctttagccatgatacatcttttctgcacatgcagattcccccatacaaacatgcccacaaaggaaaataagatggcgtgcaggctgggcacaccaatggcagatttcccacaatgccctacttggggacaagagctatrcaaagattattctaagtgttgggagcaggccccccctgaaatctggccataaactggccccaaaactggccataaaaacaaaatctttgcagcactgtgacatgttcatgatggccataatgcccatgctagaaggttgtgggtttatgggaatgagggcaaggaacacctggcccacccaaggcagaaaaccacttaaaggcattcttaagccacaaacaatagcatgagcgatctgtgccttaaggacatgctcctgctgcagttaactaacccaacctactcctttaatttggcccatcccttcgtttcccataagggatacttttagttaatttagtatct

SEQ ID NO: 868794 - DNA, 685 bp, Homo sapiens
aggtatgaagctgccatgccttccctgggccaccttccagggaactccacatgttcagctgtctaaaagctccccagatctggtcctcttggacctttcatggagacatgagatggctgtgactgacaaccatgtagaaatgtgattggataaagattatctgaacagggaaactcagcaaggcctaactcttccaattcttcccaacatctctgtagcattccttccctccaaagtgtggggcaggaccccttttctcagatggggtcttgtggcctagaaatcagacaataagktctgataattccttttatcgctagctccaagacaggaaggcaggggaagattcctgccgtggggagagaaaggcaatgaaaaggcagtaggagaatgagattgttttgaggcctgcttctaaggtctaaaatgcttctgaggtctaaaaagtcctatcaatgtccttgcctgaaggcaaagttcagagtataagctggttgatctctatcctaaaaaaatcttattggttggtttttcgtttaggtttttattaagtataaaaacaggtcatccacacatagcaatgtgcttttctagagaaaaccatcctactcaccgagagccaggattgaggtgagtaatctggttagacataaggatctccttttgagtgaggatccggaaggtg

SEQ ID NO: 868795 - DNA, 668 bp, Homo sapiens
cgagaggttaagtcagtatgtggctcaagatggcctgcgttacatgatataggtctccacggagatagttattggttcacctaaaacctttcaggtaaccagaccaacccagcaacaagggaaagagatttctgtagaagttacccacatgcagtccctcactccccaaactaaggacaacatttatgctgtcaacgtccagaaatccgatttagtgataagagtccatagagaaggaacctcatagaagtagccacgagggcactcaggtgaggctacaaccagattcagttgccactgcagcatcttcaacaaggtcaaatctgttcagagttggccccagtgactgatgggtccttatcctaagcctgatgctcagtgccacacagacatgggagaataagcaactttaccttctctgggttctgacttgataccccccatagtggctcctgctccaggacccaggataaaggcactctcagaaggaaarttagagaaaagatatacctgtttattctgcaagtgtaaatgaaaggttaagtagaataaacgtaaatgatagcatgggcatgcaataagatatacaaagtgggacaaatctgtggaacagccagccacctttttgagaagtatgtgatgggaagaaaaagaaacctgcagtttaa

SEQ ID NO: 868796 - DNA, 673 bp, Homo sapiens
agaaacaagtccaggtacacttagtttaataaacgtgaagggtacccagttgaaatagtggtccattaagaaagctgctttctattaacatcttaccttccaagctgctacttcatttatttctggagagataactaaagaagcctattgagtgcttctagttttgctgtaatgctcctaaactcagatcatgaagctagtccatttcatgtgaagtcagctctagttcacattattctttggcctggtaatcacaaaagcattagatagcaactgcactaccataaatttgraaggactagaagaatcggggctcatgctagctgttcttagaggtcccacaagagaagtttcttcatcttcagagaaggggacattccagcatttccctgcttctttcattccagagtaatccacttactgatctccaagaatccataagctggtacatcaggataatagggctaagaaatgtaaaccggataaagagtccttgatctccttttccaggaggcaccaagaccatcagaaaacaaagttgttcttccttagtgtcaagtttctctaatcccaaagcttccatggccaaccagtctgcttccccatcatgaagcacaggcatttaagaagtttatgtcagcttatttgagagccaatagaaatagatttggtg

SEQ ID NO: 868797 - DNA, 606 bp, Homo sapiens
ccacaccgttggggtcctgaggttcagtttaccatgttggagtctcagatgctactccctgccatgagcctcagccttcttgtccccagatgccaagggcagtttctttgccaggttcggcattgatagatctgcatttctctgaagacatgttcaggattttagtctgcagggagaaactagatgcgggaatttgtgtaaatgcagtaagtgttcactgcttacccttctagtagtataccaagaaccataagtcatgacttcctccaacctggagcagcatggttcctcctaagcaagctttttttggcctttcccaggcttctgacagagctaagaggaccaataatgagcaagaacctggagaagtgtgtaaaagtagctttaacagctgttctgagtcaaagcctagaacataataggtktatacttccttctacccaagatgaacccttgttgtccaagtccttctaagccccagtattgtgtctcccagagcctccttcccagttacatgagaaaggaaataacatgtcagtgtccaagagtggtagcttagcttgatctgtctggcaataagtcggaacctgcatgtacctcagacgt

SEQ ID NO: 868798 - DNA, 584 bp, Homo sapiens
tgaagccttcttctctcaacttgtcaaagtaattctccatccagctttgttctattgctggagaggagctgcatccctttggaggagaagaggcactctgatttttagaattttcggcttttctgctcttgtttctccccatctttgtgattttatctacctttggtctttgatgatggggacacacagatggggttttggtgtggatgtcctttctgtttgttagttttccttctaacagtcatgaccctcagctgcaggtctgttggagtttgctggaggtccactccagaccctgtttgcctgggtatcaccagcaggggctgctgaacagcaaatattrcagaacagcaaatgttgctgcctgatccttcctctggaagctgcgtctcagagggacacctggctgtatgaggtgtcagtcggcccctacttggaggtgtctcccagttaggctacttggggatcagagacccactagaggaggcagtctgtccattctcagatctcaaactctgtgctgggagaaccactactgtcttcaaatctgtcagacagctttgaagtctgcagaagtttctgct

SEQ ID NO: 868799 - DNA, 652 bp, Homo sapiens
aaattcttctctttaagaatgttgaaggccaggcgcggcggctcacgtctgtgatcccagcactttgggaggccgaggtgagcagatcacaaggtcaggagatcgagaccatcctggctaacacggtgaaaccccatctctactaaaaatacaaaaaaaaattagctgggcatggtggcgggcgcctctagtcccagcyactcaggaggctgaggcaggagaatggcgtgaacccaggaggtggagcttgcagtgagccaagaccgcgccactgcactccagcctgggcaacagagtgagactctgtctcaaaaaaaaaaaaaaatgaatgttgaatattggacccccactctcttctggcttgtagagtttctgcagagagatcagctgttagtctgatgggcttccctctgtaggtaacctgacctttctctctggctgcccttaacattttttccttcatttcaacattggtgaatctgaaaattatgtatcttggggttgttcttctcgaggagtatctttgtggtgttctctgtatttcctgaatttgaatgttggcctgtcttgctaggttggggaagttctcctggataatatcctgaagagtgttttccaacttggttccattccctccgtcactttcaggtac

SEQ ID NO: 868800 - DNA, 652 bp, Homo sapiens
aaattcttctctttaagaatgttgaaggccaggcgcggcggctcacgtctgtgatcccagcactttgggaggccgaggtgagcagatcacaaggtcaggagatcgagaccatcctggctaacacggtgaaaccccatctctactaaaaatacaaaaaaaaattagctgggcatggtggcgggcgcctctagtcccagccactcaggaggctgaggcaggagaatggcgtgaacccaggaggtggagcttgcagtgagccaagaccgcgccactgcactccagcctgggcaacagagtgagactctgtytcaaaaaaaaaaaaaaatgaatgttgaatattggacccccactctcttctggcttgtagagtttctgcagagagatcagctgttagtctgatgggcttccctctgtaggtaacctgacctttctctctggctgcccttaacattttttccttcatttcaacattggtgaatctgaaaattatgtatcttggggttgttcttctcgaggagtatctttgtggtgttctctgtatttcctgaatttgaatgttggcctgtcttgctaggttggggaagttctcctggataatatcctgaagagtgttttccaacttggttccattccctccgtcactttcaggtac

SEQ ID NO: 868801 - DNA, 610 bp, Homo sapiens
tcatactgaatggggaaaattttaaagcttttcctctaagatcttgtacaagacaaggatgcccactttcactactcttattcaagatagtattagaaattcaagccagggcaaccagtcaagagaaagaaataaagagtatccaaattggaaaggaggaaataaaattatccctgtttgcagacaacacaatcttgtatatagaaaattctaagtactccaccaaaaaacacttaaatctagtaaatgaattcagtaaagttgcaaaatacaaaatcaacatgcaaaaatcagtagcatttctataaatcaataatgggctagctgagaaagaaataaaaaaatcagtccgatttacaatggctacaaaaagtgaaatatctaggagtaagttgaatgaaggagtgaagaatctctactaggaaaactataaaacactgaagaaaaaaactgaagaggatacaaaaaamcagaaaacactaaagaaaaagaactgaagaggatacaaaaaaatggaaagacatctcatgttcaaagcttggaagaattaatattgataaaaatgaccttactacccaaagtgatctacagattcaatgccatccctatt

SEQ ID NO: 868802 - DNA, 620 bp, Homo sapiens
gcaccccaggcagccactcctagccttggcctttggcatgagatggaggcctccttattccccatctggtccagttccttcacttacagatggcagcagtgaggccttggggtagaaggatcctccaaagtcacacagagtgcctgcctcctggtcccctcagctctgcctctgcagcccactgcctgcccagtgccatcaggatgagcagtaccggccaagcataatgacagagagaggcagatttcagggaagccctgactgtgtggagctaaggacacagtggagattctctggcactctgaggtctctgtggcaggcctggtcaggctstccaggtggtcagagggcccagtggtgccccagcacggtggtgcccaagccaaccctgtgactgacatgtacgattcactcctttgagtctttggatgccaactcagccccctgacctggaggcagccggccaaggcctctagggaagagccccccactgcagacatgacccgagtaactttctgctgatgaacaaatctgcaccccacttcagacctcggtgggcattcacaccaccccccatgccaccggctccactttccccttttattaatacattcacccag

SEQ ID NO: 868803 - DNA, 603 bp, Homo sapiens
agcccattaaactttaagctacggtattacacagtgtctttgggctgcttacattgagggaccagcaggcaaggaaaaagtgtcactattctggcagagttaagggacccttgttgtcaggaggaagttgggctgtcgttacgccatgaaagaacagggaagaatgtatttggcaccaaggtgatacactaggaagtgttttgttctttcctgcccagttttgaacaggaataaactgtgtaatttgagaagcacagacatctgtgaagtaagtacscgggatccagagaggcctgaaggatgggatggcagccagggattcagaccctctaggaataaggtctgggcatgatattggatgagcacagagaccaccataggtgctaggtgctactgaaaggaacctagagaagtggaggaggggaactgagagtgctacatgcagcagtggtggctgtcatctgtcccactaaccttcctcctataagtctccccaggaaaagagacaactggaatccaggagtcagaatatgctgttcccagaacttagatgaaacaagcagatttgggtggtgcaaggggtggactgtagtagatgctgag

SEQ ID NO: 868804 - DNA, 577 bp, Homo sapiens
aatttgctttgctggtttaagcattagaatgcttctaagatttatgcttttcagccacatttttaataaaatcctccagcatatttactagtatagtattgctcataacattctcatatttttaattgctcccatgctagttataattgttttcattccaagtttctttaacttttttctgtgttgattagacttgccagaaatttatgaattcagtatattttaatgaaataaaacactgttacttttgaatgctatagttatcyggttttcttatcacctaatttctgcttttacttttctaattttcctgtatttctttttttctataatctgaagttaaattcttgagagtgctatctaaggctcttaaggccttttttacttctttcattcccttctttacttcctctttttaaatatatcctactgaagaaagagcatttctccctatggtcatgaggacattctataatgaaggatttcagcataagaattatgatacaagaaaaagcccattactttttgccccacttacattgttttcactcaaagctttatatgttttttcttacag

SEQ ID NO: 868805 - DNA, 574 bp, Homo sapiens
acttttattgatttgcatatgttgaaccagccttgcatcccagggatgaaaccaacttgatcttggtggataagctttttgatatgctgctggattcagtttgcgagtattttattgaggatttttgcatcgatgttcatcaggaatattggtctaaaattctctttttttgtgtgtctctgccaggctttggtatcacagtgatactggcctcatcaaatgagttagggaggattccctctttttctgttgattggratagtttcagaaggaatggtaccagctcctctttttacctctggtagaatccggctgtgaatctgtctggtcctggactttttttggttggtaggctactaattattgcctcaatttcagagcctgttattggcctattcagggggtcaacttcttcctggtttagtcttgggagggtgtatgtgtcgaggaatttatccatttcttctagattttctagtctatttgcgtagaggtgtttatagtattctctgatggaagtttgtatttctgtgggattggtggtgatatcccttttatcattttttattgtatc

SEQ ID NO: 868806 - DNA, 657 bp, Homo sapiens
aaaaagatttagaaaaatgcagttaaaaacaaagcaattttctatattgaactattactattttaccaagtatgattaaattgacattgaagaaaactgagatgcgaggagataaggagtgcaaaagcagtactacaaattgctgaaggagacgtgcagaggagttgttcagttatgaagggtaatttcaggtaaactrtccagaggaactgccatacaaacatgtatctatctatctatctatctatctatctatctatctatctatcatctatctatctatctatctgtcatctatctatctacctacctacctacctacctacctacctacctatctatgggacctctatctgtttgtctgtctgcctgtctatctatcatacgtgtgtgtgtgtgtgtctgcacgtctttgcgtatctgctgtagagattccagaacagcaggcttcagggaaggtgcacaaaattttggaataacaattatttcaaaatgtttcaatttgtttcaattaacaccatttctatcctttaaaatttttgtatcgttctctaaatttggcagccatggaaatgtatccatcagatatcccttcatcagcaaatacttccaaggagtcgttagctgacagcctccaagtgctgtacattcaggatc

SEQ ID NO: 868807 - DNA, 594 bp, Homo sapiens
tccattacttagctgagtgcaggggctggattcagggagtgggaaggaaaagctaaaatttcaatagtttttacttgttcttaatcttctttgattttgttctaattttacatcttcataggatattggatttttacatctgcacacttacctggttaatgttcgttaaaagtacagcagtattctcacaagttgatagacataagaaatcaagaaaaaatgtagagtacaagaaaatttctacgaccacatggctctatatttttttggattgctttagtgtgttataactgaaacactgcagtaacctaagtttctagaatgttcctcagtgaatattctctagtagattgtctaccctgacattttgcataccagtggattttgttggaactatttttcaaaccagtgatgaacmcattccctccattggttcctctcctggcactggtgttctaagttcttaatctgtaagatctccttactgtgttctcatccccttggtttatgatgtgcaaggctcttacggtatgagctattgaggtaacttacaaccctctcacagcactttaaacaaacacaagctctcgtaga

SEQ ID NO: 868808 - DNA, 636 bp, Homo sapiens
atttaaaattaagcactcaacacttttaaatattaataactattgtgaacacctactagcttctttggctgaattacctactaatatactaaattttttaaattttctttatttcttgataattttcttaagatatggctttgtaaatgtttaaaaaaaatccaactctagcaagatagtcaaattcacatcttatacagttaaagtctctatggatactcaattattgattaccatctccctctgatatgtttctttgctttacatgatatkacacactctgtatttctgaccctgactactcattctcctactctgatttccaaaattcagcatggcctccagttctgttcttggggctccccctcctcttcttatacatggctcttgacctcatgtagtatttttatcacgtatttcctaaatgttaaagtcaattatccttgaataggtttgcatgttaggtacatgagccaaaattcttagagattcaactttcattgaggagtagacttggaaataaaatgtttaatttctggctcttcgccaggcttccagtttctataatcataaattcttgatattattcagaggccagaggcagattttaaggtaattatacaattagaactgttt

SEQ ID NO: 868809 - DNA, 657 bp, Homo sapiens
tgctttacatgatattacacactctgtatttctgaccctgactactcattctcctactctgatttccaaaattcagcatggcctccagttctgttcttggggctccccctcctcttcttatacatggctcttgacctcatgtagtatttttatcacgtatttcctaaatgttaaagtcaattatccttgaataggtttgcatgttaggtacatgagccaaaattcttagagattcaactttcattgaggagtagacttggaaataaaatgtttaatttctggctcttcgccaggcttccagtttctataatcataaattcttgatattattcagaggccagaggcagattttaaggtaattatacaattagaactgtttgttacagttctcattgccaatattatatgaaaatgagttgatgacactgtcctaatgactagatyagtgtgccttagtagtcaactacttagtatgactctttagcctattaataggtcaaagcttagcaccttttctttgagctacacatggcttggtcaaaggaattttgcaggtatttacatctctctaatcagatatccactgataaattgataaataataatgcagtgagttaaacagggcttggttcctaattgcttataaatttagtattg

SEQ ID NO: 868810 - DNA, 632 bp, Homo sapiens
atgctaaaaatttggttttctaggccaatgtttctggcattcatatattttcccctctatttccaagggttactattatcttgctgtttaacttcctttgaaacttaaccacactgtaaaaacccatgcatgctatattgtaaagttggactccagaataagaagtagaaatgcaaagtcaacattatattcaagaagtatgtgcatatcttctgaaattggtacttcctttataccaaatgtgtctttagttcttcaaagtaaaaaatactttgattacacagaaatttgttcattctccagatgcgaactccttcatttacatgaccattttgaatctaaatatatatgcctttcttggtatcattcagttattccagaccttccatatcattttaaaagatgaaatgtctttcagtagatggtgaagagcccattttttwaaaaaaaaactttattttgcacaggtgtaacacaggtggtacaccctttcctctctgccccatagggtgtagctctaactaccctctagggaagagaaggttgggtgaacagccttactatttctccagctcagtcattacctgcaggcacattctcttctctgtccaggagtgcttaaggaaattgca

SEQ ID NO: 868811 - DNA, 604 bp, Homo sapiens
aaacagacgtaaactcccacacaataatagtgggagactttaacatcccagtgtcaatattagacagatcaacaatacagaaaattaacaaggatcttcaggatttgaactcagcactggaccaaacagacctaatagaaatctacagaacactccaccccaaatcaacggaatatacattcttctccgcaccacatcacacccattctaaaattgaccacataattcgaagtaaaacacttctcaacaaatgcaaaagaacagaaatcataacagtctctcagaccacagtgcaatcaaatgagaactcagtattaagaaactcacttaaaactgcacaactacatggaaactgaacaacctgctcctgaatgactactgcgtaaataacaaaataaagtcagaaataaataagttgtttgaaaccartgagaacaaagacacaacataccagaatttctgggaaacagctaaagcagtgttaagagggaaattgatagcactaactgcccacatgagaaagtgggaaagatctaaaattgacaccctaacatcacacttaaaagaactagagaagcaagagcaaagaaattcaaaagctagc

SEQ ID NO: 868812 - DNA, 639 bp, Homo sapiens
ggtcattatttagattatatgaaccccgaacatttgagacaggtctcagttaatttagaaagttcattttgtgaaggttgcggacctacacctgtgacacagccacaggggttcctgacgacatgtgcccaaggtggtcagagcacaacttggttttatacattttagggagataagaaacatcaatcaacatatgtaaaatgaactttggttcggtctggaaaggcaggacaactcgaagtaaaagtgggacaacttgaagcggggagggkgcttcagggcacaggtaggtgagagaccaacagttgcattcttttgagtttctgattagcctttccaaaggaggcaatcagatacgcatttatctcagtgagcagagggatgactttgaatagaatgggaggcaggtttgccctaagcagttcccagcttgaattttccctttagcttagtgattttggggttccaacatattttccttttacatttccccccttttcttttttaaaatcttttggagaaagcattttaaaagaaaatgagttcctggttccaggttttgtctgatatctcatggctaggatggtttattcctgaccaggtaggtctggtgttatgaggaaagctcatttttagaag

SEQ ID NO: 868813 - DNA, 616 bp, Homo sapiens
aatgggagactttaacaccccactgtccatattagacagatcaacgagacagaaggttaacaaggatatccaggacttgaactcagctctgcaccaagcagacctaatagacatctacaaaactctccaccccaaatcaacagaatatacattcttctcagcaccacatcgcacttattctaaaattgaccacataattggaagtaaaacatcccttagcaaatgtaaaagaacagaaatcacaacaaactgtctctcagaccacagtgcaatcaaattagaactcaggattaagaaactcactcaaaaccacacaactacatggaaattgaacaacctgctcctgaatgactactgggtamataacgaaaagaaggcagaaataaagatgttctttgaaaccagtgagaacaaagacacaacatatcagaatctctgggatacatttaaagcagtgtgtagagagaaatttataacactaaatgcccacaagagaaagcaggaaagatctaaaattcacacactaacatcacaattaaaagaactagagaagcaaaaacaaacaaattcaaaagctagcagaatgcaagaaataactaagatcagagcagaactg

SEQ ID NO: 868814 - DNA, 524 bp, Homo sapiens
gtaggaagaatcaatatcgtgaaaatggccatactgcccaaggtaatttatagatccaatgctatccccatcaatctaccactgactttcttcacagaattggaaaaaactactttaaagttcatatggaaccaaaaaaagaacctgtattgcaaagacaatcctaagcaaaaagaacaaagctggaggcatcacgctacccaacttcaaactatactacaaggctacagtaaccaaaacagcatggtactggtacaacagatatatagaccaatgaaacagaacagagrcctcagaaataacaccacacatctacaaccatctgatctttgacaaacctgacaaaaacaagaaatggggaaactattccctatttaataaatgttgctggggaaaccggctagccatatgtagaaagctgaaattgaaagccttccttacaccttatacaaaaattaattcaagatggactgaagacttaaatcttagacctaaaaccataacaaccctagaagaaagcctag

SEQ ID NO: 868815 - DNA, 626 bp, Homo sapiens
aggaaaataaagcccaagttctagctctggggccttgtcctctatgtggctgctcaaggataagggcaggtctggctccaggattgctcttgctcagaatgggccagtatgtcctgtgggtcgtggtcccttcagaagtggtgttgcctgccctctgccattctgcrtcttcagctcagcccactgtgtctttccaaagcacaggccatattcttctcctcccgttctacctggagctcccatggctcatctttccttccaactgggggggtagtgatatagtttggatctacctccccacccaaatctcatgttgaattgcaatccccagtattggaggcgtggcctggtgggaggtgactggctcatgggagtggattactcacgaaggtttagtcccatccccttggtgctgtccttgtgatagtgggtgacttcttgcaagatctggctgtttaaaaccatgtggcacctcactctttctctcttgctcctgctctggccatgtgacatgtctgctcccccttcatctactaacatgattgtaagtttcctgaggcctccctggaagccaagcagatgtcagcatcatgcttcctctacagcccacagaactgtgagccaat

SEQ ID NO: 868816 - DNA, 599 bp, Homo sapiens
ctctgatttcatagtgacatagaagaaatgaagactgttaaccaccttaaggatcttatttttaaaagtatagagtgcagcaaaatagaagcatataatattgctatatccctaaattggggagatgattcagggaagactttggaggaatagaatytagacaggtaagagtgagtctggaaaagaggtgtaagaagagcataggtggatcagcaagtgcgaagacctagaggtgaaagcatggcgcttagaaggatctttaacaagttcactaaggctgaagtgtaagagtcaagagacagggctggtgaggatcctacaaatctttgttagcttggttaaggagtttgggctttatcctgaaaacactgggcaaccattaagggttataagcagggcagtagtaaaatgtccttggatcagagttgtgaaaaaatcattctggctgtggttcatgaagaacagggttgcaaggctggagaaaaggtgactgtttcagtaaacctggagaaggatgatggtggcttgaactagaggagtggctgtaggtattgagaaaatttagaggtagaagcaacaagatatagtcactgttctgg

SEQ ID NO: 868817 - DNA, 599 bp, Homo sapiens
ctctgatttcatagtgacatagaagaaatgaagactgttaaccaccttaaggatcttatttttaaaagtatagagtgcagcaaaatagaagcatataatattgctatatccctaaattggggagatgattcagggaagactttggaggaatagaatctagacaggtaagagtgagtctggaaaagaggtgtaagaagagcataggtggatcagcaagtgcgaagacctagaggtgaaagcatggcgctyagaaggatctttaacaagttcactaaggctgaagtgtaagagtcaagagacagggctggtgaggatcctacaaatctttgttagcttggttaaggagtttgggctttatcctgaaaacactgggcaaccattaagggttataagcagggcagtagtaaaatgtccttggatcagagttgtgaaaaaatcattctggctgtggttcatgaagaacagggttgcaaggctggagaaaaggtgactgtttcagtaaacctggagaaggatgatggtggcttgaactagaggagtggctgtaggtattgagaaaatttagaggtagaagcaacaagatatagtcactgttctgg

SEQ ID NO: 868818 - DNA, 606 bp, Homo sapiens
accgttttttccttattttttgcttaatttttaaaaattgtcatttaattcttaaattgtcatttatttgagatggaaatgagatttaaagttagttgcctttgcatgtaaaatatataacttgcaaattaaaatatttttatttttttraacaagtggaagtaaatttgttttacataaatcttaattttcaactttcctagatactgtcacacgtgcccatgttaagagaccaccaaacaggctttgtgtgagcaagaaagcttttcaatcacctgggtgcaggtggactgagtctgaaaaaggagtcagcaaagggagataagggtgggcagttttataggatttgggtaggtagtggaaaattacgtcgaaggtggtttttcccttgcggggcaggggccggagttacaaggtgcttggtggggaacttctgagactcattgtccaggagaaggaatgtgacaaggtcagttgatcaattagggtggggcaggagcaaatcacaatggtggaatgtcatcagttaaggcaggaactgcctattttcacttcttttgtggttcttcagttgcttcaggccatctggatgtatacgtgcaggtc

SEQ ID NO: 868819 - DNA, 606 bp, Homo sapiens
accgttttttccttattttttgcttaatttttaaaaattgtcatttaattcttaaattgtcatttatttgagatggaaatgagatttaaagttagttgcctttgcatgtaaaatatataacttgcaaattaaaatatttttatttttttgaacaagtggaagtaaatttgttttacataaatcttaattttcaactttcctagatactgtcacacgtgcccatgttaagagaccaccaaacaggctttgtgtgagcaagaaagcttttcaatcacctgggtgcaggtggactgagtctgaaaaaggagtcagcaaagggagataagggtgggcagttttataggatttgggtaggtagtggaaaattacgtcraaggtggtttttcccttgcggggcaggggccggagttacaaggtgcttggtggggaacttctgagactcattgtccaggagaaggaatgtgacaaggtcagttgatcaattagggtggggcaggagcaaatcacaatggtggaatgtcatcagttaaggcaggaactgcctattttcacttcttttgtggttcttcagttgcttcaggccatctggatgtatacgtgcaggtc

SEQ ID NO: 868820 - DNA, 774 bp, Homo sapiens
atggatctaatttctttttggggtaatttgggagcgagcaattgataatttgtctaattttcctggtttcatcagctgccacactgccaaatatatgttccatatggatgctttgttattcctgaaacatataacaaatttcagctgcgactttatctaatatggtcaaagggtaagactattgttggctcattttctcattgtttttggctggacaccctcaatcaatggctattgagtgaaaaaacaggatcatattgaaaccattttcagcatgttscttcctatggatccaaccatttcactgtgagtttgtcaagcacagcaaatgttctctattaaagggatgactgtgttctcaacatggatgcgactgccagttaattgcattcaccttataattccagtctctcaatttggtgtagagatggttttggctctccaaagattccttcttttctgctgattcttacctcctagtatggaacagatatttgaggatgaattttgagaagatcaatgacacacatacaataagcatcatttcaggcttcccttaagttagacagtctgtgggccctgagtcatatgaatcataagacttgtgaaaggtattagtgccacaaatctggctggcatttctgtagattatcggtgctttgcatgcaattatgaaaatctctcttaccagataagtcagatgggggttcagtaacattgcacaaaagcatcatgatgtgtaagctaaagacaaagaaaggcttacttctggct

SEQ ID NO: 868821 - DNA, 774 bp, Homo sapiens
atggatctaatttctttttggggtaatttgggagcgagcaattgataatttgtctaattttcctggtttcatcagctgccacactgccaaatatatgttccatatggatgctttgttattcctgaaacatataacaaatttcagctgcgactttatctaatatggtcaaagggtaagactattgttggctcattttctcattgtttttggctggacaccctcaatcaatggctattgagtgaaaaaacaggatcatattgaaaccattttcagcatgttgcttcctatggatccaaccatttcactgtgagtttgtcaagcacagcaaatgttcyctattaaagggatgactgtgttctcaacatggatgcgactgccagttaattgcattcaccttataattccagtctctcaatttggtgtagagatggttttggctctccaaagattccttcttttctgctgattcttacctcctagtatggaacagatatttgaggatgaattttgagaagatcaatgacacacatacaataagcatcatttcaggcttcccttaagttagacagtctgtgggccctgagtcatatgaatcataagacttgtgaaaggtattagtgccacaaatctggctggcatttctgtagattatcggtgctttgcatgcaattatgaaaatctctcttaccagataagtcagatgggggttcagtaacattgcacaaaagcatcatgatgtgtaagctaaagacaaagaaaggcttacttctggct

SEQ ID NO: 868822 - DNA, 594 bp, Homo sapiens
gggtagggggatagagaggggccaagtgaggcccttcccataggccatgaacagcattctggagaagttcaaaatgcgttccgaaaaaaaaaaaaaaaaaaaaaaaagcctacaaccaaaaaactcagaccatttctagaacccaatccaaaccaaaccttcttgaaggtcatacgtgttctgaggtttcattccactatttttcacttatacagtcctcagccctgccagggctgagctagaatttgagctcaccatagccaaataccacaaggggaaaaaaatgcccaagccctttgccctgaatatatttccagcccaacagagaactgaaagccctggaaagctctaggcagccagtgaccccagcagccaccttttcagagtagcttcagggcattggtttgtgggcctcrggtgctgaccacagccttcagcctcctctgttacctcgatggccacatatgcagagagggctcacagcagcccttgggctttgctgagccaaccacagctctgatgagaaaggaaggctgccagagtgggataagttgacttgtttttccagaaagtatcttccctccagcagggcca

SEQ ID NO: 868823 - DNA, 683 bp, Homo sapiens
ttcaacttcaattgtttcctagggcaaattgataattgtgtgtaaaactaattggaatatgtatggaataatcatcctgaaataaaattggtgaaaagtatttgttattgggcatctacaatgtgcaaacctctgtactaggcatgaacaagagttataagcattggagaggctaaaatatagtccttaaggctgggcacagtggctcatgcctgtaatcctagcacyttgggaggccaaggcgggcagattgcctgagctcaggagttcaagaccagcctgggcaacatagcgaaaccccatctctactaaaaatacaaaaaaattacctgggcatggtggcacgcacctgtaatcccagctactcaggaggctgaggcatgagaattccttgaacctgggaggcagaggttgcagcgagccgagatcctgccgctgcatcccagcttgggtgacagagtgagactctgtctcaaaaaaaaattaaataataaataaatagtaaaatacagtcattaagagtacaaaatgtagattcagactacctgggttcaaatcttggctcttacttgcattgtggctttgggcagatcatgtaacttatgtgtgcctcagtttcctcatctgttaaataggggcaacaactgaatctaccttattcagttgttgtgagggtttattga

SEQ ID NO: 868824 - DNA, 642 bp, Homo sapiens
ccaagagatgagtctgacaggtggatgggtggtagtcaaatcagagccccagcatgctgaggtgttcaaactttgtctgtggattgttggggaaatgcttcagccatcccccattatccttatggggccgaagtccatgacacattccttgcatggtacctagtcaagggtcacataacaataactgactcctccttctttgtcaaaatataagctcacagctcttccatctggcatttaaaaacctacataaatgagtcctgcctatcccactgcctagcaacacgaatccctggtcataatggcaaaggtctactttactgtcagtggaatgtgctttgtcagtcctatttttsaacctttgcaatctttgatgcattcatatttcccaggttcaggagaacctcttttttccaagtctcatgtttccatatggaggttcctccattagttaatattcctggcctctcttggtacctccagtcattttctccttggggtaaacaatgactaacctgactggtgtttggaggaaagaacataatgttgagggctcagccacttttgagtagttttcttttgtgatctgtccatcactgctgacaaaaaacatttttaccttctctctgccaggatgtggat

SEQ ID NO: 868825 - DNA, 627 bp, Homo sapiens
atgtccatcacctccactttgatgccttctacctccttagtcatactccactcatcagctaccactaccaccactgaacaagacatctggtactccctagttgcaccacacctggactgatatctcaaattccatcttgtatgcaatcctagagcataactttataattttaggaagtcttcgttgattcatagtgctttcctggtgggtcttatytaagttcagaaggaaaacttaatgtttctctcatgggtacataacaggggagttgggtatctggattgttgtagaattgcaaccctagcaaatcccttctctctaaaactgacctgatgtttagcatctctcagaaactgtagcaggttcatgctatacatatttactgagcacctactatgtggccaactcgatggttggcacttgagatatattcatgaatgatacaaagaacctctgcccttgtgcagctggcattcacaggcagtaaagaaggggataggaatgaaggtggagacagagtaaataataaacatgatatgagaaatactattaaaaaaaacaaaaaaaaaggaggaaaagagtaaatcagggtaaaagtgattagaagggatgagggctcagattgct

SEQ ID NO: 868826 - DNA, 583 bp, Homo sapiens
aagagaagaacatgtctttgcacagcttcagtcctgatcgggcaactagatccccggagaatatactgagtggcaaagcctgaagcttccactgaggattaagagcaacagccccagtgcctgggctctgctggactcagtacaatgtggaaaaatgtgttctcctgttcacatttaaagaacaraataaagattgcacctccttctaccttgaaactgaggcctaacttctgaggctgtggcttattcctggttctaaacattcatgtgatttctcaggtcctatgtagactctgtcttattctcctctgcttctccctctgcccttttcctcccactctcagaatcagggtcctggtccttatctcagtctctgtgcttggggccatgctccctgctgaacaggcagtccttctctggatctacctccacaccttcccatcaaagctttttccattgccaattccactacctttgcccacagcagccaacacccagatggtgagctatgttaagtgctgttacatcaagagcaagcaacttggccttgccccttctgtttagaaggagaaaggggtgtcca

SEQ ID NO: 868827 - DNA, 620 bp, Homo sapiens
ttctcaccaagagctggggtctatatctcctccttttgactctgggcaaacttatgtctatggcacaggtggtactacatgacttctgagcctaggtcataaaaggtgatacagcttatatctggttctcttaggactctcacctttgtaacctagacatcatgctatgagaaagcctctcaccctacgtattagtctgttttcatgctgctgataaagacatgcctgagactggttaatttataaagaaaaagaggtttaatggattcacagctccacatagctgggtaggcctcacaatcatggtggaaggcaaaaggcacrttttatatggaggcaggcaagagacaatgagagccaagtgataggggtttcctcttataaaaccatcatatcttatgcgacttattcactaccatgagaacagtgtgggggaaaccacaccatgattcaattatctcccactgggtccctcccacaacatgtgggaattatgggaactacaattcaagatgagatcttggtggggacacagccaaaccatatcaccctgtgaggaagttcacatggaaaggaactggtaatcaaccccaaattgccagttctgtgaataagccagt

SEQ ID NO: 868828 - DNA, 620 bp, Homo sapiens
ttctcaccaagagctggggtctatatctcctccttttgactctgggcaaacttatgtctatggcacaggtggtactacatgacttctgagcctaggtcataaaaggtgatacagcttatatctggttctcttaggactctcacctttgtaacctagacatcatgctatgagaaagcctctcaccctacgtattagtctgttttcatgctgctgataaagacatgcctgagactggttaatttataaagaaaaagaggtttaatggattcacagctccacatagctgggtaggcctcacaatcatggtggaaggcaaaaggcacgttttatatggaggcaggcaagagacaatgagagccaagtgataggggtttcctcttataaaaccatcatatcttatgcracttattcactaccatgagaacagtgtgggggaaaccacaccatgattcaattatctcccactgggtccctcccacaacatgtgggaattatgggaactacaattcaagatgagatcttggtggggacacagccaaaccatatcaccctgtgaggaagttcacatggaaaggaactggtaatcaaccccaaattgccagttctgtgaataagccagt

SEQ ID NO: 868829 - DNA, 683 bp, Homo sapiens
aaatgctcaatagatattagctgctataataattattatttttgatgaaatctgatcaaggccattcttgaagccagtacagtacttataaaattaatggatacatttccagggaaatccctaagatggtattagggcatgaagccagaagacaaagagcttcatgtaagatatcagtcatttcacttgagtccttagggaatccaccatgatattgtattcatatttttttcctctccattacaagaaagtaggaaaaagtaagatgatgaattttactttcacagatgaaaatggaaaggggacttcctctcaagacttgaccaaagggctgagctgaataaggcaggatttcagatccagctccatgtatatgtctgtgaagatcagagaaagacattgtctaggtctttgaagaggtcctgaaatcttgttcaccttctttccattaccccaattccccaatctatttttgtttaactttttttgttgcaaatgacaaaaattcagccaaactagctaaagctcctaaactgttttyattagtttatatgtctaagaggataggcatgaagatattgataggcacaacagaagccacggatcaaacaatgtatttgggactctttctccatttcttggctctgtttgcgtgttgattttattatttaagatttctcttg

SEQ ID NO: 868830 - DNA, 589 bp, Homo sapiens
tggattagatgtatgccagtacagttagtgatggtgatgcaggtaagaatagttgtattttttaacttttaactttttgtttattattagagacagtcctgctttgttgctcaggctggagtgcaatggtgcagtcatggctcactgtagcctcagcctccggggctcaagagatcctccyacctcagcctcctgagtagttgggactacatatgtacatcaccacacccggctaatttttaattttttttttgtagagacagagtttccctatgttggccaggctggtcttgaactcctgggctcaagcgatactcctgtctcagctgagattacaggcgtgagccatttcatctcactaagaacagctgtattgatggagcacttcctacgtgctgggcactgtgccaaacatattgcatgccttctcgtagtacgctcaaagtcaccctatgaataagggctattatttatatccatttcatggatgaataacctgagacttataaaggttaaagaacttgcccaaggtcatccatctggtggtgttcaagcttgaattccctcctgtgtttgtctgacaccagtc

SEQ ID NO: 868831 - DNA, 608 bp, Homo sapiens
tgacaagacaatcccttcccagttgaattgccttgccatctttgctgaaaatcaattgaatgtataagtgtgggcctatttctcgatattctattatgtcccattgatctaagcttattccaataccacactcttgattctgtagttttagcatcttcattcaggtagtgtaaatcttccaagatgggtttttgtcttgtaaarttgttttggttattctgggtcctctgcatttctatatacattttaggattagcatgttaatttctacaaaaaggcctgctggattttcatatgtaatggtggattacataaatctacaattcaatttggggataagtgacatctcaacaatactgagtctatccatagtctatccttccatttaagccttctttagtttctttcagcaatgttttctagttttaagaatacatacttgacacaactttcattaaatgcatttttaagtatttatgttattacaaatggaactttaaaaaattattgttgatatataaaaatagaattaatttttgttcagttttaataatttgtgtctctgaaggaatttgtccatttcatttatgttgtcaaatttattggta

SEQ ID NO: 868832 - DNA, 714 bp, Homo sapiens
acaactttcattaaatgcatttttaagtatttatgttattacaaatggaactttaaaaaattattgttgatatataaaaatagaattaatttttgttcagttttaataatttgtgtctctgaaggaatttgtccatttcatttatgttgtcaaatttattggtatgaacttatcataatgttccctaaattatccttttaatgtctgtaaggtgtataataatgttcctctttcattcctaatattggtaattgtcttcttccatttcttcttgatcagtttagctacatattttcagctgtattaatcttttccaagaaatcggttttggttttattgattgtcttttttgcttttgtagtttctatttctttggtttctactgttatctttattgtttcctgtcttttacttgctatgggtttaatttattcttatttttgtggtatcttagkgtggaaacttagagcattgatttgagatctttcttattttctaatataagtaatggaacctgtaaatttccctccaagtgctgatttagctacaccgtacacattttgataatgatgtttttaaaatttttattgtgttcaaaatattttctatttttttgtatttgttccatgactcaatagctatttagaggtattgtattagtccattttcacactgctgataaagacataccgaagactgggcaatttacaaaag

SEQ ID NO: 868833 - DNA, 619 bp, Homo sapiens
gggatttaagttgttcttacctgcacgcacatttaacactcaacattgtggttcctgggttaccatctggggataattcaatatgctgatggcattttaggcatattcattggcaaaacatctatttttacaccttttcctatcagagggatctaacttctgtttttttacatcattttagattttgtatgctgccccatggatactgtcagtaataggtttacgtaatgatcagttctgtacgtttctagaagctttaaaagcttaattgagcacccaggtggagaaaatgaagtcagaataagtgaaatcattttgaaaagaagtatatttcaktaattaaaggaaaaaggtggcagatctttgtttttggtgattaagaattacacaggtttctcattagacccttaaagagaactgaagcatatttcaataaaaatatcaattagaatttctgcttgacacattctcctcctgcatccatccctaaaatgatgcatatacttggccacaaattccacgttaattcttagatctgtagcagtgtgagctaaaccatgacagaataaattagtccatcagggttttcaacctagtgaacaagttaaggagaaaaaca

SEQ ID NO: 868834 - DNA, 652 bp, Homo sapiens
ggtcaatcatcctagatgttttggagttgagggctggaagcaggtgatttcactgtactgcaattccaagggtcttagttgcagagtaatctcttcccctgctaggattcacttgcatagggcagggactggtgggtgggcctagcagcagtctctttgcttaaagagctattagattctcctggaagagttcatcctaaggacagagatcaaggcacacaattcagtccaacaacaatgtccaggcaggaggagtggtttgcgtatagtgcagcccagctcccaggcactctcatccgaagcctagaggaggcgctacgagtaaaaactaacagctgctctcacacatctcacatctgtgagtatctgaacacaagtcagctttcctttgggctacacttggtgtggggcgggggctaaaaggcacagaaagaaactttcctccctcctaacagagcagctgcagggtgggactctagagggtgcagtagggaggtggccgcagtggtgggcyacagggagggccctgggtgcagctctggtgggacccatagcctccatgggagccagtgccctctggtggacaccagcgggagtactgtgctggtgcagcttggtgagcctgagacctccccaaagacctccatggtgg

SEQ ID NO: 868835 - DNA, 576 bp, Homo sapiens
atctcaaattgacaccctaacatcacaattaaagaactagagaagaaagagcaaacaaattcaaaagctagcagaaggcaagaaataactaagatcagagcaaaactgaaggagttagagacaggaaaaacccttcaaaaaatcaatgaatccaggagttggtttactgacaacaaaatagatatacygctagccagactaataaagaagaaaagagagaagaatcaaatagacacaataaaaaatgataaaggggatatcaccactgattccacagaaatacaaactaccatcagagaatattataaacacctctatgcaaataaactagaaaatctagaagaaatggataaattcctggacacatacaccctcccaagtctaaatcaggaagaagttaaatccctgaatagaccaagaacacattctgaaattggggcagtaattaacagcctaccaaccaaaaaaagtccaggaccagatggattcacagccgaattctaccagaggtacaaagaagagctggtaccattccttctgaaagtattccaaacgatagaaaaagagggattcctc

SEQ ID NO: 868836 - DNA, 629 bp, Homo sapiens
ccgagatggcagaaaccatgtctcatgcctctttaaatcccaatttaaatctttaaatcccaaggattttccttgtagtggtgatggatttattctttacccagtcttctttataaccagtagtacatagccaggttaggaataaagtttgtgaccataaaagaggatgaacaactaccctcgcacagctctcctcaggtcattaatggtatgtgctaatttcagtacaacccagataatacacaagtatgagggtcattatgaattcatctaataaattgaccacaggaaggtacctaagaggtttgccttacttattaaaaatacttctttatttacaacataagtagtatyaatctcagcaagcaaaaaccataagaggattcatgaagagaaagctgatgaaaaagaagttcaatcatgttcctaatgacatacacagcttcctaagaacacaccattgagtggtaagtccccttctagatcctaggattagggttcacattaagtgaaccaagtattgaccaaaattgaagattttccttgtacttcagtttcatctttaaattctcctcttcagcagaaagatacttgtagaaagaatttcaaataggaggtaaatagacata

SEQ ID NO: 868837 - DNA, 629 bp, Homo sapiens
ccgagatggcagaaaccatgtctcatgcctctttaaatcccaatttaaatctttaaatcccaaggattttccttgtagtggtgatggatttattctttacccagtcttctttataaccagtagtacatagccaggttaggaataaagtttgtgaccataaaagaggatgaacaactaccctcgcacagctctcctcaggtcattaatggtatgtgctaatttcagtacaacccagataatacacaagtatgagggtcattatgaattcatctaataaattgaccacaggaaggtacctaagaggtttgccttacttattaaaaatacttctttatttacaacataagtagtattaatctcagcaagcaaaaaccataagaggattcatgaagagaaagctgatgaaaaagaagttcaatcatgttcctaatgacatacacagcttcctaagaayacaccattgagtggtaagtccccttctagatcctaggattagggttcacattaagtgaaccaagtattgaccaaaattgaagattttccttgtacttcagtttcatctttaaattctcctcttcagcagaaagatacttgtagaaagaatttcaaataggaggtaaatagacata

SEQ ID NO: 868838 - DNA, 629 bp, Homo sapiens
ccgagatggcagaaaccatgtctcatgcctctttaaatcccaatttaaatctttaaatcccaaggattttccttgtagtggtgatggatttattctttacccagtcttctttataaccagtagtacatagccaggttaggaataaagtttgtgaccataaaagaggatgaacaactaccctcgcacagctctcctcaggtcattaatggtatgtgctaatttcagtacaacccagataatacacaagtatgagggtcattatgaattcatctaataaattgaccacaggaaggtacctaagaggtttgccttacttattaaaaatacttctttatttacaacataagtagtattaatctcagcaagcaaaaaccataagaggattcatgaagagaaagctgatgaaaaagaagttcaatcatgttcctaatgacatacacagcttcctaagaacacaccaytgagtggtaagtccccttctagatcctaggattagggttcacattaagtgaaccaagtattgaccaaaattgaagattttccttgtacttcagtttcatctttaaattctcctcttcagcagaaagatacttgtagaaagaatttcaaataggaggtaaatagacata

SEQ ID NO: 868839 - DNA, 608 bp, Homo sapiens
tctaattctgtgaagaaagtcaatggtagcttaatggagataggattaaacctataaattactttgggcaatatgtctgttttcacgatattgattcttccaatctatgagcttggaatgtttttccatttgtttgtgtcctcttttatttccttgagcagtggtttgtagttctccttaaagaggtcctttgcatcccttgtaagttggattcctaggtattttgttctctttgtagcaattgtgagtgggagttcactcatgatttggctctctgtttgtctattattgatgtataggaatgcttatgatttttgcayattgattttgtatcctgagattttgctgaagttgtttatcagcttaaggagattttgggctgggatgatggggttttctaaatatacaatcatgtcatctgcaaacagaaacaatttgacttcctctcttcctatttgaataccctttatttctttctcttgcctgattgccctagccagaacttccaaccctatgttgaataggagtggtgagagatggcatccttgtcttgtgccggttttcaaagggaatgcttccagcttttgcccattcagtatgatattggc

SEQ ID NO: 868840 - DNA, 610 bp, Homo sapiens
atttttataaagtctgatttatcaatttttccttttatagattgtgctttggcgtcaagcctaagaacgtttgcctaggccgagattctgaagtttttctcacattttcttctgagagctttatagttttatgttttgtattttagtctgtggttcattttaactttttggctatggatkttccattgctccagcatcatttgttgaacattctaccttaactctattaaattgcttttgcacttttgtaaaaaatcagttgggcatgtttgtgtggacatatttcttagattctctgtgttctgtcccagtgatctatctgtccctctgcaaataccacacagtacagattactataactatataataatgcttgaaattgggaagatgatttttctcattttattctgctttttcaaaactgttccagctcttgcagttcctttttcttttcaaataaatttcagaattatcttgtctatatctacaaaaactcttgctgagattttgatagcatttgcattaaaccttaatcaatttgactatgcttttctgcactgaattatatgaccatgtgatttttcttttttaacctattaatgttgtatat

SEQ ID NO: 868841 - DNA, 610 bp, Homo sapiens
atttttataaagtctgatttatcaatttttccttttatagattgtgctttggcgtcaagcctaagaacgtttgcctaggccgagattctgaagtttttctcacattttcttctgagagctttatagttttatgttttgtattttagtctgtggttcattttaactttttggctatggatgttccattgctccagcatcatttgttgaacattctaccttaactctattaaattgcttttgcacttttgtaaaaaatcagttgggcatgtttgtgtgracatatttcttagattctctgtgttctgtcccagtgatctatctgtccctctgcaaataccacacagtacagattactataactatataataatgcttgaaattgggaagatgatttttctcattttattctgctttttcaaaactgttccagctcttgcagttcctttttcttttcaaataaatttcagaattatcttgtctatatctacaaaaactcttgctgagattttgatagcatttgcattaaaccttaatcaatttgactatgcttttctgcactgaattatatgaccatgtgatttttcttttttaacctattaatgttgtatat

SEQ ID NO: 868842 - DNA, 610 bp, Homo sapiens
atttttataaagtctgatttatcaatttttccttttatagattgtgctttggcgtcaagcctaagaacgtttgcctaggccgagattctgaagtttttctcacattttcttctgagagctttatagttttatgttttgtattttagtctgtggttcattttaactttttggctatggatgttccattgctccagcatcatttgttgaacattctaccttaactctattaaattgcttttgcacttttgtaaaaaatcagttgggcatgtttgtgtggacatatttcttagattctctgtgttctgtcccagtgatctatytgtccctctgcaaataccacacagtacagattactataactatataataatgcttgaaattgggaagatgatttttctcattttattctgctttttcaaaactgttccagctcttgcagttcctttttcttttcaaataaatttcagaattatcttgtctatatctacaaaaactcttgctgagattttgatagcatttgcattaaaccttaatcaatttgactatgcttttctgcactgaattatatgaccatgtgatttttcttttttaacctattaatgttgtatat

SEQ ID NO: 868843 - DNA, 620 bp, Homo sapiens
agttttcacccattttatctccctcaatgtcatgagaacttatacatgcttacagctttgaatatttctatgagagaagaaaggaaatatgcttctcagtgtcctaaatgtgaaaggaaaggtaggacttaaatatcatcattgttggtatttggtacacaaaaaaaggagcattggactagcttgcatcatggagcttaatcacagataaacctcttatagggtgatatggtttggatatgtgtccctgcccaaatctcatgtcgaattgtaatcccagtgttggargaggggcccggtgggaggtgattggatcatgggggtggatttgcccctgctgttcttgtgacagggagtgagttctcaggcaatctggttgtttaaaagtgtgtggcacctcccgctttgctctctcttcctcctgctccagccatgtaagtcgtgcctgcttccccttggccttccaccatgatggtatgattcctgaggcttctctagtaatgctgccagcctgcagacctatgagtcgactaaactctttcctttataagttgcccaatctcaggtagttcgttctttacagcaaggcaagaatggactaatatatagggctgtcttca

SEQ ID NO: 868844 - DNA, 620 bp, Homo sapiens
agttttcacccattttatctccctcaatgtcatgagaacttatacatgcttacagctttgaatatttctatgagagaagaaaggaaatatgcttctcagtgtcctaaatgtgaaaggaaaggtaggacttaaatatcatcattgttggtatttggtacacaaaaaaaggagcattggactagcttgcatcatggagcttaatcacagataaacctcttatagggtgatatggtttggatatgtgtccctgcccaaatctcatgtcgaattgtaatcccagtgttggaggaggggcccggtgggaggtgattggatcatgggggtggatttgcccctgctgttcttgtgacagggagtgagttctcargcaatctggttgtttaaaagtgtgtggcacctcccgctttgctctctcttcctcctgctccagccatgtaagtcgtgcctgcttccccttggccttccaccatgatggtatgattcctgaggcttctctagtaatgctgccagcctgcagacctatgagtcgactaaactctttcctttataagttgcccaatctcaggtagttcgttctttacagcaaggcaagaatggactaatatatagggctgtcttca

SEQ ID NO: 868845 - DNA, 587 bp, Homo sapiens
gaacctcaagatcaataaggagataggaagcataaaagtgatataagtggccgggtgtggtggctcacgcctgtaatcccagcactttgggaggccgaggccaaggttaggagatcgagaccatcctggctaacatggtgaaaccccgtctctactaaaaaatacaaaaaaattagccaggcatggtggtgggtgcctgtagtcccagctactcgggaagctgaggcaggacaatggcgtgaacccaggaggcggaggttgcagtgagccgagatcatgccactgcactccagcctgggcaacagagcragactccatctcaaaaaaaaaaaaaactgatgtaagtaagtcaattatctgtggccagataaatgatcttccaaggcactgaaataacttacagatgtgactagagaacccaatttcctatcttttaaaaagtgccattaagcttgatataaattccttcaaaactgtaatattactaaagtgattgtttatgagcacttagaaatgaaggcattcatactaaggactactccggcttaattaaaaactggtaacttcaaactaaccacatagactta

SEQ ID NO: 868846 - DNA, 554 bp, Homo sapiens
gggcaaaacctggaagcattccccttgaaaaccagcacaagacaaggatgccctctttcaccactcctattcagcatagtattggaagttctggctatggcaattaggaaagagaaagaaataaagggtattcaaataggaagagaggaaatcaaattatctttgtttgcagatgacatgatcctatatctggaaaaccccattgtctcagcccaaaagcttcttaagctgataagcaacttcagcaaagtctcaggatacaaaatcaatgtgcaaaaattgctagcattcctatgcacaaacaacaagcaagtagacagccatattatgaatgaactcccattcacaattgctacaaagagaataaaayacctaggaatacagctaaaaagggaagtgaaggacctcttcaaggagaatgacaaaccactgctcaaggaaatcacagtggacacaaacaaatagaaaaacattccatgctcatggatagacagaatcagtgttatggcaataatgctcaaagtaatttatagattcaatggtattcctattaa

SEQ ID NO: 868847 - DNA, 629 bp, Homo sapiens
accatgattcttgaaggctccccagaagccaagcagatggccggcatcatgcttcctacagcctgtggaactgtgagccaattaaacctcttttctttataaattaccgagtcttgggtgtttctttataacagtgcaataatggactaayacaaacagaatgatgaatctcaagaataacacattaataatatcaagatataatccaaaattacctaacatagaataccagaaaaatgtgatgcattcctaaaggtaaagaccatcaagaatccaaacctgagatgacacagatgtgggaattagcggacaatgactttaaagtagctactataactatattcaataagataaaggaaaacttattggtaaggaatgaaaataaaggaaatcttatcagaaaaaaaggaaaatataagaaagccaatggaaattttagcaataaaaatataatatttgaaattaaaactcactgcctgatcttgggaaaaatggagctaaaagaggcaaaagtcaatgaatctgaaaatagatcaatagaaatgatccaatctgaagaaaagaaaaagaactgaaataaaataaaaataaaataaatctcagagacctattgaacaatatagaatata

SEQ ID NO: 868848 - DNA, 610 bp, Homo sapiens
cggaaacagaagaacaaaatcagaggggacaaatagaaagcaaataatgtattgaaggacacaaatctaaacatatcaaatattacactaatgtgaatgggctaagcacttcagttaaaaagcagatattatcaaaatgggtaaaacagcaagatccaacaatacgcttcwacaagggcatactttaaagaaacaaaagtaaaatgaacaaaaagcaatatgccatgaaaacagaaaacatgagactagaatggccacattaatatcacacaaaagctactacaagaaaaaaagtatgaccagcaacaaatcgatattttatgaagataaaaggatcaataaatcaggaaattataataatcatcaatgtgtgtgcctaataacagggcttcaaattacatgaagcaaaaatgggcacaaagagataaacacaatgatgataggtgatttttaacactgctctctgagcaattgataggacaactagacaaaaaaataaagacacagaaaatctggataacaataatttatatttataaatcattacacccaacaattacagaatatacattcttttcaagtgcacgtgatatgttcatcaagatagact

SEQ ID NO: 868849 - DNA, 590 bp, Homo sapiens
attgatctttcatctttcccactgtgttttctttgttagttttacaatttcaggtctatgtttaagtctttaatccattttgagttgacttttgtatacagtgtgagataagggtctagtttcatttttctgcatctggatatcaaattgtcccaccaccatttattgaagaggctgtcctttttccattgtatattcttgatacttttgttgcaaatcagtggacagtaactgtgtggatttatttctgggagctgtattctgctccattggtctacatgtcttttatgccagtaccatgctgttttgattattatagctttgaagtatattttgaagccaggtagtatgatgtcttcagcttyatttttttgtttgtatgttttgttttatttatttatttactttgctcaatattgctttgggtatttggggtgttttgtggttccatgcaaattttagggaagttttttatatttctgtaaaaacttcattgaaattttgatacgaattgtattgaatttgtatattgctttgggtaatatggacattttaaacagtattaatttttccaagctatgaacataaaa

SEQ ID NO: 868850 - DNA, 590 bp, Homo sapiens
attgatctttcatctttcccactgtgttttctttgttagttttacaatttcaggtctatgtttaagtctttaatccattttgagttgacttttgtatacagtgtgagataagggtctagtttcatttttctgcatctggatatcaaattgtcccaccaccatttattgaagaggctgtcctttttccattgtatattcttgatacttttgttgcaaatcagtggacagtaactgtgtggatttatttctgggagctgtattctgctccattggtctacatgtcttttatgccagtaccatgctgttttgattattatagctttgaagtatattttgaagccaggtagtatgatgtcttcagcttcatttttttgtttgtatgttttgttttatttatttatttactttgctcaatattgctttgggtatttgrggtgttttgtggttccatgcaaattttagggaagttttttatatttctgtaaaaacttcattgaaattttgatacgaattgtattgaatttgtatattgctttgggtaatatggacattttaaacagtattaatttttccaagctatgaacataaaa

SEQ ID NO: 868851 - DNA, 619 bp, Homo sapiens
aaatgctattgatttttgtaagttgattttttatctttcaactttattttgtttattagttccaagagtgttttggtggagtctgtagggttttctttatataagaccaaagataattatgtctgagtaaaaaataattcatgacccacawccgttacagaagtagacccaccagagaggttaagataatactcttattcacaatcatctaaagaaggcataaaccaatataaagagaagtttgtggaattataggaactgtacagtggagtaggtggttaagataaataaggatgattctaatatctcattttacaattatggggcaaagatcactgtggaccctcgacagacttgtaaaatacaataacaggaggaataaacccagcattttttccatgtaaatgctcagacttactaaggtgttcaaaggcaaaataacctgataattactgttattaataggatacacagaatagataaataaggggtatggactcccaatccacactggcttacaacactatacttctacagcacactactctacccagggaaattctgaagtgatctctacagtaagttgccaggaaaactatgatctttaaatacttaaatc

SEQ ID NO: 868852 - DNA, 619 bp, Homo sapiens
aaatgctattgatttttgtaagttgattttttatctttcaactttattttgtttattagttccaagagtgttttggtggagtctgtagggttttctttatataagaccaaagataattatgtctgagtaaaaaataattcatgacccacaaccgttacagaagtagacccaccagagaggttaagataatactcttattcacaatcatctaaagaaggcataaaccaatataaagagawgtttgtggaattataggaactgtacagtggagtaggtggttaagataaataaggatgattctaatatctcattttacaattatggggcaaagatcactgtggaccctcgacagacttgtaaaatacaataacaggaggaataaacccagcattttttccatgtaaatgctcagacttactaaggtgttcaaaggcaaaataacctgataattactgttattaataggatacacagaatagataaataaggggtatggactcccaatccacactggcttacaacactatacttctacagcacactactctacccagggaaattctgaagtgatctctacagtaagttgccaggaaaactatgatctttaaatacttaaatc

SEQ ID NO: 868853 - DNA, 619 bp, Homo sapiens
aaatgctattgatttttgtaagttgattttttatctttcaactttattttgtttattagttccaagagtgttttggtggagtctgtagggttttctttatataagaccaaagataattatgtctgagtaaaaaataattcatgacccacaaccgttacagaagtagacccaccagagaggttaagataatactcttattcacaatcatctaaagaaggcataaaccaatataaagagaagtttgtggaattataggaactgtacagtggagtaggtggttaagataaataaggatgattctaatatctcattttacaattatggggcaaagatcactgtggaccctcgacagacttgtaaaatacaataacaggaggaataaacccagcattttttccatgtaaatgctcagacttactaasgtgttcaaaggcaaaataacctgataattactgttattaataggatacacagaatagataaataaggggtatggactcccaatccacactggcttacaacactatacttctacagcacactactctacccagggaaattctgaagtgatctctacagtaagttgccaggaaaactatgatctttaaatacttaaatc

SEQ ID NO: 868854 - DNA, 607 bp, Homo sapiens
aggaacataatgaagttggttggttcctcctaagttcactggacaaagtgatgaaagaaaatgatgaacttagggattctaattcctagcttcagaagcagatactgaacctcaaacctgctaagattgccctgagtgagagtcttatctcctgtagagaaagagctgaaattgcgggaaattggacacaagttcttatcataccagtggctgacctgcaatgaaaggtgcatgcacagccttgccaggtgtctactgttgaaatgagggcattgattggaaaagaatgggatcctgaaacttggaatggggatatgtaaaaggaccctgatgaagctggggacactgagattrtaaattctgatgaaactttttttgccagaagaaacagctttctcatccccagtagtggcaacatgtcctccccaacccacactgccatcagcctttccacatttgtctgaggagaaaaaccctgcactgcctgaggcaacagtgatggcttcccctgaggcagttgccaggcaagataatgttgattctcctcaggacccaccccccaccacccctgtttgcttctagacctataactagactaaagtcccag

SEQ ID NO: 868855 - DNA, 627 bp, Homo sapiens
gatatgggtttgcctatcctgcacacattgcttctgccaagattaccatctgtggactcacagaatgccttatccaccatcgtggtattccacacagcattgcctttgaccaaggcactcactttacgactaaagaagtgcagcagcgggctcatgcatatggaattcactggtctttacatgttccccatcatcctgaagcagctggattgatagaatgatggaatggccttttgaagtcacaattacaatgtcaactaggtgacaatactttgcagggctggggcaaaattctccagaaggttgtgtatgctctgaatcagcatccaatatatggtactgtttctcccatagccggaattcacaggtccaggaatcaaggggtggaagtggaagtggcaccacttaccatcacccctagtgacccactagtaaaatttttgcttactgtccctgtgacattatgttctgctggcctagagktcttagttccagagggaggaatgctgccaccagaagacacaaccacgattccattaaactggaaattaagattgacaccgggacactttttgggctcctcctacctttaaaccaacaatctaagaaggaagttacagtgttggc

SEQ ID NO: 868856 - DNA, 570 bp, Homo sapiens
ggggattgtataatataaggcagggaacaggaaaatgtttcctttcttgagtctatggctgggctgaactgattaggccactccttggcacccatgcaagactctggcttggggtctaaaggggaagttaggccattttatttaaatgagttataaattatagacaataaaatgcatatctctcaagggtttcatttgtgaaggttttttggtgtttttttatttttttgttkgtttgttttgttttgttttgtttttttgacagggtctcactcttgccctggctggagtgcagtggtgtggtcgtagctcactattaacttgaactcctaggctcaagtgatccttctgcctcagcttcccaagtagttaggacttgtggtggttagcacatgccaccacatctggcaaattttttattttttgtagccattgggtgttgctatgttgtccatgctggtctcaaactcttgtctttacgaaatcctctggccttggcctcccaaaggctgaaattacaggtgtgagccactgcacccagccagtttgttacttttgagattgtgtgta

SEQ ID NO: 868857 - DNA, 601 bp, Homo sapiens
tgtcaggccaacttcccaaggccaggagtgcccaaaagtctcatcattcactccacagatactctgtcagagtctgtgcctatgggaaaagcgtctcagggaaatgtctggatgctaaggagagaggtcatgtttcctggtacctgggatcattgaggcatgccatcttgaaactgtggaggcccttggcgatgatcaaaccaacccccaatgctgcttttttttttttttttcctaatgaggactatggccaggcacggtggatgacgcctgtaatcccagcactttgggagtctgaggcaggcgaatcacttgaggccaggagttcaagaccagcctggccaacatggtgaaaccccgtctctactaaaamtacaaaaattagccaggcatggtggcatgtgcctgtagtcccagctactcaggaggttgaggcaggagaatcgcttgaacctgggagatggagattgcagtgaattgagatcgcaccactgcactccagcctgggcgacagagtgaaactccttctcaaaaaaaaaaaaaaaaaaaaaaaaaaaaagactccaaggcacaaggcaccgaaggtcacatagctactaag

SEQ ID NO: 868858 - DNA, 564 bp, Homo sapiens
agccaattttatatactaataaaacatgaactgcccactcttcatgcctgccaaacttggggcaattgatgctaaatggtatttttaaaataaatgtttttattctttactcttgactaaacttgtttattttcaactccaatgaagattgtggaagagtgttttgaaatgaagcatcgatttgtacttcatagagcaccagacacaatgtctcacccaatttggagttccatattttttttatgataaagaaaaatgttggccgggcgcggtggctcrcgcctgtaatcccagcactttgggaggccgaggcgggcggatcacgaggtcaggagatcgagaccatcccggctaaaaacggtgaaaccccgtctctactaaaaatacaaaaattagccgggcgtagtggcgggcgcctgtagtcccagctacttgggaggctgaggcaggagaatggcgtgaacccgggaggcggagcttgcagtgagccgagatcccgccactgcactccagcctgggcgacagagcgagactccgtctcaaaaaaaaaaaaaaaaaaaaatg

SEQ ID NO: 868859 - DNA, 690 bp, Homo sapiens
cacctaggtattaagcccagtatgcattagctatttttcctaacactctctccaccgtgccctcccctgacaggccccagggtgtgttgttcccctccctgtgtctatgtgttcttattgttcagctctcacttatgagtgagaacatgcagtgtttggttttctgttcytgtattagtttgctgatgataatggcttccggtctcatccatgtccctgcaaaggccatgaatgcattcctttttatggcttcataatattcattggtgtatatataccatgttttctttatctagtctatcactgatgggcatttgggttgattccctgtctttgctattatgaatagtactgcaatgaacatacgtatgcatgtatcattataatagaatgatttctattcctttgggtgtatacccagtaatgggattgctagatcaaatagtattccctgttctaaatctttgaggagtttccacactgtcttccacacggttgaactaatttacattcccaccaacaatgtaaaaacattcctatttctctgcaacctcaccagcacctgttgtttcttgactttttaataatgccattctgactggtgtgagatggtatctcatcaaaagatatttctacagacttttgtaatggtgaagaatgtaagttgaatttcattttcggtgtaattat

SEQ ID NO: 868860 - DNA, 690 bp, Homo sapiens
cacctaggtattaagcccagtatgcattagctatttttcctaacactctctccaccgtgccctcccctgacaggccccagggtgtgttgttcccctccctgtgtctatgtgttcttattgttcagctctcacttatgagtgagaacatgcagtgtttggttttctgttcctgtattagtttgctgatgataatggcttccggtctcatccatgtccctgcaaaggccatgaatgcattcctttttatggcttcataatattcattggtgtatatataccatgttttctttatctagtctatcactgatgggcatttgggttgattccctgtctttgctattatgaatagtactgcaatgaacatacgtrtgcatgtatcattataatagaatgatttctattcctttgggtgtatacccagtaatgggattgctagatcaaatagtattccctgttctaaatctttgaggagtttccacactgtcttccacacggttgaactaatttacattcccaccaacaatgtaaaaacattcctatttctctgcaacctcaccagcacctgttgtttcttgactttttaataatgccattctgactggtgtgagatggtatctcatcaaaagatatttctacagacttttgtaatggtgaagaatgtaagttgaatttcattttcggtgtaattat

SEQ ID NO: 868861 - DNA, 546 bp, Homo sapiens
gctaccatgacttcaaaacatactatagggctatattaaccaaaacagcatggtactggtacaaaagcagacacagagagtaatggaacagaatagagaacccagaaacaagactgtatacctacaaccatcagatttctgacaaaccagatgaaaacaagcaatggtgaaataattccctatttatgattattcataataataaatggtgctggaataactgattataggcaaaagattgagactggacaccttccttataccatatacaaaaattaactcaagagggattaaagacttaaatgtaaaaccccaaactataaaaaccctggaagaacaacctaggcaataccatcctggacagaggaacwggaaaagatttaatgattaagacaccaaaagcaattgcaacaaaagcaaaaagtgacaaatgggatataattaaggtaaagagcttctgcaaagcaaaagaaagtatcaacagagtgaacagacaacctacagaatgggtgaaaatttttgcaaattacgcatctaacaaagatc

SEQ ID NO: 868862 - DNA, 681 bp, Homo sapiens
aagcagatagaaatttatttttcaacttagttcttctctcctagtactcactggcaaagatcagttggatgttaatatctattgattttgaaattggtaggaaaagagaaaatgaaatgttcgaggaataaaaaagcgagtttgaggaacaaaaatatctatttaatttgtgaacgggataattatagattagataaaatatctgcctttctgaacatgagaggagctagaaaatgttctaacttctggaattataaattgggtatctgaaagatacagactgacaaagaaatatcttattcttccaaataagcactattttctatgagaaaactcaatgtgtcaagtgagtaagaagacaaaccacagactgggagaaaatatttgcaaatggcacatttgataaagaactattatccaaaatatacagagaactcttaaaactcaacaagaaaaacacgaacaacctcattttaaaytgcacaaaagatctgaacagaaaactcaccaaagaaaatatacagatggtatataagcttattaaaatatgcacaacatcctatatcattagggaatgcaaattaaaacaacagtgagatactactacatgcctattaggatggccaaaatctggaactgacatcacccagtgctagtaagaatgtggaataacaggaactc

SEQ ID NO: 868863 - DNA, 681 bp, Homo sapiens
gtttgttgtacatattatttcataacccaagtattaagccgaatacccaatagttaccttttctgttcttctccctcctcctaccccccacccctcaagtagaccccactgtctgttgttttcttcttcgtgttcgtaagttcttatcatttagctcctacatataaatgagaacatgcgtatttggttttctgttcctgcattagtttgctaaggataatagcctccagctctatccatgttcctgcaaaaggcatgacttgttctttrtggctgcatagtatgccatggtgtatacgtaccacattttctttatccagtctgtcactgatgggcatttaggttgactctatgtctttgctcttgtgaatagtgctgcaaagaacattcactagcacgtgtctttatggtagaatgatttatagtcatctgggtatatacccagtaatgggattactgggtcaaatggtagttctgattttagctctttgaggaattaacatgttgatttccacaatggttgaagtaatttacactcctaccaacagtgtataagggttcccttttctctgcgaccttgccagcacctgttattttttgactttttaatattagccattctgactggtgtaagatggtatctcattgtggttttggattgcatttctctaatgatcagtg

SEQ ID NO: 868864 - DNA, 650 bp, Homo sapiens
ccccaatcccccacaggccccagtgtgtgttattcccctcccagtgtccatgtgttttcattgttcaactcccacttatgagtgagaacatgtggtgtctggttttctgttcctgtgttagtttgctgaggatgacggcttccagcttcatccatgtccctgcaaaggacatgatctcattcctttttatggctgcacagtattccgtggtgtatatgtaccacattttctttatccagtcgatcatggatgggcgtttgagttggttccaagtctttgctattgtaaatagtgctgcaataaacatgtgtgttcatgtgtctttattgtagaatgatttatattccttagggtatatatgcagtaacacgattactgggtcaaatggtatttctggttctagatccttgaggaatcgccacactgtctttcacaatggttgaactaatttacactcccaacagtgtaaaastgttcctatttcttcacagcctcaccagcatctatcgtttattgaccttttaataatcatcattctggctggcatgagatggtatctcattgtggttttgacttgcatttctctaataatcagtgatgtgctttttttcatatgccacaaaaataaatgtcttcttttgggaagtgtc

SEQ ID NO: 868865 - DNA, 592 bp, Homo sapiens
tgcacactcaaaccccttatgggaaggggagcacacagacgggcagatgcaggagccagggtgagcacttttgggctccagccctacggtagcatctatgggtgggtgcctgcaactcccgaagccccagtgggaatgttacagtgcttctttagctctcctgatggctaaagtgttaatcagtttagtgtcttcttctacccaggtccttgtccggtgtccagaaagaatcaggtcacacacagactcaaaggatggtaaatgcaggggttttatygagtggtagaggtggctctcagagggatggattggggatctggaaaggggatggagtgggaacataatcttctcctggagtttggctatcccatgatcagtctcctctctgaccatttctagttgaactcctctcaacgttcagatgctccttctcttctctccttctctgctgtgccattcattccttctcggctgtgctgctcttctgctcttctgttcatctgctcatctgcttacaggacctgaggtttggggtttaaatgggtacaggataggggggcgtggtgggccaaatatttggatgcaaaaacag

SEQ ID NO: 868866 - DNA, 612 bp, Homo sapiens
aaatgaaaatttataccccaaaagccatgatctccttttgctgaagtgttgtttcatgaatttttttattcaggtggtttattagattactgtaataacatgaaagagaatagtgattccctatcaaccctgaaaattctcacaaaatttgcaaggggatcactaaagataagtgactgctgacagctcakggctagcaattgcacagaaacccagccaggtaaataaatatgttcactgagatttaatattctgttacagtatagaaaaattaataactcttttaattgacagattctttatttccttttaccaaggtatagatggccccctaaataacctctagatgtattaaatcttggcagcatacagctatttcctctgtggtcttcaaggtcctgacacccttcatcttacacaaggcagcgtatttaaatctttcaaggggccttttataactgggccaccctgtttctcttcacaggagatactgaaagcctatttgtcaggagcaataaagggacttatcaaggcctgctgtcaggccaagaggaggcccacctgctcaactcctaactcaaggattatgtttctgtttgttgcggtctttcc

SEQ ID NO: 868867 - DNA, 612 bp, Homo sapiens
aaatgaaaatttataccccaaaagccatgatctccttttgctgaagtgttgtttcatgaatttttttattcaggtggtttattagattactgtaataacatgaaagagaatagtgattccctatcaaccctgaaaattctcacaaaatttgcaaggggatcactaaagataagtgactgctgacagctcagggctagcaattgcacagaaacccagccaggtaaataaatatgttcactgagatttaatattctgttacagtataraaaaattaataactcttttaattgacagattctttatttccttttaccaaggtatagatggccccctaaataacctctagatgtattaaatcttggcagcatacagctatttcctctgtggtcttcaaggtcctgacacccttcatcttacacaaggcagcgtatttaaatctttcaaggggccttttataactgggccaccctgtttctcttcacaggagatactgaaagcctatttgtcaggagcaataaagggacttatcaaggcctgctgtcaggccaagaggaggcccacctgctcaactcctaactcaaggattatgtttctgtttgttgcggtctttcc

SEQ ID NO: 868868 - DNA, 644 bp, Homo sapiens
catggtcttggatgagggagacagctgatatagtttggatgtcccgcccaaatctcatgttgaaaccagatccccagtgctgaaggtggagcttggtgggaagtgtttggatcatgaggtcgaatccttcgtgacttggtgctgtctccatggtagtgcacctaccccaacayactctctctctcttgttcctgctttcaccatgtgaagtgcctgctcctgctttgccttctgtcatgagtaaaagctccctgaggcctctccagaagaagatgccactgtgcttcctgtacagcctgcaggactgtgagtcaattaaacatttttataatatccagtctcagatatttcttcatagcaatacaagaacagcctaatataacagataagcagggactaaagtcatcaaaattagaattgtgcatttaattttgattgcatttaattttcattgcatttaattttgattgcattgaaaaggcagatgctttgaggctagaatgaggtaataactgttttgttttgttttgtttgctcttaacaaattagtgtgacttcagtccatagtaaattggagaggaactggtagaacataaaagaactggtaaaaagccattgtaaacactcaagtttcaaaaacaatt

SEQ ID NO: 868869 - DNA, 511 bp, Homo sapiens
ctggctagccatatgtagaaagctgaaactggatcccttccttcaccttatagaaaaattaattcaagatggattacagacttaaatgttagacctaaaaccataaaaaccctagaagaaaacctaggcaataccattcaggacataggcatgggcaaggacttcatgtgtaaaacaccaaaagcaatggcaacaaaagccaaaatagacaaatggggtctaattaaactaaagagcttctgcrcagcaaaagaaactaccatcagagcgaacaggcaacctacagaatgggagaaaatttttccaatctacccatttgacaaatagctaatatccagaatctacaaagaacttaaaccaatttacaagaaaaaaacaaagccatcaaaaagtggacaaaggatatgaacagacacttttcaaaagaagacatttatgcagccaacagacacatgaaaaaatgctcatcattactggtcatcagagaaatgcaaatcaaaaccacaatgag

SEQ ID NO: 868870 - DNA, 628 bp, Homo sapiens
aaatacttgttgagtgaatgagctctggcagggagggggtgatgccaatttagaacgtgggagaagatcacatgctgcccataggcaggagctgcggtgcccctgctttctctctgccaccagctagctctgtaagtgcaaggaccagaaaagctaccgtgactagggtggtgactgggactatcccctccaccccatctcaatttagctggcacgagggaccagagagctgacagaggaggtatgacaggctggacaagcctcccaggctgtgaagcagggccctgtgacagttctggtgggtgagagagattgagtgtgtgtgtgtgtgtgtgtgagtgaatgaatgaaggagcaagtgaatgaatgaatgctggccaccaccacagctagtaagcttcacccctggaggacccctggctgatcaggagccttggagaagggttaggggcccggagcrgtgactcagtggtgcagaggtgtggtgagcaggaggagggacaggggatcccaggcctgtccctgcccagccccgatcttggttctcagagtccccccacagccctgggcctggctgcatacctgctcttccctttgccacgtggtgacttgttcctctcactcaggt

SEQ ID NO: 868871 - DNA, 679 bp, Homo sapiens
aaatgctactgatttttgtacattgattttgtatactgaaactttactgaagttatcaattccaggagcctttggtggagtctttaggttttctaggtatagaatcgttgtgaagagttagtttgacttcttttcctatttggatgccttttatttctttctcttgcctgattgctcttgctggcacttccagtactatgtggaataggggtggtgagagtaggcatccttgtcttgttctagtcctcaaggggaatgcttccggtttttgcccattccgcatgattttggctgtggattggtcataaatggctgttactattttgaggtatgttccttcaatgcctagtttcttgagggtttttatcatgaaggaatgtggattttatggaaagctttttccatgtctgttaagatgatcatatggtttttgtttttaattctgtttatgtggtgaatcacattgactgatttgcatatgttgaaccaaccttgcatctcaggagtgaagcctrtttgatcatggtgaattaactttttgatgtgctgtggaatttggtttgccagtactttgttgagaacatattgcgtttatggtcacacattgtcaggtctctttaacctttcatctggagtggttattcagcctatgtcttttatgacattgatgttttcttga

SEQ ID NO: 868872 - DNA, 556 bp, Homo sapiens
ctacagaaacccttgacaggtccagtgatgtatgagcatgcaagggaaaagccaaacctttcatgttaagaacaagtatgacagatctggctaaggtcctcagttggccgaggccatgccaggagcttttttaaaatgattattattgttatcaccttcgtactcagagataatgtcataatgtacagtcagccattgtgtgatcyaaatgattgatgccacttggacatgaattggtggggttaataatggtctttcagtggggcccagcatgggaggaagctctctcagaaaggctgccttcactttgatattctgctcaagacaggaaggtggacttctagaagtcaacactccatcatcctctacttctgaaagcatccccagggccctggtgagaactaggggtggggaaaccacaaaagttcctttctgttctttccaaaagtacatttgcttgtgttcaaccttcagcagtggatgtaatcatagaagttccattgaggtatgcactgttaattctctgatgaaaaaacagctacttttggaaggtata

SEQ ID NO: 868873 - DNA, 556 bp, Homo sapiens
ctacagaaacccttgacaggtccagtgatgtatgagcatgcaagggaaaagccaaacctttcatgttaagaacaagtatgacagatctggctaaggtcctcagttggccgaggccatgccaggagcttttttaaaatgattattattgttatcaccttcgtactcagagataatgtcataatgtacagtcagccattgtgtgatccaaatgattgatgccacttggacatgaattggtggggttaataatggtctttcagtggggcccagcatgggaggaagctctctcagaaaggctgccttcactttgatattctgctcaagacaggaaggtggacttctagaagtcaacactccatcatcctctacttctgaaagcatccccagggccctggtgaraactaggggtggggaaaccacaaaagttcctttctgttctttccaaaagtacatttgcttgtgttcaaccttcagcagtggatgtaatcatagaagttccattgaggtatgcactgttaattctctgatgaaaaaacagctacttttggaaggtata

SEQ ID NO: 868874 - DNA, 547 bp, Homo sapiens
cctctaagctgtaaatgtatagttgtttaatcatatgtagaggaagtcaaagaagtttatagacctaatttgaagaaatacttcttatcattaatattgttgtttttaagattaaggtcagaaaacaaatgtcaaaatttttaaaaacaggtgaaatgaagtgactattactgaccagcttctaaagaaacttttatggtgtagyattctggtggcacagagaaaaggaaatcccattcatgaagtatattctactgctgagaaatcaaaatgccaagtgcacaaaagctactcctgtatgaagaaaacaaaacaaacaaacaaaaaaaaaaaacaaggcctagagggagatattccgggggaaggacagtccctgacatgaccaatacccactgttagtctgagaagggagacagcacagcatgaaggctggattcagccagacctggcttcaagtcctggctctcactttttagttgtgagacttttgatcaggtgtttggtctctgaatctcaacttcctctcctctacaaatgagcaaaatat

SEQ ID NO: 868875 - DNA, 660 bp, Homo sapiens
tatatacaaatcaagtaaaatatttgagcctccactttctcttctgtaaaatggggttaataaaaatagttagctccttgggttattgttaggattcaagattaaatgagataatgtgaaaattaaacgagatgtattaaggcattttataaactataaaaccataagcaaatttaacttactgaaagttactagaaaaagatacatgagatatctctgaattatttcctacaaatgtgtacgaatcaacaattayctcaaaaagtataataagagtgataagaacatccctaaagaaaaacaaggatttatttatttatttatttatttattttttatttatttttttttttgagacagagtttctctcttgtctcccaggctagatagagtgcaatggcgcaatgttggcgcactgcaatctccgccccctgggttcaaacaattctcctgcctcagcctcccgagtagctgggattacaggcacccgccaccacccccagctgatttcagggactgattttaaaagagaatgccctctataaattctcagcatcggacaacgttcctgtgtactttctaagtattagcaaaaaaaaagtatatggaatgattttaaatccttttttcccgagtactagctgggcactagatgattaa

SEQ ID NO: 868876 - DNA, 660 bp, Homo sapiens
tatatacaaatcaagtaaaatatttgagcctccactttctcttctgtaaaatggggttaataaaaatagttagctccttgggttattgttaggattcaagattaaatgagataatgtgaaaattaaacgagatgtattaaggcattttataaactataaaaccataagcaaatttaacttactgaaagttactagaaaaagatacatgagatatctctgaattatttcctacaaatgtgtacgaatcaacaattatctcaaaaagtataataagagtgataagaacatccctaaagaaaaacaaggatttatttatttatttatttatttattttttatttatttttttttttgagacrgagtttctctcttgtctcccaggctagatagagtgcaatggcgcaatgttggcgcactgcaatctccgccccctgggttcaaacaattctcctgcctcagcctcccgagtagctgggattacaggcacccgccaccacccccagctgatttcagggactgattttaaaagagaatgccctctataaattctcagcatcggacaacgttcctgtgtactttctaagtattagcaaaaaaaaagtatatggaatgattttaaatccttttttcccgagtactagctgggcactagatgattaa

SEQ ID NO: 868877 - DNA, 660 bp, Homo sapiens
tatatacaaatcaagtaaaatatttgagcctccactttctcttctgtaaaatggggttaataaaaatagttagctccttgggttattgttaggattcaagattaaatgagataatgtgaaaattaaacgagatgtattaaggcattttataaactataaaaccataagcaaatttaacttactgaaagttactagaaaaagatacatgagatatctctgaattatttcctacaaatgtgtacgaatcaacaattatctcaaaaagtataataagagtgataagaacatccctaaagaaaaacaaggatttatttatttatttatttatttattttttatttatttttttttttgagacagagtttctctcttgtctcccaggctagatagagtgcaatggcgcaatgttggcgcactgcaatctccgccccctgggttcaaacaattctcctgcctcagcctcccgagtagctgggattacaggcacccgccaccacmcccagctgatttcagggactgattttaaaagagaatgccctctataaattctcagcatcggacaacgttcctgtgtactttctaagtattagcaaaaaaaaagtatatggaatgattttaaatccttttttcccgagtactagctgggcactagatgattaa

SEQ ID NO: 868878 - DNA, 493 bp, Homo sapiens
ttactttatattaaacatcaattattacctttatgatgttcatgcatcataaccatatcagacttcacgggaattggaatgttggcctctggtggtatggttctgaacatatctggagctacattctgggtacaggtcatgaaagaaactgcatgcttggcttccatgtaatacataatgtataagttgcacatttcatcactagacgtgccactgcaggcaaaaaaaagatataacaaatcaactattcacataaaacacatgcttaatgcaagaaaaatgaagccmttagatctgccagcaatggattcaaaggtagaaatattgtgcatttattttatagctttcattaaaacccatcacagttttcaacatcaaaagcacattgtcaaaggcatatttccacttaacaatggagtgtcagtttgcaggcacaccatgaacactactaaataccactgatgaaaatggcattttagtagatgagggaata

SEQ ID NO: 868879 - DNA, 577 bp, Homo sapiens
cttgtaagtatctcacagctcccacatcattctgagtacatattatcagaggcaatgctgaaaatatttaacaactctctgacctgggcattgattaaacagagtagtcagtaattattaaccatcattatagctatactggtgtgtgcaggctgaatataagcaagcaactccttcagaacattcccaaaacacaggactcccctggttccctcctaatcccactccgtatctgcaggtttaccacatcgtgggatggttcaggatcgtgcataactctatgaaggcagattcagatggagagaggctcytgaatggttgataacagagaaaggatagttgcttctgagcaatagcattgattatggtcagggggagcccacagaggccactcttaggcattctccttgcagtttcagggtatcaggtgtgtactgctattgagaggacataggtctccttgcccatgacaccatcagacccacctggagtccacacctcaattctgctccctcagctgcccagcagcaagcacgggaactcccacctcccccttatataagagccaaatgtcggg

SEQ ID NO: 868880 - DNA, 559 bp, Homo sapiens
ggtggaataaaacattcccatttatctgttttctatttcaaaactcctcttttaaggagatgtaagaaacatctattttttgagcattggcatacaattctttgacaacagcattttaatactaaaaagtaagttatttaccttattttactaatatttcttgctttacatgtaaaaagtagagtcttaaacagtcagtggcacttctcagtgaaggaaaaggtgcttccgacttacaaagtaagatgaatcccagagagcacaagtccatttcaaggaattatgcctaacaaacattaatttgtaaaatgcagtactaggaaacatctctccccgcrtgccccaaaagtcaacatgaagttttagtgctttaggaaatgagacaacgaggcgaagattagattgccttttcatataaagtaattggatgcaataatattaatgacttagggatgagacagagattaaatatgcaagtttaaatgaggatgtcctaaaaataatcaccttcaagaagggtggaggatcatcagatgttggacagaaactgtcaaaaact

SEQ ID NO: 868881 - DNA, 627 bp, Homo sapiens
aaggcaagtatgaagagaaggttatcaactttatgaaaaagaggaccagagaaggcgaagtggcaagctgagtggcgaatgctgcttatcatatatccagttaaaatttcttggtctcattcttcaccattgttaaaatactttaacatattttatatacacttaaatatctgctcctttctagtaatatattttatgtcttttaccatctttgagccacaatgatctcaactgtgaaatgggagcagtaacaaattgcaccataagattgttgtgttaaataatggcatgaatgtgcttagcctgttgcttgtcacatggaatctgcacagttaatgctcatagcctgtaactcttcccatcctcttcagcaagcttttatttaatgacgcagttaygaatgagaaactcctgcaagaatgatcagtgtgcattggatagatgttaattaggtaggacagccagcattatgttcatttgaaggggaaaaaaactgaggttttcagaggttaagtagcttgctgcaaagtgcttagctatcaacaaataggaggtggttttctccagagggccccaggtgagatgcacaggtgttacccagtgcagacttttggtcaccttcactta

SEQ ID NO: 868882 - DNA, 628 bp, Homo sapiens
tgggttttcccctggcagtcttaaggaggctgggaggtgtggactgggcagaattcaccacagcacagcaaagtggctgtggtcagactgcttctctagattcctcctcaatgggcagggcatctctgaaggataggtaacagmctcattcaagggcttacagataaactcgcatctccctgggacagagcacctggcggatggggtggctctgggtgcagcttcagcagatttaatctctcctgcctgccagctctgaaaagagcagctgatcctgacaagagggattctctcagcacagcacaccagctctgttaacggacagactgcctcgtcaagtgggttgctcacccccgtgcctcctaactggagagacctcccaacaggggtcgacaactgatacaggagagctccagctggcatcaggcttgtgcccctctgggatgaagcttccagaagaaggagcaggcagcaatctttgctgttctgtagcctccactggtgatacccaggtgaacagggtctggagtggacctccagcaaactgcagcaaggaaaacgaacaaacagaaagcaataactgcaacatcaacaaaaaggaccctcacacaaaaaccctatccaaagg

SEQ ID NO: 868883 - DNA, 628 bp, Homo sapiens
tgggttttcccctggcagtcttaaggaggctgggaggtgtggactgggcagaattcaccacagcacagcaaagtggctgtggtcagactgcttctctagattcctcctcaatgggcagggcatctctgaaggataggtaacagcctcattcaagggcttacagataaactcgcatctccctgggacagagcacctggcggatggggtggctctgggtgcagcttcagcagatttaatctctcctgcctgccagctctgaaaagagcagctgatcctgacaagagggattctctcagcacagcacaccagctctgttaacggacagactgcctcgtcaagtgggttgctcacccccgtgcctcctaactggagagamctcccaacaggggtcgacaactgatacaggagagctccagctggcatcaggcttgtgcccctctgggatgaagcttccagaagaaggagcaggcagcaatctttgctgttctgtagcctccactggtgatacccaggtgaacagggtctggagtggacctccagcaaactgcagcaaggaaaacgaacaaacagaaagcaataactgcaacatcaacaaaaaggaccctcacacaaaaaccctatccaaagg

SEQ ID NO: 868884 - DNA, 668 bp, Homo sapiens
aaaggacatgaacagatacttttcaaaagaagacatacatatgaccaaaaagcctatgaaaaaatgctcaacgtcacttctcatagagaaacgcaaatcaaaaccacaatgagataccatctcacaccaatcagaatagctattattaaatagtcaaaaaataacagatgctggtgaggttgccaagaaaaggaaatgcttatacactattagtgggaatgtcacctagttcagccattgtggaaagcagtgtggtgatttctcgaagaacttaaaacagaatttccattctacccagcaattccattatggggtatatacccaaaggaatataaatcattctaccataaagacacatgcacatgtatgttcattacagcactattcataatagcaaaacctgaaatcaacataaatgcccatcaacagtagaatggataaagaaaatgtggtacatatgcaccatggaatactacacagccatataaaagaatgagatcatgtcttttgcagcaamgtagatggagctggatgccattatcttaagtaaactaatgaaggaactgaaaaccaaatactacatgttctcatttttaaggggaagctaaacaacaaaaacacatggacatgaaaagggaaacaacagataccaggacatactttaggga

SEQ ID NO: 868885 - DNA, 673 bp, Homo sapiens
gagtcatgtgcctctcacttggaataaaaaactagaaatgattaagcttagtgagtaagacatgtggaaagccaaaagagactgaaagctaggcctcttgcaccatacagttagccaagttgtgaatacaaaggaaaagttcttgaagaaaattaaaagtagttctctggtaaacatacaaatgataaggaaacaaaccagcctcattgctgatgtggagaaagtttgagtggtctggactgaakatcaaaccagcctcaacattcccttaagccaaagcctaatccagaacaagaccctaaattctttaaattctgtgtaagctcagaaaggtgaggaagctgaagaagaaaagttggaagctagcagaagttggctcataaaagaacatacaaagtgaagcagcaagtgctgctgtagaagctgtagcaagttaaccggatgatctagttaagatatttaatgaaggtgactgcaccaaacatattttcaatgtagatgaaagaggtttctattggtagacaatgtcatctaggaatttcatagctagagaggaaaagtccatgcctagcttcagagcttcaaagaacagtctgactctcttgttaagggctaatgcagctggtgactttaagctgaagaactacattaaatctactctgcctgtgctcta

SEQ ID NO: 868886 - DNA, 676 bp, Homo sapiens
acttattactaactgtcttcttaagcatttagcatagggcagagttgggtaacacacatgaagataaactttaactctttaaggatttttttaaggagaataaaatggcaaaagattgacaaattataaaagacaagaagatttccataaaggtaacatgtggtgctataagatggaaagaaaattgtatatttttaagtaaagcgatccacaattacctagaaagttcaggaaaaagactgagattattttagtaacattttattcagtagcygtttcctgaaatattcttcataatagaaacagcacatattacacacacacacacacacacacacacacacacacacgtaggactggcaaacgataatgtcaaaaactccacaaatatctgtgaattctgatttacttttatgaagtttctcagtaaaataacattgagaaatctacctaatcttgtttgaagtctaagatatctggtattggaactgaacttttttcatacaaaagtttttgtttgttggtttttcagaagacactatatatttgcaatactagggagttctttaattgattcaatgatgtatttattgtttctatgtgtcaggcactgtggtaggatctagggagttacaaattattaacttttaaagtatttattggagcaatggacaaa

SEQ ID NO: 868887 - DNA, 634 bp, Homo sapiens
ttgccttctttttcaaaattgccttagttgttctatattaattaattaatttatagttccatattaattagaatcagtttatccagttccctgcaaatattctgctggaatttttattgaagtgcattgaatttgtagatcaatttgcagaagtctacatctttacattgtaaaacaatcacatccatttatatggtgtaactttccatttattcaaatctatcttttttcagttgaatcttaaaacttcccctgtaaagattttcattargttatttcctaggaagttcatagctttgtgttattgtaaatagtgctttattttctattgtattttctaagtggttagtgctagtgtaaaaaatgttatttctctttggttgatgatattttatttctctaccttgctgacttgaactctcatattacttttaatagtttgttgatttgcttctgtttttaagtaaattattatgtaacctacaaacaatggcaaattttctcttccaaattttatttacttcaatgtgattgcattgaccaaacctccagtactatgttcacccaatagaattcagattcaaacatatcatggtatgaaaccacatatcctcttggttaggaatgtggtagt

SEQ ID NO: 868888 - DNA, 634 bp, Homo sapiens
ttgccttctttttcaaaattgccttagttgttctatattaattaattaatttatagttccatattaattagaatcagtttatccagttccctgcaaatattctgctggaatttttattgaagtgcattgaatttgtagatcaatttgcagaagtctacatctttacattgtaaaacaatcacatccatttatatggtgtaactttccatttattcaaatctatcttttttcagttgaatcttaaaacttcccctgtaaagattttcattaggttatttcctargaagttcatagctttgtgttattgtaaatagtgctttattttctattgtattttctaagtggttagtgctagtgtaaaaaatgttatttctctttggttgatgatattttatttctctaccttgctgacttgaactctcatattacttttaatagtttgttgatttgcttctgtttttaagtaaattattatgtaacctacaaacaatggcaaattttctcttccaaattttatttacttcaatgtgattgcattgaccaaacctccagtactatgttcacccaatagaattcagattcaaacatatcatggtatgaaaccacatatcctcttggttaggaatgtggtagt

SEQ ID NO: 868889 - DNA, 643 bp, Homo sapiens
gtcctagccagagcaattaggcaacatcctaattgcatccaaattggaaaagaggaagtcaaactattgctgtttgcagatgatataatcgtatacctagaaaatcctaaaggctcctccaaaagactcctagatttgaaaaacaaattcagtaaagtcttaggttacaaaatcaattacacacatcggtagtactgctatacaccgacattgaccaagctgagaatcaaataaaaaactcaatcccttttataacagcttcaaaagaaaaaaaaaaatacctaggaatagacttaaccaaggaggtgaaagatctctacaaggagaactacaaaacactgctgaaagaaatcayagatgacacaaacaaatggaaacacaaccatgcttatggattggaagaatcaatactgtgacagcgaccatactgcccaaaacaatctacagattcaatgcaattccccttaaaatgccaacattattttcacagaattagagaaaacaatcctaaaattcatatggagccaaaaaagagcccaaatagccaaagcaatcagaagcaaaaggaacaaatctggaggcatcacattactcaacttcaaattatactgtgaggctatagttaccaaaacagcatggtact

SEQ ID NO: 868890 - DNA, 643 bp, Homo sapiens
gtcctagccagagcaattaggcaacatcctaattgcatccaaattggaaaagaggaagtcaaactattgctgtttgcagatgatataatcgtatacctagaaaatcctaaaggctcctccaaaagactcctagatttgaaaaacaaattcagtaaagtcttaggttacaaaatcaattacacacatcggtagtactgctatacaccgacattgaccaagctgagaatcaaataaaaaactcaatcccttttataacagcttcaaaagaaaaaaaaaaatacctaggaatagacttaaccaaggaggtgaaagatctctacaaggagaactacaaaacactgctgaaagaaatcatagatgacacaaacaaatggaaacacaaccatgcttatggattggaagaatcaatactgtgacagygaccatactgcccaaaacaatctacagattcaatgcaattccccttaaaatgccaacattattttcacagaattagagaaaacaatcctaaaattcatatggagccaaaaaagagcccaaatagccaaagcaatcagaagcaaaaggaacaaatctggaggcatcacattactcaacttcaaattatactgtgaggctatagttaccaaaacagcatggtact

SEQ ID NO: 868891 - DNA, 620 bp, Homo sapiens
tttggggttctcaataatttttaaggttataaacaagttgttctgaagccaaaactttgagaaccacaacattaaactaagtgttccacaaagattgacaattaaaaatccactcttggaatataatcttttaaaatacagtattaggtagactcatcttaatgtgataaaatatatcttaaatatatctaaaagcccaaattacatgcttgctggttatagaattctgagagaaacaaaatatcacccctttggccttcatggtttctgataagaagtctcccctcaatgggawaatgtaactgtggtcttttcaagattttttcccgtttttagtttttacaagcttgataatcatgtgtcttggtgtggttttttgggatttaccctaattggaatacacacagcttcctgattctgtaggtttatggctttggacaaatttgagaaattgtcagccattatttcttaaattaattatttagcaatgccttctttatccttcactccagggctccaatgacattattattatatctttgtctctgcttgtcagagtcttctcatgtttattttacaaatgatgtccaagaattttagttttccttagggagagaaag

SEQ ID NO: 868892 - DNA, 682 bp, Homo sapiens
tcaaacagaagtttctcagttatgtgacaagacagtaagtatggtgattttttttcaaaattgtcaataatcatgataaagacatctaagtatctcaccaaaatatgtctttctccctgtttgaccacttcctaagagcctaaaaaaaaaaatattcatcttggaatattttaygtaatcaatagtctacaaataatcttttaaacaaaccttgtttgaattgtatcattttagtaaattcgaggtatatgctttctgtatatatctatatctatatacatacacacaaacatatagacatacacacacatgcatatatatacccacatacacataaatttatacatatacatggcctgtccttaaatacaatttcagttaaaaagaggtaaaggtaaattaataaatgggatattggactgctaattcccttccaaattaatattaggtatatttaaaataaatgtgacttatctcggcattataactgggcttattctgactcagttgtcaactttccactgtactgtgaagtttttcctatttaaagcatttcttctagcatgatacattcactagagctttgtctaattctctcctctatattccctcaactcagtttctcatacttaatctgataatcctaataatttaatgcaaatagtctttaagaaagactgcc

SEQ ID NO: 868893 - DNA, 661 bp, Homo sapiens
aggccttgaggcctaggagaaattggttttgtggtctgggcccagggtgcccatgctgtatgcagcctaggaacttggtgtcctgtgtcccagttgctccagccatggctgaaaggggccaacatagagcttgagccatggcttcgagggcgcaagccccaagccttggcagcttccacacggtgttgagcctgcaaatacacagaagtcaagaattggggtttgggaacctccacctagatttcagaagatgcatggaaatgcctggatgcccaggcagaagtttgccgcaggggcggatccctcatggagaacctctgctagggcagtgtggaagggaaatatggggttggagcccccagtacagagtccctactggggcactgcctaggggagttgtgagaagagggccaccatccttcagaccccagaatggtagatccacctacagcttkcaccataggcctggaaaagctggagacactcaatgccagcccatgaaagcagctgggagaaagccacaggggcagagctccttgagaccatcggaatccacctcttgcatcactatgacctggatgtgacagctggagccaaaggagaccattttggagctctaaaatttgaccaccctgctggatttcagacttgcatgggccct

SEQ ID NO: 868894 - DNA, 584 bp, Homo sapiens
atagtcagtgtcttggatttgggccatttgaaaaggtgtgtagggtacctcattgttgttttgaaattccctaatggcatatgatgttaagcatcttttcttatgcttattttccatctgaacattttatttgatgaggtatacattcagggcttttgcccatttaaacaattggttttttttttattgttggattttaagagtccatggcatattttattttgggaagtttttgcttttggttttttgtttttgtttttgtttttgagacagagtctcactctgtcgcccaggctggagtgcagtggcgcgatctcggctcactgcaagttctgcctcccaggttcatgccattctccttcctcagcctctcgagtagctgggactacaggtgccygccaccacacctggctaattttctgtatttttagtagagacggggcttcaccgtgttagccaggatggtctcgatctcctgacctcatgatccgcccgcctcggcctcccaaaatgctgggactacaggcgtgagccactgcgcccggcctgtttttgttttttttactaaatctgaaatgagcaga

SEQ ID NO: 868895 - DNA, 582 bp, Homo sapiens
acacattcagtgtctaatcggtgattataaataatagtaaagtcagatcttgaataatggctcatttaggtgctttagaagttggtctgccacatatttaagatacttatttctcgcctagcctaaagcaacataacaaacaattgaagttagtcaacccttaactccaaaataagctgaatgctaaaaacataatttagtatttttaaaatactttatacatttgaatttatattttaaaaaaactcagtcttgtttagaaagttgaaraagtcttggcttaatgactatttttttaagtcagttaatagggaagcaactggaacacactacaaacatctggtggtaatcaaataaatgtacctttttaaaatacttgtacccatagctctgagggattttgttgttcatcagcggaaacccttttttaacaactacatttgattccccacaatcattcatgctcgcaaacatccaaaccaaatgtgaataaatattttcatcctgtattagcaatattataaaggcctcggcgtgataatgaagtgagaaacatttactggcataccagagtggtgtaaa

SEQ ID NO: 868896 - DNA, 640 bp, Homo sapiens
aaatgttgctgcctgattgttcctctggaagttttatctcagaggggtacccagcagtgtgagatgtcagtctgcccctactggggggtgcctcccagttaggctacttgggggtcagggacacacttgaggaggcagtctgtccgttctcagatctcaagctccgkgctgggagaaccactactctcttccaagctgtcagacagggacatttaagtctgcagaggtttctgctgccttttgtttggctatgccctgcccccagaggtggagtctacagaggcaggcaggcctccttgagctgtggtgggctccacccagttcgatcttcctggccactttgtttgcctactcaagcctcagcaatggcgggcacccctcccccagcctcactgccacgttgcggttcgacctcagactgctgtgctagtaatctgcaaggctctgtgggcgtaggatcctctgagccatgtgcgggatagaatctcctggtgtgccgtttgctaagaccatcggaaaagtgcagtattaggatgggagcaacccgattttccaggtgccatttgtccccccttcccttggctaggaaagggaattccctgaccccttgcacttcccgggtgaggcaatgcctcgccct

SEQ ID NO: 868897 - DNA, 637 bp, Homo sapiens
tcagagacttgaaatttattcttattcaacagatggggaatcaaaccgatcatgcattataatacagccaaatatatattattgttgctatatagccaaaagtcatataagtgtttgaaagtaatagactaatgatgcaataagatgaatatgccattcaaattcatggatggttttaaaaattagtgacagataggtatattattatttcttccattttacgataagtgaagtcagagaagtaacttggccatggtcatatgataaatagccaagctgggatttgaccccaaggagtttggctccaaagcctgggctcttaactccacccactgtttctctgggcagtacctggaaatagctggacttcaggcaggttggtcaggtatggcacaaatattggaaacctcagatctgaaattttaaaaccaacatggtgccatgtaatttcttacagtkaaataaagagacagtttgggacctgagaaacggagatcttttgaaaaccatgggattctatgacttttagaaactaaccaccatgttcaggttgagttagtttcccctttctctatgtttccatgactttgtgaacacaccctattttagcttgtattacagtgttgtaattggtttt

SEQ ID NO: 868898 - DNA, 643 bp, Homo sapiens
tctttggttctgtttatgtgatggattatgtttattgatttatatatgttgaaccagccttgcatctcagaaatgaagccaaattgattgtggtggataagctttttgatgtgctgctgaattcattttgccagtattttactgaggatttttgcatcgatgttwatcagggatattggcctgtaaatgtctttttttgttgtgcctctgccaggttttggtatcaggatgatcctggcctcataaaatgaattagggaggagttcctctttttttattgtttggaatagtttcagaagaaatggtaccagctcctctttgtacctctggtagaattcagctgtgaatccatctggtcctgggctttttttgttggtaagctattatttactgcctcaatttcagaacttgttattggtctattcagggattcaacctcttcctggtttagacttgggagggcgtatggatccaggaatttatccatttcttctaggttttccagcttatttgtgtagagctgtttacagtattctctgatggtagtttgtatttctgtgggatcagtggtgatatccccttcatcattttttattgcatcgatttgactcctctctcttttcttctttattaatctgtctag

SEQ ID NO: 868899 - DNA, 473 bp, Homo sapiens
cttacagttctacatggctggggaagcctcacaatcacggcagaaggcaaggaggagcaagtcctgtcttaaatgaatggcagcaggcaaatagaatagagaatgaggaagatgcaaaagcagaaccccctgataaaaccatcaaatctcatgaggcttattcactgccatgagaacagtgtgtgggaaacygcccccatgattcagttatctcccaccaggtccctcccacaacacatgggaattgtgggaatataattcaagatgagatgtgggtggggacacagagccaaactatatccttctgcccctggcccctgccaaatctcatgtccttacatttcaaaatcaaccatgccttcccaacagtcctgaaagtcttaactcatttcagcattaactcaaaagtccacagtccaaagtctcatctcagacaaggcaagtcccttctgcctatgagcctgtaaaatcaa

SEQ ID NO: 868900 - DNA, 722 bp, Homo sapiens
gcaagaattaattcatggagatagttgacattttcgagctgactgcctcttagagaaaatgatgtcattctccagcagcctaatgacagtcatcagcctgagaggacacatgctaataaggttcattgctcacctagttttcttcctttttgtctagccagagtgtccttggatgcccataatttggcattgtgctcctagaatcatttttaagagagactagagtatgaaacttaggaaatagtgcttttttttttcctaatcagaaaattggattaatgtttctaacttcttccagtaactcaaagtcatgctcccagtttattcataagtatccaaattatttattttwtttttttttgagacggaatttcactctttttgcccaggctggagtgcaatgacgcgatatcggctcaccacaacctccgcctcccaggttcaagcaattctcctgcctcagcctcctgagtagctgggattacaggcatataccaccaccccggctaattttgtatttttagtagagacggggtttctctatgttggctggtcttgaactcccgacctcaggtgatccacccgcctcggcctcccaaagtgctgggattacaggcatgagccaccgtgcccagcataggtatccaaattctaattgaactttctaaggtgttggatccattgtttaaattgtgaaagaccattgattcaagatgctgaga

SEQ ID NO: 868901 - DNA, 641 bp, Homo sapiens
tttattttagcagcccaaataaactaagacagagctcattaatattaaaatagaaacattttctcttatactgtctatgttacacacattttcttcccagtggacaatggactttagcaatcttttaaatcttttaaatacattggttctcagctctatcaatgttttcctgcgtgggttttggctatggtgttccctgaaaggcctttcccaaactcttcacctcccactggtgcctcttccccactgagtaacagaggagattctccatttgttcacatctttatgtcctctgaaaaggtcttatagttctgttcacaaaagtcctgtatttaaattctgtgccacttattaatattgttttccaataacattttctaagcagttacttmtaatttatagaaactttggggctttttgatttcttttttaaccagtctgattttctgtgtttttcagcacaccaatgtactttttataactaatgattatttaccactaaaactttctgttatttgtgacttctcatattccttccagtcttgtagtaatacttattgcttacagaaaaatgtgaattacagagataatggcaaataatcttgcttcattagaaactttaataagaataacactacaat

SEQ ID NO: 868902 - DNA, 607 bp, Homo sapiens
taagaaatgcttgagtgaaatacctttcctattcagtgcttcttacgattatatgtacagtacaggcttgctattaagagctgaggccgggcgcgatggctcatacctgtaatcccagcactttgggaggtcacggcgggtggattgcctaaggtcaggagttcgagaccagcctgaccaacatggtaaaaccgtgtctctactagaaatacaaaaattaggagggcrtggtggtggcacctatagtcccagctacttgggaggctgaggcaggagaatagcttgaatccgggaggcggaggttgcagtgagccaagatcacaccactgcactccagcctgggtgacagagcgagactccatctcaaaaaaaaaaaaaaaaaaagagctgagacgcaggcatactgcttggagggttcatggcatggaaatcagtcgtttgtgaggaaggaggtcaaggcatacttacttggggttggtgcagaggcgactcctatgagatactccccctccgcaggtcctggagcatggggaccaagaagaccagtccgaccagtggccatgggtgggcttggggccttcatcaccatatttcacacactgtcctc

SEQ ID NO: 868903 - DNA, 607 bp, Homo sapiens
taagaaatgcttgagtgaaatacctttcctattcagtgcttcttacgattatatgtacagtacaggcttgctattaagagctgaggccgggcgcgatggctcatacctgtaatcccagcactttgggaggtcacggcgggtggattgcctaaggtcaggagttcgagaccagcctgaccaacatggtaaaaccgtgtctctactagaaatacaaaaattaggagggcgtggtggtggcacctatagtcccagctacttgggaggctgaggcaggagaatagcttgaatccgggaggcggaggttgcagtgagccaagatcacaccactgcactccagcctgggtgacagagcgagactccatctcaaaaaaaaaaaaaaaaaaagagctgagacrcaggcatactgcttggagggttcatggcatggaaatcagtcgtttgtgaggaaggaggtcaaggcatacttacttggggttggtgcagaggcgactcctatgagatactccccctccgcaggtcctggagcatggggaccaagaagaccagtccgaccagtggccatgggtgggcttggggccttcatcaccatatttcacacactgtcctc

SEQ ID NO: 868904 - DNA, 621 bp, Homo sapiens
aatcctcatgggcttctctgcctagtccaaagtccaaattcgtcaatatacagtctacttcgctgaagccccagcacacctttctggtctctttcccaccacactccaggtggcagtacggagtctttccaacaaggcaccttcacgtttagcacttaatacatcatgcctttaagtccagttaggtatgcacacatctgactctcatgtgaggttgtaaactctgccagacatatatcataaccacatcttcttcctctgtacgcacagygcctagcacactgcttcatacgtaagtggtctgatcttagatccagtaaacaaaaccactggacacagccatgaattgaaacttgcagcacagacaaagcatctccaaagttacataaactttgtaagaagtgaactctaaattatctctagaaactgaagattaccaataattaaatatcataaaccccataattatcaaataatatcattaaatatcagaaacctcttcaaaaagactgccttctaaagttctacattaaggtgatagtaggggtaggtggtgtttcttctatttgttttttagatatgagatctcaccttagttgcccaggctggtctcagattccg

SEQ ID NO: 868905 - DNA, 621 bp, Homo sapiens
aatcctcatgggcttctctgcctagtccaaagtccaaattcgtcaatatacagtctacttcgctgaagccccagcacacctttctggtctctttcccaccacactccaggtggcagtacggagtctttccaacaaggcaccttcacgtttagcacttaatacatcatgcctttaagtccagttaggtatgcacacatctgactctcatgtgaggttgtaaactctgccagacatatatcataaccacatcttcttcctctgtacgcacagcgcctagcmcactgcttcatacgtaagtggtctgatcttagatccagtaaacaaaaccactggacacagccatgaattgaaacttgcagcacagacaaagcatctccaaagttacataaactttgtaagaagtgaactctaaattatctctagaaactgaagattaccaataattaaatatcataaaccccataattatcaaataatatcattaaatatcagaaacctcttcaaaaagactgccttctaaagttctacattaaggtgatagtaggggtaggtggtgtttcttctatttgttttttagatatgagatctcaccttagttgcccaggctggtctcagattccg

SEQ ID NO: 868906 - DNA, 631 bp, Homo sapiens
gacatggtaagcactcaagagaattgtttcttttttaactgagaagacataaataaatatgtacaatgaaagacttgtatattttttaatctctgattttttttgtttattctgtaattataatcttgattttccctatttttcaaaatagttacatctaatcgaagtcactcatataaaatagttaattggataaatgtcttatgcagctgaaaacatgayaccaaagttagtaagattttaattctcatattttaaaataaatatgtctctagtacaaatcccttcagatctaggctggtttattttgagctaacttacatctctaatgactaggataaaatgcctgttataagatgggaagtatgagtcttcttcctaaaaatgcttgagtgattagagcatagaactatgatacataagtgacagctttaacatttattcagtggatgttgcctacttgggtcttgaaagagtttctagaattttgatgctatgaagaaacaattgaagtaattttacataattgataatttaacaaacatccttttagaccataggggctgctttatgtggaaatgcttagctttcttttatattttctaagagttttgtataaatgttactttgt

SEQ ID NO: 868907 - DNA, 594 bp, Homo sapiens
gtgatcttggctcactgcaacctccacctcccaagtttaagcaattctcccgtctcagcctcccgactagctgggactacaggcacatgtcactatgtccagctaatttttgtattttctggtagaaactgagtttcatcatgttggccaggctggtctcaaacttctgacctgaagtgatccacccatctcggcctcccaaagtgctgagattacaggtgtgagccactgcacccagccagtgccttgttttatttcayaggtgtgctatattgtgttttgattccttcttaaactaatctttttcttacactttctcccaaatatatctctgaacatcaatgaatacaaagtgttatctgacaaaccattatctggagaaagttgtagccaaatacaatgtggttagaagcatgaaatgacaaactaggaaatatcaaattaaaatttcatccaaatttcatgtgctgctctgatgttttcattctttcacggataaaatagctaaatatttctttcctaatttttcacataatatcacctgtggctgagatcacccagactgtaattggtttctcaagaagaacaattttc

SEQ ID NO: 868908 - DNA, 587 bp, Homo sapiens
gacctgatataattgtctcatcggcctacttaaagtatcactccatactaccttacagcagagaactataaagaggaacaggaaacagactcctagatagaagtctcatgtagtgagcaagctttagacctctgttcttggaaagaatgttggaaaagtggtacctgcaagagtcagacccagaacaagtcctgagtcttccctcagttgaagcacccaggtactactgctactaatagctcagaatcatcattagacatttgattgtatgtggccaatgaaaagkgggttccagtgctgaacttacaattagtaaagagtgtgtactttatggaagccaaaagaatagtaattgatctctaagattgaatatgttcactcatcactgccaggactatgtacatatttagggtaaagtgcttaataagtaagtttaacatcagattagtaatttcgagagcctcaatcaccctttaggcacaatgacattttgggggaacaactttacaataaataggaaaattatcacataggttaagtcactgtcctatatacacaatatttttaaccaacacgagggctaatat

SEQ ID NO: 868909 - DNA, 587 bp, Homo sapiens
gacctgatataattgtctcatcggcctacttaaagtatcactccatactaccttacagcagagaactataaagaggaacaggaaacagactcctagatagaagtctcatgtagtgagcaagctttagacctctgttcttggaaagaatgttggaaaagtggtacctgcaagagtcagacccagaacaagtcctgagtcttccctcagttgaagcacccaggtactactgctactaatagctcagaatcatcattagacatttgattgtatgtggccaatgaaaagtgggttccagtgctgaacttacaattagtaaagagtgtgtactttatggaagccaaaagaatagtaattgatctctaagattgaatatgttcactcatcactgccaggactatgtacatatttagggtaaagtgcttaataagtaagtttaacatcagawtagtaatttcgagagcctcaatcaccctttaggcacaatgacattttgggggaacaactttacaataaataggaaaattatcacataggttaagtcactgtcctatatacacaatatttttaaccaacacgagggctaatat

SEQ ID NO: 868910 - DNA, 703 bp, Homo sapiens
tctccttgtagatgctggatattaaacctttgtctgatgcatagtttgcaaaaattttctcccactctctacattgtcttttttttctgttgatagtttctttggctgtgtagaagctctttagtgtagttagatcccatttgtcagtttttgcttttgttgcaattgcttttggtgtctctgtcgtgaaagcattagccatgtctatgtcctgaatggtattccctaggtagtcttccagggggtttttatagttttggattttacactaaagtctttactccatcttgagttaaagtataaataagrggtccagttacaattttctgcatattgctagccagttatcccagcaccatttgttgaatagggaatccttttcccattgcttgtttttgtcaggcttgccaaaaatcagagagttgttaagtgaacagttttatttctgggttctttatctgttccattggtctaagtgtctgctctgcaccagtaccatgctgttttggttactgtagccctgtagcatagtttgaagttggatagtgtgatgcctccaattttgttctttttgcttagaattggcttggttatttgtgctcttctttggttcagtatgaattttaaaatagttttctctattttcaaataaatatattacaagaaacattaatgcaaaatttctcatgattttgtgtgagat

SEQ ID NO: 868911 - DNA, 543 bp, Homo sapiens
ctatcttttctcctgttaatctgtctattgtcagttaactcatgggccttcaaccactggaactaaattggatgaggaaaagttttctcccaataattttggtgatgaggatgggatggctgggactctctgctcctccagaaagtgcagctaagatgtcaggatctctgactatgctgacaaagataaatttcttagcagccaggttcccagatttctgctcagaatcccgtcaagtgaggatggtaagaccatctttctgtcttttcttcccaagatttagatttccgggagaaaacactcagaacttatacttactgtattgtgacttggtttgaatactttttaaaatagatcttttccttcccarggatagctcctgtatcctttctgtctcattttgtgtcctgatagtttggtttggattcagtcagagtgctcactctctggctttctgcatgctgtggggtgcagattgtctgttctgtgctcagaagcagccaattgtcaggttggggctcaagcatttgtagttgactgaag

SEQ ID NO: 868912 - DNA, 638 bp, Homo sapiens
acagaaggggttttgccgtgctgcccaggctgatccctaacccctgggctcaagcaatccacccaccttagcctcccaatgtgctgggattacaggtgtaagccaccgtgcctggcaataatttttcttttatatcaagtttcttcttcattttaaaaaaatttaaggtctatttttacttccaggaattttaattgattgttttctctataaaatgcattttacatttatgttacacttatctcttcatttcttgagtaattcagcacacattattaaaattcttttcacattatggtgtcattttccttttctggtgaaatgtttctctctttargcaaggatattttttgttttggtttgattttcctaacctctcagcttcacatttttcttgtgtgtattgaaatgtgttgtgaagcttcatgatgagcagatactccttttgaggcggtttagaaccaggtcatgagctggtggctttagatcttaatcctttttccatacttggaccatggcctgacctggttcttaggttctggtgctgctgggttttcctgccactgcagacaaattgtttactttcaggcagagccttggatagctgcagatttttaagggccctctttataaaaata

SEQ ID NO: 868913 - DNA, 593 bp, Homo sapiens
aatgtatccctgatgtccaggaattaataatctggtcagaatttacgtggaattactgaactagtcacatgtatttatttcctccatcccacaaaaagtttactgttgaccacctgactgccataggttctagaggcrcaaagaaaaagacccttcagatcctaactccgaggtctaatgagggagataattaaaatacaattggtcaagagttcagatggtggaatatgcaggatactgtggaagtgtgagaaaagaagtcagggaaggcttcctggatgaggaggcactgagttgagaaacagaattgaattaaccagtggatagaagccatttcaggatgtgcaaactgcatgtgtaagagcctggaggagacaagaggaaggtgaatgcataggagtgagcagagacagtgctagagcatccttcccactcaggaactgccaaaagccctgagaggttggtaagagaagcacctttataaagacacggtactgacttcggacttaaccctcagggaaatgggaggtcacacagaggttttacagagaacagtaacatgatcagattttctctggaaagatccttctggt

SEQ ID NO: 868914 - DNA, 609 bp, Homo sapiens
cctctctgccaataatatcccatccctctggtatatcagtgaaggttcatcatagccatctctaacctttataggctcatcttctgtcatacccacacttggaccaaagttacctgatcccagtaactttggtcgagggatcccactcgagttgccgtagatgtcaaagttttacttaygttcatcacttcttcaagataacagtagctcttagacatgctactagatcttgcttgatgtgttaacagttgggcacatgtattactgtcacaatattttgataagcgtatttcagtataattggtttcctttctcaacttacaggttttattttataaaattaaaaataacattctgagaaatggtccatagatatcactgtctgccaaagggatccgtgacacaaaaataagattaagaactgccaaaaggcagggagaacctactgccaccatctccactgatgatggtgatgagaaacaacagttcccagctcaggatcatttaaactatacaagatgctcatcttcaagcaggctagaagccatatgtatgctaagctattgcatttgatggggatacaaaaagtgtgaaatcaggttaataaac

SEQ ID NO: 868915 - DNA, 609 bp, Homo sapiens
cctctctgccaataatatcccatccctctggtatatcagtgaaggttcatcatagccatctctaacctttataggctcatcttctgtcatacccacacttggaccaaagttacctgatcccagtaactttggtcgagggatcccactcgagttgccgtagatgtcaaagttttacttacgttcatcacttcttcaagataacagtagctcttagacatgctactagatcttgcttgatgtgttaacagttgggcacatgtattactgtcacaatattwtgataagcgtatttcagtataattggtttcctttctcaacttacaggttttattttataaaattaaaaataacattctgagaaatggtccatagatatcactgtctgccaaagggatccgtgacacaaaaataagattaagaactgccaaaaggcagggagaacctactgccaccatctccactgatgatggtgatgagaaacaacagttcccagctcaggatcatttaaactatacaagatgctcatcttcaagcaggctagaagccatatgtatgctaagctattgcatttgatggggatacaaaaagtgtgaaatcaggttaataaac

SEQ ID NO: 868916 - DNA, 533 bp, Homo sapiens
aagctgccagtctctttgctaacacatagcaagagtccagtttgctccagttttcaacaagttcctcatctccatcttggaccacctcagcctggacttcattgtccgtatcactactagcattttggttaaagccattcaacaagtttctaggaagttcaaaactttctcacatcttcctgtcttctgagccctccaagtctctaggaagttccaaactcttccacattttcctatcttcttctgaatcctctaaactgttccaacgtctgcctgttaccaagttccaaagtcgcttccacatttttggggatgcttatagcagcrccccctcctcccttggtaccaatttactgtattagttccttctcatgctgctatgaagacagacccaagactgggtatttctaaaggaaagaagttttttataaaggagaaaatcttttttttaataaaggaaagaaaatttataaaggaaagaggtttaattgactcacagttcagcatggctgcagaggccccaggaaacttac

SEQ ID NO: 868917 - DNA, 655 bp, Homo sapiens
gagaaaggtagtatcacagaccaatggagaaggggggaatttcttataacaatctgaaagtaaggataactcattttactatgactcaatagtcagaaagaaaaatacagacacatataatgatgtaaataaatgtatgtatggagataaaacaatataggaaggggaaaatagagttttggcattgctcataaagaatgaaatcacaaatataaaaggtgcagatatcatgggttgacaagatattaagtctcaatctggcttatatccacaaagttggaataatatttcccccaaactctgcattaatgggtaatactgacctgaagggaaatctattgcattggagaagaaaaatgtatttttttaraaaaatgtattaatagaagtattaagtatatgaaatatattttactagacaatttgaaaaggtataatttgaaattatatcattgtgcacaacaacaacaaatcacatcaaaatggactaaagacttaaatctaagacctcaaactaaagaaaacattataagaactctccaggacattggactgggtaaagatttcttgagtaataccctataagcacagtcaaccaaagaaaaaatggacaaatgggatcacatcaagttaaaagtcttctgcacagcaaagg

SEQ ID NO: 868918 - DNA, 621 bp, Homo sapiens
tgttcctgtgttggtttgctgaggataatggcttccatcttcatccctgtgcctgcaaaggacataatctcattcctttttatggattcgtagtattccatggtgtatatgtagcacattttcttgatccagtagatcattgacgggcatttaggttgattccatgtctttgctattgtgaatagtgctgcratgaacacacgtgtgcatgtctcattataatgaagtgatttatattgctttgggcatatacccagtaatgggattgctgggtcaaatggtatttctggttctaggtctttgagaaatcgccacactgtcttccacaatggttgaactaatttacattcccaccaacagtgtaaaagcattcctatttctctacaaccttgccagcatctactgtttcttgactttttaataattgccatctgactggcatgagatggttttgtggttttgatttgcatttctgtaatgatcagtgatgttgagccttttttcatatgtttgttggatgcatgaatgtctttttttgatgtcctttgccactttttaatggcgttgtttttttcttgtaaatttgtttaagttcttcgtcgattatggatattaaacctt

SEQ ID NO: 868919 - DNA, 573 bp, Homo sapiens
tataaattaccttgggcagtatagccattttcacaatattgattcttcctacccgtgagcatagaatgcagaaccattttttaagagcagttttgttctcccctgtactgtgaaaatgcttagcataaaggctttgctgagtaggttatattttgcaatgactaagagctctgrctctgaagtcctaatgagttttgtttgaacccagatcctgtcattcgtgttggtgtgaccttgggaaaattgtttaagtttcagttttcccatctttgagagaggaaataataggatccatcttggtaagtcaggaagcttgggttatgtgaataatccatatcaaggttgtggaaatagaaaagagagtgtagtagttaatgtatctatatctgtatctctaatctatataaacatattctgcaggagtgcttggtgaaagtatgatccagggactcaaattatgatcttgttctccccttttgatttgcttttctcttagtctctattttgcaaacaggatttgtccacttagcagagaagatgatgtttcagctgttgcttgatgtatcaagttct

SEQ ID NO: 868920 - DNA, 593 bp, Homo sapiens
tatcacaaggtcaggagatcaagaccaccttagctaacacggtgaaacaccgtctctactaaaaatacaaaaaaaaattagccaggcgtggtggcaggcacctgtagtcccagctacttgggaggctgaggcaggagaatggcgtgracccgggaggcggagcttgcaatgagctgagattgtgccactgcactccagcctgggcgacacagtgagactctgtctcaaaaaaaaaaaaaaaaagaaagaaagaaagaaagagaatggatatttgtgggcaactagctgtcctttctacagcaagccttgtcttatggcaaatttcttcaagtaaaggaaaacttatttttatttcttttgttatatgccttctgtatgcttttcatccatttcttctcgaactcatggtagacagatactggctctcaaagatctatcttccatgactattgtcacttctcttacaatttctacctcttagtccatttgatagatttctgacttgttaattcggttttagttgatgtctattttggtattcagttgatttatttgttgctctttttttttttttttttttttttttgacgtgg

SEQ ID NO: 868921 - DNA, 590 bp, Homo sapiens
aaaaagatcagtggttgccaggggctgaggggagagaggagtgaatgggtggagcatagaggatttttagagcagtcaaaaatttctgtatgaggccgggcacagtggctcacacctgtaatcccaacactctgagaggccaaggtgggtggatcatttgaggtgagcagttcaagaccagtctggccaacgtggtgaaaccctgtctctactaaaaatacaaaaattagatgggcatggtggcaggtgcctgtaatcccagctacttgggaaactgagacatgagaattgcttgaacccaggaggtggaggttgcagtgagctgagattgtaccactgcactccagcytgagtgacacagcgagactgtctcaaaaaaaaaataaataaaattctgtatgatagtataatgaatacatgttctcatacacttgtccaaacccatagaatgtacaacactgagagtgaagcctaatgtatagactttgggtgataatggcgtgtcaatgtaggcttatcaattgtaacaacagtaattgtaacttatcaattgtaggcttatcaattttaacaacaacaattgataattg

SEQ ID NO: 868922 - DNA, 602 bp, Homo sapiens
cttgcatcagagtgccctggatgtgagagatggagtcaaaggagaccattttggagctttaacatttgactgccccattgaatttcagacttgcacggggcctgtagccccttcattttggccagtttctcccatttggaatggttgtatttacccaatgcttytacccacatactatctaggacgtaactaacttgcttttgattttacaggctcataggcagaagggacttgccttgtctcagataagactttggactgtggacttttgagttaatgttgaaatgagttaagattttgggggattgttgggaaggcatgattggttttgaaatgtgaggacatgagatttggaaggggccaagggcagaatgatatggtttggctgtgtccccacccaaatctcatcttgcatggtagctcccataattcccatgtgtcatgggagggacctggtgggaggtaattgaatcatgggggttggtctttcccatgttgttcttgtgattgtgattaagtctcatgagatctgattgttttataaggggggagttcccctgcacacactgtcttgccctctgccatgtaagacatgacttttc

SEQ ID NO: 868923 - DNA, 632 bp, Homo sapiens
gagacccccaccccaagctgtaacaaccaaaaacatccccagacattgccaaatgtcttccaggaggcagataaaatacaaggtgcccaattaaatttgtatttcagataaataatgtgatatttggaaggtacttatgcaaacaaattttctgttgttttctgaaatttaaatttaactgagcaccatgaatttttatgtgctcaatctggcaaccttacctggggaacaaaatcattcccagttgaaaaccactgccttaaaaataccaggaacttgggggacagttctggggcttgggtttctcatcagcgggattgatcgtctgcccagtctaatgattctgaaagctggagatttggaatagtctcaccccygagcccctccatcttgcatgctccccagccacctctgccccaaggcagacctgcagggaagaatttctctctggagaaactgactggggacacagaaaccacctcatcacattgatatttgggattctgcaaaaaaagagggcagaccctctggttgatcatcctagcaagaggcctgccctgcaataagcctcacccaatggaagattgcttcccactaacaatttttgatgcctcactcttggataaaaatgg

SEQ ID NO: 868924 - DNA, 578 bp, Homo sapiens
aatgaacacttagtaagtggcacctattattaacaacaaaaagaacaaagagttgaatgtataatgatgaatggatgcttttaaaactctcctaatgaaaactagttctggagcatatctcagtgctaggaatattagactgtttatagacctttactattcaagtttttgaacctggcaaagctataattccacaaaaagcaaaagtatttcattccacagacattaagatttataggaacactgggcatctatggacagtcaactaaaaagaatcaaagcctgtttctactttgtgtcataaagaacaataaacaaatctaattaaagagcaaaacttttctatttcattaaaatagtaacatawttccaatattgtggaagcaagtaaaccaaactatttacagtggctgtgtaaggatagaatgattaaggctgacttcgtcttattttctaaaatgtctgtaatacgtacaaatgactcttacagtgaaaaataccttaaattatcattaaactaaattaatatgagaagaaattccattttatcatcatcttagagataggaatacaattat

SEQ ID NO: 868925 - DNA, 511 bp, Homo sapiens
ctaataagagtttggtaactttgccaatagatatagaaaagttggttgtgatcttatataatagtaacaattagaaaatgtaatttttaagtaatacataatatataatagcacaaaaatacaacataccaaaaaataaatctaaccaaaaagtacgcaggtgttttatggagaaaattatatgtttataaaagacattataaagacttacataaatgatgatatggccgggcatggtggctcacgcctgtaatcccagtactttgggaggctgaggtgggtggatcacctgaggtcaggagtttgagaccagcctgaccaacatggcaaaaccccgtctctactaaaaatacaaaacttagccrggcgtggtggcaggggcctgtaatcccagctccttgggaggctgaggcaagagaatcgcttgaaccagggaggcggaggttgcagtgaaccaagatcacaccattggactagagcctgggcgacaagagtgaaactctgtctcaaa

SEQ ID NO: 868926 - DNA, 666 bp, Homo sapiens
agaaacaagacaaagatgcccactcttaactcttctattcaacatattcctgcaagttcctagccagaccaattaggaaaaaaaaagtcatgtaaataacatttgacccagccatccccttattgggtatatacccaaaggaatataaatcatgctgctgtaaagacacctgcacacatatgtttattgcggcactactcacaatagcaaagacttggaaccaacccaaatgtccaacaatgatagactggattaagaaaatgtggcacatatacaccatggaatactatgcagccataaaaaatgatgagttcatgtcctttgtagggacatggatgaagctggaaaccatcattctcagcaaactatcgcaaggacaaaaaaccaaacactgcatgttctcactcataggtgggaactgaacaatgagaacacttggacacaggaaggggaacatcacacactggggcctgttgtggggtggggggagggggragggatagcattaggagatatacccaatgtaaatgacaagttaatgggtgcagcacaccaacatggcacatatgtacacatgtaacaaacctgcatgttgtgtacatgtaccctagaacttagagtataattatatatatatatatatatataaagaaaagtaagaagtga

SEQ ID NO: 868927 - DNA, 557 bp, Homo sapiens
cagggtggagataagaaaataaaaccagagaacatagggcttatctaagggcagccacttctcagctcttgttgatggctgttaggcaggaatgcagaccctgttcagccaggccatccaagacaagacttaagtctgaggttttatctgaaatcttgcaaattgacaactaaatcacctcttttaaaaacactgttggccaaatcaaacacttccaggaactggttagggcccttggcaaccaggttgcatcctctgtccctctctgcttttaggaattccagtccaccacgccccttggtgggctctctcaraactccatcctgagtggaggggccatggtcttgctctgagaaacgaggaactcattcgtttgttgaatgtgggtgcatccagggtttatgtgttagttattctttgtgcataccactgtacttgacacatagaaaagccccagtaaaccttcataaatgaatgaataaataaatgaccccacaaatatgctagggcttagagcagttaagtgactttttcaagtcatgctgtcaaaaccagag

SEQ ID NO: 868928 - DNA, 587 bp, Homo sapiens
tgaacacagtaaacaagtttgcatgcaaaataataggaaatgttttaatctgaaagccatcgtaacctcatctccaaaattttttcagagaaaatgaccaaagagttgcctacagtgaggtgactaaaaataaaaactgtagactgaacttcaccmacttcaaaaattatacaacagtaaaaattttctccaaattgtaatatcagtatgaaaaataaacacttcaaatgtctaatcaacagagtacattttattatttttcaacatttaacatttacacttaaaaataggagtctgtataaaaatgtaacgtgctgtatcatagaaaattaaatttagaatccttacttaccactaactctcttttaaatataacttataagatatattttgtaacaaattttatgcttgccacactttgtgtaagaatccaataagattcttcttttacaaacaaagaaaaacaatgttaactgatttaattattccacgtgtggacagtgtatgtctcttattttaattaactaatctgaaagttatattggcaagcaaattctccacttaaaatccattttttagcacattaa

SEQ ID NO: 868929 - DNA, 424 bp, Homo sapiens
ttattaaaaatcagcttggattaagccttcagtcacatctgcctgaactgcagctttttcaatatgaagggaaaatttatgaatgtaatcaggttgagaagtctttcaacaataattcctcagtttcaccacctcaacaaatgccttataatgtcaaaacccacatttctaagaaatatctcaaagattttatctcttctttattactcacacaggggcaaaaagcaaataattggggaagcccttacaaatctratggatgtggcatggtctttcctcaaaattcacaccttgcaagtcatcagagaagtcatactaaagagaaaccttacaaatgttatgagtgtggcaaagcctttagaacacgttcaaacctaactacccatcaggtgatccatactggcgaaaaacgttacaaatgtaa

SEQ ID NO: 868930 - DNA, 634 bp, Homo sapiens
tgttgtccatgactacatttgctagagaatctatggaggccttgagtttagagatgctatctctggtactcttagctatgttgtctatttgtctggagagatttctgagggtgacatcatgataagtgaaccctccccatggggcgatcattcctatggcygcacccatccctgccagtattagacccagagctcttttctgtctgggttgggtggtgttataaatggtcacacctatcccccgtggtcccaaaagtcccacagcacattctcccgtatgttggatgttattaatgcaagtgtagaggtttgccacagggggggttgaataggttatcttaggacttccatcaaagggcagtttatttttttgtggcccacataaaaatacatagccaggaggggtacaggcccaccgggggatgtggctgtcgaaccacttgtgtaactgcgatttccaccctgctggaatagtttgattgcatgcaggggatagaggccctcccaggggaacagtagattttggccatgtggggacagtgtgtgccttgggaagcgaatatagaaccctccatgtgattagctcttttccttcccaagctgcacagcggttttggggtgacttgtctcgata

SEQ ID NO: 868931 - DNA, 675 bp, Homo sapiens
tttcttgtggagcaccgaaaatctgtttgtaacatgtgtttgagactcataatctggaccagtggctccaagatttttattctgtacaagtggccaatgagcacatgaaaagatgcacaacatctttattcactagaaagatgtaagtcaaaaccacagtgatatatcacttcatacctatgggtacaggtatatttcagaagacagatcagtgtgggtgaagatgtggaaaaattgaaaccctcatagagtgcaaaattaggcagcagttttggaaaacaytttggcagttcttcctgaggttaacatagagttactacatgtcttagcaattccacttctgagtatatactcaactgaaatcaaaataggtccacacaaaaacatgtatatgcgtgtccatagaaacattatttgttatggccaaaaggtgagagcagtgcaaatagtccatggaggactagatagacaaatgtgatgtagtatacaaggcaatagtattccgccagaaaaaggaatgatgtgccaatatgggacacaacatggatacatattaaagacattatgcttgatggaaaaagctatccaaaaagggtcatgtactttatgaatccatttgtataaaattcccaaaataggcaaatcctttgaaacagaaagtggattaatggttgc

SEQ ID NO: 868932 - DNA, 564 bp, Homo sapiens
tttgtttatgtaaacatcattgtatgtctgtgttccattatggatttctattgtgccataaagtagactagtaagtccacatctgcattcttagtatatactaaggtattaaaaatgtcatttgctgaaatcttgtatattaataaacatttatgtaattataattatataattctgtacgtgtgtgtttatctacctayatccagatgtatccaggtttgtacctatattcacaaaaaataaagatgtagaaggtgaaagtgttgatcgtaattgatatcaatagtaatatacaaagataattccatagaggtataaaattttctgccgtatgaaatatacctagaatgctactcaaatggatgtatgctattacctaaatctatcatcatttaacttatacaaagtaagcatagttttttttttttaatggagtcttgctctgtcaccaggctggagtgcagtggtgctatgatcttggttcactgcaatctccgcctcctgggttccagtgattcaactgcctcagcctcctgagtagctgcgactacaggtgcctgccaa

SEQ ID NO: 868933 - DNA, 607 bp, Homo sapiens
ttgctgacctctgcacactatgatcaatctattgaaagccagtcatggggatgggggtacctgttagatctgaaaaaatgagatctgtctctgttctttataaagtgggggaggaagggcggtatggtaagaaaatgaacaaattctgtgctgaagactgaataatggtatttacctttgatttcttgtttactgcatgtcaggtgccgtacattattsgctgtaagcctcaaaaactcaggaagatttagccccattctccagataaatgaagtggctcagagatgttaagttgctggagatcacataggcaggattctaacacgaaagcttattctcatttcgctatgttccactgggcctgatccagtctcagcctcaattctcctgtttgggtggtgctatgttatccagcaagatgaccctgcaaagtcaatgctgtgtattcaaggcacaatagacagtcttctagaggcagtagcctccacctagcacaatatggtgacaaggtagcccaagctgtctgaccacttcagcccaaataatttcacacaagcatgaaaattagagaagatgtcataatggtgtcagagggatttgaaccaga

SEQ ID NO: 868934 - DNA, 499 bp, Homo sapiens
taaaaaaaaatcactttggcctggtggtgcatgcctgtagtgctagctacttgggaggctgagatgagaggaacacttgagcccaggagttctaggttagtgagatgtgattgtgccattgcaccccagcttgggtgacagagagaaaccctgtctcaaaaaaaaaaaattaaaataaacaatattctacaaatgtgtgttagttttaataatactctaaggctattactgtcctaatagsacatgtgcattccagggatgtcatctggcatttaatcagaagacaacactgcagaggtaactactgtaagcactttggctatctttatgatccacactacaggtttttctaattagcataatgaatgctagaaatgggttttcattggtgtaaataatagtgcttaatatatgtggattggctagtgcagcagttggcaaactctttccataaaggaccagatagtatttctggctttgtgagccttaaggtttctat

SEQ ID NO: 868935 - DNA, 581 bp, Homo sapiens
ccacatgccaaaagaaccctgtaaaaattgacttgttattcacagggagcaaacacttcttgacttttcaaactatgctctttattaacaaatatttctaaagtgaggtaaaaaagaatgttaagtgtaattcttgttatactgaaatgaattagaggaatcatttgaaaactatttttagaagtctctaattattttttctgccatttgctgcctacaaggtatctagtgataaggttttactaaattagaagttgcgtttttaacactgacactgacactgttgattaaaaccagaaagaataacagtcatttattgctataaatcagaaacacytgtctatgattctaacttacaatataacggtagatttaaattggctgaaaagttggaaatatgctgtttaagcaatccaatacttgtagaaacgaacatttttcactgataatgatttctgaaagtgtattcagtgtaagtggccaaatgataacctaggaagatagctaacattgtatttctgaagaataaaagtgtatgcaaataaaaaattaaatttcaaattaaatattgaaaaaagcat

SEQ ID NO: 868936 - DNA, 600 bp, Homo sapiens
ggtgatcttgtgttgcgataatacatatttatcattcttatattctcttattgaattaatccctttatcatcatataatttcctgctttgtcacttttcacagtttttgacataaagcttattttatctaagtatgactgttcctgctcacatttgcatgaaataactttgtccatttcttaactttcaatgtttgtcttcaatagtgaaatcaagtatcttttaggcaacagagagttgcttacaactatatgagtrttgttgtttttttaatccattttagccatgctgtttcttttaattggataatttaatacatttacattcaaagttattattgataggtgaggaattattcctgctattttgttcattgttttctgattgttttgtagatcatttgttccattctttatctctggtcgtttacctctgtgattggatggatttctgtcctgctaaggtttgcttcctttctctttattcattatgtatctgatataatttctttctttttttaattatcatgaggttaatgtagggcctagtagttataatagactattttaacctgatacctacttaactttgtttatgtaa

SEQ ID NO: 868937 - DNA, 600 bp, Homo sapiens
ggtgatcttgtgttgcgataatacatatttatcattcttatattctcttattgaattaatccctttatcatcatataatttcctgctttgtcacttttcacagtttttgacataaagcttattttatctaagtatgactgttcctgctcacatttgcatgaaataactttgtccatttcttaactttcaatgtttgtcttcaatagtgaaatcaagtatcttttaggcaacagagagttgcttacaactatatgagtgttgttgtttttttaatccattttagccatgctgtttcttttaattggataatttaatacatttacattcaaagttattattgataggtgaggaattattcctgctattttgttcattgttttctgattgttttgtagatcatttgttccattctttatctctggtcgtttacctctgtgattggatggatttctgtcctgctaagstttgcttcctttctctttattcattatgtatctgatataatttctttctttttttaattatcatgaggttaatgtagggcctagtagttataatagactattttaacctgatacctacttaactttgtttatgtaa

SEQ ID NO: 868938 - DNA, 607 bp, Homo sapiens
atagtttcagtatactatatttacctttcttggaaattaatcaatacattctctgacaatgactaaaattattcatttttcagtccatctatcaatataatttaagaaagactgaatttggatggtagaaacctataagataaaaataattactttgtcctgataccataatttttcacacatttatcttgtttgctctgcacacayttatgcagttttacatcagtaaaatttatatatacagttatcccttgaaccacatggttttaaatgtgtgagtccattgatacacagatgttcttaaaaaataaaagttacattgagtgtgcctgcttctcctgcctcccctttcacctcctccacctcttctttttttgctgtttctgagacaacaaaactactccccctcttcctcctcctcagcttatgcaacatgaaaatggcaaggatgaagacctttatgatgatccatttccatttaatgaatagtaagtatattttatcttccttacgattttctcagtaacacctttttttctctagcttactttattgtaagaacacagggtataatacataggacatacaaaatatgtattaatcaatc

SEQ ID NO: 868939 - DNA, 607 bp, Homo sapiens
atagtttcagtatactatatttacctttcttggaaattaatcaatacattctctgacaatgactaaaattattcatttttcagtccatctatcaatataatttaagaaagactgaatttggatggtagaaacctataagataaaaataattactttgtcctgataccataatttttcacacatttatcttgtttgctctgcacacacttatgcagttttacatcagtaaaatttatatatacagttatcccttgaaccacatggktttaaatgtgtgagtccattgatacacagatgttcttaaaaaataaaagttacattgagtgtgcctgcttctcctgcctcccctttcacctcctccacctcttctttttttgctgtttctgagacaacaaaactactccccctcttcctcctcctcagcttatgcaacatgaaaatggcaaggatgaagacctttatgatgatccatttccatttaatgaatagtaagtatattttatcttccttacgattttctcagtaacacctttttttctctagcttactttattgtaagaacacagggtataatacataggacatacaaaatatgtattaatcaatc

SEQ ID NO: 868940 - DNA, 682 bp, Homo sapiens
ttaccagtgctcattttcaggcaaaaacttggcattctcccaaaacactacaatccatgctgtgattctctaaatgggactcacccaagactctatacagaatctatcagtgccgctgatacttctaatactcttttatttgatggatcacaaagcaggacagcttgtaccacagcttgaacctgatgcagagaggtcttttgctccaagacccactcaacattggcagcyttatgggttacctgataaatgggttaagcagcatagccaattgtgatatacgtttcctccaaaatccaaggagacaaatcaagacttttgcatttttcaaaattgcagatggtacaggaagcctcttacttaaaaatgacacccattgacccttggaattcagatgtcttagataatcaactcacttctcaactctactatgacagagaaaggaaattgacgtagctctgcagcaggacaccaagcatgatcttagcctaacttaaattatcattcttttctaacttacagaaataagttgcataatagatgccaagattttcattatttcaataaagacgccacacctggagcataagccatgattagcatcaccacctacgaatggtatcatggtaattctttataattcatctgggtttagtgatgattaaaaggtgtaaatggagat

SEQ ID NO: 868941 - DNA, 705 bp, Homo sapiens
aaatatgaaaacacattttaatatttctctgaattttcatcatgctaaaaatagctagaaatgtcagaacactattgagattaaaaagtaatgagaattaactaattgaaataatgcagctattcttaaaatgttaaataccattaacatattttaattgaaaagcaattctgcttgaacattttaaaattttacataatcaacttgaaatgataggtagwtcattattgtaaataaagtttaatctattttatacaaatcaaaatgttagataaatattaaacatgaaatgggcaaaagagggtaaaaatacagtaataattatcaaatcaaataatgaaccatattagcattcaaaaatttaaaaaattataaaatataacttttttattattgttatactttaagttctgtgacacatgtgcagaatgtgcagatctgttacataggtatacacgtgccatggtggtttgctgcacccatcaacccatcatcttcattaggtatttctcccagtgctatccctcccatagccccccacctcctgacaggccccactgtgtgatgttcccctccctgtgtccatgtgttctcattgttcaattcccacttcccactgagtgagaacatgcggtgattggttttctgtttgtgtgttagtttgctgaaaatgatggcttctagcttcatccatgtccctgtaag

SEQ ID NO: 868942 - DNA, 566 bp, Homo sapiens
actgctctgtctggagctgcaatctaatactgcctcccatctgccatgatgacctgttattctctatttggttcttttttcaaatatctttctttttggtaagtttctcatttatattctgaattgtttttcttatttctttgtattsgttttcagaattctcttttatctatgtttctttaaaatcaatattttgaattctttatctgggatttcaaaaatttctttttgattaaatctattggccgggcgtggtggctcacgcctgtaatcccagtgctttgggaggctgaggggggtggatcacaaggtcaggagattgagaccatcctggctaaaacagtgaaaccccgtctctactaaatatacaaaaaattagccgagagtggtggcccatgcctgtagtcccagctactcgggaggctgaagcaggagagttgcttgaacttgggaggtggaggttgcagtgagctgagatcattccactgcactccagcctgggtgacagagtgagactccatctcaaaaaaaaaaaaaaatgctggaaaatctttgtgttgctttgg

SEQ ID NO: 868943 - DNA, 601 bp, Homo sapiens
tagaaatataaaaattagttgcatataacatgatcaaatttttgttacaacaaatagcaacagcaacaacaatacaacctatatatgtgtgtgtgtgtgtgtgtgtgtgtgtgtgtgtctttgaatgtgctgggaaaatgtgtgaaaacacataccaacatgttaacatttattatcttggagatgggtagggataaagaaagattgttaatttttaaaaataaagctttttatggttttgctacatgttgttaaagsaagaacaaataaaatcttcacaaaacaactggttttcacaatcatcaggaaaagatgctataatcaccttgaattcaaatattatattgtcaagtgcaatgtttaagattttgacttaactaggagaatccttaccaaattcagttatttatgctaaagagtttcatcctactcatccagtataattctctttctgatatttgcttatgtggctccaaaccagtaagaatattgagtgaacaaaaaaataagatagaagttcaaaaaatagcagaaaagcagcagtatttaatgataacagaacttcaagtcccaggcaagtgatgttttcttctgaactttt

SEQ ID NO: 868944 - DNA, 637 bp, Homo sapiens
cctggcccaggaaaccatttttccctcctagacctctgggcctgtgatgggaggggctgctgccaagttctctgagatgccctggagacattttccccattatcttggtgattagcatttgactcctcattacttaagcaaatttctacagccagcttgaatttctccccagaaaatgggtttttcttttcttctgcattgtcaggctgcaaattttccaaacttytatactctatcttcacttgaatgctttgcttagaaatttcttctgccaggtaccctaaatcatctctctcaagttcaaagttccacagatctttagggcaggggcaaaaagccatcagtctttttgctgaagcagagcaagaatgacctttactccagttcccaacacatttcccacctccatctgaggccaccttagcctggacttcattgtctgtattactatcagcattttggtcaaggccattcaacaagtctctgggaagttccaaacatccccacatctttcttcttctgagccctccaaactgttgcaatctctgcgtgttacccaattgcaaagtcactttcacattttcgggtatctttacataattgccctattctctgcagtagcaacgtactgtgttag

SEQ ID NO: 868945 - DNA, 618 bp, Homo sapiens
caaatcaacagaatatatatttttctcagcaccacattgcacttattctaaaatttaccacataattggaagtaaaacactcctcagcaaatgcagaagaacggaaatcacaacaaacagtctctcagaccacagtgcaatcaaattagaactcaggattaagaaactcactcaaaactgcacaactacatggaagctgaacaacctgctcctgaatgactactgggtaaataacaaattaaggcagaaataartaagttctttgaaaccaatgagaacaaagacacaatgtaccagaatctctgggacacagctaaggcagtgtttagagggaaatttatagcactaaatgcccacgtgagaaagtgggaaagatctaaaactgacaccctaacatcacaattaaaagaactagagaagcaagagcaaacaaattcaaaagctatcagaagacaagaaaaaactaaaatcagagcagaattgaaggtgatagagacacgaaaaacccttaaaaaaaatcaatgaatccaggagtttgttttatgaaaagattaacagaaaagactgctagcaagactaataaaaaagaaaagagagatgaatcaatagacacaataa

SEQ ID NO: 868946 - DNA, 594 bp, Homo sapiens
caccatgatcaagttggcttaatccctgggatgcaaggctgattcttagatattagataaagattattttcaacagatttttttccaaaatgattgctgtattttcataatagtaattatttctcttgtactatgacatttttatttttgaaawtttttatattgagttatccttaacttggggtagtaagtctatgagttacttttcataaaggggaagtgagcgttttccacaaacataggtgaaaaaacacatttcgtgagtgaaaaatttgactcttaggtatacagtttgtgggttacaatctttccctttactacactataaacattattttattgtagccagctctctagatttttttttaaaagaaaagtgcaaggtcagtctgttttttatttcttttatatagcatgttgtttttaacattttcattttttatttgaaacattttaaatttattcttaaaattaacacaatattgaacatgtttatatatcattatttttactcatctttttttaaacattgtaagtcattcatctgtcccaattttgtcatcaactcagagaagatttcttctcttatttttg

SEQ ID NO: 868947 - DNA, 609 bp, Homo sapiens
tctatctgcttaaattggaaaatctaaaacaatagcagcaacaaaaatccaatcagttctgagctgtgttagaatatatttggctgctaatttcccaagtgtctaaaataatgtaaatttagaaatagttggaagtgagaaaaatrttgttattaagtaatacttcatatatgtaactataattgaatcattattttttatttgtgaatttatttctataaaaaatcttacaaagtcatcaacattaaataatgtttggtgataggtttaacaaatttactttattgaaaagaacaaaataatgtgaagttgacaatgtttggtcatggtgcatgcagggatagcttgatttttcttcctgaacaatctgatgggagcatttccaacttaaagtgttttccttctcatagccacatggttgtagacaatttacacatagggatcctggatttgttagttgagaaatatgaagttcctcagtttcaaaccaataaggcagttattctttaaaagaactattctttgagcatgggtaaaaagagtgacagagtttctgggtatttttgtgtgaggtgtcattgcatgaattgcccagatccctgtcatgct

SEQ ID NO: 868948 - DNA, 664 bp, Homo sapiens
tgaaaccagttcccagtaaaactttgggcactgagtccctaatgaacttccttggtagataacattttatatgtgttgtcacaattcagtgctggaggaattaaatgtattctgtatgattccactgggtaaggacccttgaaaatttgtaccttgcttttgtttggaatacaactctatgctgagtcctctgaggtttcctagtcaggcaccaaaacttgaagtggtcttagggcctgcctacacagggaggaatatgaaaaattatcttttaatatttcctagactttctagaccagtaaaaacagtataactaagacaaaattagtatcttaatgaattatagaaattaaaataaaatgccaataataattaaacccaaagaaaattctccatagaagatgacccttggtaggtctcaaagtcgtgawgtttagttgttacggtatagtttagacaaatttcttagaagcgggaactcttgagtctagtttatatcttctagagatgatcttttctttacgataattgaattctaagaccatatccacgaagttatagttgaacctgaaatcctcctttttctagagagcctagctggatggaaagataatacaagatgtacttttttattttcttgatttttctctttgctatttctctt

SEQ ID NO: 868949 - DNA, 615 bp, Homo sapiens
ctcccatttttattgctgaatgctgtgtgaccttgagaaaatcactccacctctctgactcacattcttctgttgaaaaatgagagtatgaactcaaggagtctgttcagttctggcatttttattctggaacactctcttgacatagttaatgcaagagtgtgtgtaaagtgcatatgttagcccacagacagaaactgcactcatttttcagagctaaaatacttggagctacgccactgcacagagaacactgggacagtctttggattcccaaagctgtgactgactgccaagctgcgggggaacatcagagacatttttcttgctcaccctctttttgccaacaggagagattaagaatcacaaagactacmaaaatgaaagttgcatgagatggctgagggctgacaactgaagatgaagagctcagtggtacagtttagccttttccacgatgggcactttgctgtggaggtccagccactatatggggatttcattttcaggaaaactacactctattggcatcttacattttcaacaagaaaaaaatttcactggccatttgagtcacaggaaggaacttttaagacacagtatgatgtttgtccc

SEQ ID NO: 868950 - DNA, 519 bp, Homo sapiens
atctgaaaggaaagtaactgcctgatatcttctataggctcagatgaaagaaaatagattttaggctcaccatgtacaagggattaatcctcacctgcatcaagtttaggatagcttatttccaaaccaaggaattccgcaagcagtctctttttttttttggccaggctggagtgcagtggcaccatcttgggtcactgcaacctccacttcccagttcargcaattctcctacctcagtctcccgagtatctgggattacaggcaccagcagccacgcctagctaatttttgtagttttagtaaagacagggtttcaccatattggccaggatagtctccatctcctgacctcatgatccacccgccttggcctcccaaactgctgggattacaggcatgagccaccgcgcctggccagcagtgtcttaataaatgggccctgctcatctcgattgcagacaattatcccagtgggtagagactgaaaactgttatccacagagaataaaggaaaag

SEQ ID NO: 868951 - DNA, 653 bp, Homo sapiens
tgatatcttctataggctcagatgaaagaaaatagattttaggctcaccatgtacaagggattaatcctcacctgcatcaagtttaggatagcttatttccaaaccaaggaattccgcaagcagtctctttttttttttggccaggctggagtgcagtggcaccatcttgggtcactgcaacctccacttcccagttcaagcaattctcctacctcagtctcccgagtatctgggattacaggcaccagcagccacgcctagctaatttttgtagttttagtaaagacagggtttcaccatattggccaggatagtctccatctcctgacctcatgatccacccgccttggcctcccaaactgctgggattacaggcatgagccaccgygcctggccagcagtgtcttaataaatgggccctgctcatctcgattgcagacaattatcccagtgggtagagactgaaaactgttatccacagagaataaaggaaaaggatgttgccatcctggagaagttctgattataaaaattatctagattaaagcaaattctgaacaaaaattcttgggcttcaacaatgagatagacatctgaataaaccacttactagtgaactgggacctggaacgttcccaggtacaaatgttca

SEQ ID NO: 868952 - DNA, 691 bp, Homo sapiens
cttatgtgaactggagaaatctgtttaacccgtatgaatcacaatttcttctttgtaaaatgagggtgattgtgagaattaatgagataatgtgaaagttcctgtaacagtgttacactatggtggtcatcaaacatgagttgaatttggatcagacattagcattattgattgagcagtggaaccaagagcattgctgacaggcaagaactgtgtgcataagttaaattcctatactttaattgctacccataagtgatgttagagttcacagggatttgcaacaacgagtcccgtaaaacaaaatctatttcccagggagactcaaacaagacctgatcccctccttgagatttgttgacagagaggatgctataaacattagctaagcaatcaccttgtttgaagtcatctgttatacytaagtcagctgcttgtatttgaaaatgtgtaaggatttttcagtttggagtctgtgaaggagaagaaccatgcttctaacacaggtttttttttttttttttttttaaatgtgctaatagattgttctcgcctttagagaataagtactgattagcatctatcaatgcaggcgcagctctggacaagagccaaaggaatggggctgtggccaaggattggtgtctgtcagtatcagcatgatcttctggtcagaaatcaataaatgtaa

SEQ ID NO: 868953 - DNA, 647 bp, Homo sapiens
ggggctcacttgaatcatgccaacctccaatgtctctcttactctcctttactgcatgtgaaaaacttctaatgaaacagaaaaatgcataccatataaaatttagttaaaaaggagaaatacgaagcatttttatcaggggcatctctgactaaattaattcatgggaaagttttcttgcattgtctccttgctgtatatagtgatccagaccaaaatgtcaacacttcaaattttagtcgaaatattcattcacacacacacacacacacacacacacacacacacacacacacgcagagagaaataggaaaaygtcacatgatgcagatcatttttggagaaattcaggatattttagcctgatcctaaaagcaatacaaaaatcattgaaatattttacttaggattatatctgatatgcattttgaaaagataactctcaatgcatgtgtgatacatgtggagatctactttgtgggagcaaaatcagacagcacaggaagctaattatagtcctggtagactataatggtggttaagcaaatgtgggggtggtactagaaatggcaagaaatggtcgagcacaatatttaaggcaacactggcagaggttgatgatgaattagaggtaagaatgagggaga

SEQ ID NO: 868954 - DNA, 639 bp, Homo sapiens
aattcagccaaggtctttgctactttatagaatgggtggctttcttattcctcatttccattagagatttcatcagaatggctattactgtctgtatttctactaatattctggtcacaatcatctaagtaatccttaagaagattcagacttktctacatttgccttcttctgagccttcaccagaattttccccaacactctattcaccacaatataggctttttgtttttagccttctcctccaaattcttctagcatttactccttgttagttctgaaggtgctttcattttcaggttttttttttaaatggcaacagtcctacttcttgataccaattttcttagttcattttctgctgccataacagattaccacagactgggtaatttataaaaaaagagatttatttggcttatggctttggaggctgggaatttcaagaacatggtgttggcatctggtgaggaccttcttactgtgttataacatggcagaagggcaagagggcatgcaagacagagagagaaatgaggtccaacttattcttttatcaggatcctactcccatcataattaatcactcttcagtaatgccattaatctattcatcagggcaaagtcctcataacctag

SEQ ID NO: 868955 - DNA, 610 bp, Homo sapiens
acataatctccagaacacagaaaatatatgggagggtattattgcatcctgtaaactctattatataggaaatattaactatgttctctttaaataaatttaaatccaatatttagtttaattacagacatgattgtggctccttcttcccccagggttttgcaaacatcattttttgtgctacagcatccagaaggtgtgcactggttactcctgagtagcccatttccacctcctttttcagtgacaccaatatcattccttcaaagaacttaggcccatacaaaaggcaagaaaaaacagactttaggtggtgtattagcctgtttcaccctgctgataatgacatacccaagactgggtaatttataaataaaaagaggtttaatggacttagagttccacgtgrctggggaagcctcacaatcatggtgaaaggcaaaagacacattttacatggtggcaggcaaaagagaatgagagccaagcaaaaggggaaatcccttaaaaaaccatcagatctcatgagacttattcactaccacgagaacagtatttaagaaatggtctcatgattcaattatctcccatgacatgtgggaattatggt

SEQ ID NO: 868956 - DNA, 613 bp, Homo sapiens
atttgacattataagttaagcctctagaaaatttcaatgtcaaaattaaatttatacatcaaattggccatatttcattttgaaataaaaatggcgagatgggaagagggtgcaggcatcctgtggcaagtttggtattaaagaggagtgaagagagaaaggtaagactgtggtaaaggggcaagttaagaaggaaaattcattgaaaagtcmtaccccgcacccacatcaccattttgatcttataactaattcttctttgcctctcttatctcctagcatgaagaatttgcttaaagttataaccaatgctgctcagcacatttcttcatttccacaccttcactcctcacattgctccccaccccaccccacacacaactgaaaatcaatttacaggtctcttcaactctccctgatgggcccaagctgcatactgaatatttctggcttactgattttcaaaggtttttggatgatattaacaaataggagatcataatatatatgaaactcaactagattttgacttaatcagcccaaatccctatgtgtttctattgtaattcttccctccagcataaagaattcccctgcttctaacaaatctttg

SEQ ID NO: 868957 - DNA, 610 bp, Homo sapiens
aaatcttgtatacaaatgttaacagcaccatacatcctgacagccaagaagtggaaacaatcaaaatgggtgttaattgatgaatggctaaacaaaacgtggcatataaaatatcatttgatcttataaaaggaattaaatactgaaatatgttgatatggataaagcttggaaatatactacaggagagaagctagatacaaaaggtccatataacgtgattycatttatattacatgtccagaattgagtcagaaggtagattggtggattccagggtctgcagagaaaggcaaacggggaaagactgctaatgagttcagagtttctttgaggggtaatgaaaattttaaatactggtgatggttgcaaaactctgtaaatatactaataactactcaattgaagattttaaaatgataaattttatggtatatgaattctatctcaataaagctgttattcaaaacaaaacaaggttggtaaatgggtataaacttatagttagataggagaaatgagttctcatgtttgatagccaaccaggtgacttgttagcaacagtgtattgtatatttcaaagcagctagaagagaggacttgaaatgtt

SEQ ID NO: 868958 - DNA, 621 bp, Homo sapiens
ggagggtggaaggagggaaaggattagaaaaaataactaatgaatactaggcttaatacctgagtgatgaaataatctataaagcaaacccccgtgacacacatttatctatgtaaaaaacctgcacatgtacccctgaacttaaaagttaaataaagagtaaaacctgtacattgaaaactacaaaacattactgagagtaatttttaaagacataaaaastgatagacataccgtattagaatattggaagaccaaatattttcacaatgacaattttccccaaaattgattttataatttaattcaatctctatcaaaacttcatcaggctttcttgtggaaattgacaagctggtcctcaaatttatatggaaatgcaaaagacctaggttagccaaaacaattatgaaaaataacaaaactggaggacacacagtctatttcaggtagcactggcataagaacagacatgtacatcaataaaacagaattgagggtccagaaataaatccttaatatttatggacaacttatttttgacaaaggtgccaaggaaattcaatggggaaaaattctcttttcaacaaactgctgggacaactggatagccacatctga

SEQ ID NO: 868959 - DNA, 618 bp, Homo sapiens
taaaatcattttgtgtgacctgcaaaagctaattataaatatatatatatacacatatatatgtatgtgtatatatatatttatttatgcatatatatgtgtatatatggcaaaattagtacctatgttcctggtgcctgtctcactttgggagcacagttacagagggaggtctgcctgctttcatatgagcattttcacctatttttatttaaagagtacgagggtcctcaattccattttaaactctagctttactgactcargttactaaagatcaccacatagaacatatagattctgggttatacccagaattttttcaggatccttaaccatatttaaatgaatgagaatgagagtgctattatagggatgcagcaaacccaacatagcagatttcaaaagaatgaatattctccagactttgtccctatctattattagcaataaataatttctaatgtacctcacaattatggaagtaagccagcctgtcaagacttcacagttaagaacttatggaataaaacagtggtgggatattaacatttagggattcttagtggtttagactgaagcctaaagtcttacaccattatatcttctaactagcaa

SEQ ID NO: 868960 - DNA, 618 bp, Homo sapiens
taaaatcattttgtgtgacctgcaaaagctaattataaatatatatatatacacatatatatgtatgtgtatatatatatttatttatgcatatatatgtgtatatatggcaaaattagtacctatgttcctggtgcctgtctcactttgggagcacagttacagagggaggtctgcctgctttcatatgagcattttcacctatttttatttaaagagtacgagggtcctcaattccattttaaactctagctttactgactcaggttactaaagatcaccacatagaacatatagattctgggttatacccagaattttttcargatccttaaccatatttaaatgaatgagaatgagagtgctattatagggatgcagcaaacccaacatagcagatttcaaaagaatgaatattctccagactttgtccctatctattattagcaataaataatttctaatgtacctcacaattatggaagtaagccagcctgtcaagacttcacagttaagaacttatggaataaaacagtggtgggatattaacatttagggattcttagtggtttagactgaagcctaaagtcttacaccattatatcttctaactagcaa

SEQ ID NO: 868961 - DNA, 628 bp, Homo sapiens
gcagtgggggaaacagatagggctcaactccaaatacaggatggggaaagtgggaatttatagccaaggagcagtgtaggggtcagtggatggaaaactatgaagaggaaacttcaagggtaagggagattctggctaaactgacctcacaggattcttgctgaagacaggccagggtaactggtcatcaccggagggatagtrgaggatgaggacctgatcagatatcaggagagataacacactgaggatggaggaggggggttcttgctaaaccactaaaccaactaagcagggttcttgctaaaacttgatttttcaagcaagtacacagatggggctagggggaaagttcaaaagcctgacaaaagtgtggccaagcaaagaacctttgtcaccaaggagaaaataattctctatatctaatttttgtactcccttgaatccctttgctcctgagccccagtggcaaaccactaatgacactccttaacagattatccaacattaagtgtttcaatgcacagcataaggccaatctactacttttcatccagtgcaagtgttggcttatcataattaaatatcagagctcaaagagatattaggtatataatcgaaatataaa

SEQ ID NO: 868962 - DNA, 628 bp, Homo sapiens
gcagtgggggaaacagatagggctcaactccaaatacaggatggggaaagtgggaatttatagccaaggagcagtgtaggggtcagtggatggaaaactatgaagaggaaacttcaagggtaagggagattctggctaaactgacctcacaggattcttgctgaagacaggccagggtaactggtcatcaccggagggatagtagaggatgaggacctgatcagatatcaggagagataacacactgaggatggaggaggggggttcttgctaaaccactaaaccaactaagcagggttcttgctaaaacttgatttttcaagcaagtacacagatggggctagggggaaagttcaaaagcctgacaaaagtgtggccaagcaaagaacctttgtcaccaaggagaaaataattctctatayctaatttttgtactcccttgaatccctttgctcctgagccccagtggcaaaccactaatgacactccttaacagattatccaacattaagtgtttcaatgcacagcataaggccaatctactacttttcatccagtgcaagtgttggcttatcataattaaatatcagagctcaaagagatattaggtatataatcgaaatataaa

SEQ ID NO: 868963 - DNA, 587 bp, Homo sapiens
aatgttactttcatggagattttgtaaaattggcattatatctttcttaaaagtgtggaagaattaattgttatattcattgtgcttggcattttttttcttggaaggatttaactatgaattgagttcctttaacatatatcaaagtaatcatgctatccatttcttcttgagtaaactttggtagtttatagtttatacctttcaaggaatttgcccattgcatctaattgtttgtaatattttattatgatgattttcatgtctaagttctgtctttcattttaatattgataatttgtattstctccctgtttttggttggtaggtctggctagaggtttatcttttttttttttaatctttacgaagaacaaggatttggttttcaattactctattgtttttttcactttcattgattaatgcacctcttatctattatacctccctttccttctaagggtttaatttgcttttctttaccagtttcttaaagtggaggcttagttcactgattcaagaggttttttttctaatataaacatttaatgttacacaccttcctttatacattttcctctaag

SEQ ID NO: 868964 - DNA, 642 bp, Homo sapiens
agctctaactccaggcattccatggctatcgaacaatttctggcacttacatctatcccagctacttctcctagatccagtctcaagagaagaagagaaggcagaaatggaagaagaagtggggaaagtgcccagattctaccacctggaatgatctgacttctcaaagagccaagagacagcatccctggttcctcttcctagcaaaatcagtcacgtcattggtggtcaattacagaactagttctatggtatttggatcatcaatgcaggagtcagatgtggttgctaaataagcaaagatatcttgattggctatacattgcctaaggcacaatatgtcagtcagctaaagaaggtacgtttaaggaactgctagaaaagaaaaactgagacttyctgtcatgccatcctctccagacttgtattcttttggaggcatcttccactatcacctaggtattttgcccttttgatattgtagtatcttttccatgaggatatgcattacatagtctaaatcttcagtcatatgttaaataaataattttaaaaatcctatacagatagcatcaaacaaggtgttcctaggaacagtattcaagtggtgcattcagaacagccctgatagttagaaggctt

SEQ ID NO: 868965 - DNA, 551 bp, Homo sapiens
ctccagttcccatgagttcctcatctccatctaagagcatctcagcctgggcttcaccatccatatcactatcagcatttttgtcaaaatcattcaacaagtctctaggaacttccaaactttcccacatatcttctgagcccttcaaactgtttcaacctcagcctgttacccaatttcaaagttgcttccacatttttgggtatttttataacagcacccctctctctgtggtaccagtttaytgtattaatctgttctcatgctgctatgaaaaaatacccaagactgggtaattcataaagaaaagagatttaactgacccacagtttcacacagctgggaaagcctcaggaaacttacaatcatggcagaaggtgaaggggaagaaatgcacgttcttcacagggtggtaggaaggaaaagtgccaagcaagggggagaaaccccttataaaaccatcagatctcatgagaactcactccctatcacaagaacagcatggggtaacctcccccatgattcatttacctcccacggagttcctccca

SEQ ID NO: 868966 - DNA, 551 bp, Homo sapiens
ctccagttcccatgagttcctcatctccatctaagagcatctcagcctgggcttcaccatccatatcactatcagcatttttgtcaaaatcattcaacaagtctctaggaacttccaaactttcccacatatcttctgagcccttcaaactgtttcaacctcagcctgttacccaatttcaaagttgcttccacatttttgggtatttttataacagcacccctctctctgtggtaccagtttactgtattaatctgttctcatgctgctatgaaaaaatacccaagactgggtaattcataaagaaaagagatttaactgacccacaktttcacacagctgggaaagcctcaggaaacttacaatcatggcagaaggtgaaggggaagaaatgcacgttcttcacagggtggtaggaaggaaaagtgccaagcaagggggagaaaccccttataaaaccatcagatctcatgagaactcactccctatcacaagaacagcatggggtaacctcccccatgattcatttacctcccacggagttcctccca

SEQ ID NO: 868967 - DNA, 632 bp, Homo sapiens
  misc_feature 535, 540, 548, 553, 563, 575, 592, 593, 595, 606, 607, 621: n = A,T,C or G
ttaatattagtaaagattggcaacatcaagtgtttgaggatatgaataaacagggaattccatatctgatttatgagagtatagcttggtacaatctctttgaaaagcatgaagacctaaagagaaataccattcaacccaataattccgttactgggtatatacccaaaggaatataaatttttctattataaaaacatacgcatgcatatgttcattgaagcgctattcacaatagcaaagacatggaatcaacctaaatgcctatcaatgatctactagttgaagaaaatgtggtacatatacaccatggaatactatgcagtcacacacacacacacacacacacamaaaaaaaaaaaaaaaaaaaaacgagatcatgttctttgcagggacatggatggagttggagaccattatttttagcagactaacacaggaacaaaaaaaaaaacacaaatactgcatgttctcacctataagtgggagttaaatgataagaacacatggagtgacatagtattggaggaattcnatatnctaactancactnggagcctttntggagagtggangggtatgaggagggagnnanggattcacaannaaaattaactgatngggtactagac

SEQ ID NO: 868968 - DNA, 581 bp, Homo sapiens
tatgtcgattcctggttgctcatatttccacgtacttgactcattttccttctttttaaaaagagaaaatggctgctatcccaattgactagtaacttttcatatactctgagcctttcctaaccgacgcttcatatctgacacaactaacattctgtagctctctattmaaggagtcagaacattttctcttttctttttttttttttttttttttttttggtgatacaagatctcactctgttgcccagactggagtgcagtggcatcatctcagctcactgcaccttcaacccgcagaggctcaggtgatcctcccaccctctcctcccaagcagctgggactacaggggcacaccatcatgcctggctaatttttgtatttttagtagagatggggtttggccacattgcccaggctggtctcgaaatcctgggctcaagcaatctgcccgcctccacctcccaaagtgctggggttacaggcaagagccaccgcacctggccagaattttctttctgaaaggctagacagtcaataatttaggtttaagtttcccacggggaacaaagggagcgag

SEQ ID NO: 868969 - DNA, 581 bp, Homo sapiens
tatgtcgattcctggttgctcatatttccacgtacttgactcattttccttctttttaaaaagagaaaatggctgctatcccaattgactagtaacttttcatatactctgagcctttcctaaccgacgcttcatatctgacacaactaacattctgtagctctctattcaaggagtcagaacattttctcttttctttttttttttttttttttttttttggkgatacaagatctcactctgttgcccagactggagtgcagtggcatcatctcagctcactgcaccttcaacccgcagaggctcaggtgatcctcccaccctctcctcccaagcagctgggactacaggggcacaccatcatgcctggctaatttttgtatttttagtagagatggggtttggccacattgcccaggctggtctcgaaatcctgggctcaagcaatctgcccgcctccacctcccaaagtgctggggttacaggcaagagccaccgcacctggccagaattttctttctgaaaggctagacagtcaataatttaggtttaagtttcccacggggaacaaagggagcgag

SEQ ID NO: 868970 - DNA, 581 bp, Homo sapiens
tatgtcgattcctggttgctcatatttccacgtacttgactcattttccttctttttaaaaagagaaaatggctgctatcccaattgactagtaacttttcatatactctgagcctttcctaaccgacgcttcatatctgacacaactaacattctgtagctctctattcaaggagtcagaacattttctcttttctttttttttttttttttttttttttggtgatacaagatctcactctgttgcccagactggagtgcagtggcatcatctcagctcaytgcaccttcaacccgcagaggctcaggtgatcctcccaccctctcctcccaagcagctgggactacaggggcacaccatcatgcctggctaatttttgtatttttagtagagatggggtttggccacattgcccaggctggtctcgaaatcctgggctcaagcaatctgcccgcctccacctcccaaagtgctggggttacaggcaagagccaccgcacctggccagaattttctttctgaaaggctagacagtcaataatttaggtttaagtttcccacggggaacaaagggagcgag

SEQ ID NO: 868971 - DNA, 581 bp, Homo sapiens
tatgtcgattcctggttgctcatatttccacgtacttgactcattttccttctttttaaaaagagaaaatggctgctatcccaattgactagtaacttttcatatactctgagcctttcctaaccgacgcttcatatctgacacaactaacattctgtagctctctattcaaggagtcagaacattttctcttttctttttttttttttttttttttttttggtgatacaagatctcactctgttgcccagactggagtgcagtggcatcatctcagctcactgcaccttcaacccgcagaggctcaggtgatcctcccaccctctcctcccaagcagctgggactacaggggcacaccatcatgcctggctaatttttgtatttttagtagagatggggtttggccacattgcccaggctggtctcgaamtcctgggctcaagcaatctgcccgcctccacctcccaaagtgctggggttacaggcaagagccaccgcacctggccagaattttctttctgaaaggctagacagtcaataatttaggtttaagtttcccacggggaacaaagggagcgag

SEQ ID NO: 868972 - DNA, 553 bp, Homo sapiens
ttgcatcttcttcactgtctctttgcctgcttccatccatgtaagacgtgacttgcttctccttgccttccaccatgattgtgaggcttccccagccacgtggacctgtaactccaattaaacctctttcttttgtaaattgcccagtctcgagcatatctttatcaacagtgtgaaaacggactaatacaccataataaactaaaccctgtctggcctatacgrtgtatgaaaaactagagtcaatgtcaaatgtactagagatcaaccaaagtcaaacactgaccttatgagatggaaaattcaagtaagttttaaatttatatatatatatatatatatacacacacacacacatatattcaaaactgtaatagcatgagcattcatttaaatgtacacaaaaatggcaaaattaaaactagaccttaagagaggcaacaaccttgaaaatgaaatcaaaggaagaggcttggactagaagcccagggacctggcattgccaccaagtagcagaggagcctatccaatcgatgttcacttataaagcgag

SEQ ID NO: 868973 - DNA, 631 bp, Homo sapiens
cacaccaaaacccaaaaaaatcccacaaatctacatatgtaatttgacacttctgattcaccggaggcaggaataatggtagagtagaggtaatggaagtcaaaataacagcacctaagtgaaatatttgcataatgagtttggaattgacactacattttctacatgtagtaagaatagtagagtgaattaaatgaaatgttgaggtaacagcactagatcatattgcactgtatgctgcaaacattaagcaatttgaaaggttaatgaacaaagcaatggttctctgtaagggcctccagaaaatattagcaaacaacaaaatgaaactgcctagagcatgagaaaagatcaatagagcactgtttctttctttcttttcccagtgctctgtgaatgaaacaatagcaacttcaacataaggtgtgtgctaagaattrctaactggatggattaattgcattcaggcttgtctcaagccagccattccttataacttttcattaatcctcaagaaatgccttttgcttcacttgtttttgccaaaatcctgctaaagtaacaatataataaatcttttcaggacttaattattattaaacaaattagatacaggaccaaaaaactgttt

SEQ ID NO: 868974 - DNA, 562 bp, Homo sapiens
atgagaactcatcattaaaaatgtgtggcaccttcccccatcccttgcccccactttaccatctgccatgagtaaaagcttcctgaggcctccccagaagcagatgccagctctatgtttcctgtatagcctatggaaccatgagtcagttaaaccacttttgttataaattagccagtttcaggtatttctttatagcaatgcaagaagggccaaatatagaaaattggtaccaggaaaggtgtattgctataaagatacttgaaaatgtggaagtgcctttggaactggataataggcagaggttggaagagtttggagggctcagaagaagataggaagatgagggaatgtttggaacttcttagagaatggttaaattgttgtgaccaaaaagctgatagttacatggacartgaagtccagacagccgaggtttcagatggaaatgaggaacttattgggaactggagcaaaggccacgtgtgttacgccctaacaaagagcttttctgcattctgttcatgccctaggaatctgtggaagtttgaactaaagagtg

SEQ ID NO: 868975 - DNA, 526 bp, Homo sapiens
aaatataggcagaaaatcctagagtttatttgggaagtgggaaataactcactttggctggcaattagggcatatactatgggtgattcagacaaaggtcatagagccaagcaaaatagtttggacttaatcctctaagtaataggggactactggactttttgagccggaaggttatatactttgagttgtgcattgtgaaaattaatctggcagcagtagacaaaattgactggagtagagaaagactaaagaccaattaagaggcyattttgatagttaagctgagaggtaatgagagaagggaccatgggaatggaacagaaaagaccaattcaagagataagggaagtcaaaccagtgggatttagtgattaattgtaggtggaatggcaaaatggagagaagataagggtgataagaaggttttaaccttgagagactgagaaattgatactggcagaaataataaattccatgggatctagtggaactcttttggaattctatttgaaacttgacttca

SEQ ID NO: 868976 - DNA, 665 bp, Homo sapiens
tattagctgatataaaataataattgctgagtttgttaggtgtgattaatgttactgtgattacgttttttaaaattttctcattagaaagactaaagcacgtgtggataaaacgatatgctgtgtgaatttttatttaaaatactctagcagcaaaagaaatgaaaaataagaaatagatgaaagatcttcaaaagttgtgtaattgtgaagcatggaacttctttcttgtactttctttttaaaccttttcactataaaaaagattttaaaaatagtttcacatayattttacaataaaagtgctattttaatctttgcaattgttttgtcatgttaatctatgaagctccttttggtattattcttaagaataggagtatagtgtcaaacagggattagaaagctaatgctttccattctcatgaatggcagctaaagagaaaggtgacaaaaatacttcaaaatgacaaaggatataataaactggagttgaaagaaattggagggatgaaatattctaagccatgtccatattacatcatatccaaagatttctgataaactaccctctcctttttactccttgattatcatccattttaaacttgcttaaattccttgcctgaaactgacagttggtttggtgatgtctggacgctcta

SEQ ID NO: 868977 - DNA, 609 bp, Homo sapiens
caaaaggcatacaaatggcaaacaggcatatgaacaaatgcatcagaaaactgcagatcaaaactacagtgatatatcatctccccccagttaaaatggcttttattcaaaaataggcaataacaaatgctggcaaggatgtggggaaaagggaacgctcatacactgttggtgggaatgtaagtrtccttcagtcactgtaaagagcagtatagaagttcctcaaaaacctaaaaatagaactatcatatgatccagcaatcccactgctaggtatagtcaaaacaaaggaaatcagtatattcaagagatatctgctctctcgtgtttattgcagcactatttgcaatagcgaagatttggaagcaacttgtatccaagttgcatatcaagtaacagatgaataaataaagaaaatgtggtacatgtacacagtggagtactattcagacataggaaagaatgagattctgtcatctgcaacaacatggatggagcttgaggacattatgttaagtgaagtaagccaggcagagaaacacacactttgcatattctcactcatctgtgagagctaaaaattaaaacatttgaacttatggagacagg

SEQ ID NO: 868978 - DNA, 632 bp, Homo sapiens
tcccaatattccattttacagatctatattgggcccttgtgactcatagtactctttactaaatattgcaggaatttgcttttcaaactatggactttatactgtccttcttgatacctcctgtattagaaccacaggggccatcagttaaaaatactgattatttggtgacawttgagacctgtttatcaagaatgtttgtggctatgatcttagaatctagaattttaaccaaaagtgtattagtttttttatctattacaatttgaaaatttaaaaggtatatggtttttgccttcaccagatttctaaacaccactgatgccagatttctcaaccttgattgcagaatagattcacctggggaagaaaaagcagtatctggatcctaccccaaaaccaattaattatgaatctcaggagatggggcctggaaatctgtaataaactaacttctctaagaatagaagtttccacgtgagaaataacttgattccatctggggtagttaaagagaaatctaagttttaaatttataaacactatagttcgaataaacgttccagaatcgctggaatttcagggttacaagttttatgctattaaaaaaatactattttacatagcagatc

SEQ ID NO: 868979 - DNA, 643 bp, Homo sapiens
tgcctgtgccccaactgcttgataatgaagtgggcatgctagtaattaaacttcttgatgaatgtataatggaccatcgtgtttatctcttttggtgaatctatgtttaaagaattataaatttaaaatttgaaaaaaattcaaatgttctggaagtgcataaagtaaaacgagaacatttccccacttcctatcctattcctagggacaccttctattgacaatttggtgtgaaacagatactttttctatgcatgcaaatacatctatatgcatgttttaaaaaataagtcatttaataacgtttggcaatttccttttaataatatatggtatatcttggrcatctttccatgtcagtatatttggacttagtcttcttaaacgttacctagtatttcattgcagtaagttgttcaacctcctaatgttgagcatttaggttgtttccaatttttcatgattataaacaatgctgcaaatattcctattcatacatatttttagacagttttgagggtatttctttgggacacacttctagaaattgccaggtatgttaggccattcttgtgttgctgcaaaggaatacctgagactgggtaatttataaagaaaagaggtttaattggctcacagttct

SEQ ID NO: 868980 - DNA, 637 bp, Homo sapiens
ttagggagtccataaggacctgcattcctgagtgaggacagggattataaaggagggagaaggcaagtgaaccagcaggtgtccttttttttaattattattataatttatgttctggggtacatgtgcagaacgtgcagttttgttacataggtatacatgtcccgtggwggtttgctgcacccagcaacccatcatctacattaggtatttctcctaatgctatccctccccttgcccccaaccccccgacaggccctggtgtgtgatgttcccctccctgtgttcatgtgttgtcactgttcaactcccacttatgagtgagaacatgcagtgtttggttctctgttcttgtgttagtttgctgagaatgatggtttccagtgtcatccatgtccctgcaaaggacatgaactcattcttttttatggctgtgtagtattccatggtatatatgtgctacattttctttatccagtctatcattgatggacatttgggttggttccaactctttgctattgtaaatagcagcaggtatccttctatttggcacatgtaaagtagaagttcaaatgggtccgataacaaaaatatttttaaaaatttttgtaagttctaggaaggcaaggactaa

SEQ ID NO: 868981 - DNA, 637 bp, Homo sapiens
ttagggagtccataaggacctgcattcctgagtgaggacagggattataaaggagggagaaggcaagtgaaccagcaggtgtccttttttttaattattattataatttatgttctggggtacatgtgcagaacgtgcagttttgttacataggtatacatgtcccgtggaggtttgctgcacccagcaacccatcatctacattaggtatttctcctaatgctatccctccccttgcccccaaccccccgacaggcyctggtgtgtgatgttcccctccctgtgttcatgtgttgtcactgttcaactcccacttatgagtgagaacatgcagtgtttggttctctgttcttgtgttagtttgctgagaatgatggtttccagtgtcatccatgtccctgcaaaggacatgaactcattcttttttatggctgtgtagtattccatggtatatatgtgctacattttctttatccagtctatcattgatggacatttgggttggttccaactctttgctattgtaaatagcagcaggtatccttctatttggcacatgtaaagtagaagttcaaatgggtccgataacaaaaatatttttaaaaatttttgtaagttctaggaaggcaaggactaa

SEQ ID NO: 868982 - DNA, 584 bp, Homo sapiens
gaggctaagaaatccaagatcaaggtgctgacagacccggtatctggtgaaggtccactgtctggtgcatagatggtccctgatagccatgtcctcacatggtagaagaatgaaggcagctttctgggtcctcttttataaggtcacaaatcccattmatggggaccccacctttatgatataatcacctcccaaaggccccacctcctaatatcatcacattggtaattaggtttcaacaaatgaactttgagggacacaagcattcagaccacagtatcacttgtaccccaaatgtcaaaaatgttatgttccatagagtgcattggaccctgtggattttaagggtaccttagagtccaactgagtttgcatatactcactccctcatcctttgctagccaactttcttggagcacaggcctagaaatagattggggtgttctagtctcctcaataggcttacctctgaagttcccttatgactagcagctaatctaatgtaatttataacaaattgcttctctggttcaaatagatttggtaatacttgtagtttaaaatttagtatctcctcttactga

SEQ ID NO: 868983 - DNA, 588 bp, Homo sapiens
tactgtttttataatagctaaaaaggtatttccttttacctgtacaaaactgttgaatgttttaatcaattctttatgttttagggaagttatttatttttccttttttaaaggtagagtcttgctgtgttgtccaggctggagtgaagtgacatgaccaagctcattgcaacctctatctctgaggctcaagcaatcctcccacctcagcttcttaagttgctggagactacaggcatgcaccaccacgcctagttatttttttttttattaatttttttaamcggctggtcttgaagtcctgagctcaagcaatcctcctgcctcgccctccaaaagtgctgaggttacatgtttgagccaccgttcctggtctgggaagttatttttaaagtgtcgatttgatttttattatccccttggaaaatgtgagataatatttgcttgctttcttgtccttgtgttcaatttctttgttttattcaatttactttagctatattttgttttaaaatatcaaaatatataattatgtataatcttttgtgaattgtatcttaattattgttgcatataaagagttgttct

SEQ ID NO: 868984 - DNA, 520 bp, Homo sapiens
catgaggcagcaacaccctggaatctctctgaatctgctctgattctgagggctacccaaaacttgcaaaatatttcttctggctcaattcaactctgttaattttaatttgcctaaagttgtaattttaacaaattaaaaatggaaaaactttgttgtaccctatcatagaagaaatagaggttggcaagaaatatttcatataagcaatgggctttytgggccacatactttccattacaccttgtcttagcccagtagtctaaaaattctgactcaaacttatggtgtttaaatactgttcaacatttatttagtgggaacatggataaattgattttcaataaatacaattactatggcactttatgaatattacaaaagatttaaatatattgtcacatttttgcttattttatactgcctgtcatttttcatttatccattattgataaatggaaaacatgtgtcagaaggtactcatactcatcaagtttagagataacatacatagacatag

SEQ ID NO: 868985 - DNA, 671 bp, Homo sapiens
tctaccacatatccatgtgcaacttttattcctctaacagtttttaaattttttactgaggatacctttgtattttaaatatatgtattgcatatcattctgcttacatactgcaataaattcccattaaaattagaatcccattagaatctctatacagaataatttttaacattgcctacaagacataattcaatctgttttacttctgtgtcttcactttcattttgccttttgctatggccattctttttttttttttttttttttttttaagatggagtttcacacctgttgcccaggctggagcgcaatggcgcaatctttgctccccgcaacctctgcctcccarattcaagcgattctcctgcctcagcctcccgagtagctaggattacaggcatgcgctaccacacccggctaatttttgtattttttttttagtagagacggggtttctccatgttggtcaggcttgtccatggttttatttttctactttcaacctgtgttttccccttccttctgatacaatattctgcaaccaggtctccctgaggctgactcattttttttttttttttcacatatctgctcaattacaccttttcaaagatcttttttaagcatagaattctctggaatatttttcagtttatttttgctgaaca

SEQ ID NO: 868986 - DNA, 643 bp, Homo sapiens
caaagtcttaactaatttcagcattacctcaaaagtccacagtccaaaatctcactggagacatggcaagtcccttctgcctgtgagcctgtgaaatcaaaagcaagttagttactccctagatacatgagggtacaggcattgggtaaatacagccattccaaatgggagaaattggccaaaacaaagggtctacagacctcatgcaagtccaaaatccagcagagcaatcaaaccgtaaagctctgaaatgatcttctttgactccatgtctcacatccaggtcatgctgatgcaagaggtgggttatcatggtctctggcagctctggccctrttgatttgcatagtatagccctcctcctggctgctttcacaggctggcattgagtgtctgtggcttttccaggtgcatggtaagttgtcagtggatctaccattctgaggtctggaggatggtggacctcttctcaagctccactagatggtgttccagtagggactctgtgtgggggctccaactccacatttcccttctgcactggcctagtagaggttctccatgagacccccacctctgcagcaaatttctgcctggacatccaggcattcccatatatctgctgaaatctaggcagagattc

SEQ ID NO: 868987 - DNA, 567 bp, Homo sapiens
ttctctaatgaccagtgatgattagctttttttatatgtttgttggctggataaatgtcttcttttgagaagtggctgttcatattcttcacctattttcaatgggattgattgtatttttatgtaaatttgtttaagttctttgtagattttggatattagccctttgtcagatggatagattgcaaacattttctcccttttctgtaggttgccagttcactccgatgatagtttcttttgctatgcagaagctcttcagtttaattagatcccatttgtcaattttggcttttgttggcattgcttttggtgttttagtcatgaattctttgcccatgcctatctcctgaatgttattgcctaggttttcttctagggtatttatggctttaggtcttayatttaagtctttactctatcttgagttaatttttgtataaggtgtaaggaagtggtccagtttcagttttctgcatttggctagctagttttcccaacagcatgtattaaatagggaatcccttccctgttgcttgtttttctcaggtttgtcaaagatctgat

SEQ ID NO: 868988 - DNA, 610 bp, Homo sapiens
gtgtcgcaattcctcaaggatctagaaccagaaataccatttgacccatcaatcccattactgggtatatacccaaaggattataaatcattctactataaagacacatgcacacgtatgtttattgcagcactattcacgatagcaaagacttggaaccaacccaaatgcccatcaatgatagactggataaagacaatgtggcacatatacatcatggaatactatgcagccataaaaaagaataagttcatgtcctttgcaggsacatggatgaagctggaaaccatcattctcagcaaactaacacaggaacagaaaaccaaacactgcatgttctcactgataagcgggagttaaaccatgagaacatatgggcacaggaggggaacatcacacataggagcttgtcaggggtttgggcaaggaaagggatagcattaggagaaatacctaatgtagatgatgggttgttgggtgcagcaaactgccctggcaaatgtataccaatgtaacaaacctgcaccttctgcatatgtatcccagaattgaaagtacattaaaaaataataataatgcaaaaaaaaaccccacttttatcctttaagtc

SEQ ID NO: 868989 - DNA, 542 bp, Homo sapiens
agccaggcctcttccccatcccactttccctggctcatttattcatatttcaagagctgatacaataaatgaggcagtgatgattcttgaggtaaaccctcaagcagtctagggagaagaggttgtatcagagtcagggttttacagagaaagagaaccaaaaggatgtatcgatatagatacagagataggtaggtaggtaggtagatagatagatatataggatagatagatagatagatagatagataaatagatatacagatagattcatagatacatagacaaatgaaaaggcttataataagaaactggttcttaccactgtggagtctaacaagtcctaaagtctgctgtcagcaagctggagaccaggagagctgatkatgtaagtttcagtctaagtctgaaggtctgagaaccaggagagatgatggtgtagttgcagtctgaaaactagctatctcaagacccaggaagatctgatgttttggtgcaagcctgaaagcagaaggaaaacaatgtcccagcttaaaggcagt

SEQ ID NO: 868990 - DNA, 562 bp, Homo sapiens
gtggaacatatttctatatctatagctgctatataactacataaatgatatttagttctaagttatattcagattctcaagtaatctctgcccttaaaggaacttaccatctagaagggggatattataatactagtaagtctacacagtagggaatattaaktgctctgagagtgtgaaggaggggagagagaaagaatatttccagtctccaagaggatggggaagaaggtaggcatccaaagagaccttatgggggaaattacacctggactggatgttatgggcagaagatgatcagttggtcttatagactcctgggaagtcaattaatgtcaaccaaagcagaagtcaattccctcttctttctctctggtcttcagagagctgtttgctgtcttgcaaaatctcctttgctttccctgtttaaggctgcctttgctgtttccttgaactggatttcatcttgatgcaaattcaaaaggagcaagagggtaatctgcttttagatagtcccaggagatgttctgctgaaggctgggcagagcagcacatcaagtcg

SEQ ID NO: 868991 - DNA, 613 bp, Homo sapiens
cttcagagggtgcaagcttcaagccttggcagcttcagtgtgatattgagcctttgggtgcacaggaggcaagagctgaggtttgggaacctccacctgacttcaaaggatgtatggagatgcctggatgtccaggcagaagcctgctgcaagtgcagagccctcgtgaaaatcctctactatggtagtctgaaggggaaatgtggcattggagtgcacaagcagagtccccactggggcactgcctagtggagctgtgagaaaagggccacyatcctccagaccccaaaatggtaaatccactgacagcttgttctgtgcacctgaaaatgctgtaggcactcaatgtcagcctgtgaacacagccataggggctctaccctgcagaacagaagggttagagcttccaaaggccttgggagcctatcttttgaatcagcatgtgctggatatgagatatggagtaaaaagggattattttggagtggtaagatttaaaaactgccctgctgagtgtcagacttgcatgaggcctgtagcccctttgtttcagctgatttctcccatttggaatgggagtatttacccaatgcatgtaaccccattgtatctt

SEQ ID NO: 868992 - DNA, 599 bp, Homo sapiens
agccaatattactgctgaaaatacagaaaatgcacggtaggtatccaatgacttggaaaaatggtgttgaaatacatgtgccatgaactacctgaaatttttcaaactcaacctcaatcaatcacatatagattgacaaagattattccaatagctgtagwgggtcactataattttttttttttttttgagacagagtctcgctctgtcgcccggcctggagtgcagtggcaagatctcggctcactgcaagctctgcctcccgggttcacggcattctcccatctcagcctcccgagtagctgggactacaggcgcctgccaccacgactggctaattttttgtattttttttttagtagagccagggtttcgccgtgttagccagtatagtctcaatctcctgaccttgtgagccgcctgccttggcctcccaaagtgctgggattacaggcatgagccaccgcgcctggccactataaaatatttaaaaccaactttaagtgccagtaccttcctcagaggcattagaaatatattatgaccacttttttccttaaaatgcacattcatatgtcaatgttttatatgatttttag

SEQ ID NO: 868993 - DNA, 635 bp, Homo sapiens
actctgcctggtgccctattctactgtggctgagctaaaacccaagctccacgacaaattcctttttcagtctttcctctcttctctcaagcaaaaggaaaacrtctcccccagagttgtgagctgcactacctggggttgggggagggattgcataagaactcccttggctgcccaagctcgtgtctcactaggtcgtgtgtagcccaagcccgctgactctgagtccagcggagcactaggatttgcccagaaattgtcatctcactgggcaggactgcctttcaagtttatttagaaccccatatctccgtagcccactgtggtgtgtctaaccagagctcaggttctgaccactggattgaaagattcccctctggctggggctgatctaaacgctcctgcatgggcaccagctaaattctcccctgtgttgctttctactgtgactagcagtgctgggttccaatataaagacccacaataactgtgctctcccacccccaaggacacagattttctctccatgccacatggccactgcaaagggattgcagagaagtgtcctcagcaattcaagactgactcttctaccctttcagtgcctctttacttcatatgatgttaaaaccagg

SEQ ID NO: 868994 - DNA, 646 bp, Homo sapiens
atgggattttgccatgttgcccaggctggtctccaactcctgacctcaaagtcatccgcgctcctgggcatcccaaagtgctaggattataggcatgagccaccacacccagactaccacaaaatttctttaacaaaattttaaaaagtaatgaaaaaagaggaaactaactgaagtaaaaatggagtctactaaaagacatttggatctttgggtgggccgtgaagtcagtcacaaatggccacaaatcccaacatgggaatgttctagtgaggatcctacaactggcaaggctacaattggaatcaccacagctcaccctcatgatgctagcactggaggtcaaaacgtttttcatgtctggccttgaagtccaggtcattctgccatcactcttatgagaaaagatggatatgtatggaatttgmctcctatattgttattttctggatgagagtcccatatttagaattcgaaagacaagatcactgcaaaatattttagctattaaagaaaaaggccacgaaagcaaatttctgacttctgcttcggtgaaaaatgtcataacatgagaattttttcaaacataaataagaagtgttcaaaacttgctgtgtaactaaaggcatgacaaatttttcccacg

SEQ ID NO: 868995 - DNA, 579 bp, Homo sapiens
tttataaggacaggaaaaagcatgaattgagatgctttttctaccctagatgtccattaaattgattttaaaacaggcaatggcattattatctttttattcttgagtaatacccatttaaggaaaacacaggacaaagggtaaaaaaaaatcattttttctttatttatttaagaaaaaatatggcctatccctaacagtttataataccttctgtgtgaaacacctaatggacttaataaggatcaatcaaagaaatgcaatgaattcccttaaaaaactactgtgcaatatatctcctaaaagamaatatataagaataaatcctttaatattcaaattaaaaataatgcaaatttcattggacatattggagtatggctaacttggaggaatatcttagcattattatcttggaaaaggttacgaagataatatagattcatatggttttaatttctgcatctatgtcatggtaaataaatttttgcatctatgtcattagtaaataaattaagtctcataataatatgaacatattataaaactgctaaccagttagaagcatctcagaataca

SEQ ID NO: 868996 - DNA, 622 bp, Homo sapiens
tgtgtgtcctttttggaagagttgggacgttcagatgagcaaagagggaaaggaaggtatattcctggtctgtaaagcacaggaagctgctgacaccaacaaaggtttaaaggcaccccattgcctatgaaatgaagcctaaacctctcagctggtgaaggacagataactcatttttcacactgcattctgatgagaccagaaagctttgtttcttctgtctgtaagactgacccgaktttcctcaccaaactcccacctagctaagtagcatcggtaatttagagttacaattagcgatattttaatctcatctcttttaaacagtcagtttggatgatgaagtttaaatagtgtattcaaagtcaacctagtatcatgcctagtttgcatgatctcttttggatgaatcagacccttcgccaaatgttcggtctttctgattttgcaccctcacttccaactccaccatgacagccactatatatgttacagggatttactgtgccctcctaccagcagcaggaaggggccctcagaccatcatggcctcctctggccattgattcttgctgcagaatggctggattgactgactctgaggtgcaaccagccacgtctg

SEQ ID NO: 868997 - DNA, 622 bp, Homo sapiens
tgtgtgtcctttttggaagagttgggacgttcagatgagcaaagagggaaaggaaggtatattcctggtctgtaaagcacaggaagctgctgacaccaacaaaggtttaaaggcaccccattgcctatgaaatgaagcctaaacctctcagctggtgaaggacagataactcatttttcacactgcattctgatgagaccagaaagctttgtttcttctgtctgtaagactgacccgattttcctcaccaaactcccacctagctaagtagcatsggtaatttagagttacaattagcgatattttaatctcatctcttttaaacagtcagtttggatgatgaagtttaaatagtgtattcaaagtcaacctagtatcatgcctagtttgcatgatctcttttggatgaatcagacccttcgccaaatgttcggtctttctgattttgcaccctcacttccaactccaccatgacagccactatatatgttacagggatttactgtgccctcctaccagcagcaggaaggggccctcagaccatcatggcctcctctggccattgattcttgctgcagaatggctggattgactgactctgaggtgcaaccagccacgtctg

SEQ ID NO: 868998 - DNA, 622 bp, Homo sapiens
tgtgtgtcctttttggaagagttgggacgttcagatgagcaaagagggaaaggaaggtatattcctggtctgtaaagcacaggaagctgctgacaccaacaaaggtttaaaggcaccccattgcctatgaaatgaagcctaaacctctcagctggtgaaggacagataactcatttttcacactgcattctgatgagaccagaaagctttgtttcttctgtctgtaagactgacccgattttcctcaccaaactcccacctagctaagtagcatcggtaatttagagttacaattagcgatattttaatctcatctcttttaaacagtcagtttggatgatgaagtttaaatagtgtattcaaagtcaacytagtatcatgcctagtttgcatgatctcttttggatgaatcagacccttcgccaaatgttcggtctttctgattttgcaccctcacttccaactccaccatgacagccactatatatgttacagggatttactgtgccctcctaccagcagcaggaaggggccctcagaccatcatggcctcctctggccattgattcttgctgcagaatggctggattgactgactctgaggtgcaaccagccacgtctg

SEQ ID NO: 868999 - DNA, 582 bp, Homo sapiens
ttgtttcttctgtctgtaagactgacccgattttcctcaccaaactcccacctagctaagtagcatcggtaatttagagttacaattagcgatattttaatctcatctcttttaaacagtcagtttggatgatgaagtttaaatagtgtattcaaagtcaacctagtatcatgcctagtttgcatgatctcttttggatgaatcagacccttcgccaaatgttcggtctttctgattttgcaccctcacttccaactccaccatgacagccactatatatgttacagggatttactgtgccctcctaccagcagcaggaaggrgccctcagaccatcatggcctcctctggccattgattcttgctgcagaatggctggattgactgactctgaggtgcaaccagccacgtctgactgtgttgggagtgatgtgagaacaaccacttcaggccccagtcatttgttcccagtccagagggccccacccacagtatttcctatgtgctccctccaggccttaatgagaccccatcacggttaacaattccatgcccgctccctggcacaaatgggaatttcag

SEQ ID NO: 869000 - DNA, 671 bp, Homo sapiens
aaaaattcagaggctagggtttttcaaggatagtttggtaaacagggggataggtgaatgggtactgctgattggttgtggatgcaatcgtaggtgtgtggaaaattgtcctcatgtgctaagtctgcttctgggtcggggccacaggagcagttgagccaaaaatcacaggtctgggtggggccatctggtcatcaaaaatgcaaaagcctgaaaggacatctcaaaaggccagtcttagattctacaatagtgatgtcatctgcagaaggaattgcggaaattgcaaatcttgcgactgccagaataatgtctggtaatcattcatgcctagatcttagcagaattcaggctcctctcatcttcctaacttcgtagtgtttcattagttttacaaaggcagtttagttttggggaaggactattattatttaaaccataaactaattttttcccaaagttagcttggcccaagcccaggagtgaccaaaagcaatttggaggttaaaggcaagatgkaggttggttagattatgtctctttcactgtcataattttctcattgttatgatcttgcaaagagagtttcattcctacttgggcatcaagactccaggcttacacaacaaaaggaagaggggaatcttttaaacactgtggtagaatcctac

SEQ ID NO: 869001 - DNA, 579 bp, Homo sapiens
ggatttacctccactgtcaggcaaatacaggctgaggcagaatgttcccctgtgttttcagtgtttttaacttaacaatcctcaatattttagggagaaatgttttgttttactacaatacacacacacacacacacacacacacacacacacacagtcacaccatacctgacagagaatcataaattggcgccattgtctcaagggtgaaggsacagaaggggaactgtcagaggcagcctagagaacaaaggattcaaattattggctttagtacttctaaggtcagatataaaacaaatagcagaccacttgcagcaagcattcttcacccacacaggaggatttctgagctgcatgaggagtcagaaagacaagagaaccagagcctgggtagtgcccctggcaactttgcccctggcctctctccgcagaaggaagccactgcaagtgtgggatgtgggcacagaggaaatctgaactgtgcttcttatgtaaggtcccagagttcacccacaccccgcagtggcagagcacatatagtgaccaagaaagagaagctttagacaacctcactga

SEQ ID NO: 869002 - DNA, 579 bp, Homo sapiens
ggatttacctccactgtcaggcaaatacaggctgaggcagaatgttcccctgtgttttcagtgtttttaacttaacaatcctcaatattttagggagaaatgttttgttttactacaatacacacacacacacacacacacacacacacacacacagtcacaccatacctgacagagaatcataaattggcgccattgtctcaagggtgaagggacagaaggggaactgtcagaggcagcctagagaacaaaggattcaaattattggctttagtacttctaaggtcagatataaaacaaatagcagaccacttgcagcaagcattcttcacccacacaggaggatttctgagctgcatgaggagtcagaaagacaagagaaccagagcctgggtagtgcccctggcaactttgcccctggcctctctcsgcagaaggaagccactgcaagtgtgggatgtgggcacagaggaaatctgaactgtgcttcttatgtaaggtcccagagttcacccacaccccgcagtggcagagcacatatagtgaccaagaaagagaagctttagacaacctcactga

SEQ ID NO: 869003 - DNA, 573 bp, Homo sapiens
ttgcctcagcttcccgagtagctgggactacaggcgcccgccaccatgcccaggtaatttttttgtatttttagtagagatggggtttcactgtgttaaccaggatggtcttgatctcttgaccttgtgatccacccgccttggcctcccaaagagctgggattacaggcgtgagccaccacgcccagccctggstactttcttatttttatgtagagatagggcctcgctatattttccagactagtcttgaactcctggtcttgagcaatcctccagatttggcttcccaaagagttgggattacaggtgtgagccactgcacctggccaattcctcagaatttatatgaaacctccttggaaaaaaaaaaaaaaaaagtggggcaaatcagaattaactgaatggagcccaagtattaaattcagttttaaaaaataaagttataatgtttcaaatataggatctttaaaaaccatacccatatcatcaacaatgaaagtaactgaccagttcttccgagaaagaggataataaggtaatggtgtggctaaactgggaagtcttcaaaaa

SEQ ID NO: 869004 - DNA, 526 bp, Homo sapiens
acattaaaaatgaagacaatcttcaaatgtacttcggtgggatataagacacttagaaaagcagccctttgaaacactgtaaagtgagcatgtattttctctactacctgtcaaaatccctaaaataaaggaacaaaggggctaaacaaattaaaaagacaaaagggcaagaaaccagaagacaatggaccagcaatgacaagagcattctagaagatgsagaacagaggaatgagtgaccactgactgccctgccgatctgtgattgtgtgacaaactaccatcgggcgtagcaacttaaaacaactattttttatattcacagattctggaagtcaggaatttgaaaaggacatggcaggaacatcttgtcacttcacaatgttggtggtttcagctaggaagactcaaaaactggagtgattcaacaacttgtgggtattaaaactatctggagactctgttactcatacaactggcagttgatgctagctagctattggccggaacctcagcttggtctgtc

SEQ ID NO: 869005 - DNA, 526 bp, Homo sapiens
acattaaaaatgaagacaatcttcaaatgtacttcggtgggatataagacacttagaaaagcagccctttgaaacactgtaaagtgagcatgtattttctctactacctgtcaaaatccctaaaataaaggaacaaaggggctaaacaaattaaaaagacaaaagggcaagaaaccagaagacaatggaccagcaatgacaagagcattctagaagatgcagaacagaggaatgagtgaccactgactgccctgccgatctgtgattgtgtgacaaactaccatygggcgtagcaacttaaaacaactattttttatattcacagattctggaagtcaggaatttgaaaaggacatggcaggaacatcttgtcacttcacaatgttggtggtttcagctaggaagactcaaaaactggagtgattcaacaacttgtgggtattaaaactatctggagactctgttactcatacaactggcagttgatgctagctagctattggccggaacctcagcttggtctgtc

SEQ ID NO: 869006 - DNA, 455 bp, Homo sapiens
ctctatgaattcaccccaaattctttcttgattaaggtccaagaaccctctcttggggtctggatcaggacccctttccagtaacatctcagttgtagtcacacttaacagctgtaagtacgtacattttctgattcttacatgcaaatattgctgctaccttttttctttaaaartttttcctattcaaccttagagactttatcacttatgcaatgtatgagctgttaacttggacactcactcgcttaataacaggtacacctaatgtaaccgagcagcttagcttcaaattgcattttaaaactttttttctttcctccttttccccagtctcaaaacatagctttgagacaaactatggatgtgttttcttttgtccggaaatacagccttggaatgtgctttaaaactccactcccttccctttcaacccaccttatgctctcacgcca

SEQ ID NO: 869007 - DNA, 590 bp, Homo sapiens
ttttccatatttttctgatctgcttcttttctaattataaattccatctttaagttatttatgtcctctcacatctgtgtgtggttaaaagtagccacacaacagcctgaatgctttgctgtttagatatttcttctgccagatatcctagttcattgctcttaaggtctgcattccataaagccctaaaggcatggacacaattcagccaagttatttgcaactatattacaaggatggccttgactccagtttccaataccttgtttctcatttttgtctaagacctcatcagaatgagctttactgtctatatttctaccaacattctgaccaggaccacatgagtgattcctaagaaaatttagaytgtctttagttctggggtcttctaatctctcaccagaattgctctgaacactaacacttcattcatgacaatctaggtttttttctagcctgctcctccaaattcttccagcctctactcattacacagttccaaagttaattatatatttttaggtatttgttatagcaacagccccacttctccataccaattttttgtcttagggttctttagagag

SEQ ID NO: 869008 - DNA, 585 bp, Homo sapiens
tttgttttgaaatatatagttatttttcataaaagtatattatttgtgttaaaatataattagtaatttttaaatgaagtaatatgaaataataacattatcttttgttttctcagttttaatctgtaatactttaaatactgatagacataatacacataaaccaaatctctttaaggtcctcaatgagtgtaaaggagttcttagatcaaaaagttagaagactactggtttattttaagttcaaaggatttttttctctaacactttgaagatgctacttcattgtgatcttgcatctcatatcattaaagagaagtttgacattaattttattcttgytcctttattggtgatctgttccttccctcaaaagcttttagaattctctttggttcttagttgtttctacattttattgcagtatatctaagtgtaagtttatttttatctatactgttttgtaatctatagattgcttctacttcctcttattctggaaatttctctattattatttcttaaaatattgatacttctttgcttattttttcctctcctctagagtcctctattcgacagatg

SEQ ID NO: 869009 - DNA, 677 bp, Homo sapiens
gaattacaaaacacctcagagctcctaagatattttattctgtataatttttatatacatttttgtaaaataaatagatacaaaacatgtatttaccaggcttgagatgccactgagaacttttcattcattcaacaaatatttactaagagctctatgtgtcaggcactattctaaacactttttaaatgtactagtctatttaaaaaaaaagcaaagaaccttttccacgtgacatagtttagtgagaggaacaaacaataaacaacaaaaataataaawaaaataaataaataaataaatgatgtagtatattaaaagtgagatggatgatggacaaaaggggaaatagagaaaggaagaggcagctgagctctggggagggtgggcagggcaggatgaatgagggtggtaagtggaggcccccaggagtaggtgagattagagcagagacttactgcaagtgatgaattgagtcaaccagttatctgagggaagcacattccagaagaaggacagcgagagccaagtctctgaggcaggaacgtgtctactcctcaaaggacatcaagaaacagtgttagcccagaagttcaaactttctaacttcctggcaccctcagtgtctcagtaattttttaaccaccaaaaaaaaaaaaactacatagccattcctt

SEQ ID NO: 869010 - DNA, 677 bp, Homo sapiens
gaattacaaaacacctcagagctcctaagatattttattctgtataatttttatatacatttttgtaaaataaatagatacaaaacatgtatttaccaggcttgagatgccactgagaacttttcattcattcaacaaatatttactaagagctctatgtgtcaggcactattctaaacactttttaaatgtactagtctatttaaaaaaaaagcaaagaaccttttccacgtgacatagtttagtgagaggaacaaacaataaacaacaaaaataataaatwaaataaataaataaataaatgatgtagtatattaaaagtgagatggatgatggacaaaaggggaaatagagaaaggaagaggcagctgagctctggggagggtgggcagggcaggatgaatgagggtggtaagtggaggcccccaggagtaggtgagattagagcagagacttactgcaagtgatgaattgagtcaaccagttatctgagggaagcacattccagaagaaggacagcgagagccaagtctctgaggcaggaacgtgtctactcctcaaaggacatcaagaaacagtgttagcccagaagttcaaactttctaacttcctggcaccctcagtgtctcagtaattttttaaccaccaaaaaaaaaaaaactacatagccattcctt

SEQ ID NO: 869011 - DNA, 579 bp, Homo sapiens
agacatgcaaagcacaccagattgacgacagcttaagaccaactacacaaatcctttttcattaattaaaacttaacagagaatgtaatcagtgatccttattatcccttttaccagtttgcccagagacagagaggccaaaagcccaactggttaaaaaaaaacttttaccgttttgctggcatgtcagcttctgggttccctgctcctgagctcaactctaagcgatgcactttaaggtttggggaacttgacatttctctgtttggaggaacattataaaagaaggaataggagccattttaaactgtgaaagaaggaaggagaaataccatagaaaagtctagcggtttgggtagtagaactggaggagctgacatgtggatggggggcaggaagggccacagcatctggaagttkcattcgagggttgcattcaagggtttcctgagggtttgtttctctaattttggggaatcattttctttgggccctcctgatatgactggtaaaaaagctgagttgattgtgcaacacttgcaaagttctagtaagaaggccatgcccttgtgcataaga

SEQ ID NO: 869012 - DNA, 622 bp, Homo sapiens
gtttgaactctacgttggcccctttcagccatggctagtgcagctgggacacagggcaccaagtccctaggctgcacacagcttggggactctgggcatggcccatgaaaccactttttcctcctaggcctccaggcctgtgatgagagggttgccatgaagacctctgacatgcactggagacattgtccccattatcttggggattaacaatgggctcctccttacttatgcaaatttctgcagtcagcttgaatttctcctcagaaaatgggtttttcttttctatcacattgtcaggctgcaaattttccaaacttttttgctctgcttcccttataaaactgaatgccgttaccagcacccaagtcaccttttgaatgttttgctayctagaaatttcttctgccagataccctaaatcatctcaagttcaaagttccacaaatctctagggaaggggaaaaatgctgccagtctctttgctaaaagataacaagagtcacctttgctcccgttcccaacaagtttcacatctccatctgagaccaccttagcatggacctcagcatggtccatatcactatcagcatttttgtcaaagccatccaacaagtctcta

SEQ ID NO: 869013 - DNA, 646 bp, Homo sapiens
ttagggagtccataaggacctgcattcctgagtgaggacagggattataaaggagggagaaggcaagtgaaccagcaggtgtccttttttttaattattattataatttatgttctggggtacatgtgcagaacgtgcagttttgttacataggtatacatgtcccgtggwggtttgctgcacccagcaacccatcatctacattaggtatttctcctaatgctatccctccccttgcccccaaccccccgacaggccctggtgtgtgatgttcccctccctgtgttcatgtgttgtcactgttcaactcccacttatgagtgagaacatgcagtgtttggttctctgttcttgtgttagtttgctgagaatgatggtttccagtgtcatccatgtccctgcaaaggacatgaactcattcttttttatggctgtgtagtattccatggtatatatgtgctacattttctttatccagtctatcattgatggacatttgggttggttccaactctttgctattgtaaatagcagcaggtatccttctatttggcacatgtaaagtagaagttcaaatgggtccgataacaaaaatatttttaaaaatttttgtaagttctaggaaggcaaggactaaacctgtttg

SEQ ID NO: 869014 - DNA, 646 bp, Homo sapiens
ttagggagtccataaggacctgcattcctgagtgaggacagggattataaaggagggagaaggcaagtgaaccagcaggtgtccttttttttaattattattataatttatgttctggggtacatgtgcagaacgtgcagttttgttacataggtatacatgtcccgtggaggtttgctgcacccagcaacccatcatctacattaggtatttctcctaatgctatccctccccttgcccccaaccccccgacaggcyctggtgtgtgatgttcccctccctgtgttcatgtgttgtcactgttcaactcccacttatgagtgagaacatgcagtgtttggttctctgttcttgtgttagtttgctgagaatgatggtttccagtgtcatccatgtccctgcaaaggacatgaactcattcttttttatggctgtgtagtattccatggtatatatgtgctacattttctttatccagtctatcattgatggacatttgggttggttccaactctttgctattgtaaatagcagcaggtatccttctatttggcacatgtaaagtagaagttcaaatgggtccgataacaaaaatatttttaaaaatttttgtaagttctaggaaggcaaggactaaacctgtttg

SEQ ID NO: 869015 - DNA, 627 bp, Homo sapiens
cttttatgtctgactgtcattctcttctctttcctgggccatcacatcgtataattctagagagctctattctctttatattttgtctaaatgataccccctgcatttatacaaagtagtgacctttcccttttcttccatttttggtagtagaggccagctttcaatcattaacagtaatagagatgtatactggtgagtgttctaaaatacttcactttagggatggttttaggaagtaggtcttaacttaaaaatttgcatataaatgtgtccgattatgagaattgataatacttcaaatgaaataacttctccaagtggtaaacgtcagagacaggaaaatgaaggtggtaatctccttttatattctctataacctgctagaatggacaatgctgttacctcagaaygcagtagagaacctgaataaattctagtttaccccttcacccttaatgatgtttcattgcttccctggggcaaggatttgaaatcttaaaatagagattaaagaattattctaattagtaaataagagtttaggggtagatctcaacactatttagattgtagaagacttgcaatgaatgatttgaaggtaatagaaatagtagtgacatgttt

SEQ ID NO: 869016 - DNA, 635 bp, Homo sapiens
gtgcttaacagtcagagaaacctagattaaaatctcagttctgctacttattagctatgtgactctggacaagttacttaacctctctgatccttagtcttatagtcataaaatcgggttaatagtaccttcttcatataactgtcagaaatgattgcaatcttgtatataaagtacttggcacacattgtaaacacttactaaatggtaactgctattaattattatactgtatccartgttctctttacttctccccaaataaattcccttagcattcatgccatttttttctattaaaatgttttcccttttacctcacgtccttgaagactcaacccaacctctttcactgataatgtatttatatgattatcaaaacaagaacttcaataacactctgtgctactgatttgttctattataccagattataactctatcagattacaaggccttataagtcagaggcaatatcttaaaccacaaatcttacagatttgaaccttgcacattccaactaataagtatgtgaaacaacagacaattgaataagtatcttaaacataagttgtgatgcatcccatatgccacacaaagctaacatttgtatagttctttatattataagcatt

SEQ ID NO: 869017 - DNA, 711 bp, Homo sapiens
aatggaagaaggatcagatggaaagtgtacacagtaggaagtgcagtgaacatatccttatctttcaacgttcacattaatgagttcattcatccatgaatcctttctgaccacatccccaatctcagggagaattgtgcacaccctcattggtacattcacagtaatatgtatcaacctttatcataaaatctgaaacactctattgaatatattagtttatatgtctctctcccaaatatattgtaaatctttagggacatgagaatagccagagaaacaggaaaaaagccagaagaggttctggtaatagaagtctgggaaatacagagttcttagaagtacacagagaggctaagtgatataagaaccataatgtagctagtggttttggcaacagtatacagtatagttacagtatagcagggcagttggcaaccagactgaaatgacacaaggaatgaatggaaattcagaaagtggatttagaaacttgggcttagctataaaggcaaggagctacaagatagttgctagagacagatataaggttcattcattgatctaaaaaatgtkactgagtaactgctatgtgccagttacaacgttggagacaggataataaacaagatgtagattctcttgaccttcattgagtttacattctagtggggttaaaagttttgacagtcatgttcatagccacatcac

SEQ ID NO: 869018 - DNA, 645 bp, Homo sapiens
gtgaaacatgaacaagtatgagaggttaacccttggcatgtggttccagggtgtgggggtgatatggttaggctttttgtccccacccaaacctcatattgaattgtaatccccaggtgttgagggagagacctggtgggaggtgattgaatcatgggggcacgaggttctcatgatagtgagtgagttctcacaagatctgatggtttaaaagtgttyggtagctccctgctttcactctgtctctcctgctgccatgtaagaaggtacttgcttctccttcattttctgccatgattgtaggtttccagaggcttccccagccatgcagaactgtgagtctattaaacctcttttgtttataaattaccccatcttgggtatttctttatagcagtatgaaaatggactaatacagtaaattggtacctcagagagtggggtactgctatgaagatacttgaaaatgtgggagtgactttggaactgggtaacagaaagaggttggaacagcttggaaggctcagaagaagacaggaagatgtgggaaagtttagaacttcccagagacttgttgaatggttttgactaaaatgctgatagtgatatcgataatgaagtccaggctgaggtggtctcagatgg

SEQ ID NO: 869019 - DNA, 645 bp, Homo sapiens
gtgaaacatgaacaagtatgagaggttaacccttggcatgtggttccagggtgtgggggtgatatggttaggctttttgtccccacccaaacctcatattgaattgtaatccccaggtgttgagggagagacctggtgggaggtgattgaatcatgggggcacgaggttctcatgatagtgagtgagttctcacaagatctgatggtttaaaagtgttcggtagctccctgctttcaytctgtctctcctgctgccatgtaagaaggtacttgcttctccttcattttctgccatgattgtaggtttccagaggcttccccagccatgcagaactgtgagtctattaaacctcttttgtttataaattaccccatcttgggtatttctttatagcagtatgaaaatggactaatacagtaaattggtacctcagagagtggggtactgctatgaagatacttgaaaatgtgggagtgactttggaactgggtaacagaaagaggttggaacagcttggaaggctcagaagaagacaggaagatgtgggaaagtttagaacttcccagagacttgttgaatggttttgactaaaatgctgatagtgatatcgataatgaagtccaggctgaggtggtctcagatgg

SEQ ID NO: 869020 - DNA, 608 bp, Homo sapiens
gaaaagaccaagaagtatatgttctgaattctaataaaaatggaagaaaatacaattattaaaaatcaccgggagccaagatggctgaataggaacagctccagtctacagctcccagcgtgagtgacgcagaagatgagtgatttctgcatttccaactgaggtaccagattcatctcactggggagtgtcggaaagtgggtgcaggacagtgggtgcagtgcatcgagcgtgagccgaagcagggcgaagcatcgcctcactcgggaagtgcaaggtgtcagggaattccctttcctagtcaaagaaaggagtgacagatggcatctggaaaattgggtcactcccaccctaatactgcacttttccaatggtcttagcaaacggcacaccagaagattatatcctgagcatggctcrgagggtcctatgcccacggagtcttgctgattgctagcacagcagtctgagatcaaactgcaaggtggcagcgaggctgggggaggggtgcccaccattgctgaggcttgagtaggtaaacaacgtagccgggaagctcgaactgggtggagcccaccgcagctcaaggaggcctgcctgcctctgta

SEQ ID NO: 869021 - DNA, 610 bp, Homo sapiens
cggggccgccccgccgggagcgccgctgtccacgctggtggcgttgcggggcgcgcaggtcggggtacagcgggagccggtcggcccatggacgcagcgcaggccgcacacgaccggggtgaagcgcacgcggagacgctctccgagccggcccagtccaggctgcggccctagctgcgccagcagcaccaatagcgacacccagagcagccgcacgccgcccgccatggctgcagcgccgcgctccgccgcgccgccgccccagcccgcccgaggggcccggccgcacccgcccgcccgcccgcgggggaggkcgcccgcgcccccgctcaggccccccctcctcaccactccctccccggcggccgcgcgggggcgcgtggggctgggcgcttagccagaggctcgcaggctgggcgctagactcgcaggggtgagcggggcgccccctctgtccccatccgcgcaccaacaagtggaccgggcctgtaggggagcggcggggaagggaacaggtgggggcgggcgggtttccccccagacagagctgaatccataaagaggaaatccattaagagtagtgggggccacatttggggagacagctaag

SEQ ID NO: 869022 - DNA, 610 bp, Homo sapiens
cggggccgccccgccgggagcgccgctgtccacgctggtggcgttgcggggcgcgcaggtcggggtacagcgggagccggtcggcccatggacgcagcgcaggccgcacacgaccggggtgaagcgcacgcggagacgctctccgagccggcccagtccaggctgcggccctagctgcgccagcagcaccaatagcgacacccagagcagccgcacgccgcccgccatggctgcagcgccgcgctccgccgcgccgccgccccagcccgcccgaggggcccggccgcacccgcccgcccgcccgcgggggaggtcgsccgcgcccccgctcaggccccccctcctcaccactccctccccggcggccgcgcgggggcgcgtggggctgggcgcttagccagaggctcgcaggctgggcgctagactcgcaggggtgagcggggcgccccctctgtccccatccgcgcaccaacaagtggaccgggcctgtaggggagcggcggggaagggaacaggtgggggcgggcgggtttccccccagacagagctgaatccataaagaggaaatccattaagagtagtgggggccacatttggggagacagctaag

SEQ ID NO: 869023 - DNA, 663 bp, Homo sapiens
cagatgcctgaatgctattattgttgatttgagttcatgctagctgcagtccaccacctctgatgcttagtatttgctctctcttctctgtgctcacaagatttaacatcaatacttgtgatcaccatttatatattccctggaatttgaattactctttttctatttatagtttgttttcctttcccagaccaaatgacccttagtttttaaaaacaaatttttttcttttctacaatacctgcttggattaaaattttaacaaatttagatcaataaataaaaattacctatagtctcatctctacataacattttagtgtatgtcctttcatgttttgtttaattacaatgtatgactattttacctttagyagctatgatggttatagtaaaaatacacccagatagggatcagaaaaagtctaagatgaaacatttagaagtggagacacatcagctaggacatcaatgcagtggtcctgagtatctatgggcaaacatagatgcttcctaaaaagtcaggagaaaagagcatcaaaagacaagtgtcactgtgtcccctggtgtctgccattattggagtcacagaaacagatgtgcccttgtagaatgagggttctttcattgggatatgagggaaacaaccaaagtacagtgact

SEQ ID NO: 869024 - DNA, 690 bp, Homo sapiens
ttgaaataaaaggagagaatgggagaatataatcagagaagactgtattaaaggacgattcttccccacagggagaaggcatatttgatttagtaacaattcctcttggattttgctgcatttgcttcctttgttcacgagaatctagcagttttaggtaccattgagtccygtgtttcagttggtaaatgaggcctgttttcttagaaagttgtatgctaacagtaaaaaaaagggggaggggcattgtacaatactttcccttgcttttataagaaaatcactatcacaattaggcatttcctctacactcaatctgtacaaaatcgattttatttctcacattgtattgtcattttcatgtaaatgttcgtatcctccattatcctgtaagtgcctcatgggcacatacaatgtctctctcattccttgtttacttaaaaaaaggtttgcaaatctaatatttggacatggttaacaaaaattagtacaaaagtatatacaataaaaaaacaactttccttctcactacagaatgaccgtcctttagccagaagaaattaccattggttttcgtgtgcatgttcttcaagaaatgttctgtgcatataaaatgtttataacatggtggtatgttacatgatctttcctgaacactgtttatttccctttaacagtatttttttgcct

SEQ ID NO: 869025 - DNA, 655 bp, Homo sapiens
gaatgctgcaatataaaacatttatcagtttctcaactatcctcatttcctgcgtagaattcagcattctttgttctgttaattctgttaccacttgaccatctgttttccagctcccaatatttcattgatttgttacatgttcctctgtcctgcttgcctccttaattttatgcttctctttctttttaattatgttttccttagtcgttttagtgaaattttagarggagtgaaattatatgcacatattaaactcacagcttgaacctggaatctcttctttcttttaatctcatgaagaaggagaatcagtaatttccctataaatgaacagacagtaaataatttagcctttgccagacaatgagactctgtcacaactcctcatgtctgcctttgggctttgaaagcagccatagacaatgcatcaatgaatgagcacagttgtgttccaacaaaactttatttacaaaagcaagtgttgtgctagatttgatcagcaagccataaagatttccctgtactgtagctttaagaactaatcattaattatctcaacaaatattttcccccacatctttcttccttaatagacattaaactctatgaaaacagggactctaatttctctgtctctctttccctctctctc

SEQ ID NO: 869026 - DNA, 632 bp, Homo sapiens
ggtgaaggaaaaatatttgaagggttcagatctatttttacaaatcaagccacaaagagtgaatttggagctgagaagtggcaaccaggaccatggacagtgcaatggaagtagactttgggtgggcactatcagactgtttagattaaattgctgagtctgacatcgaagaaactcagctaggagyttgccgtgttgacacaggcatgatgttaaggctgtgcaccaaagtggtatcagtagaattaaaaagaagggtgatatttcaaaggaaaaacagaatttttcttccagtttattacctcaattttaaaaatctaaaaagtagagggatccaaaaacaaatgagagaaagagaaccactcttcctgtactcagaagcactgagtaagccatcatgcggatagataaacatctgggtccattgagaaccagaacacttcctctcaggaaaaccaggtcactcctttcaaaatgaggggcagaatgggcaaggaaagggccacaagtaataatggacacattggatttagaaaaatccagggatctaagagcatccaaggaaagaggactgaggaattttgtcaagaatgagagagaactaaatgtaggaaatcaatctaagacttaag

SEQ ID NO: 869027 - DNA, 632 bp, Homo sapiens
ttctattgtagcaacagaaaacagactaggacaatatgtactttcacatacatcgttcaacttcattcttaaaacagcccacattatcacctcaattttgcagaagacgctgaagctgagtcatgacatgcccagtatcttgacatttctacaaggccaagacaggacattgaacccatgccttctgtctcccaatctaacattctttctgttctattatattctctatcatcttgcattcatagaatatctgactgtgctaaaggttctttaaattatgttgycctatgtctaattcatttgtattttgcttaaatctcatacctggagtaaagtagcccttgggaactgtggttttcattattattttgttaattagaaatataagacaaagggttatcttcctcgactttaaaagttagaactggactaggtaatgtctagcactgttttaattccagcattctgaaatctgctattacattagatcaaacttcatttttttagtcttccaaaaacacaataattacaagtaatggtgttcatgccaaattcattagagtttgaaaacagagctatatttcagctctttggaggccaaaaatgaactttgatatttttgcaagtgtgaa

SEQ ID NO: 869028 - DNA, 645 bp, Homo sapiens
ggattttctaatggattggatattgtgtgtcggataaaaagaagtcaagaatatcaccaaaatcttggatgtgggtaactggaaggttggaattaccctcaattgagacagggaagaatgagaagaaagcaggttaggatattaactgttgtctctcagccccgcacttgcccttctatactcttgtcagtacttctggggataggagtctgcaaactgcatttcccaggctcccttgcaatttggcttcttgttaggagtcactactgggagatcagaaggtgacaggaaaagaaagtcttcctacttctggggtaatgtggtagttaccagtagttgctaacatgaaggtgggtaggggtgattccataagccaacagcccaggcaggggcggcagatttctggcagcttcagcactgatcctgaagatgcagacctgacacaacagcatctccagcatggcaagctkgtgagctccagtgtgggagtgcatgcagcttctgacctctgggtattgttccttcttcctttattacttccagacctcctccattttcccttttgcacttccagctcttccaacacctatgaaacttcccggtattgaaatgcacagtgttgttgttgttgttgttgttgttgtt

SEQ ID NO: 869029 - DNA, 572 bp, Homo sapiens
atcgataagaaatcattgatttttctaagctctgaagtacagaaatccaaggttggacttttcaattatgaagtaattatgttagttaacactgtcatgagcctaagtgttcttgccaactaacgtagaaaattgtagtacttaattactgaattgagacttcacaacacttggaaagatattaaatgtacctaagttttccgtctctctttattattactcaaatatacattcatcatgattttcaatgtctacttttaattgagaaatgagaatccttatcctcaaaaacattccagaaartgtagtggtttttctaaatcctgtcttctatatcaatatgctataaaacgtgagctgaaaactgacattagcaaacaactttctaaaactatgctgtcctgggtggtagccaccagccacatgtggctatttaaattcaaattaatttgattaatttgctagaggccatgatatgggacagcacagatcactgaacatcttcatcattacacaaagttctattgggcagccctgttctaagaagcagactcaacatgcaataagtagaa

SEQ ID NO: 869030 - DNA, 591 bp, Homo sapiens
cttcctttttgctactgtttttatattttgtacctcttttatattataaatgctataaggtattattatttttgctatttcaaacagccattatttcattgttctggctttattgaggaataattgacataaattgtctatttttttaaaaaactctgttaaataagtagtaatataaataaatgtaaacataacaggataaataaaatcacagtgtagcaagaaagaacagagggaacatttatccaaatagagcatttctcatttatagacattcgttctgtttttccactcaagcttcactaaaatattcttttccaagcaaaaagaaaaayaactttcttctgttccttttgtactagtcacctcagatttggttctaggaaaaggatctccctgttgatgaaagaatgatttattttccagttcgtgaaatgaaactcttgccaggactctaccagcaaggcagttcacacagcaaaatctctgaccaggcttccagcaagcccctgttgctccctcccactgttgggagatttacatggtcaggctgaagttcacagagccaagttcttagacacctgaacaggg

SEQ ID NO: 869031 - DNA, 584 bp, Homo sapiens
ctggtgaagaaagttgcctttcccaaggccttatctgcttcctggggtgacccagagatatgacatgggtgtataaaaggctcagtgttctctcaccccaactctggaaagctctgaacggtcattccctcttcacaactctcaagagaggtagctgaggtttcaactgagatgaaattacaattcaactcctccatctaccccagaatgctyctttcccctccataggagttgatcctatgagctctctctaataaacctcctgcatgctaagttccatttcagattctgcctccccagaagcccaacctgtgacaattggtactggaagtggtctgaaaaagcagatgataagatgagatttgcagctggaccaaccactactcaaatggtaattaggacactgtcactggtggtaggtgaaccacagagagccctggcaatgactgcaaacttcactggtggtgagctggcttggtgtaagagcataaaggaatacgttaggcctggctatgaaatgctgagctcttaaaaacagggcaaataaaaagtaactatgaagacaatggaattgggtgcctatt

SEQ ID NO: 869032 - DNA, 584 bp, Homo sapiens
ctggtgaagaaagttgcctttcccaaggccttatctgcttcctggggtgacccagagatatgacatgggtgtataaaaggctcagtgttctctcaccccaactctggaaagctctgaacggtcattccctcttcacaactctcaagagaggtagctgaggtttcaactgagatgaaattacaattcaactcctccatctaccccagaatgcttctttcccctccataggagttgatcctatgagctctctctaataaacctcctgcatgctaagttccatttcagattctgcctccccagaagcccaacctgtgacaaytggtactggaagtggtctgaaaaagcagatgataagatgagatttgcagctggaccaaccactactcaaatggtaattaggacactgtcactggtggtaggtgaaccacagagagccctggcaatgactgcaaacttcactggtggtgagctggcttggtgtaagagcataaaggaatacgttaggcctggctatgaaatgctgagctcttaaaaacagggcaaataaaaagtaactatgaagacaatggaattgggtgcctatt

SEQ ID NO: 869033 - DNA, 652 bp, Homo sapiens
agtaggaactgttcacatgaagaacagaatgccggaagtaacaggctgtatagacagctggagaagcagcactgtatcactaggctgagatcaaatgaccttctctcttcccaagagagagacaaattcccttccttcttcatgcagaattcttcttctctctttcgtaaagccttggtgtcagtacctctaggctgtggggatccactattttttgcttcttccctaagggaaattctgctgtcagctattaaaatagtaataatgtgttttacaccagtcctcctctttactgtctcttaccactttttcatccaagtcaggtttgcatcagatgtagtgggggaaatcctccagcgccggcaatcagcatgctcaggccatgccatggactagagagaagccaaggtatactagaatggtcacaaggcctttgaaagcctgtagtcattctgcctttttaagtgaaaaaggctacaaatggcaattatctgccgaagttgctataatgtttacractgccactgagtgaaaccaagctagctgcttttgccacagctgatttgaccagaggcttatgctcaatgaaaggcaagtgtgaatgggctacaggtaagaggcaagccagtctcccaagaagggatgtacatga

SEQ ID NO: 869034 - DNA, 674 bp, Homo sapiens
cttcggaaatcctcttccagcttgaacttcttcagttgcttcagataccttcctgacctctgcaattcccagtttagagaaaatttcccgtatagcacagagcataaacctccttccaagagagagttctgagctatgcaaaactctgcagagggtgtgcctggcctcaggtgtttgtcattaatctcagggccccacttgctagaatcccgaccccaagcctatcggcctgaccaaatatgcttcgtccaacagcctcatgcagcggtccatctatggagggctctggctggtcttccagaagaaacaaggttcaatgatcaagatcatgaaagtggcaggccctaagtaagccccattccaggctcttccaaaggacctggaataaacacccttaattcatttcctccaacrtgagattcccaagctcactaatgcagaagccatgaatgtcttcagagtttctcagttacagtgcacagtcctgaggtctgttggtgggcactgaggcttgggtactaggctccaggcccccccgtgggaggtgctgcaatgggcaggatgccaaacacaaaagtgcacccagagacatggggtgactctcacgctaggcgtgaatagggtcagtgcctggggcttcctggaattgtgcttttcactgggccatttatgct

SEQ ID NO: 869035 - DNA, 651 bp, Homo sapiens
tttacacaggtcatctggttatagccaatttattaggcacaccagtttggaaagcaggtagtatgtaactggaggctctcgccgagcacctggacagttgtgtgtagctgggccacagttctaaatgcaaagtcgagttttccaactactcctaggaatctctactttcatgtaaattgcacaagaataatgaaactgtttcttgtaagttgggtcattctggtggtgtcrgctcacagcagaggtattacttatcctttagtaactcaatttcctggtcccacaagtgtcctgttacaagctatggacataagaggactaactgcaagtataactctcagaaaccacagagctgtgggtttcaacaccaattgctagaggttttcagcacatttacagagaaagagacaataagtttggtgtcaatttaaccagactgtttccatttccattcaaaagctggtgaaacacaatgaaataaccaacacagtacagcaatctgggtattataaagataaatagaacacaaatgtacatactcacacatacacacaaagaagtcatgttggtttatgccaaatctcatcttaaattgcactgcattggagagatgtatgtaattagttaagttacacattatttaactggaac

SEQ ID NO: 869036 - DNA, 591 bp, Homo sapiens
cttttgtcactctgggtgtctcaagagcatccctagaagacgtattcggaaggggtagaaccagcaagcttttgtcacccattgtattttgggtttgtttataatcagaaaacaaaagacttaacagaattcttaaactaagmgcagacctttgtcacatatccagtgcccacgatagaagtcagatttatagaatcctgattgctgcctaattcatagacaaattcaaagttcagttatcagagaagtgagaaatgcttattgaggaagcagtcatagtgtctctcaactcttgtctctttgtcttgtatttctgggcagaaattgtgcaattcatgagaaacagagccctcaaatgtttacaagttctaattaaatttgacaaagttggtttgcttttcttttaacttaattagcatgagttccgtaaaatggagcaaaatacaaaataaattctaggaaaaacaaacacacatatttgtttacaaaaagtgaaactatccatacaaagaagcggtgtggaaaggctgccagttgaaacaatgtagctaatataatctaatcttgccccacgagatattcagaaattct

SEQ ID NO: 869037 - DNA, 628 bp, Homo sapiens
atacatgttttctgtaaaatggagtcaaatacaaggaaacggcatatataccctggaggcagtcccacctggacttaaatcgagcacagccctttaaaagctgcatgtcctggccaagttgttacctctcctaattctccattttcttccctgtacagtgagaatcagtaactaccttatgaggatgatgttaggagaattaaatgagatatcaagggggcaggtgcagtggctcacacctgtaatcccagcaatttgggaggccaaggtgggcagatcacttgaggtcaggattcgagaccagcctgcccaacatggtgaaaccctgtctctactaaaaacacaaaaattagccaggcatggtggcgtgcmcctgtaatcccagctactagggaggctgaggcaggagaatcgcttgaacccaggaggcagaggttgcagtgagctgagatcgcgccactgcactccagcctgggtgacagagtgagactccacttcaaaaaaaaaaaaaaaagatatcaagggccctgagcagtgtagctggttatagcaagaactggataaatgtttgccttatggttatcacagtttattacctttagcttattattacatacattattaatat

SEQ ID NO: 869038 - DNA, 626 bp, Homo sapiens
attcaattatctcccacagggtccccgctatcacacatggggattatgggaactacaattcaagatgagatttgagtggggacaccaccaaaccataccattctattccaggcccctctcagatctcatatcctcacattttagagcacagtcatgcatttccagcagtccccccagagtcttagctgatttcagcattaacccaaaagtccaagtccaaagtctcatctgtgacaaggcaaatcccttccaactatgagcctgtaaaatcaaacgcaagttagttacttcctagatacaatgaaagtacaggcattgggtaaataccccctctccaaatgggagaaattgcccaaaacaaargggccataggccccatacaagtccaaaatccaatagggcagtcattaaaccttaaagttcccaaatgatttcttttgactccacgtctttgatggagaaattcagttttggaaagaattgccagagaagtttcaggaagatgaggcttgaaataaaagtgaagacatgctgatgcaagaggtggtttcccatgactttgtgcaactctgctcctgcagctatgcagggtacatcccccctgtcagcttctttcacaagctggc

SEQ ID NO: 869039 - DNA, 569 bp, Homo sapiens
ctgactatttagtcttcatgacttttttaggggttaaagatcattgtccatgtcaattcagaaaaggcaaacaggaaatcaatgccatgttaataactacaagggtcaccctgggtgaaaataagtcattcttcttatgttattggtctacatctgttatgggaattgctgttctttcgttctagatttataggaaatgtggagtatcagtaagccagatgttaagataaccagcttcataatctattccatatgctaattgtttcacaaacctactcatttctacgatcaggtgagtcaaaatctttctggcacagtattgatgaaaagcatatcccatgtgttgtacattacacaattggcatcgacaccatagagataaggtccatccctctttcccttcccctaccttcctttacagaattaagaatyggccacagccagaaggtggatactccatgggctccatcaattcctgcaggtgcatttctaaaccaggccacaggtgacagtcagtcttttcctgccattctacataactacctgtttcttcttcacggccctcagtg

SEQ ID NO: 869040 - DNA, 628 bp, Homo sapiens
cagatctccagctgcgtgctgggagaaccactgctctcttcaaagctgtcagacagggacatttaagtctgcagaggttactgctgtctttttgtttgtctgtgccctgcccccagaggtggagcctacagaggcaggcaggcctccttgagctgtggtgggctccaaacagttcgagcttccgggctgctttgtttacctaagcaagcctgggcaatggtgggcgcccctcccccagcctcgctgctgccttrcagtttgatctcagactgctgtgctagcaatcagtgagactccatgggcataggaccctccgagccatgtgcgggatataatctcctggtgcgccgttttttaagcccgtcggaaaaccgcagtattcgggtggaagtgacccgattctccaggtgccgtctgtcaccactttctttgactaggaaagggaactccctgaccccttgcgcttcccgagtgaggcaatgcctcgccctgctttggctcgtgcacagtgcatgcacccactgacctgcgcccactgtctggcactccctagtaagatgaacccagcacctcagatggaaatgcagaaatcacccgtcttctccgtcactcatgctgggagctgtag

SEQ ID NO: 869041 - DNA, 639 bp, Homo sapiens
taagctaattcctattggctattttaaagagagcaagggtatgacccagagtggcggggtgagcagtttggcaggaaagacggttatagaacaggtaactgaaggtgacttaggtcagagcaggtgaccaggatgagttaggatggagctggtgacccgggaaacagatgtgaactactgattaaaactggtggaaaaggttgtttactcaaactacgaggaagttaaacttcaaaatggaggacaaagaactgaacattctgacatactgattstttgaagagaaatttagaactcactatatccatcatgcccaatcctgctcctctccccacccccacaccaaccagatggggcttctccaccttcattgatttacacattgtgattccatatcaaaaatcttagtttaagaaagggttccagtgcctaaaaagtagtatatttgaaaatctctcatctaatctaattatctcatttaataggttaaaaaaattgaggcctaagaagggaaaagtcacccaggcagtgagtgaaggagccaggcctgcccactaactacatccaatcactcttgcgtcaactgtcctttactaaccacacccaatcactcttgcatcaaccgtcctttaacttgcc

SEQ ID NO: 869042 - DNA, 517 bp, Homo sapiens
tcagaactaaactggattagccttaaaggctattcgatttctacttgccttttataactggcaaatagattcctccagaggacaaaatcagagggaagaatgttcattttatccttatggccttatctcaacaagacagatcaaaggatctggtacctactgctctcttctagtgtggagattctcttcaagagagttccctgtgtacttagcccaagcactcctttctgtgagatggagaaaamtaaggaactaaaagcattatattgattttctctgttacattttttttccagataaactttgctttgcacttatgctgtgtgtcatgcttatgcttgttcctgaccttaatacccagactttcagttagcaaaaccagtatgacttccaaaatatgttttttcaaaaatcctaattttgctattatgacctctacaattaagtctttctttctgtgatctgatgccagctattcctccttcctttaggccctgccattgactccacacttctt

SEQ ID NO: 869043 - DNA, 707 bp, Homo sapiens
atatgtggccagcacaacataaatatttattccgtggccattttcagaaagtgtttgtctggaagctaagaataaaagaaacataagataagttagattctttcaggtgctctctgtctagataaagagtcgggaaaaaaaaaaacacatgaaaaacatataaatacagtgagataagtgtaataaaagacacaagtaggggggctatggaaacctgagttacctggggatgatttctgaaaggtatccaagcaaaagtgacacttaaatttaatcttaaaacttattgtgtgaactatttactctcaattttttataaatatgcatttctctttaaacgaatgattagttgtgtgtggctttttttccattgtaagattcagtctgtcatagtgtgaaacaagtgacttttccaagaacttgcttttgccttaacagtcacttatttcattcttttyggctgagatacaatattcattgtgtgaatacaccacattttgcttatgcggctgagacacaatattccctgtgtgaataaaatgtagtttgaagggtgtttggtttcaggtttttgctctcctgagctgttgttacatgtctcccttggtacttacgtaatcatttattgtagatataaaacttggaatacagtttatgcaccacagtttttcaagtatacctctttacaaacttttttcagaattata

SEQ ID NO: 869044 - DNA, 707 bp, Homo sapiens
atatgtggccagcacaacataaatatttattccgtggccattttcagaaagtgtttgtctggaagctaagaataaaagaaacataagataagttagattctttcaggtgctctctgtctagataaagagtcgggaaaaaaaaaaacacatgaaaaacatataaatacagtgagataagtgtaataaaagacacaagtaggggggctatggaaacctgagttacctggggatgatttctgaaaggtatccaagcaaaagtgacacttaaatttaatcttaaaacttattgtgtgaactatttactctcaattttttataaatatgcatttctctttaaacgaatgattagttgtgtgtggctttttttccattgtaagattcagtctgtcatagtgtgaaacaagtgacttttccaagaacttgcttttgccttaacagtcacttatttcattctttttggctgagatacaatattcattgtgtgaatacaccacattttgcttatgcggctgagacacaatattccctgtgtgrataaaatgtagtttgaagggtgtttggtttcaggtttttgctctcctgagctgttgttacatgtctcccttggtacttacgtaatcatttattgtagatataaaacttggaatacagtttatgcaccacagtttttcaagtatacctctttacaaacttttttcagaattata

SEQ ID NO: 869045 - DNA, 600 bp, Homo sapiens
caacgatgtccaaaaagaaaatcattgtatgtttatacatgcaataatggtttagcctactgttcccaggctacaacctgtagagaatgttaatgtactgaatactgtaggcaactgtaatacaatgataggtatttgtgtatttaaatatatgtaagcatacaaaggcacagtaaggatacagtataaaagacaaaaaaaaaaaaaggtacattttcatagtgcattctactaagccagtcttgctttgctataaagaaataccgaagactgggtaattgatatagaaaagaggtttaattgactcacagcttcttcgggctgtgcaagcatggtgctgccatagcttggtttytggggaggctttggggagcttttattcagggaagaaggagaacccggagcttgtgcattacatggtgaaagcaggagcaagagagagagtagtaggtgggggaggtgtcacacacttttaaatgacgagatcccatgtgaactcagagcaagagctcacttaccatcaccgggggaatggcacaagccattcatgagggatctgcccccacgatccaaatacctcccaccaggccccacctccaa

SEQ ID NO: 869046 - DNA, 649 bp, Homo sapiens
actttaagctccttaatgatacagatagtatcttctattggttttgtcttcatagtagtattcatgacagttgtgggcatgtagatgttgagaaataaaatggtttaagtggttatgtaggaagatggaaaatgcatccccataactgggagtggaacgtgatccttcatacaggtcccagaatctcccctcatatcctccaggaaatggaactctaagaacwgaggatcaactcacatatctagtctgacataaagctaatagggcatcatgcaattccctattcattgatattccttgaggggtgaaaagcatgtatggttgcactgtatccctacctctacatttgtatataattcactaatttttcatatttcatgcctgtccttgtccccgctcccatggatctcaaaatctaaaataaacatgcagcttctctcaaaaaggctagtgcaggggctatctcctggaagcaacattttggttatgtttcttaaagggttttttgtttgttttcagacagagtctcactctgtcgcccaggcagaagtgcagtggcacaaacacagctcactgcagcctcgacctcccgggctcaagcggtcctcccacctccaccttcccagtagctaggactatagatgcatgc

SEQ ID NO: 869047 - DNA, 614 bp, Homo sapiens
tttcccatgaagatccactttaccttaaaattaatcaccaagttctgttagctctcattcctttctttcccacttatcctctccattttattgccactaacaagactagattatgccttttaattgcatatctaggctattgcaaccatcttataacctgtacttccagcatctccccttccaccattgccactgttcccttgtgtgaatctaacaaattttgtttagcttaaatttgccttaggctttatggcctccagtgcttttatcagatggcttttcacctctgctcttaaggtcataccccctctctccagtaagctcttccattatatctggatgccaaaattcttgggaagagtgtttgaacactcttgcastgaaatatcatgaacttaaagacctttgatttgaaaagtggttcttgggtggagccaagatggccaaataggaacagctccagtctacagctcccagcgtgagccatgcagaagacgggtgacttctccatctccaagtgaggtaccgggttcatctcacaggggagtgtcagaaagtgggtacaggagagtgggtgcagtgcaccaagcgtgagccgaagcagggcaaggcat

SEQ ID NO: 869048 - DNA, 623 bp, Homo sapiens
ttagagacttgttggatggctttgacaaaaatgctgatagtgatatggaccatgctgaggtccatgctaaggtggtctcagatggagatgtgaaacttgttgggaacgggagcaaaggtgactcttgttatcttttagcaaagagactggcagcatttttccccttccctagagatttgtggaactttgaacttgagatgatttagggtatctggcagaagaaatttctagrtagcaaaacattcaaaaggtgacttgggtgctggtaacggcattcagttttataagggaagcagagcaaaaaagtttggaaaatttgcagcctgacaatgtgatagaaaagaaaaacccattttctgaggagaaattcaagctgactgcagaaatttgcataagtaaggaggagcccattgttaatccccaagataatggggacaatgtctccagtgcatgtcagaggtcttcatggcaaccctctcatcacaggcctggaggcctaggaggaaaaagtggtttcatgggccatgcccagagtccccaagctgtgtgcagcctagggacttggtgccctgtgtcccagctgcactagccatggctgaaaggggccaacgtagagttcaaac

SEQ ID NO: 869049 - DNA, 653 bp, Homo sapiens
ttgcaacctaacaaaaatactaaataattttctagaacattctttatgggtatgcaattaataattttcactcaaagttatctttctctgaatttagaaatacagtcctgtcttctggcttttatttctcatagaagctatactgtatttgttctccttatatatacaacataaaaaagaactttgaagatccagtkgtgcacttattataatctggtacctgtctatttggtgctgtttcattcttttttttttttttttgagacagagtttcgctctagtcacccaggctggagtgcagtggcgtgatcgcggctcactgcaacctctgcctcccaggtttaagtgatcctcctgcctcagtgtcccgggttcaagtgatcctcctgcctcaacctcctaggtagctgggattacaggcgcccaccaccacacctggctaatttttttcatttttaataaagatgaggtttcaccacgttggccaggctggtcacaaatcctgaccttagttaatccacctgcctcagcttcccaaagtgctgggattagaggcatgagccaccacgtccggccataatagtctcacagtaaagaaaagttgaggacctattggcttcactgctgaattctactaagaagaactaatacca

SEQ ID NO: 869050 - DNA, 416 bp, Homo sapiens
gcatgtccataaaattgctaatgatattaatataattatatatgcatatatatatgcacatatatgcatatatgcatttttctaatgcgagtgtggttgtactgtgtaaactttggtatactattagaaggcatataagtttgtgaaattcttctagattgcaatttgagaccgtgagtcaatatccataacatgttcctaccatcctgccattgaacacagtatttccactgcttggaatctcttacaaacytaacatggcatacaaaacaatttatacctgcagatgttcactgagacattatttgcaaaaaaaaattaagattaaaacaacgtgtatgtttaatgacaataaggtggtaaaataatacatgacatctctatgtgtttataggatgtattttatacattttatg

SEQ ID NO: 869051 - DNA, 536 bp, Homo sapiens
gtctctgcacgtgagatgggtttcctgaacacagcacactgatgggtcttgactctttatccaattttccagtctgtgtcttttaattggagcatttagcccatttacatttaaggttaatattgttatgcgtgaatttgatcctgtcattatgacgttagctgtaatccagcatataaacagaaccaaagacaaaaaccacatgattatctcaatagatgcagaaaaggcctttgataaaattcaacagcccttcatgctaaaaactctcaataaactaggtattgatggaacrtatctcaaaataattagagctatttatgacaaacccacagccaatatcatactgaatgggcaaaaactggaagcattccctttgacaactggcacaagacagggatgccctctctcaccactcctattcaacgtagtgttggaagttctggccagggcaatcaggcaggagaaagaaataaagggtattccattaggaaaagaggaagtcaaattgtccctgtttgcagatgacatgattg

SEQ ID NO: 869052 - DNA, 542 bp, Homo sapiens
ctgcagagcagcaaatattgctgaacagcaaatgttgctgcctgatcattcctctggaagcttcgtctcaggggtacccagctgtgtgaggtgtcagtctacccctactggggggtccctctcagataggctactcgggggtcagggacccacttgaggaggcagtctgttcgtcctcagatctcaaactccgtgttgggagaaccactactctcttcaaagctgcagacagggacatttaaatctgcagaggtttctgctgtcttttgttctgctataccctgcccccagaggtggagtctacagaggcaggcrggcctccttgagctgcggtgggctccacccagttcaagcttccccaccactttgtttacctactcaagcctcagcaatggcgggcgcccctcccccagcctagcagcccccttgcagttagatctcagactgctgtgctagcaatgagtgcagctccttgggcatgggaccctctgagccaggcatgggatataatctcccggtgtgccatttgctaagacccttgg

SEQ ID NO: 869053 - DNA, 685 bp, Homo sapiens
tatactgttcaggggttgagtgcactaaaatctctcacaaagcaccactaaagaacttacgtgaccaaataccacctgtttcccccaaaaacctatagaaatagaaaaaaaaatattgggtgaatcacctgagttcaggagtttgagaccagcctggccaacatggtgaaactctgtctttactgaaaatgcaaaaattagccaggcatggtggcatgtacctgtaatccaacctactcgggaggctgagacagaattgcttgaacccgggaggtgaagtttgcagtgagccgagattgtgccattgtagtccagcctgggtgacaagagtgagactcagtctctaaataaataaataaccacaaatgaataaaatatgaagaattaaatttttgctttagttctaagtgtttttttgacataccgtgctactacttcattgcaaagctagagaaataaagacatggggttaataattttcttttgatttctaattttcatttttacagaaaggcatgaaaatctttgaataaaatctaagacscaaagtgtagagattgtttacacacatgtaaaaggaaaatactaccacatacgtagagatggagaacataatttcattttctctgtaaatatcttgaagaatgtatattatttaaataatgaattctgcttactgattttt

SEQ ID NO: 869054 - DNA, 554 bp, Homo sapiens
agcctgacaggagagagtgccgggagtgtgacagggtggagggctctgcttctgggggagccacatgccttcctgacatctgtcttgggaggagaggctgtgcaaggcagctgatgcctggggcaggatgtcagtcgggcaccttctctccttcaattatccagcagctgataaaaaataaaataaaatgaagtttaaaatttgacatgattcactaagttagtcatcacaagtttgcatagaattcaattttggagcggttgcctggccctcctgggggggtgraattagattgtgcaccccaggaagcacatctatactctcagccgcctgggccccttgcaagctgcagttgtggagaaaggacccacaaggagggagcgatgccttccacttcctagagcttccaaatgtgtgcctagctgcaaggtgtaaggtggttacttctcagagtccatcaacttccatcactgggttttcgtgtttgattgtgtggcagctattattagtttaacaggtgaatgttccacagtgtcagtgtctacgctgttgct

SEQ ID NO: 869055 - DNA, 615 bp, Homo sapiens
tgtaattttaacgggagatcatagagttattgatcttcagtgatttctttagcatctgtgcttttaacagaatgtatcccaccgacccccacacctataggtatttcctgggcccgtgtgagaggtgggcccggacagatggtgagaggcagtggccgtgtgcatcctgaggtcacgttgcacaaagctgagccccacctggcaccagggtgccatccaattggacctctcttcctgctattctggagactccaaataaagcagaaaataatatttatggaaaatgtttcctcagaaatrttggcctctctggcaggttggtttctctcctgatgctagtgggagaatcgtctgatgccttttgagtgaaattagatagtggactatatgacgaagtggcttgcaaggaaaaccctattaattccttatttacaaagtgctgtgtggtgcaggggtacatatatataggctcttttccaacacctggcctcgttgggggccagtgtcagggcaaaagggatgaacaggtctgtgtccaaccaccatgcgccactgggtggggaaactatggttggagccacccgtaccccatttggctccttgttatatgagatc

SEQ ID NO: 869056 - DNA, 615 bp, Homo sapiens
tgtaattttaacgggagatcatagagttattgatcttcagtgatttctttagcatctgtgcttttaacagaatgtatcccaccgacccccacacctataggtatttcctgggcccgtgtgagaggtgggcccggacagatggtgagaggcagtggccgtgtgcatcctgaggtcacgttgcacaaagctgagccccacctggcaccagggtgccatccaattggacctctcttcctgctattctggagactccaaataaagcagaaaataatatttatggaaaatgtttcctcagaaatgttggcctctctggcaggttggtttctctcctgatgctagtgggagaatcgtctgatgccttttgagtgaaattagatagtggactatatgacraagtggcttgcaaggaaaaccctattaattccttatttacaaagtgctgtgtggtgcaggggtacatatatataggctcttttccaacacctggcctcgttgggggccagtgtcagggcaaaagggatgaacaggtctgtgtccaaccaccatgcgccactgggtggggaaactatggttggagccacccgtaccccatttggctccttgttatatgagatc

SEQ ID NO: 869057 - DNA, 587 bp, Homo sapiens
ctttatccagtatactattgatggacatttaggttgattccttgtctttgctattgtgaataatgctgcaatggacatacaaatgcatctgtccttataatagaaagatttacttttctttgagtgtatacccagtaatgggattgctgggtcaaatggtatttctgcmtctaggactttcaggaatcatcacgctgtcttcacaacagttgaactaatttacactctcaccaacagagtaaaagcattcctttttctccacagcctcaccagtatctgttgttttttgaccttttactaatagccattctgacgggtgtgagatggcatctcattgtggttttaatttgcatttctctaatgatcagtggtgttgagcttttattcatatgtttgtttgttggttgcatgtatgtcttcttttgagaagtgtctgttcatgtcctatacccactttttaatggggttgcttgtttttttcttgtaaatgtttttaacttccttatggatactgggtattagacctttgtcagacagatagtttgcaaaatattgtcccattctgtagcttgtccgtttactgtgtt

SEQ ID NO: 869058 - DNA, 587 bp, Homo sapiens
ctttatccagtatactattgatggacatttaggttgattccttgtctttgctattgtgaataatgctgcaatggacatacaaatgcatctgtccttataatagaaagatttacttttctttgagtgtatacccagtaatgggattgctgggtcaaatggtatttctgcctctaggactttcaggaatcatcacgctgtcttcacaacagttgaactaatttacactctcaccaacagagtaaaagcattcctttttctccacagcctcaccagtatctgttgttttttgaccttttactaatagccattctgacgggtgtgagatggcatctcattgtggttttaatttgcatttctctaatgatcagtggtgttgagcttttattcatatgtttgtttgttggttgcatgtatgtcttcttttgagaagtgtctgttcatgtcctatacccactttttaatggggttgcttgtttttttcttgtaaatgtttttaacttccttatggayactgggtattagacctttgtcagacagatagtttgcaaaatattgtcccattctgtagcttgtccgtttactgtgtt

SEQ ID NO: 869059 - DNA, 587 bp, Homo sapiens
ctttatccagtatactattgatggacatttaggttgattccttgtctttgctattgtgaataatgctgcaatggacatacaaatgcatctgtccttataatagaaagatttacttttctttgagtgtatacccagtaatgggattgctgggtcaaatggtatttctgcctctaggactttcaggaatcatcacgctgtcttcacaacagttgaactaatttacactctcaccaacagagtaaaagcattcctttttctccacagcctcaccagtatctgttgttttttgaccttttactaatagccattctgacgggtgtgagatggcatctcattgtggttttaatttgcatttctctaatgatcagtggtgttgagcttttattcatatgtttgtttgttggttgcatgtatgtcttcttttgagaagtgtctgttcatgtcctatacccactttttaatggggttgcttgtttttttcttgtaaatgtttttaacttccttatggatactgggtattagacytttgtcagacagatagtttgcaaaatattgtcccattctgtagcttgtccgtttactgtgtt

SEQ ID NO: 869060 - DNA, 510 bp, Homo sapiens
actttttaatggggttgcttgtttttttcttgtaaatgtttttaacttccttatggatactgggtattagacctttgtcagacagatagtttgcaaaatattgtcccattctgtagcttgtccgtttactgtgttgatagtttctcttgctgtgtggaagctctttagtttaattagatcccatttgtcatttttttatttcgttrcaattgcttttgacattttcatcatgaaatctttgcctgtgcctatatcctgaatggttttacctaggatttcttctgggattcttagttttgggttttaaatttaagtttttaatccatcttgagttgatttttgtatgtggtgtaaggaaggggtcctgtttcaatttcacacacatggatagccagttctcccagtgccatttattaaatagggaatctggctaggcatggtggctcatgccaggcaggattccgtatttaataaatcccagcactttgggaggcagaggtggatggatca

SEQ ID NO: 869061 - DNA, 546 bp, Homo sapiens
ggaaaaggtaaacgtatgaagacaataaaaagggattagggaaaaagagggatgaatagggattttaagcaatgaaactactctgtatgccactacaataaacttatctgactgactgtggttaaaatatctcacttttgcacatttttaagaacataagaccacgtgaatacacttctggagcccctcatggagcttggaggagctgagcgtatgcagtactctgaacgtggaggaacgttttctgcgataagagttgttgtgttcaattgcctctattaggaggaatttcaacagcataagacactggcttcattcctatctctatttccyttggatctaataacaaacctcactcagagtaatcactcagcaggagcttgccacaaaactaaaatctgatcctaggcaggttattaaagatgcagaattaaagctttaagttcccaaggactgtcattcttttcatatggctgcactataatgcacatgttacttaaataaactccctgagtttctccacaaggcatatcaccttagaataga

SEQ ID NO: 869062 - DNA, 719 bp, Homo sapiens
actataattctgaaaaaagtttgtaaagaggtatacttgaaaaactgtggtgcataaactgtattccaagttttatatctacaataaatgattacgtaagtaccaagggagacatgtaacaacagctcaggagagcaaaaacctgaaaccaaacacccttcaaactacattttatycacacagggaatattgtgtctcagccgcataagcaaaatgtggtgtattcacacaatgaatattgtatctcagccaaaaagaatgaaataagtgactgttaaggcaaaagcaagttcttggaaaagtcacttgtttcacactatgacagactgaatcttacaatggaaaaaaagccacacacaactaatcattcgtttaaagagaaatgcatatttataaaaaattgagagtaaatagttcacacaataagttttaagattaaatttaagtgtcacttttgcttggatacctttcagaaatcatccccaggtaactcaggtttccatagcccccctacttgtgtcttttattacacttatctcactgtatttatatgtttttcatgtgtttttttttttcccgactctttatctagacagagagcacctgaaagaatctaacttatcttatgtttcttttattcttagcttccagacaaacactttctgaaaatggccacggaataaatatttatgttgtgctggccacatatggtttatgtt

SEQ ID NO: 869063 - DNA, 719 bp, Homo sapiens
actataattctgaaaaaagtttgtaaagaggtatacttgaaaaactgtggtgcataaactgtattccaagttttatatctacaataaatgattacgtaagtaccaagggagacatgtaacaacagctcaggagagcaaaaacctgaaaccaaacacccttcaaactacattttattcacacagggaatattgtgtctcagccgcataagcaaaatgtggtgtattcacacaatgaatattgtatctcagccraaaagaatgaaataagtgactgttaaggcaaaagcaagttcttggaaaagtcacttgtttcacactatgacagactgaatcttacaatggaaaaaaagccacacacaactaatcattcgtttaaagagaaatgcatatttataaaaaattgagagtaaatagttcacacaataagttttaagattaaatttaagtgtcacttttgcttggatacctttcagaaatcatccccaggtaactcaggtttccatagcccccctacttgtgtcttttattacacttatctcactgtatttatatgtttttcatgtgtttttttttttcccgactctttatctagacagagagcacctgaaagaatctaacttatcttatgtttcttttattcttagcttccagacaaacactttctgaaaatggccacggaataaatatttatgttgtgctggccacatatggtttatgtt

SEQ ID NO: 869064 - DNA, 620 bp, Homo sapiens
actacagtaatccatctcttaaagatggagaaacgtttttaaaaatgtgtcactaggaaattttgtacttgtgagatcatataatccatttatacaaatctggatggtacgccttaccacataatctaagctatatggtacggcctattgctcctaggctacaaacttgaacagcatgttactgcagggaatactatggctattgtaacacaatggtagtatttaagcatataaaagccatagtaaaaatttgtattataatcttatgacacttctgtcatatatgtagtcctttttcaaccacrtatatttcatgtggtgcatagctgtattttgttaaggaagtgattcaatgttattaggtgctctgaaaggccactggatactgtagttgtacacaaatttatgtaaatttttggcttaaattgcaatcttttaggtaattctgtatcaatgctatgttgttatgaaaagtattttgtgagtcttcagataatgatacattcattgcaggcaaagaagccaagtacatatctattatatatataaaattccagtgaaatttaatcactgtactttcactatacaaaagtctaaaatggctgtttggtccccaagaa

SEQ ID NO: 869065 - DNA, 620 bp, Homo sapiens
actacagtaatccatctcttaaagatggagaaacgtttttaaaaatgtgtcactaggaaattttgtacttgtgagatcatataatccatttatacaaatctggatggtacgccttaccacataatctaagctatatggtacggcctattgctcctaggctacaaacttgaacagcatgttactgcagggaatactatggctattgtaacacaatggtagtatttaagcatataaaagccatagtaaaaatttgtattataatcttatgacacttctgtcatatatgtagtcctttttcaaccacgtatatttcatgtggtgcatagctgtattttgttaaggaagtgattcaatgttattrggtgctctgaaaggccactggatactgtagttgtacacaaatttatgtaaatttttggcttaaattgcaatcttttaggtaattctgtatcaatgctatgttgttatgaaaagtattttgtgagtcttcagataatgatacattcattgcaggcaaagaagccaagtacatatctattatatatataaaattccagtgaaatttaatcactgtactttcactatacaaaagtctaaaatggctgtttggtccccaagaa

SEQ ID NO: 869066 - DNA, 623 bp, Homo sapiens
tccaaaattgttggaaagaccgcaacaaacagaaacataatccttgagttaggagttgagcaggtgggcctcctcttggcctgacagcaggccttgataagtccctttattgctcctgacaaataggctttcagtatctcctgtgaagagaaacagggtggcccagttataaaaggccccttgaaagatttaaatacgctgccttgtgtaagatgaagggtgtcaggaccttgaagaccacagaggaaatagctgtatgctgccaagatttaatacatctagaggttatttagggggccatctataccttggtaaaaggaaataaagaatctgtcaattaaaagagttattaatttttttatactgtaacagaatattaaatctcagtgaacatatttatttacctggctgggtttctgtgcaattgctagccmtgagctgtcagcagtcacttatctttagtgatccccttgcaaattttgtgagaattttcagggttgatagggaatcactattctctttcatgttattacagtaatctaataaaccacctgaataaaaaaattcatgaaacaacacttcagcaaaaggagatcatggcttttggggtataaattttcatt

SEQ ID NO: 869067 - DNA, 581 bp, Homo sapiens
aaagggatatttggaagtgcattgaggcctatggtgaaaaaggaaatatcttcagataaaatgtagaaagaagatttcacagaaactgctttgttatgtgtgtattcttttaacagagataaacatttcctttgattgaggagtttggcagcacactttctgtggaatctgagaagggatattttggagctatttaaggcctagggtgaaaaaggaaatatcttcagataaaaagtagaaagaagctttctgcgaaactgcttcatgatatttgtattcatctcacagagttaaacttttcttttgattgagcagtttggcaacagtgtttttgtagaatctgagaagagataattgacagtggtgtgagrcctatggagaaaaaagaaatatctacatataaaactagaaagaagctttctaggaaactgctttgtgatgtatgcattcgtgcacagtgttaaatctttcttttgcttgagaagttttgtaacactgtttttgtagtatctacaaaggaatattttggagcacattgctgcttaagttgaaaaacgaaatatctacagattaatactaga

SEQ ID NO: 869068 - DNA, 627 bp, Homo sapiens
gggagcaccttgtggcctgtggtgaaaaaggaaatatcttcagagaaaaactagaaagaagctttcagagaaactgttttgtgttgggtgcattcatctcacagagttaaacttttcttttcattgagcagtttggaaacactgtttttttagaatcttcaaagggatatttgggagccattagaggcctatgttgaaaaacaaaacatatttgagaaaaacctgaaagaagctttctgagaaactgcgttgagatgggtgaattcgcctcacagatttaaacttaaattttgattgagcagtttggaaaccctgttttggtagaatctgtgaatggatttctcagagcacttttaggcctatgataaaaaaggaaactttttttatcagggtttttgtgaaatctgagaagggatatttggaaacatttagaggcctatggtgraaagtgaaatatcttcagagagaaacaagaaagaagctttctaagaaactgctttgtggtgtgtgcattcatctgacacagttaagcctctcttttgattgagcagtttggaaattcagttttcgtagaatctttgaaaggatatatgggagagactggaagtctatggtgacaaaggcaat

SEQ ID NO: 869069 - DNA, 629 bp, Homo sapiens
ggaaacattgtttttgtagaatctatgaaggggtatatgggagtgcaccgaggcctatggtgaaaatggaaatatctttgagaaaaactagaaacaggctttctgagaaattgctttgtgatatgtgcattgatctcactgaggtaaacctatcttttgattgagcagtttggaaacactgttttggtagaatctgcaaaaggatatttcagagtgctttcatacctatggtaaaataggaaatatcttcagataaaacctagaaagaagctctctgagaaactgctttgggatgagcacattcatctcacgtagtgaaacctttctttttatttagcagttttgcracagtgtttttgtagtatctgagaagggctattttggagtgcattgaggcctatggtgaaaaacaaaatatcttcagataaaaacaagaaagaagcgttctgggaaactgctttgtgatgtgtgcattcatctcactgagtaaaacttttcttttggttgagcagtttggaaacactgttttggtaaaatctgcaaagagatatttgggagcccattgtggcctacgctgaaaaatgaaatatcttaagagaaaaactagaaagaagctttctgagacactg

SEQ ID NO: 869070 - DNA, 629 bp, Homo sapiens
gggccacaagtgataggcaaatggcgaaagtcagtcatgctaggtcttgaagggcccattgacctcaggaattcagaagacgctcagccctgcctgtgtgatggagcactgtgatgaagaagtgggctgggagacaggccatctgcatggtagaactggctgctctgcatgagctgtgccagtggaaagtcacatggcttctctatgcttccatgtcttcctctgcatgacaagaataagaatatgggcagcttttaagggctgtaggaagtattcaataatataacgtgtgtaatgtgcctggcaggcagtaactatttagtcaaaattgggttttattacttcttactctatwtatagcaatctgaggagcatggagaagttttatatgttcatttatccttctttggagcaaattagtgaagctggctcctctgcaccccacagtccttcccctgtcagtggcctgctgacttcccttgcgcttctttgtctttctgtgcctgaggaccttcctgggaaccatgtgtacagcagcctggaagtgctggaaattgccactatctgggaaagctgtcaaacaatgatgattccctttcaggggataattctgaggcaagtgctgttca

SEQ ID NO: 869071 - DNA, 629 bp, Homo sapiens
gggccacaagtgataggcaaatggcgaaagtcagtcatgctaggtcttgaagggcccattgacctcaggaattcagaagacgctcagccctgcctgtgtgatggagcactgtgatgaagaagtgggctgggagacaggccatctgcatggtagaactggctgctctgcatgagctgtgccagtggaaagtcacatggcttctctatgcttccatgtcttcctctgcatgacaagaataagaatatgggcagcttttaagggctgtaggaagtattcaataatataacgtgtgtaatgtgcctggcaggcagtaactatttagtcaaaattgggttttattacttcttactctatatatagcaatctgaggagcakggagaagttttatatgttcatttatccttctttggagcaaattagtgaagctggctcctctgcaccccacagtccttcccctgtcagtggcctgctgacttcccttgcgcttctttgtctttctgtgcctgaggaccttcctgggaaccatgtgtacagcagcctggaagtgctggaaattgccactatctgggaaagctgtcaaacaatgatgattccctttcaggggataattctgaggcaagtgctgttca

SEQ ID NO: 869072 - DNA, 485 bp, Homo sapiens
tgcccatttgcaaattctacaaaaagactgtttccaaactgctcaataaaaacaaacgttcatctctgtgagatgaaatcatacatcacaaagaagtttctcagtgaacttctgtctagtttttatgtgaagatatttcctttttcaccatagtacttaaactgctcacaaatatccctctgcagaaacttcaaaaagactctttccaaactgctccatcaaaggaaaggttcgtctctgtgagatgaatscacacagagcaaagaagtttctaagaatgcttctgtctagtttttatgtgaagatacttcatttttcaccataggccctaactgctcacaaatatcgctctgcagttactacaaaaagactccttccaacgtgcaccatcaaaagaaacgttcagctctgtgagatgcatgcacacatcacaaaggagtttctcaaaatgcctttgtctagtttttatgtgtagatatttcctt

SEQ ID NO: 869073 - DNA, 562 bp, Homo sapiens
tttcaccataggcattaaactgcgcacaaatatccctctgcagataatacaaaaggacgggttccaaactgctccatcaaaagaaatgttcaactctgtgagatgaatgcacacatcgcaaagtagtttctcagaaagcttctgcttagtttttatgtgaagatatttcctttttcacaataggcctyaaaacgctcaaaatatccatttgcagattctacaaaaagactgtttccaaactgctcaatcaaaaagaggttcaactctgtgagatgaatgcaaacatcacaaagaactttctcagaaacatctgtctgcttttaagttgaagacatttcctatttcaccatagaccataaagggcttacaaatatccctttgcagattctacaaaaagaatttttccaaactgctcaatcagaagaaagtttcaacactgtgagatgaatggacatatcacaaagaattttctcagaaagcttctgtctagttttttatgtgaggatatttatttttaatcataggcctcaacagctcagaaatatcactttgcagattgtac

SEQ ID NO: 869074 - DNA, 562 bp, Homo sapiens
tttcaccataggcattaaactgcgcacaaatatccctctgcagataatacaaaaggacgggttccaaactgctccatcaaaagaaatgttcaactctgtgagatgaatgcacacatcgcaaagtagtttctcagaaagcttctgcttagtttttatgtgaagatatttcctttttcacaataggccttaaaacgctcaaaatatccatttgcagattctacaaaaagactgtttccaaactgctcaatcaaaaagaggttcaactctgtgagatgaatgcaaacatcacaaagaactttctcagaaacatctgtctgcttttaagttgaagacatttcctatttcaccatagaccataaagggcttacaaatatccctttgcagattctacaaaaagaatttttccaaactgctcaatcaraagaaagtttcaacactgtgagatgaatggacatatcacaaagaattttctcagaaagcttctgtctagttttttatgtgaggatatttatttttaatcataggcctcaacagctcagaaatatcactttgcagattgtac

SEQ ID NO: 869075 - DNA, 740 bp, Homo sapiens
agcaaagaggcagatgtgccccggaagcagatagtccagcaggtgagtaaggccatttctgaacacacacagggaacacaggagaatagacagtgcaggttttggggaaagagacaattttagttaaaaaagcagaggaaccctaagacatttcatggtgttcagctttagccctattactcttgagagtctcctgtccaggagggccataagtgcatcagttctactcagcatggaccccaaggttcttcccacccctgcaaaccatctgtcagggtgagcagagagawagcccatggaaacagagccacttgtggctgagaggaatcattctgggagctggttagtaagccatagagtgaaagggaaaagaaaatcatatagaggggttagctgcctctagccaatgaaggtgaggcataaaggtctttcaccactaggggacatatctgagtcatgcacaccaaagcatgttagcagcaaaaggtaccaagtcacacagcaccaaaacatgttaccagcagtgaatccgcatgggtacgggtctgtagcaacctcatttcttgcctcttcagaagaaaaaattgactgaggggcttaaggcagaaagagagactgggggaagttttagagcaggagtgaaagtttattaaaaagctttagaacaggaacaaaaggaaggaaagtacacttggaagagggccaagcaggtgacttcaaaggcaagtgagcggtttgac

SEQ ID NO: 869076 - DNA, 606 bp, Homo sapiens
gagcacaatgaggccaatggtgaaaaaggaaatatcatctgatgaaaactagaaagattctttctgagaaacagctttgtgatgtgtgcattcatctcacaaagttaaacctttcttttgattgagcagtttgataacaatgtttttgtagaatctgygaagggatattaggggtgcatagaggcccatggttaaaaagaaaatattttctgatgaaaactagaaagaaactttctgagaaactgctttgtgatgtgtgcattcacctcacagagttaaagctttatttgattgatcagtttggaaacaatgattttgtagaatctgtgaaggcatattttggagcacatcgaggcttatggtgaaaaagaaaatatcttcagatgaaaaatagaaagaagctttatgagaaactgctttgtgatgtgtgcattcgtatcacagagataatgctttcttttcatggatccgtttggaaacactgtttttctagaatctgcaaaagggtacctgggaacacaatgaggcctatggtgaaaaaggaaataccttcagacaaaaactagaaagaagctttctgaaaaactgctttgtgaagtgtgcatt

SEQ ID NO: 869077 - DNA, 632 bp, Homo sapiens
gaggctgaggcaggagaattccttgaacctgggaggcagagattgcagtgagccaagatcacaccactgcactccagcctgggtgacaagagtgaaactccatctgaaataaaataaaatataaaagttaaagcagtcatcctggcttttaggaacccgcagaatcaggargtaagctaaaagtcgtctcccttttgtcacgatggaatgtgaaataggtgcattttccttctgacttatgattctgtttcacggtgcctctgcagaaattcagtacgtccccatgggcacctgtgtccttcaggagttgaggaaattttctccattccttgtccctgtccctagactctgccagctcgtgcatgtagaagctcccgggaaaactgtcaacctgtgcacattcaagaccgccatatacttgttattgaaaagccatcagtcatgtgagcagaacttttttatggttgagattgtccccagggaaacccgccttgcaattcagaccttccacggagatcgattccaaactctcatcccgttcccacttcctcgttcccatggaggctgcggttctctctctctgtgccgcttacagattgtcatacctatttccaaaaatgacacagaaaact

SEQ ID NO: 869078 - DNA, 591 bp, Homo sapiens
tttgctgagcaagggagtcctttgtgtcaggcactttgttgaaggccttgtaaattaattctcagtgcagtctacatagtagatggtgcatcagatacaaagagtttgaacactttgccctcatccatggagcaggcaagaggcaccatgcccctaactaggacaccgcagtgcctctcataggtcaggatgcaaaggtgggaatcagtggttcccagtggatgtagaaaagactcactggtgctcctggagatcagggaagctcaggattaagctaccaggcagtagggtcaacttccctccctgtagtttacaatggaccgtgtctttgaagtataggcacatgatggacatggcgtgtggatgagtwtttctctccactgtcctatctaattttattctttccctccaggccctgtcaaaactttagaaattgaaagacttctagggtctggtactaatcaagcatcttgaattctcttattgctacaactgcatatctctctgtatttttgtcattttttttgtttacaagaaaaagttaggaaagggtgaatgaaatgcccctataatgtcaccctctcagcctgg

SEQ ID NO: 869079 - DNA, 591 bp, Homo sapiens
tttgctgagcaagggagtcctttgtgtcaggcactttgttgaaggccttgtaaattaattctcagtgcagtctacatagtagatggtgcatcagatacaaagagtttgaacactttgccctcatccatggagcaggcaagaggcaccatgcccctaactaggacaccgcagtgcctctcataggtcaggatgcaaaggtgggaatcagtggttcccagtggatgtagaaaagactcactggtgctcctggagatcagggaagctcaggattaagctaccaggcagtagggtcaacttccctccctgtagtttacaatggaccgtgtctttgaagtataggcacatgatggacatggcgtgtggatgagtttttctctccactgtcctatctaattttattctttccctccaggccctgtcaaaactttagaaattgaaagwcttctagggtctggtactaatcaagcatcttgaattctcttattgctacaactgcatatctctctgtatttttgtcattttttttgtttacaagaaaaagttaggaaagggtgaatgaaatgcccctataatgtcaccctctcagcctgg

SEQ ID NO: 869080 - DNA, 593 bp, Homo sapiens
aaattagggctcaagacagaaatatcaggcagtgctaacaaatcacatgccacagcctgaatcagcaggaaggcaggggactcttgcaattcacgtaattcttcagttgccaaaggcatactctcagcacatcggattctggatatcatgagttggtctagaagcaaataaattgctggcatgttctgttttccaacaaactccacaagtacagggcatctccagtgcaacaaactyagtcagtgaagttcacctgccccagcctggtcatgggacctctcaggcaaatttcagactcataccagttgtgccagccaggttcccctttctctaggcttgagatttttcaatcctgtacaaaagttatatcttactcttttttcatacagaaagtattggttattaaatatattaatactatcattttaaaaatttaattattataaagttttttttttttttttttttgagactgagtcacgctctgtcaccaggctggagtgcagtggtgtgatctcagctcactacaacctccacctcccgggttcatgccattctcctgccccagcctcctgagtagctggggttacagg

SEQ ID NO: 869081 - DNA, 647 bp, Homo sapiens
ctacacatgtaccccctgaatcaaaaataactgttgaaattatttaaaaaattaaaaagaaaaagaggaaaaatcaattaccaggaaggaaaggttgacatttaattaaggatatgtcaaaatgctcagaaagaaaagactcaactctattgcaggyttcaggaagtcaggggtggaaacagctgtttttgttttaaagtatgtcacaataattacaagatcaaaaatatgtcttggataaatgagtgagccagtgaaagaaaaagcaaatgggtaaaaatgcacaacagacagtatcataaatgcagagttagagttggggagaaagatcagcctaggagcaggaaatctgaagcatccacttaggtcaattacggcttgggtaaaagccctataggtgagtggacacagagagaaggaccaagtcaatgcctggacagggatcaaagactagtgaagacatcaggtacagtgttatctgaggcataacaggttagtgccaagaaaactaaagggagataatatttcagaaaggaaattctgaacaaaaatgtgtctaatgctacagtctgagacaaaaaaaaacaaaaacaaaaaactgcagaatgtccaagaagttaagagttatggtgatattgcaaggcctc

SEQ ID NO: 869082 - DNA, 592 bp, Homo sapiens
gtggagacttaattttccaaacaatctgtctcctttctctcctttcttttcccattgtttattcaaaagacaaacataagtctcttattatcttttaatattacatgaaaatcttgttcaagacagaaagccaaatttcacttttgcattagtgcatcgttaacactaaagctaattttaaatataatattataaacacatttattcaagtttaattcgtttgaccataggtaagatttccacaaaccttttataacacttattaatttctattaaggagcatattagtgttccaaaaagcctcattattctgacatatgggcccagattttgtatcagtgtgcttttatttcaatatttaatttatagaaatatkgaataatatccttttaattttagtcaatttgctcacacacagaattatttacaaggttaattttttatgaaccttccacaacttgctcaagccttcagctttagcctatctcacttaaaacaattctttaaccctctaaactaggccaaaaaaaaaaaagtttcccatgccttattataatcttttaccaaaaacacattctactttctttacaca

SEQ ID NO: 869083 - DNA, 830 bp, Homo sapiens
aactcattgggacctgaaatgattagatacatagggaaagggacactaatgggaaaggcaggattctctccgacctttgcttcccacagtcaatactaatcttgttcactttcagtgacaactacagctcctgcctaatgaaaatgttctcatcattagctgggcatggtggtgtgtgcctgtagtcccagctactcgggaggctgaggcaggagaatcgcttgaacccaggaggcggaggttgcagtgagccaagatcgcgccactgcactccagcctggcgagtctccatctcaaaaaaataaaggaaaaaaaaaaaaaaagaaagaaaaaagaaagaaagaaaatgttttcaccatgagcttctgtcagaagagtgcaccagaataacgcacatgcccacatctggacgcatactggggtgtatcrgcaaagctgaaagaagaacaaactttcataatgacaagtgcttcctttctacaaagggatgttagctgttcccatttttgcatttatctcaagggtggaataaatcaccggctagttgttatgaaaaatatgattctatttgtccctgatgtaattgtgtgggggcagcttcagaggcatgtttttaaattggcctcttaatttattttaatgcatcagttagacatggggagggagtgggcaagattgccacactttttggagctcgtacacagtgtattggttgacttcaaaatgaaggtggcccttttgagccaagtatgatttcttaattccatgctattgcattttaagtcacctttgaaattttatcataacctataattgattggtttagtgaa

SEQ ID NO: 869084 - DNA, 830 bp, Homo sapiens
aactcattgggacctgaaatgattagatacatagggaaagggacactaatgggaaaggcaggattctctccgacctttgcttcccacagtcaatactaatcttgttcactttcagtgacaactacagctcctgcctaatgaaaatgttctcatcattagctgggcatggtggtgtgtgcctgtagtcccagctactcgggaggctgaggcaggagaatcgcttgaacccaggaggcggaggttgcagtgagccaagatcgcgccactgcactccagcctggcgagtctccatctcaaaaaaataaaggaaaaaaaaaaaaaaagaaagaaaaaagaaagaaagaaaatgttttcaccatgagcttctgtcagaagagtgcaccagaataacgcacatgcccacatctggacgcatactggggtgtatcggcaaarctgaaagaagaacaaactttcataatgacaagtgcttcctttctacaaagggatgttagctgttcccatttttgcatttatctcaagggtggaataaatcaccggctagttgttatgaaaaatatgattctatttgtccctgatgtaattgtgtgggggcagcttcagaggcatgtttttaaattggcctcttaatttattttaatgcatcagttagacatggggagggagtgggcaagattgccacactttttggagctcgtacacagtgtattggttgacttcaaaatgaaggtggcccttttgagccaagtatgatttcttaattccatgctattgcattttaagtcacctttgaaattttatcataacctataattgattggtttagtgaa

SEQ ID NO: 869085 - DNA, 610 bp, Homo sapiens
tcatcagggaaatgcaaattaaaactgtagtgagatatcataccgttcacaatggctattattaaaaagtcaaaaataacagatgttggagaggatgaaatgtaaagtgaactcttagacactgttgatgagaatgtggacgagtacgacctctatagaaaacagtatggattgagtatgatattgactatgcatttctcataaacagctcttattattttgagatacattccatcaatacctagttaatgagcggttttagtatgaatcggtgttgaattttattgaaggccttttctgcatctattgagataataatgtttttttttccattggttctgtttatgtgatggattatgtttattgatttgcatatgttgaaccagccttgcwtcccaggtatgaagccaacttgatcatggtggatttggaaaccggcacaagacaaggatgccctgtctcaccactcccattcaacatagtattggaagttctggccagggaaatcaggcaagagaaataaataaagggtattcaaataggaaaagaggaagtcaaactgtctctgtttgtagatgacatgattatatatttagaaaaccccatcatc

SEQ ID NO: 869086 - DNA, 532 bp, Homo sapiens
ggtactctttcttccagttgattgcatccgctcctgaggcttctgcattcttcatgtagttcttgagccttggctttcagctccatcagctcctttaagcacttctctgcattgattattccagttatacattcatctaatcgtttttcaaagtttataacttctttgctattggtttgaatttcctcctgtagctcggagtagtttgatcgtctgaagccttcttctctcaactcgtcaaagtcattctcygtccagctttgttccattgctggtgaggaactgcgttccttaggagaaggaggggcgcgctgctttttagagtttccagtttttctgctctgttatctccctatctttgtggttttatcaacttttggtctttgatgatggtgatgtacagatgggcttttggtgtgggtgtccttctgtttgttagttttccttctaaaagacaggaccctcagctgcagatctgtgggagtttcctagaggtccactccagaccctgtttgcctgggtatcagtagcg

SEQ ID NO: 869087 - DNA, 532 bp, Homo sapiens
ggtactctttcttccagttgattgcatccgctcctgaggcttctgcattcttcatgtagttcttgagccttggctttcagctccatcagctcctttaagcacttctctgcattgattattccagttatacattcatctaatcgtttttcaaagtttataacttctttgctattggtttgaatttcctcctgtagctcggagtagtttgatcgtctgaagccttcttctctcaactcgtcaaagtcattctccgtccagctttgttccattgctggtgaggaactgcgttccttaggagaaggaggggcgcgytgctttttagagtttccagtttttctgctctgttatctccctatctttgtggttttatcaacttttggtctttgatgatggtgatgtacagatgggcttttggtgtgggtgtccttctgtttgttagttttccttctaaaagacaggaccctcagctgcagatctgtgggagtttcctagaggtccactccagaccctgtttgcctgggtatcagtagcg

SEQ ID NO: 869088 - DNA, 606 bp, Homo sapiens
gaattccttggggagatggatttgagagtctccttccatctcctttcttggcaccctgtgatcattaaactctttctctgctgcaaaccctggtgtctcagtgcgttggtctgttactatgcagcaggcatatataccttttggtccattgactgctgataactcatagctgactgcctccctagaaagagtgttgccccatccaaggtcatgtctcttcattctgtgcaacaactggtcagagttgaggcacacaagactgcctcccttgcttccatttggaacatctttgagggtccaccccagttccagtgcccccacataagaccacctgcagcttctattgtcactgcagttttccctacttcctccctttgtccagcttgcttccttcccatccttatatctgttgttctcaaaaccactccccaacaaaatccctgcatgtgaatctctgctyagaatcttttcccctgggagcctgactcacaacataagtcttacaaggttctccatgacctggctccagctcaatgcccagtacaaagtggatgttcagtgagtaccttggattgattggctcattggctggttgcttggttggtt

SEQ ID NO: 869089 - DNA, 593 bp, Homo sapiens
attttattgttattattattttttgagatggagccttgctctgcacctaggctggagtgcagtggtgcaatcttggctcactgcaacctctaccccctaggttcaaggtattctcctgcctcagcctcctgagtagctgggattacaggcgcccaccagcgtgcctggctaatttttgtatttttagtagagacggggttttgccatgttggccaggctggtctcgaacttttgacctcaggtgatccacccgcctcagcctcctgaagtgttgggattacaggtgttagccactgggcctggctgccatatatatatatatatatgtttttttttgagacagggtctcactgtatcacccaggaggagtgcagtggctccatstcagctcactacaactctccaccctcaccccctaggctcaagcttcccaccccagcctccccagtagctgggaccacagatgcagaccaccatactctgcttttttgttttgttttgttttggaatttttggtggagatagagtcttgccatattgcccaggctggtcttgaactccacagctcaagccctctgcccacctcagcctct

SEQ ID NO: 869090 - DNA, 603 bp, Homo sapiens
ttcacgtttaaaaatgatttcttctgcttgatcaagcctgtttttgaaactatcagttgtattttttaaaatttcattcattaaattcctcagctctaagatttatctttggttctttttcatgatatctatctctgttgaatttctcattctgattattatttttttctgattttattgcattgtttgtattcttctgtatctttctgagtttcatattttgaattccttttcagatattctataaatatccttttcttttargtgtattactaaagtcttactatcttgttttagtagtatcatattttcttgttttattatgcttcttgtgtccttatgttaatgtctacacatctagtgaaatagcctattttttctatttgatggagtagcttttgtagggagagacttttttcctgtagaagggtcctaaaatgtcagttgagtatgatgcagtggtttgcttgtgggtttactaagcctggtttccatgcagtttcttcagccataatagtcatctgtaatgcctgtgatttttctcagtggtctaggctgtggattttgtgacagtggtggtgtgattttgcttgtagctggggc

SEQ ID NO: 869091 - DNA, 659 bp, Homo sapiens
cataggatcagaaaagacccagattaggaagggagaggtatgtagcacaggccaagatgagccactgtctgattgcatctgtgcaatgctgttagagaacatggccacaataagctcgaaatggtacacagggagggtccaaatcaattggtttatatgttctatgtatagaatacacatattaaccttgacccttgaatagtcattgagtcctcgctctctcttcttactgcttctatagctagacctcatcaattcctgcctagaatgttttaatcttttctcttacccagtccccatctattcaccatgttttttccagaataattaaaacctactaatgtcattattattattgstaatgtcatttttcttataatttaaataaatccttattttctttagaaaacaaagtttacatatttgcaaggcacacaatgaacttctaatgctgtctttgcctgcctcttgttgcatcttttcccagaatatcctaatctcttttcaaaacatggtgcaaatgtcatttcctctccaaaaccagacccccattcttccattattttttgcataccagtaacataggctacattatgataaaatctgtcttcatatgagactgtacactccttttgactaaggcccagatattattttta

SEQ ID NO: 869092 - DNA, 504 bp, Homo sapiens
tttaggtggagagttctgtagatacctatcaggtccacttgatccagagctgagtttaggtcctgaatatcttagttaattttgtctcagtgatcggtctaaaattgacagtagggtgttcttctactattattgtgtgggagtctatttgtaggtctctaaaaacttgttttatgaatctggattctcctgkgttgggtgcatttacatttaggatagttagcacttcttgttgaattgatctctttatgattagtaataaatgtatttgtcgtttttgattttttttttgtttaaagtcttttgtcagcaactaggattgcaaaccctactgttttctgttttccatttgcttggtaaattttccttcatccctttattttgagcctatgtgtgtctttgcacgtaagatgggtctcttgaatatggcacactggtgggtctttatccagcctgccattctgtgtcttttaattggaacatttaggccatttatatttaaag

SEQ ID NO: 869093 - DNA, 504 bp, Homo sapiens
tttaggtggagagttctgtagatacctatcaggtccacttgatccagagctgagtttaggtcctgaatatcttagttaattttgtctcagtgatcggtctaaaattgacagtagggtgttcttctactattattgtgtgggagtctatttgtaggtctctaaaaacttgttttatgaatctggattctcctgtgttgggtgcatttacatttaggatagttagcmcttcttgttgaattgatctctttatgattagtaataaatgtatttgtcgtttttgattttttttttgtttaaagtcttttgtcagcaactaggattgcaaaccctactgttttctgttttccatttgcttggtaaattttccttcatccctttattttgagcctatgtgtgtctttgcacgtaagatgggtctcttgaatatggcacactggtgggtctttatccagcctgccattctgtgtcttttaattggaacatttaggccatttatatttaaag

SEQ ID NO: 869094 - DNA, 665 bp, Homo sapiens
gcaaaggtgggtggatcacgagctcaggagtttgagagcagcctggccaatatggtgaaagcccatctctactaaaaatacaaaaattagctgggcgtggtggtgtgcacctgtagtcccagctacttgggaggctgaggcagaagaatcgcttgaacccrggaggcagaggttgcagtgagctgagatcaccccactgcactccagcctgggcaacagagcgagattccatctcaaaaaaaaaaaaagggatgaattcatgtcttttgcagggacatggatgaagctggaagccatcattctcagcaaactaacacaggaacagaaaatcaaacaccgcatgttctcactcataagtggaagttgaaaaatgagaacacatggacacagggcagggaacatcacacactggggcctcttggggggtaggaggctaggggagggatagcattaggagaaataccaaaatacctaatgtagatgatgggttgatgggtgcagcaaaccaccatggcacgtgtatacctatgtaacaaacctgcacattctgtacatgtatcccagaacttaaagtataatttaaaaaaaaagaatgatggtcacgctttttatctgttcacatttacacagtaatgctaactaggttttcattgaaggtaagggat

SEQ ID NO: 869095 - DNA, 685 bp, Homo sapiens
tttgaagagagagagccagcatcagaaccagactcagatatggctggtattttggaattaacaaataatttaaagcaactatgattaatatgctaaagacactaatggataaagtagacaatgttcaagaacagatgggcaatgtaagcagacagatggaaattctgagaaggaaccaaaaagaaatggaagagagcaaraacaatgtaatagaaatgaagaatgcttttaatgggcttgcaagtagatggacacaactaaggaaaaatctctagcttgaagctatctctatagaaacctttaaaactaaaaagtaatgagaaaaaaaaaagaatgaaaacaaacaacaaatcagaacagaatatccaagaactatggggcaattacaaaaggtgtaatgtatgtgtgatgagaataccaaaaggggagtaaagaaagaaagcaacagaagaaatacatggaacaataatgattgagaatttccccaaattaatgttacacaccagaccatgctggaagttgaaagaacatcaagtaaaaaaatgacacccagatacgttgtatgtaaactacacagcttgtgtttcttttatattttgcatattaattccatatcagatgtatagcttgaaaatattttttacccttctgtaggttgtctcttcattctgttcattcttttctt

SEQ ID NO: 869096 - DNA, 685 bp, Homo sapiens
tttgaagagagagagccagcatcagaaccagactcagatatggctggtattttggaattaacaaataatttaaagcaactatgattaatatgctaaagacactaatggataaagtagacaatgttcaagaacagatgggcaatgtaagcagacagatggaaattctgagaaggaaccaaaaagaaatggaagagagcaaaaacaatgtaatagaaatgaagaatgcttttaatgggcttgcaagtagatggacacaactaaggaaaaatctctagcttgaagctatctctatagaaacctttaaaactaaaaagtaatgagaaaaaaaaaagaatgaaaacaaacaacaaatcagaacagaatatccaagaactatggggcaattacaaaaggtgtaatgtatgtgtgatgagaataccaaaaggggagtaaagaaagaaagcaacagaagaaatamatggaacaataatgattgagaatttccccaaattaatgttacacaccagaccatgctggaagttgaaagaacatcaagtaaaaaaatgacacccagatacgttgtatgtaaactacacagcttgtgtttcttttatattttgcatattaattccatatcagatgtatagcttgaaaatattttttacccttctgtaggttgtctcttcattctgttcattcttttctt

SEQ ID NO: 869097 - DNA, 685 bp, Homo sapiens
tttgaagagagagagccagcatcagaaccagactcagatatggctggtattttggaattaacaaataatttaaagcaactatgattaatatgctaaagacactaatggataaagtagacaatgttcaagaacagatgggcaatgtaagcagacagatggaaattctgagaaggaaccaaaaagaaatggaagagagcaaaaacaatgtaatagaaatgaagaatgcttttaatgggcttgcaagtagatggacacaactaaggaaaaatctctagcttgaagctatctctatagaaacctttaaaactaaaaagtaatgagaaaaaaaaaagaatgaaaacaaacaacaaatcagaacagaatatccaagaactatggggcaattacaaaaggtgtaatgtatgtgtgatgagaataccaaaaggggagtaaagaaagaaagcaacagaagaaatacrtggaacaataatgattgagaatttccccaaattaatgttacacaccagaccatgctggaagttgaaagaacatcaagtaaaaaaatgacacccagatacgttgtatgtaaactacacagcttgtgtttcttttatattttgcatattaattccatatcagatgtatagcttgaaaatattttttacccttctgtaggttgtctcttcattctgttcattcttttctt

SEQ ID NO: 869098 - DNA, 533 bp, Homo sapiens
tgttcctagaggctaggtgctgagcaggtggtagttactcaagacatgtttattgagtaattcagtgattaaactcttagttaaaatagaagtgtttttcaatttcttagttaatacagaagtgattcttaacacacccccaacatttgatccacttccatcagaagcaatggtttattcatagtggtttttttttttttttttttttttttttctgagatggagtcttgccstgtcaccaggctggggtgcaatggtgctatctcggctcactgcaacctctgcttctcaggttcaagcgattcttctgcctcggcctcccaagtagcagggactacaggtgcatgccactgtgcccagctaatttttgtatttttagtagagatggggtttcactgtgttggccgagatggtttcgatctcttgaccttgtgatccacttgccttggcctcccaaagtgctgggattacaggcgtgagccaccgcacccagccattctgtagcattttaatggaaagtgggaggcatagta

SEQ ID NO: 869099 - DNA, 492 bp, Homo sapiens
taatgtttacaaagtattttgaaggtgtaaagtgctggcaagtgctaagcccaataaaaagtattttatacaaaatctgagagctgacttgtacagcatccagctttgtgagtgaatagagcaaagacgattaaaatcaacatcatttgtaatttaaagtaccgtgaacaacaaagaggatccaactattgytttcgtttgacaggctgcaaatatagattgctgaacagcggtagtctgtcaatataaagcatttagcacttcactaaacaacttgagaattttctactttaggaaaagaaatatgaaatcagatttggtgtaacattattattttaatggattaaccatatcattattaaaaagaaaactacaactcaacaaaatccaagaaagtctttgctatagaacttaccagtgtggtgaatgttcagaaagatgaaaccctttccatgaaggctttccctagctccacccatctggaatgtgcag

SEQ ID NO: 869100 - DNA, 571 bp, Homo sapiens
catccaactgattttcctaactaccatccctactgccgtcattgactaatgtgactaaatgcttttcctcctgtttcagtagatagcctattagggttctctgtgtgatttaattaaataagttactccccagagttcaaagtcagaaaatactttttgaaattggaacaattaggtatacacagaaaatacatgaaattaagtggaaagatctctaagaagctgtttctrttactgtcctttttaaagaagtccactcattctctcattctccgcatgcttaattctgggagtgagaataggaatgtgtcttctgctcttgaccaacagcccgcttctttgaatagtcgatgttgttttctcatattcctcactactcttagccagaacttccttatatgcttttgaaaatttggcaactaatttaggatgtgcttccctctttcgggtctttcaagttacagtgggagcctgaagggctgttggcaagatgaagccagcaccttagcaatttgattttcatgaggaaaggatgatctccatcctacttcagcatcaacccacacctaaa

SEQ ID NO: 869101 - DNA, 659 bp, Homo sapiens
cacgtggccaagcccatacaattgatttatagacccatgagcatgaaaataaatgcttattattgtaagatactgagtttgaggtactttattatgcaccattattgttgcaatagttgactaatgcaaatggtaacagctagtgctataggctgtctatcctgttcccttgccattacctctcagtgcacctataacttctatgtataatcaaagtgaaataattgaaaaaattcaaaytgtgtatattgtttaaaggattagagtactatgcaatgaagacagcatatgcaatttgctaccttttgtgttagagaaaagataagtaggagagactgatttgggggaaaaagtaaacaacggaagaaacaataaacaaattttttttacttataggttacttacagggctacctgtatagagaaagaaacaagagttctcagagtataccttttcagttacttttgacttttgaacattttctttattaaaaaataaaatcaaagtgaaaagaaaaaagcaaaccctaaaattgaaaacacaggaacataactgtatatcaagttgacacagaaataatgtcttcagatgacttttgaatgcaatatgcacattcttcaatcttaatgggatttatttatttttagagatggtgtctt

SEQ ID NO: 869102 - DNA, 544 bp, Homo sapiens
aatcaaatgagaaggaaccaggaaaacaattctggtaatatgacaaaacaaagttatttaatacccccaaaagatcacactagctcaccagcagtggatcaaaccaagacaaaatctctgaattgccagaaaaagaattcagaaggtcaaatattaagccaatcaatgaagccccagagaaagatgaagtccaactcaaagaaataaaaaaaaaaaatagatacaagatgttaatgggaaatctccastgaaatagaaagcaaaagtaaaaaacatcacttctggacatgaaggacacacttagagaattgcaaaatgcactggaaactctcagcatagaatcaaacaagtagaagaaagaacttcagagctcaaggacagactttcaaattaacccagtctgacaagacaaaaagaatttaaaaaatgaaagcctccagaagtttggcattatgttaaaacaactaaacctgagaataattggtgttcctgaggaagaagagcagtctaaaagtttggaaaacatattcgagagaataattga

SEQ ID NO: 869103 - DNA, 578 bp, Homo sapiens
gatctttcctctcacatcgtctaatcaaatgagaaggaaccaggaaaacaattctggtaatatgacaaaacaaagttatttaatacccccaaaagatcacactagctcaccagcagtggatcaaaccaagacaaaatctctgaattgccagaaaaagaattcagaaggtcaaatattaagccaatcaatgaagccccagagaaagatgaagtccaactcaaagaaataaaaaaaaaaaatagatacaagatgttaatgggaaatctccagtgaaatagaaagcaaaagtaaaaaacatcacttctggacatgaaggacacacttagagaattgcaaaatgcactggaaactctcagcatagaatcaaacaagtagaagaaagaacttcagagctcaaggacagactttyaaattaacccagtctgacaagacaaaaagaatttaaaaaatgaaagcctccagaagtttggcattatgttaaaacaactaaacctgagaataattggtgttcctgaggaagaagagcagtctaaaagtttggaaaacatattcgagagaataattgaggaaaacttccc

SEQ ID NO: 869104 - DNA, 633 bp, Homo sapiens
tcccaggtcgacttcagactgctgtgctgggcagtgagaatttcaagccagtggatcttagcttgctgtgctccatgggggtgagacccactgagcaagaccactcggctccctggcttcagccccctttccaggggagtgaatgtttctgtcttgctggcattccaggcaccactagggtacagaaaaaaaaaaaaaaaaaaaactcctgcagctagcttggtgtctgctcaaatggccacccagttttgtgcttgaaacccaggtccctggtggtgtaggcacccgagggaatctcctggtctgcagattgcaaaaactgtgggaaaagcatagtatctgggctggagagcaccatccctcatggcacattccctcatggcttccctgggctaaggcrgggagttccttgaccccttgcacttcctgggtgaggtgacacctcatgctgcttcggcttgccctccgtgggctgcacccactgtctaaccagtcccaatgggatgaaccaggtacctcagctggaaatgcagaaatcacctgtcttctgcattgggctcactgggagctgcagaccagagctgttcctatttggccatcttgccttcagtcaactttcctcctttttatcga

SEQ ID NO: 869105 - DNA, 591 bp, Homo sapiens
tgacacaggtgttttaagatgtccttttgacatagcttctttgactgtgtggttttgatgtcatgagtatttttaataatgctccaaaaacagttattaaacgttaacttttaaaaacaattgccagtgaggaattcctagccagagtaatcaggcaagagaaagaaataaagggcatccaaattggaaaagaagtcaaactatttctgtttgccgatgatatggtcatattcccagaaaaccctaaagactcctccaaaagactcctagatttgayaaatgaattcagtaaagtcttgggttacaaaatcaatatacgcaaatcagtaacactgctacataccaacaattactaagctgagaataaaatcaagaactcaattccctttacaatagctgcaaaacgagttaatgggtgcagcacaccaacgtggcacatgtatacatatgtaacaaacctgcacgttgtgcacatgtaccctaaaatgtaaagtataataataataaaattaaaaaataaataaaaaaaaataaaatacctaggaatatacttaaccaaggaggtgaaacatctctacaagaagaactaca

SEQ ID NO: 869106 - DNA, 591 bp, Homo sapiens
tgacacaggtgttttaagatgtccttttgacatagcttctttgactgtgtggttttgatgtcatgagtatttttaataatgctccaaaaacagttattaaacgttaacttttaaaaacaattgccagtgaggaattcctagccagagtaatcaggcaagagaaagaaataaagggcatccaaattggaaaagaagtcaaactatttctgtttgccgatgatatggtcatattcccagaaaaccctaaagactcctccaaaagactcctagatttgacaaatgaattcagtaaagtcttgggttacaaaatcaatatacgcaaatcagtaacactgctacataccaacaattactaagctgagaataaaatcaagaactcaattccctttacaatagctgcaaaacgagttaatgggtgcagcacaccaacrtggcacatgtatacatatgtaacaaacctgcacgttgtgcacatgtaccctaaaatgtaaagtataataataataaaattaaaaaataaataaaaaaaaataaaatacctaggaatatacttaaccaaggaggtgaaacatctctacaagaagaactaca

SEQ ID NO: 869107 - DNA, 669 bp, Homo sapiens
agtagaggtaggggagggaaagctgtaaaaacctctacatggattaccatatgcgaccttctacagtctaaggctttgccttgttctgactatcctccagtagaggttttaccctagctgtatacgaacaagtttaaatttgaaaaacccaaactgccgtgtgaggctgtgaaggacagatcactgcaatctcagttattaaagatgatttgaatagggctagggatggagataggagagaaaatctgtcagaaaatgagcctattgatgagaggaagctacttagacatgtattcaatttaactcctttcaccaacaagtggtttaaaaaattgagyacaatactgacactatccaattctagatgaactgtaggacatactaagatacatctgtatttcaatgggaagctgtaggtttaggtacaggcccaataacaactttagattgtagaatgcaactgctaatggcacggttgggggagaagcactatggaggcagattctcactgaggcccagatgggctattctgctgccattgtagccttgggacatacctattgtgatctgccaaccccacctcatagtaaacagcatatccaactaatcatctaaagctgaaggtctctcctgagaaagaaattttactaccagagaattcagtttttt

SEQ ID NO: 869108 - DNA, 681 bp, Homo sapiens
atttttagaatattctaaataaatccttgtttctaaatatataggactactgaatataaacccttgagttatgaagaatgcaataatgatcatatgatatagaaaaataacaagtttcctttatgtgactagaattcatatattatatcattcactcatttatcaaacattaaatcttctgataattttaaattgatttaagcctaaatcaaggcaataggtctgtaagtgaaaaatgtggttaatcttgtggagatcttaatgccacagaaatcacagaattcaaagttagcatagtaacctgagccaatactattttttcagtcacattcaatcagctgattctgcaagcccagcaatttgtattcacrgaaagtagagtagagaatttacaagtaatttgaggcatgttaacggtgcagacaatcaatgtggataatattctccaaaagccattattttccaatggagattttgtaaggcttatgctatcaagaaagattatctgtattttctaccgtttttccttcagacagccagaatcaaagatgaaagcagtcattagttggtttaggaattatgtgttagagttttttaaaaaatctaaactctactccttatttgtttaacgtacccttttcagagatggaagaacatcaaaactattgggatccttttagt

SEQ ID NO: 869109 - DNA, 637 bp, Homo sapiens
tcagcctggacttcattgttcatatcactatcaacattttggtcaaagccattcaacaagtctctaagaacctctaaacttttccacatctttctgtcttcttctgagctctccaaagtgtttcaacctctgcctgttacccagttccaaagttacttctrcattttcaagttctctttatagcagtgccccactaccttggtaccagtttacagtattagtctgttttcacactgctgtaaagacatctgagactgggaaatttataaaggaaagagatttaattgactcacagttctacatggctggggaggcctcaggaaacacattcatggcagaagaagaagcaggcaccttcttcacaaggtggcagaagagagaagagaaaagcccaggggaaactaccatttataaaaccaacgtatctcatgagaactccctcactatcatgagaacagcatgggggaaaccatccacatgatccagtctcctcccaccaggtctttccctcaacacctggggaatcacattcaagatgagattggggtggggacacagagcctaactgtatcaccatttttcctacctttgagcttcaattcccactgttttttcacttgaagtgccccctgcctga

SEQ ID NO: 869110 - DNA, 649 bp, Homo sapiens
aatttaaaaatatggtgttatacactattccttcatagtacctagctattttattatttttgctattatgaatgaatttctgttttctattggttattgctggtgtagacacatattactgcattttatatgtttactgaaatctggtcaccctactgaattctattctattwgtttgtttcctgattctgttgggttttatagatagataatcatataatctgctaatacgaaagttttgtctctcttctcctaatagtatgcttttatttttcttgtgttactaaattgggcatagctttcagtattattttgaacggtactggtgatatacgaaatattggcttattcttgatttgaagatttgaagacaatatataggattttcattaagtaggatattatattggatataggttaatggaatatagcctttatcagtggaagctctttcatctctgtttttcaaaaggtttttataattaaatagatattgaattttataaaatgttttaaaaaaactattgagataacaatgtgattttcctccttgcatccatgattgtggagaattacatggatagttttttctaatgttaaaccatttaacaattgcctttcttgaataaatcctacctaatcataatgg

SEQ ID NO: 869111 - DNA, 658 bp, Homo sapiens
aaatacagatcaaactgtaaccattgattatctgggcaaggtgaaattaaaggaagacagaggaagattattaacatcttcatgcacctctgaattgtttaacatagtaaaataaatatccattaatttggtaacttgaagaatccctgtattagtccattctcacactgctaataaagacatacccgagattgggttatttataaaggaaagaggtttaattgactcacagttcagcatggctggggaggcctcaggaaacttacaatcatggcagaaggggaagcaaacatgagcttcttcacatggyggcaggaaggagaatgaaaactgagcaaaggggaagccccttatgaaaccatcagatctcatgagaactcactcactaccatgagaacaggatgggggaaagtcccccaccatgattcaattatctccacctggtccttccccacaacttgtggggattatgggaactacaattcaagatgagatttgggtgaggacacagccaaaccatatcaaatccataaagctggaaggaagggaaagaaagaagaagcaaaaagaaagaaggaggaagcagggagaaagagagatctgttatctttgatcaaagtatagggaagtaccttatatacccacaagatttcaagaa

SEQ ID NO: 869112 - DNA, 628 bp, Homo sapiens
gaggatggagcccagtaacaaggataatggagagccaacaggaggagaaaggagcatgtgtacgtgtgtgtgtttgtgtgtgtaaaaggtagacctctgtggataggaaatctaagaggagggggcaaggaaggaacggagaaaaggcaggcgaggaagttccaggatcgggggagtggagaccaccagcgcagcatggcagacagcaaagagaaggcagctggaggagtccagaacaggagagggagcctacccgccttggagtgggggccttctggcattatttcagtggctgcaatatacccagcacccctcactccttcttctygagggtctcttttctgtcccccagcagagaaagcactgcctccttcaattacatatatatgtgcatatgtaatatataatcacacacgtgaaaacacacacaccatacatacttacattaaaaatggaatcaagcaccatctaccaagcaatagagttaactccttaaacacccaccaccctttccagcctgattttttttttcctccaaagcgatggttcctccatttcacatgctcttgcctggagtgcgagtagggtatgtgtgcgtgtgtgaacacttcccctctgcccctcatcc

SEQ ID NO: 869113 - DNA, 568 bp, Homo sapiens
tcactctgacttttttgagctctctgcacatcttactcaattctttcttttttcctacaacagcatttctatttgctttatactttaatatgtgtatggctttaagttataattgatgtataataaactgcacatatttaaagtgtataatttgatgagttttgatatctgtatatgtctgtaaaaccatcaccacaatcaagccaatgaatatatccatcacttctaaaagttctctatggttctttgaaatctatctgtctcccaccccccaactccttccaggttccctagcaatcactgatctccttactgtcattatagattaatttgyattttaaaggattttatatggacaggatcatatagtatgtgctttcctcagaaatcagtcctgcaataaatattatgcacttgtgctctgggaatacagccaagagctaggctgtcacaattcctgctattatggagcttcagtctaccaagaaaggcaaataatgaataaataattgccataaggcctgttgtgtgatttgatgagaggagaagcatctgtggaagtctacag

SEQ ID NO: 869114 - DNA, 593 bp, Homo sapiens; identical to SEQ ID NO: 867672

SEQ ID NO: 869115 - DNA, 625 bp, Homo sapiens
aacacaatacacattcttataagtgccatcttttagatggagtcttgccttgttgcccaggtgaaaatggctggaatgcaatggtgtgatctgagctcactgcaacctccacctccagggttcaaatgattctcctgcctcagtctcctgagcatctgggattacaggtgcatgtgaccacacccagctaatttcttwtatctttagtagagatggggtttcaccatgttggccagactggtcttgaactcctgatcttgtgatccacccatcttggcctctcaaagtgctgggattacagtaagtgtgaggtgaagaagtcaggttctttgaataaaccagctctcatttgaattaatggagtgaaaactttctgattatcaaaaagatagtgtcaaggcatttatgaggtatttttccccttaacagacatgtacaaaactttctacttaaaagtcaaagaatacaaaatattcttatttgcacatgacgtattcagttaggaaatataacaagtcttattaaataataacagctgggggtagtggctaacatctataattccaacaatttggaagatgaaagtgagggagtcagttgggaccagaagtttgagaccagcctg

SEQ ID NO: 869116 - DNA, 588 bp, Homo sapiens
aaaaataattgggccctatcttggcccttaaaactaacttctacatccctagtgagaataggagcagctcaaagtgttcaacagagttctatcctgtctcggaccagatggacagttatatacttttcaaccttatgttacgaatatagctgttaatctatggggtcgagatttacttacagcatgggatatgagacttacaaatgaaactattgataatccaggatttaaatgttaaagaaaatgggatatcagaatggaaaagccttaggaaaatccctacagggaaaccctgatctaatatcaataactggacacacagatagaaaagggttaggacatcaggacttctgawggggaggtcattgatatttctcctccacctactgctttgccgctagagtggctgactgacaaacctgtatgggtggatcagtggcccctatcacaggggaaactgattcaactccatcaattagtaaaagggcaattggaagcaggacatatagaagagtcggttggcccatggaattcaccagtatttgtgattcctaggaagtcaagaaaatggtgattgctgcatgattt

SEQ ID NO: 869117 - DNA, 627 bp, Homo sapiens
taagaaaagataaagaaaatataactttttagtgagggtcattggggtaggggtgatatttctcaggactgcttcaagcatgaccagggactgcgtggacaccttaaagaaaattttattatgagttagtccagtaagtttcaggtctagggtgcattttttatgtggctaaagaggtgccagttagcatattttttagcttggaactgccctaagaaaataagttctctaaaaacagtaatcaggcatattagctttaatgtaggtggcgatgagtttttagaccaaggaaggaataatgttttatgtaccaaagctttttgtccccattttccatcatatgaataggattccctgttgttaagccaacgacctattatattactctttttccataggtgtgggtggcratgtgaatggagaagttcaatagttgtgattgcaaatcctatgcaggagagataataagtaaaataatctttgtttcctggataaagctgaggaagaataaatttttcatgagctaagagccacttgccctgagttggaaagactggtagagcaggttttcagaagaggagtaggtgggggtgatagagtagaaagaaaaatattggccttttggag

SEQ ID NO: 869118 - DNA, 627 bp, Homo sapiens
taagaaaagataaagaaaatataactttttagtgagggtcattggggtaggggtgatatttctcaggactgcttcaagcatgaccagggactgcgtggacaccttaaagaaaattttattatgagttagtccagtaagtttcaggtctagggtgcattttttatgtggctaaagaggtgccagttagcatattttttagcttggaactgccctaagaaaataagttctctaaaaacagtaatcaggcatattagctttaatgtaggtggcgatgagtttttagaccaaggaaggaataatgttttatgtaccaaagctttttgtccccattttccatcatatgaataggattccctgttgttaagccaacgacctattatattactctttttccataggtgtgggtggcaatgtgaatggagragttcaatagttgtgattgcaaatcctatgcaggagagataataagtaaaataatctttgtttcctggataaagctgaggaagaataaatttttcatgagctaagagccacttgccctgagttggaaagactggtagagcaggttttcagaagaggagtaggtgggggtgatagagtagaaagaaaaatattggccttttggag

SEQ ID NO: 869119 - DNA, 651 bp, Homo sapiens
cttttttatttcaagaagaaatcgtattacacagacttacaaacacttgtgtttgcttgaggggtggattataaaaatgttcactatttttattgtagtaatgtttttgcagatgtatacatctgtggtagtggatcaaattgtacaatttaaacataagaagtttattttaatttaattacatatcaagaaagttatgtaaaaaacataaaattcttagcatgcttggaatacaagagaatttgctaatttgataaaaagcttgtaccaaaaaaaaactcctaccaagatcatagttaatgataaaagattttttttctttgaatactacatattttttttatttcaatgggtttcgggagaacaggtggtatttggttacatgagtaagttcttttggtgggatttctaagattttgatacacccctcacccaagcagcgtacactgtacccaatgtgtactctttttaaaaaattattattatactttaagttctagggtacrtgtgcacaatgcgcaggtttgttacataggtatacatgtgccatgttggtctgctgcacccatcaactcgtcgtttatattaggtatttctcccagtgctatccctcccccagcccccaccccacggcaggccctgatgtgtgat

SEQ ID NO: 869120 - DNA, 614 bp, Homo sapiens
aatttcagtgaacatttaataaatgtcggtagagggaattacttctaaaaaataaatatgaaaggtaaataaacaatacaaatggcaggtaatatggtaccattttatttgtatacttcatttttaattaaaaatcatttacacttacacttacatgctctcaaaggtacacagatatagaggccttctttagaaattttttttatgatgagtaaagaagagcacttgtttactatttaaaaaaaatgtaactgatagtggtctgtctgggtctcttctctttcaaatcrctgccacacagcattaccaggtatttctgaaattccccattgttacctctagagagggcatagtggcaattcgatcaatgctgaatacaaaaatagaatacggtagtagaatatggtagtctgcatttcctggctgtaagatctgtgtttatgcatccttggtattgtgcttgcttttgtcaggtacgacaataatcctaaattaatgagtccattcaacattggctaccagagaatttcaggcaccttttatacagtcatttaaaataattacactgcctgaattgtctgagtagactggaagtgccttctgacctgacaccc

SEQ ID NO: 869121 - DNA, 640 bp, Homo sapiens
taaaaagtcgtagttggaggagactgacctcttttactacctggagacacatggtttaaacatatgctaccagttcagccatgttttacatgcatttggttttttttttttttttttttttttcacagaaatgaaaatggagtagaacatctactcccatttcccatgcaaaatgttattcaataataaaaaacgtgaatacatacataagcacgattattaatcatgagctgttaccaaaaatgattcaaactatcatgccacttggcatctccttaataccatatttatcatcagatatttctgtcaccaaagcattcaaattgtcagataaaaatctctgcctgggggaaatataaactatggcttcttgtaatgaatgaaaatgaaatgattccccacagtttattgccaractcactggaaataaaaattactaattaaataatcttagtttaaaataggtctgggtctgtcaagcacttttcttcattgtggtacaaaatgaggatgtcctacggaaaagtttcatattaacactttgataaatcagattacaattctgaaaagcacttttataatcgagtttttcccccactttaatatctgagtaatcttatctttaggataaatggagata

SEQ ID NO: 869122 - DNA, 652 bp, Homo sapiens
agaattatacatgatatcatttgctaccaatatttggcaatatttgccaatatgctgttatgtttctcccatcaaaaataaaatattttgaaatatgctctatatgaccagagagtggttgagaagatgtgcaaatgtaacatccaacagtgctcagggacttccaagargtttggccttgggcatgctcaccaaggcatggtagagcttcagggtcctcacgtttgaatggcccctctgttggtttcaaaggccgtattttcaagtcttctggctgtcagcccaacaggtatacccatcaaggaatttccaagttgtccttcagactctctgctttacataatttgcttctctgatccactattccagtgtaggatgcttctctggagatgacaactcctaactcctatgctttctctactacttccatgttgcatggctctgcctcttgctagtttggtcattaatttcaacttgattatttcctgatcaagaaaataactttacacatgagaaatcaaatcacttgaccactgaggattagtaatttattttcttcatctttgccatacttaaattttttttctaacgtaacttcaaaattgttctagacaatctacaagacacatagaattcaaagatattaaaatac

SEQ ID NO: 869123 - DNA, 662 bp, Homo sapiens
tatccaccatgatcaagtgggcttatccctgggatgcaaggctggttcaacatacacaaatccataaacttaatcctgcatataaacagaacccaaggaaaaaaaccacatgattatctcaatagatgcaaaaaggctttgacaaaattcaacaatgcttcatgctaaaaactctcaataaattagtattgatgggatgtatctcaaaataataagagctattatgacaaayccacagccaatatgatactgaatgtgcaaaaactggaagcattccctttgaaaactggcacaagacagggatgacttctctcagcacgcctattcaatatagtgttagaagttctggccagggcaatcaggcaggagaaggaaataaagggtattcaattaggaaaagaggaagtcaaattgttcctgtttgcagatgacatgattgtatatttagaaaaccccattgtctcagcccaaaatctccttaaactgataagcaacttcagcagtctcaggatacaaaatcaatgtgcaaaaatcacaagcattcttatacaccaataacagacaaacagagagccaaatcatgagtgaactcgcattcacaattgcttcaaagagaataaaatacctaggaatccaacttacaaaggatgtgaaggacctct

SEQ ID NO: 869124 - DNA, 662 bp, Homo sapiens
tatccaccatgatcaagtgggcttatccctgggatgcaaggctggttcaacatacacaaatccataaacttaatcctgcatataaacagaacccaaggaaaaaaaccacatgattatctcaatagatgcaaaaaggctttgacaaaattcaacaatgcttcatgctaaaaactctcaataaattagtattgatgggatgtatctcaaaataataagagctattatgacaaacccacagccaatatgatactgaatgtgcaaaaactggaagcattccctttgaaaactggcacaagacagggatgmcttctctcagcacgcctattcaatatagtgttagaagttctggccagggcaatcaggcaggagaaggaaataaagggtattcaattaggaaaagaggaagtcaaattgttcctgtttgcagatgacatgattgtatatttagaaaaccccattgtctcagcccaaaatctccttaaactgataagcaacttcagcagtctcaggatacaaaatcaatgtgcaaaaatcacaagcattcttatacaccaataacagacaaacagagagccaaatcatgagtgaactcgcattcacaattgcttcaaagagaataaaatacctaggaatccaacttacaaaggatgtgaaggacctct

SEQ ID NO: 869125 - DNA, 675 bp, Homo sapiens
aaaccccatagtttctgcccataatctccttgatctgataaacaacttcagcaaagtttccggatacaaacttaatgtacaaaaatcagtagcattcctatacaccaagatccaaaccaagagccaaatcacaaatgaaactgcattcacaattgccacaaaaaataaaatacctaggaatacacctaaccaggcaggtgaaaggcctctacaacaagaattacaaaacactgctcaaagaaatcagcaaaaacacaagcaaatggaaaaacattacatacttatggacaggaagaatcaatatcactaaaatggccattgtgcccaagacaatttacagattcaatgctatttctatcaaatgactgatgacattcttcacagaactagaaaaactattaatattttaaaattcatatagaacaaaaaaagcccaaatagcaaaggcaatcytaagcaaaaataagaaaactggaggcatcatgttacccaacttcaaagtatactacagggtactggtaaccaaacagcatggtacttgtacaaaaatagacacatagaccaaaggaagtgaacagagaacccagaaataatgctgcacacctatgaccatctgatcttcgacaaaccttacaaaaataagcaatagagaaagcatttcccatttaataaatg

SEQ ID NO: 869126 - DNA, 610 bp, Homo sapiens
gctacaattttaatttataagattttatataatttaatccttcaaataatgccttatgtaaacacggcttttacttaatttttatgagtggggaaacagaggagtaagaaagaaaattatatgcctttgatcgtgcaggaaatatgcactaacactggacttagaatggaagtccctaactcccaaacaaacacatgcactgttcatcacagrcatatgaattctgggtaatggattggctgaaagcaacagccttgccagagaagtctatcattagcagtgtatcaccgattaaatggataaagttattctaaagaggcttcaacaatggagatcttgagtttgttcttttagacattctctccgcatttttccctcacttcttctacagttgacccacttctgtcttaacacatttttaaaattatggttatgtaattaagtggctccttggtgacgtttttgaggaaattttgaagtactgtattaattcctgaaaagagacatgcaagatctatctccaaaccctcagaacttgggcaccaccccaatcaaactgtttcttagaatgtggatgtaaatacaccaattagcagttcactgaatgaag

SEQ ID NO: 869127 - DNA, 690 bp, Homo sapiens
agccttatatcatgccaatccccattaatctttggggtagagatttgttggcacaagggggagctgaaattaatattcagcataactcttatagtgctcccagtcaacatataatggaaaacatggggtttgttcccagactcggtttcagtccaaaacatgaaggaattgctaaacctcttcaagttactgtaaaagaagacagsgctggtttaggttctcctttttaatggcggccactgccatgcctcctaatcctattcctttacaatgaaaatctaaaacacctgtttggattgatcagtggccactctctaaaaaaaactggaggcttcaactcaattggtttctgaacagttacaacttggaaatgtggaatcttctctttccccctggagttctcctgtgtttctagtaaaaaagaaatcaggcaagtggtggatggtaactgatttaaggtccattaatgctgtaattaaacctatgggagccatccaacctggcatgcctgcccctgctttaatacctaagaatttcctctcatagttattgatcttaaagtatttttattgctttacataaattggattgtgaaaaatttgcctttactgtaccatctatcaataatcaggagcctgtagctcattatcaatggagagtacttcctcagggaatgctgaatagccctac

SEQ ID NO: 869128 - DNA, 685 bp, Homo sapiens
cacatgtagatggttgtattcatctacaagctcaaatctgggctgcttatcttccggagagattagctacaagagaacagggacatttgatctccagcctctctctttctcctttaagacaaatgaaagggggagtaataggagataccccaaactttcaatataaacctgtaggaaaaccatgtcctaaaaattttgagggcccatctaaaattttaatttgggaagaytgtgttaactcacatgtagtagtactaaaaaatgacgcatatggtttagtaataggatgggcaccaaagggctatttaaaaaacaattgctcctctggtggaagggaatgcctggaggctacttattttatttcttattgggaggacgaggatcatcgttctactttacataggaagttcagctcattctttcccttaaaatgggaagataaaggcattacccctccgaggcctcatatgatattccccattctgagcctggaacactcagaactttggaaattggctattgccatgtctggactgtgagtatgggaagggtaaacttttctgtctgttatccccactactgccccttgcatccatgactctgaaccccatgataaatcccctttgaacccttttcctctttttgatgctgatcctcctttatgggactccaattggcattatga

SEQ ID NO: 869129 - DNA, 617 bp, Homo sapiens
agatcttcctccatccctttattttaagcccatgtgtgtctctgcacatgagatgggtttcctcaatacagcacactgatgggtcttgactctttatccaatttgtcagtctgtgccttttaattggagcatttagcccatttgcatttaagattagtattgttatgtgtgaatttgatcctgtcattatgatgttagctggttattttgctcattagttgawgcagtttcttcctagtcttgatgatctttataattcggcatgtttttgcagtggctggtactggttgttcctttccatgtttagtgcttccttcaggagctcttttagggcaggcctggtggtgacaaaatctctcagcatttgcttgtctgtaaagtattttatttctccttcacttatgaaacttagtttggctggatatgaaattctgggttgaaaattcttttctttaagaatgttgaatattggcccccactctcttctggcttgcagagtttctgcagagagatcagctgttagtctgatgggcttctttttgtgggtaacccacctttctcttgggatgcccttaacattttttccatcatttcaactttggtgaatctgacaatta

SEQ ID NO: 869130 - DNA, 577 bp, Homo sapiens
ttcaaattttttaacttctttgccattggttcgaacttcctcctttagcttggagtagtttgatcttctgaagccttgctctctcaactcgtcaaagtcattctccgctcagctttgttccattgctgatgaggagctgcgttcctttggaggaggagaggcactctgatttttagagtttccagtttttctgctctgttttttccccatctttgtgattttatctacctttggtctttgatgatggtgacgtacagatgggtttttggtgtggatgtcctttctgtttgttagttttccttctaacagtcaggaccctcagctgcaggtctgttggagtttactggacgtccactccagaccctgtttgyctgggtatcagcagcagtggttgcagaacagtggatattggtgaaccacaaatgcttctgcctgattgttcctctggaagttttgtctcagaggagtacccagccatgtgaggtgtcagtccacccctactgggagatgcctcccagttaggctactcaggggtcagggacccacttcaggaggcagtctgcccactctcagatct

SEQ ID NO: 869131 - DNA, 564 bp, Homo sapiens
tctcattgttcaattcccacctatgagtgagaacatgtggtgtttggttttctgttcttgtgacagtttgctcagaatgatggtttccagctgcatctatgtccctgcagaggacatgaactcattttttatggctccatagtattccatggtgtatatgtgccacattttcttaatccagtctatcattgatggatatttgagttggttccaagtctttgctattgtgaatagtgctgcaataaacatacatgtgcacgtgtctttatagtagcatgatttataatmctttgggtatatacccagtaatgggatcactgggtcaaatggtatttcttgttctagatccttgaggaatcaccacattgtcttccacaatggttgaactagtttacacttccaccaacagtctaaaatcattcctatttctccacaacctctccagcatctgttgtctcctgactttttaatgatcgccattctaactgttgtgagatggtatctcactgtggttttgatttgcatttatctaatgaccggtaatgatgaccatttttttcatat

SEQ ID NO: 869132 - DNA, 633 bp, Homo sapiens
aattgaaatgcaacataattatgataaagaaggaaatgccaggggcttcttttctctatggactacaataccatagtgaattgggcctttcaaaatccagaaactttttattggctgttcgtttcacgaaagcagaaatactccaggatgtgttttcartaattaaggtaatctttataatacatatttttctttagcccagctgactatccaaatgagtgagtgtttggtgactaatgtaaatagctgtatgaaccaattccagatattttagctgtgaatgacttgatgataattataacagaagcaaaatgagtgttcctcattttaatgtgacctaataacaccatatcatttaagacaatatttattttttagtataatatgaactggtcctaattctgaggtatgctcataccttagagtatcaacactagagagttattacaattaatgactggctttctattgtgttcgagccaattaaatttttttttcaaaattctcttctgcaagtcatttctgaggtctccttgcaaaccatttgcacagtcataacatctatacaagtatttgcttatcaccttggccagaaaaatctcttttcaaggctgcttcacagggtttcttgag

SEQ ID NO: 869133 - DNA, 598 bp, Homo sapiens
ttgtagaaacgagaatagaggctggcactccatacctacttcatcacgttaattgcgctctgctatttaaacgttgaccttgcatggaaagcagagaccagactttcctttattttctgtgcgaaagttctcttaggaaatgccttctgacatttgttgagttcatgctggctgcaaccactggggctgctaaagcgtctttcacagtagaggaacactggaggtagagtctagctgtttattgcaagtatttctcactctcctgtttgaaacaatcctcaaggaagccgagttctctttagaggatgtcatccctccttccttctctgctcctggctcctaatgcttgcytaaagagtttgctctttccagcttcctctatggagtcagaagtctccacttgaacttgcccctttgaaagttcctgttgggctgatgttttggcaagcagaatgttgcacttaaaattgatccttccttgcttgtagaaaatgcatctaaggtacttagggaattatttggggttgggaaggcttgatgcctcataaaatgaagctctgggctgaaatactgttgaaatatgtcaagctccagagtt

SEQ ID NO: 869134 - DNA, 631 bp, Homo sapiens
gagaatcacgcggtcaggcaatcgagaccatcctggctaacacggtgaaaccccgtctctaccaaaaatataaaaattcagcctgacgtggtggtgggcgcctgtagtcccagctactcgggaggctgaggcaggagaatggcacgaacccaggaggcggagcttgcagtgagccgagatcgtgccactgcacttcagcctgggcgacagagtgagactccgtctctaaataaataaataaataaaataaaactgacaaattctagccttgcccagcaagttgtctcttggacaaacatcctttgtagggcatcaaaaagatgatagaacctatggttgtagcacaagttggaaaacaacagttcatgggtggccatgtgtttttctgaataattttaacaggacatatccgtgtccatttgtttacatattatctatggctgctgytgttctacaacagtagagtggaatagttgtttcagagaccatgtagtctacaagcttaaaatgtttactatttgtccctttaagaaaaagtttgcctgcttttgagctagaaaataaactttatgaattttataagtgtgtctcaagtcctccctgttaagcaatagagtttttaagaagctta

SEQ ID NO: 869135 - DNA, 631 bp, Homo sapiens
gagaatcacgcggtcaggcaatcgagaccatcctggctaacacggtgaaaccccgtctctaccaaaaatataaaaattcagcctgacgtggtggtgggcgcctgtagtcccagctactcgggaggctgaggcaggagaatggcacgaacccaggaggcggagcttgcagtgagccgagatcgtgccactgcacttcagcctgggcgacagagtgagactccgtctctaaataaataaataaataaaataaaactgacaaattctagccttgcccagcaagttgtctcttggacaaacatcctttgtagggcatcaaaaagatgatagaacctatggttgtagcacaagttggaaaacaacagttcatgggtggccatgtgtttttctgaataattttaacaggacatatccgtgtccatttgtttacatattatctatggctgctgttgttctacaamagtagagtggaatagttgtttcagagaccatgtagtctacaagcttaaaatgtttactatttgtccctttaagaaaaagtttgcctgcttttgagctagaaaataaactttatgaattttataagtgtgtctcaagtcctccctgttaagcaatagagtttttaagaagctta

SEQ ID NO: 869136 - DNA, 578 bp, Homo sapiens
ttatgctctttagttttgtatcttttatctaatttgatctttctttccataaataaaaataaggtaattgtttagaaagagacatctgtaatatatatatttttcccacataggagtctttttaacttaaagatccattgtctggccactaatgactaatgaatatctaatgatgtacttattttaatagtgattcaatctaataaggctctttatggaaagaccaggaggtaattgttaggcttagaataagtyttaccatataagcaaaaggagttcctggaaagggtgtcaaagagacaatgcccatgatcacccaaaattaatgcctataaatagactaagagagcaaaaagatggttacagtcacagatggttgagaacagtgttttcggaacagtgtctccagtatctcacaaatttgtggggggttgccagttacagacctgttaatctgtgatatgggcaggtcctcctggaactggactttcccagtactaatcgggcaatgagagttgagacagcaaaaggcctttatggatggtactttttattgacgtaaactcccctgagagctt

SEQ ID NO: 869137 - DNA, 602 bp, Homo sapiens
ataaatatatgataagaatggcattcaaattacttggggaaaatgtaatattcattcaatttttcagggtacctagctagccatatgcatacaaaatgagataaatgccccaattaaaagactcagactggcaaattggataaagagtcaagacccaatggtgtgctgtattcaggagacccatytcacgtgcaaagacacacataggctcaaaataaagggatggaggaatatttaccaagcaactggaaagcaaaaaaagagcaggggttgcaatcctagtctctgataaaacagactttaaatcaacaaagatcaaaagagacaaagaagggcattacataatggtaaaggtatcaatgcaacaagaagagctaattattctaaatatatatgcacccagtacaggagcacccagagtcataaagcaagttcttagagacctacaaagagactgagactctcacacaataatagtgggagattttaacaccccactgtcaatatgagacagatcaacgagacagaaaattaaggacattcagggcttcaactcagctctggaccaagtggacctaatagacatctgcagaactctccac

SEQ ID NO: 869138 - DNA, 560 bp, Homo sapiens
aactgggaaaatcctgacaatgcatcagttttaacatatcccctttcttcatttcttcagttccagcttttatctacttaaatctaatgaagttagcttagatacagactttctaatagaagtaagcttttagaaataaatttaaagagcagaagacttgttttgtttcaggagtaaggtacagaacataacacagtagacaaggaacagaagagtgaatgtgagctaaatagttttacaawccacagtcttcagggttgaagagaagggagatgttgatagggcaaattgaaaaggacttttgatatgaaaacaaagtaaagctgcttcttgaatatatttaaaattaactctttagattacctatataaagccgatatttactgagcacctattatgtacccagagtttcatataattttcacatgtaatgaaatatctttcttttgatttttatatatttttttaaaatataaaaatctttggctcacaggccatacaaaaacaggcagtgggccagatctgatcttagtttgtcagtccctgctctacagcaatga

SEQ ID NO: 869139 - DNA, 646 bp, Homo sapiens
ttatttcactctgtttccacctttgtttttccctcctttgtttcacatttatgttctgttgttatttaacatattatttcattctgtcttaaattctttctgaaacaatttagcatataaatgtgtaaacttgaaggttgtagcattacctacagaagtgtaactggcaaacaaaacaagctcagttcttttttccatagtctttttttttttttttttttttttggacagggtctcgctttgtcacctagcagtgtagtggtgtaatcacagctcactgcagcctcgacctcctgggcgcaaggaatcttccagcctcagccacccaagtagctgagactacaagtacgtgcaactatgccttattttttattttttattttttatattatttatttatttattttaaatttttttattgktattgagacagggtctcactattttgcctaggctgatcttgaactcctgagctcaagggatcctcccacctcagcctcccaaagtgctaggattacaattgtgagccactgcgcctggacaatagtcattattcaatagaaaaaaaccatagtgacattagtaagttttaatgtaaaaagttattgaagataacttgactttttagggtagtgaacttctgtgt

SEQ ID NO: 869140 - DNA, 432 bp, Homo sapiens
gttgaaaaagctggcttcaatttattgagcaagatgctggtgttatcatctaacataaaacctatcttataataaagtgttgacacatgtaatgagtactgtactgaaaaatggtggtatgtatatggtttgtactgattatgtatcgcttttataccatcaaaaagttgaaaaatcataaagttgaatcatcctaaaatgggtacattctgtactatgtttccaaggcttcrgaagtgttgcatacacattcctagccagctgatagtgctaggagccaacagtagtctcccccgggggccaagaggagggcgaaatctctactatggtatatgatgttctcgtgggccaagtatgagggtgatatttcattgttggcactgggtttctggaatccatcctcttcaccagggagatttaatgaaccaaatg

SEQ ID NO: 869141 - DNA, 611 bp, Homo sapiens
tcatctctatctgagaccacctcagcctggaccttttcattcatatcattatcagcattttggtaaaggcaatcaacaagtctctccggagttccaaactttcccacattttcctgtcttcttctgagccctccaaaytgttccaacctctgcttgttacccagttccaaagttgcttctacattttcaggtatcttttcagcagcacccgattccactggtgccaatttactgaattagtccaatttcatgctgctggtaatgacatactcgagactgggaagaaaaagaggtttaattggacttacagttcgacatggctggggaggcctcagaatcatggcaggaggcaaaaggcacttcttacatgatggtggcaagagaaaatgaagggatgcaaagtggaaaccattgataaagccatcagatcttgtgagacttattcactgccatgagaacagtatgggggatacctcccccatgattcaaattatctcccaccgggtctctcccacagcatgtgggaattatgagagcacaattgaagatgagatttgggtggggacacagaatcaaaccatattacctggcatctgaatcactggacataa

SEQ ID NO: 869142 - DNA, 506 bp, Homo sapiens
catggtagattacttaaatataatgaatttatttcacccagaaagagagggaaagaagctactttcaaaggtaagtgaaaaaaaaaccctatgctggccaggcatcacgcctgtaatcccagcactttgtgagggcgaggagggtgaatcaccttaggtcaggagttggagaccagcctggccaacatggcgaaaccctgtctctactaaaaatacaaaagttcgacaggcatggtagcaggtgcctgtagtcccagctactcagaaggctgaagcataagaattgcttgaacccaggaggcggaggctrcagtgagctgagattgcaccactgcactccagcctgggggatagagcgagactctgtctcaaaaaaaaaaaaaaaaaaaggaaggaaagctctatactttctgatctcagaattcagtgcactatcaaacacaatgtaattaaaatggtaattataatgttagcaaattcattttaacatagtctttctaaaggaa

SEQ ID NO: 869143 - DNA, 486 bp, Homo sapiens
ggggcaaaatgtcaccagtctctttgctaaaacataacaagagtcacttttgctccagttcccaacaagttcctcatctccatctgagacatctgagcctggatttcattgtccatatcattatcaggattttgggtccaagccattcaacaagtctctaggagttccaaactttctcacattttcctatcttcttctgagccctccaaactgttccaaactctgcctgttacccagttccaaagttgcttccacattttcaggtatcttttcagcagtgccccattctactggtaccagtttactgtgttagtccwtttatgctgctgataaacacatatgcgagattgggtaatttacaaaaggatgaggtttattggacttgcagttccatgtgactgggaaggcctcacaatgatggcagaaggtgaaaggcatatctcacatgatagcagacaagagaaaagagagcttgtccagggaaac

SEQ ID NO: 869144 - DNA, 627 bp, Homo sapiens
ctgatatgatttggctctgtgttcacacccgaatctcatgttaaattataatccccagtgttgggagagacacctggtggggggtgattggatcatgggagcagatttctcccttgatattctcgcgatagtgagtgagttctcatgagatctcatggtttccaagtgtgtggcacttcccccttcactcactctctctgctccaccatgagatgtgccttgcttccccttggccttccaccatgattgtaagtttcctgaggcctcccagccatgcttcctatacagcctgaggaactgtcagtcaattaaacttcttttcttcataaattatctagtctcaggtagttttttatagcagtgygagaacagactaatacaactacccaccccgcttctcaaccatgtcaggaaactagaaagagggccctcatcagaacactacatgctgtcaccctgatctcaaacttcacagcctccagaatggtgagaaataaacatttgttgttaagccacccagactatggtgatttgttgtaatagcccagactgactatgaaagaacttggtaacaagaagtgtggtgctgccttaacaaaccagaacatgtggaggcagctttggagc

SEQ ID NO: 869145 - DNA, 590 bp, Homo sapiens
ataaaaaaatttagtgaagatatacagatttgaccaacttaaataaattgacattcatggcacactataccctgtctcttaaaaaatgttttagataaaaataaataatgaaatatatgtgtgtgtatagatagataagtaactgagcttttcactttttgttttgaaaggactgttaaattataggtgcccctgaatgcatttttattctcagtaaggatgcatatgcttatcttagctggacccacaaggagaaggcctgattgtcaagaccyaggaaaagcctgaggtggcttcctgctgctcccttggaggcctgtaggaggcgccattctgcccccatcatccgttaagggcttggctctgacagctctctgaagctcactacctaactccttcctaagaagcaaaatctgaccaggatggtaagaaactatcacccttagctttcttctttggacactctccatactctccattttcctgcatgccttcagagcactgtaagcagcaacgaaattttattttctgtgtaaacacctgctcatttagagaaaaagagtcagtatctcctctacctctgcaacctg

SEQ ID NO: 869146 - DNA, 622 bp, Homo sapiens
ctttacgtgtatcctgaggcacagggtcccaaactgcattagttcaacagacagcagcatgataataaaccccagggtgtcaacctattagttttaaaaatagctataaaattgactttaaatctgatttgtaatattttgcagtcttcatagtagtaattcataactacctatctatactttctttaattatttaaaaattcataatactatcatcaagaatgttctgaaaattgtcaaacccaagaggtcaaaactatcattttttgggttactatgtttcaaataaggaaaataaggagcagcggaagaactgacattgaactgagtctttttttttttttttttttaagacagtcttgctctgtcacccaggctggagtacagtggcacaatctcggctcactgcagcctctgccgcccrggttcaagcgattctcctgcctcagcctcctgagtagctgggattacaggcacccaccaccacacccggctaatttttgtatttttagtagagacggcgtttcaccatcttggccaggctggtcttgaactcctgacctcgtgatccacttgccttggcctcccaaagtgctgggattgtaggcgtgagccactgcat

SEQ ID NO: 869147 - DNA, 660 bp, Homo sapiens
ggtagggttgcctgtgtccatgcttgcacttgtaccagcagtgatggcagcatgggtgggtcactggtggtttcaaggatgctgccctccatgcacacatttgcattggcagcagtgatggcctcattttagttataaacttttttaaggacatattaacatacattttattttttgttcttctaaaaatctaactttatagtttacatacaatacaatgcaccaattttgattgtacagttcaacatgttcagaaaaatgtatacacccatgtaactaccaccacaatcaaggtatggaacatttctatcaaatccacacaaatkaaaaataaataaataataaataaataaataaataaatagttttgtcatgttactatgtggtcagtctttcctcttccctgttccaggcaactactactttgttttctgccatgacatgataggtaagtttgcttattccagaatttcatttaaatgaaatcacaaggtaattatagatttatgattttattataattgagaaacttattagttctaaattggacagtgcaataaattttttgttgttttttgtttttctccccgggagaggcagtttaatgagctcggggccaatacaaaagatcaaatttctctccatggggaaatgcaggaa

SEQ ID NO: 869148 - DNA, 599 bp, Homo sapiens
gaaaaaaatccttttgtagaacttattttaaaggcatttcatactgttaaaaaggaacagctttcaaaatacaaatcaagtatataaatccattaagtgcagtcacatcaatacttaggtcaaaaccatcacatgacacatagtactataagatcatacttaaaatccctcttatctgtaagtctttatattaactgcttagaattgcagctgtctcccttatttttctctaagtcttcgtagacatcatatatatatatatatatatatatatatatatatatatatatatatatatatattcttaaatgtcagaaggatagtgttgttttcatatagagtggaaatgactagatacttaaaaatacattgttcctatggaaaktaatctctggaggtttagattaaagaaaaatactattcgggtatgagatgaaagctatataaaatgactaattttatttcaattttataatcattcagggctacatctttcaaccttatctctaaaatatgcaagtagatagcaggacaatactagagtgccgtgttaattccctttgctaatgtactggcagtcaaaactgaaagactacaat

SEQ ID NO: 869149 - DNA, 599 bp, Homo sapiens
gaaaaaaatccttttgtagaacttattttaaaggcatttcatactgttaaaaaggaacagctttcaaaatacaaatcaagtatataaatccattaagtgcagtcacatcaatacttaggtcaaaaccatcacatgacacatagtactataagatcatacttaaaatccctcttatctgtaagtctttatattaactgcttagaattgcagctgtctcccttatttttctctaagtcttcgtagacatcatatatatatatatatatatatatatatatatatatatatatatatatatatattcttaaatgtcagaaggatagtgttgttttcatatagagtggaaatgactagatacttaaaaatacattgttcctatggaaagtaatctctggaggtttagattaaagaaaaataytattcgggtatgagatgaaagctatataaaatgactaattttatttcaattttataatcattcagggctacatctttcaaccttatctctaaaatatgcaagtagatagcaggacaatactagagtgccgtgttaattccctttgctaatgtactggcagtcaaaactgaaagactacaat

SEQ ID NO: 869150 - DNA, 587 bp, Homo sapiens
acaaaataaaaactgggttacttaaactaacatcagataaatagacttgaagtgaaaaactcttacagagaaagacagtaaatattgataaaataataaatttatcaggaagatataacaataataagcacacacattcggcaacagagctcccataacatatgaagtaaatattgacatatttgaaggaagatataattcaacaataatggttggagacttcagttgctcactttcaataatggatagaagatctaggtaaaagataactaargaaatagaggatttgaacaacaccttaatccaactatgcctaaacagacgcatgtagactacttcacccaaaaccacagaatacacagttttttcaagtgtatatgaaatagtctgcataataaactgtatgttaagccacaaaataaatctgaataaattttaaaaggttgtaattatacaaagttttttctcaaacaacaatagaacagagctaaaaatcagtaacaagaaaaattttaaaatacatgaatatgtgaaaattaaacacacttttaaatggtcaatgagtcagaataaatcacatgaaaaac

SEQ ID NO: 869151 - DNA, 574 bp, Homo sapiens
agtgttaacaccatgcaatgaaggacagaacagtgccttcaacaaatggtacaaaaacaactggatattaacatgcaaaggaatgaaataaaacccctacctcacaccatatacaaaaattaactcaaaatggattaatgacctaaatataagtgttaaaattgtaaaactattagaaaaacaaatattatttttcatgatcttcaatctggtgatggatgcttagatatgccatgaaaaatatgaacaacaaaagaaaaaaattgttagatagggcttcatcaaaattaaaaactcttatgcatcaaatgatgttatcaggaacatgaaaagaaaacytagagaatgaaagacaatgttttaaatcatgtatatgataagcgcctattatccagaatatatttttaaaattcttacaactctgagtcaaaaggaccaaccaccccattttaaaaagaagaaaaccttgaatagccatttctctagaaaaaatggacaaacgaccaagaaactcatgaaagatgctcaaccttattaggtattatgaaaatgcaaatccaaaccacagtgaaat

SEQ ID NO: 869152 - DNA, 566 bp, Homo sapiens
aacccaaccctctcctgatggccatgtctgggagaacatctttctcactatccgtctcaagaattctacagcccagtatatagaagttccctgaggatgtgctttggactgcttgtcctggcatttagtggtttttttgtttggaattccaactggcctcatcttgggatggtatggggcagtcttttgggggagcttccctgccactacttttggggtgactctagccatggtctcagccaaacacaacaatatgcttgttgctcctagggtttcattacttctaagcactctcagcagacagaacaggcaatgtatttaygtatcataactcctgtatctatacatctctacaattttttctgtatccctctttatacatattaagttaaacataagatcacactgatgtctcttactaattccattgcacagagtttattctagcattactttcttgtttataactttcctctccaacagtgagaaacctggcttccacccaccacctgccatccatttagttatttcttcatcctcagtgtacatgaacagtggttccagaa

SEQ ID NO: 869153 - DNA, 645 bp, Homo sapiens
cctaccttttgctaccttttgacattatacaagaaaattctcactatctgacaagatttactgcctccccatttgacctctttcgtcttactcaccaaaacagttttctttttatacatccattcattcaatcagtaaacaattattggattttttttgatgcttcaggtggtatgataggtaataaaactaaataggaaaatagatacattctgtatagtttcattcttgttgtaaaacttactatccagtagcacatatggctattagacaaataattacacaaaggtaaccattattttgtcggtacagcatacctctagattgtgtccttgtcacacacatgtacctttttctagtaataggctctgccccctaggtgagtggccgtgtctctcagactgggtcaattacagcacagtactccatttctctagcttcagtgattggtacaagttctggcatgtgattctaacygacccaaaagaatccttcctctgaacttttctatgtggactgggaaagagcatagaatcttctagccctcatgatgctcaccagataaagaaagttcatttgctttgattaagagaaaataaagccaagcagaggcaggcataaatgaactacaaatggtaaagagag

SEQ ID NO: 869154 - DNA, 648 bp, Homo sapiens
aattattctcaggccatggctaattactttcagattctcaaatactccaagcctcttttcccctcagggcttccaaaacattgtttctagcgtataacaccttcctctctctggtcttcttttgcttaactcctgctctccctcgcaaactcacattatgtttttcaggaagccttatgtgatctcactaggttaagttatacatcacttctctatataatctactggcaatttgtgcgtacctctaacatagcctttagtagtataattgaacattttatgtttaaatcctctagtgcctaatataatgcatataataaatacccactaaatattcattgagtaaacagtaaacaaaataaaataaatgagacctaagtgaaaagctatgaaccaaaaagatatttgtacttttgttttttttttwaattttggtatcttttaaaagctctttgtttcataaatcctttcaacataattcacttggcactaaactatacatatttaatttatctttaatattacctgaaaaatctatatttaacattaatttttctctaaaatatgcaattctaaaatggcactgtacccacaactgataatactgtcttgatgatgctaatttagaccaaatgaacaattcatttt

SEQ ID NO: 869155 - DNA, 625 bp, Homo sapiens
catatatagatcccattatttatgttccgctagagaatcctgactaatacactaatttataaagtccatgacaactcaaacacacttgccgaatcctccattaaagaccacattaacattcaaattccttcttaagagatagtggctgggttcagtggctcatggctataagtccagcactttgggaggctgaggcaagcagatcatctgaggtaaggagtttgggggtagccttgcaaacatggtgaaaccctgtctctactaaaaatacaaaaattagcctggcatggtggtgkgcacttgtaatcctagctactcgggaggctgaggtaggagaatcagttgaactcgggaggcagaggttgcagtgagccaagattgccccactgcactccagcctcagtggcaaagcaagactccatccgaaaaaaaaaaaaaaagagtagttttgggtgggtgcaagatttccaaacctcaaactcaagtgttacgacaaccttcagtcttgcttgtctcaccaatgtggtgagttttagtgctgcatgaagctaaagtaatgcctatgaatggaggatgtggaccatattccttctttggccaaaggcagaataaacccaggattgca

SEQ ID NO: 869156 - DNA, 625 bp, Homo sapiens
catatatagatcccattatttatgttccgctagagaatcctgactaatacactaatttataaagtccatgacaactcaaacacacttgccgaatcctccattaaagaccacattaacattcaaattccttcttaagagatagtggctgggttcagtggctcatggctataagtccagcactttgggaggctgaggcaagcagatcatctgaggtaaggagtttgggggtagccttgcaaacatggtgaaaccctgtctctactaaaaatacaaaaattagcctggcatggtggtgtgcacttgtaatcctagctactcgggaggctgaggtaggagaatcagttgaactcgggaggcagaggttgcagtgagccaagattgccccmctgcactccagcctcagtggcaaagcaagactccatccgaaaaaaaaaaaaaaagagtagttttgggtgggtgcaagatttccaaacctcaaactcaagtgttacgacaaccttcagtcttgcttgtctcaccaatgtggtgagttttagtgctgcatgaagctaaagtaatgcctatgaatggaggatgtggaccatattccttctttggccaaaggcagaataaacccaggattgca

SEQ ID NO: 869157 - DNA, 658 bp, Homo sapiens
gtcactgatgaatatatatgcaaaatcatcaaaaaatactagcaaaccaagttcaatatcacattaaaagaatagtacacacttaccaagtaagatttgtccttaagttgaaagaatgtttcagtattacacaatcaatatgataaatcacattttcacaatgaagaatatagtcatatgattatatccacagatgcaggaataatatttgacaaaagtcaacactttttataatacaatctttcaacaaattaggtatagaagaaatgtatcacaacataataaagggcataaatgagaagcccacagctaatatcataggtaatgaaaagaagctgaaaatgtttcttctcagatgaggacaaagtagaggatgaccactcttcccacttttatttaacataatactggaaatcctagccagarcaataagatacaaaaaaaaaaaaatccatattgcaaaagaagaactaaaattatctctgtatgcaaatgatattttatatgtagaaaatccttaaaatctccaccaaaaaaaaaactgttaaaacaaagaaatttagtaaagtttcaggattcaaaattaacatacaaaaatcagttgtgtttatatatactagcagtaaactattcagaaagaaaatttagaaaacaatct

SEQ ID NO: 869158 - DNA, 658 bp, Homo sapiens
gtcactgatgaatatatatgcaaaatcatcaaaaaatactagcaaaccaagttcaatatcacattaaaagaatagtacacacttaccaagtaagatttgtccttaagttgaaagaatgtttcagtattacacaatcaatatgataaatcacattttcacaatgaagaatatagtcatatgattatatccacagatgcaggaataatatttgacaaaagtcaacactttttataatacaatctttcaacaaattaggtatagaagaaatgtatcacaacataataaagggcataaatgagaagcccacagctaatatcataggtaatgaaaagaagctgaaaatgtttcttctcagatgaggacaaagtagaggatgaccactcttcccacttttatttaacataatactggaaatcctagccagagcaataagatacaaaaaaaaaaaaatccatattgcaaaagaagaactaaaattatctctgtatgcaaatgatatyttatatgtagaaaatccttaaaatctccaccaaaaaaaaaactgttaaaacaaagaaatttagtaaagtttcaggattcaaaattaacatacaaaaatcagttgtgtttatatatactagcagtaaactattcagaaagaaaatttagaaaacaatct

SEQ ID NO: 869159 - DNA, 466 bp, Homo sapiens
tcggttatattgtttggacaggaaaggggcagctcaaatctcagttcagattctttctctttagctgacctcttttgtctgcatcacacatacataggtcatagattagtcataaatatgggtagaaagaattatggaccccatttttggctctttcccttctagaatttctttttttttttttttttagtggagtttcactcttgttgcccaggctrgagtgtagtggtgtgatctaggcaggttcaagtgattctcctgcctgactccagagtagctgggattacaggcacctgccaccacgcctggctgatttttatatttttagtagagacggggtttcaccatgttggccaggctggtctcgaactcctgacctcaggtgatccgcctgccttggcctcccaaagtcctgagattacaggcgtgagccaccgcacctggcctcaccattgtcttgtctctg

SEQ ID NO: 869160 - DNA, 636 bp, Homo sapiens
aaaaacatgcagatgaccaaggattcctgaagaaattccctaacctgaaagagatgaaaatacctagcaaaaacaacttagaggaaatagagatggtgctgagagaaaaaataaaaacaaactatattattggaagatatatatattggaagataaagttgaacagaaaagtagaaaaaataaagacttaggaggtgaataataggaaggaagagaaaatcagaaacaagtccaagaggtacaatgctgggaaaacaagagttccagaaatcaggaataaagaatatggagtgtaagaaaacatgaatrcaattattcacaataattcctcagaactgcaagacatgagtttgcagcctgaaatggcccatcaatacccaattcaagggatgaaaccagatctacacaacatgaaattgtgtgattggtttatggttcttttcccctcctcactcttgtgttagttcactgtggacagggaaacctcattgctcctttgacttggacttggccatatgacttgcactgagcgatggaacacaactgggtttgatataccctacatctgccagaggctataagtgtgcccatggtgtttggatgaaacttaaacactcttgcctggtgccctgagaa

SEQ ID NO: 869161 - DNA, 578 bp, Homo sapiens
ccgccccagctcagcccaatgaactcacagaattgtgacaaataataaaggatttttactttaggcagctaagtttcagggtagtttgttacacagtaatacctaactgtgaaccccaaggaacgcctgctcctcacgtcggctttgaattctcacagctttctcttctgccttaatgtttgttaagctgttttacagtatattatttatcttatgcttctgtgtgagtggagtgtgttcctatcaggaggccagttggtgtatggtgtccacatttgctcaattcccaatttgggggaaattcaaacactcgttgcacatagaaagtcatgtaagcaccctgtcttggcttatatgtccctccatgaggcgatgcctgcctgatgcttgaacctcactgcttatataaccccacattctcacctctcaggcytcagccatgccaatacaccatggtcttttgtgctctgcagccaccaggcatcctgcctcacgaccaagatggtctcttcccagcacataacatactcattctttttcttttgtcagcttagttgccatttttcaagtgaagttct

SEQ ID NO: 869162 - DNA, 580 bp, Homo sapiens
gctggcaggagagagagagtgaaggggaaagtgctacatattttcaaacaactagatcttcttgagaactcactcactatcagaagaacagcaagagggaaatccacctccatgatcaatcgcctcgcaccaggcccctcctccaacaatgaggattacaatttgacttaagatttgggtgagtacacagagacaaaccatatccctcacataatgtccccagggataatttaggtatcatatatttattcacaatagccaagatgagaaaacagcytaaatgaccattgaaagacaaacagatttgaaaaacgtggtatatacgtgcagtggaacattatttagccttaaaaagaggcaaatgtaacagtgcttctgccttgagatgaatgctgtttatctgcactgtccgtaaagtatccacgtagggctgttgaggacatcaaatgtggccagtgtgactgaacaactgaattttgaattgtattgagttttaagtcatctcagtataagtagctatatacagctagtagcacagctttagactataatgctatataatcaggacattgattatata

SEQ ID NO: 869163 - DNA, 529 bp, Homo sapiens
gacctcgatttccatcagacggcaaacctcctctctcatttttaggcttggcatagaaaaagatggtttggacaggaccgtggtaagtccatcactacattcatacccctgttttttttttttttttttttaaatcagccaggaaagcttttctatggcaactgaatttatccagtccttatatgcatctatcacaggttataacatgtccaaatttggagtcaagaattatagcaaagagacaggtaagaaraaaaaatccccagggaggctttcttttgtgggaggcaggccgccacagtgctaagtattagaaacctttcagccaagcaggtgaactagaattggcagagtccagcaatagctcttagtctaattaagagttttcttcagtgacatttaaaaagtgtaaattcagttaataggtaataggcaacaaacagtaataagaacattcaggaattcagtcaggcggttagtttaaagaagagaagtgaataagccataggagctaagatatttattattt

SEQ ID NO: 869164 - DNA, 627 bp, Homo sapiens
caatgtttaactcttttctacagtgatcttaccactctagttcttaattttaataatttgctaaacactaggatttctagacatttattgaattaatagattactgtcccaaatcatagaataataaattgataaagcaagaaaaaaatctgagattacctaattggacccactcaacttacagagaacaatgatgcataggatagatgaaatgatctgtttaaagtcctagaaatgatggactttcagatgcagtcccaaatagtttatggaaycatcattgcattcttaccagcatcttctatttctcaaataaataatgtttgatgagtaataataaacttccatttttaagagaataagtcaagacctaagaaaataaaaagataagcagaaaagaaattatcgcaatttagggttaagcttgaatttattcaatgcatggtttcccatcagctcacattaccttgtattaaacttgctgtctccaaagaaagccattctcagctccttggacaaagtactttactttctcccactgaaggtctttttgcctaaacttgtttgcctctcttaattaccatgtgatttagttatagttcttgaatttcaagcctatgtctactg

SEQ ID NO: 869165 - DNA, 512 bp, Homo sapiens
gttagttaagatgatatcaggctgggagtggtggctcacacctgtaatcccagcactttgggaggccgaggtggagtgatcacctgaggtcaggagtttgagaccagcctggccaacatggcaaaaccccatctctactaaaaaatacaaaaattagctgggcacagtggcaggcagctgtaatcccagctacttgggaggctgaggcatgagaatcgcttgaacccaggaggcggaggttgcagttagccaagattgcaccattgcactccagcctgggagacagagcaagactccatctcaaaaaaaaaaaaaaaaaaaaaaaaaargatgagatcatactgaattagtgtatgactggtgtccttagaagaagaggagacaaaacacagacacagacgcagacacagagggaaaaagaccacataaagacagaggcagagatttgagctgtgctgctacaagccaggaacacctgaggctactaaaagctggaagaggaaaggaagcat

SEQ ID NO: 869166 - DNA, 582 bp, Homo sapiens
tcaccctggctcatgtaaccgtgccctcatctagcccattttcaccactgtgacaagcgtgtctgtctaaccagcaaacctgatcctagcccagaagccctttggtagctccccagtgtctctacaataaaatgcaagcaagatttgttaggctcttcatggacttctgtctgcctctccagccttctctctcccttctgccagggctcagccctaccacaccctgggctstagccactcaccaacgctaagcatccacccttcaggactttgtatgtgccattccttttgccctccatgtcccccagctcctgatcatcccgggccagtgtgaccacactccctcaggacttggcagaggctgctcctctggatactgcagtggcctctgtgctcctctagcatgctaaagtttccctgtccattgatttgtctgacatcaccctgctacttaatccggtgactttcaacccaatcacacccaataccaccttatagcctaaatattttgtaatgttccttcttgaaataaaatttgtgaataacacatcttgtacactttgtgtacacagacacatatac

SEQ ID NO: 869167 - DNA, 585 bp, Homo sapiens
cctgtggtctgcctaccctggagctgaaatagagtgtttagccaaatgctctttgagagattgaggcctgctggattctataatgcctctgtcatcttttgtcaccttggctaggagtcctttggttacaatttaaagaaacccagttctttgtgttacatacattccaattatgctcttttagttattttaaaatgcttggatgaatgataccccatttaccctgatgtgattattaagcattgtatacccatatccaaatatttcatatattccataaatatatattcctattatgtacccataaaaatttaaaataaaatttttttaaaaagtaaaaaacccagctcaagcaaacctgatcaaagaaaaggacactattaaaatttctaatggtgtactttaaggttccaggagcttcagatatgatgaaactcagaktcttactgtcattaggattctgtttctccctcctggctctatctcactaaccacccacccccaacgcctgttttggcttttgtattagttatctattgctatgtaacaaatgatctcaaatccagtagcttaaaacaaccacat

SEQ ID NO: 869168 - DNA, 657 bp, Homo sapiens
atgaggctatagaaacaaagccaaaaactcaacacagcattatctacagtcacactccctagagaggggaaaaaattgaaaggcagagaaaaataatactaatgataatattgggaataaagaaaaaaatcctatccactcaaaaatattttaaaaaacaagaagtgctgttgtctccagatgagaaggaaccagcacagggactacggcactatgaaaaatmtgaatgtaatgacacaaccataagatcacactagctctccaggaatggttcctaacaaaaatgaaaactcagaaattacagataaagtattgaaagcatggattgaaaagaagttcaatgagacttaagacaagattgagaataaaaacaaataaacttctgaagaatccaggaaattaaagaaggattaacatctgaaaaagaaatcaatcaggactactggcattgaaaaatcttgcttaaggaatttaaaaatacaattgaaagttttatcaatagactggatcaagtagaagaaaaaatttcagagcttaaagacaggtctttcaaactaagccagtacaacaaaaataaagaaaataagaaattttaaaaatgaataaagtatttgagaagtatggaattatgtaaagcaaccaaatctatgatttatt

SEQ ID NO: 869169 - DNA, 657 bp, Homo sapiens
atgaggctatagaaacaaagccaaaaactcaacacagcattatctacagtcacactccctagagaggggaaaaaattgaaaggcagagaaaaataatactaatgataatattgggaataaagaaaaaaatcctatccactcaaaaatattttaaaaaacaagaagtgctgttgtctccagatgagaaggaaccagcacagggactacggcactatgaaaaatctgaatgtaatgacacaaccataagatcacmctagctctccaggaatggttcctaacaaaaatgaaaactcagaaattacagataaagtattgaaagcatggattgaaaagaagttcaatgagacttaagacaagattgagaataaaaacaaataaacttctgaagaatccaggaaattaaagaaggattaacatctgaaaaagaaatcaatcaggactactggcattgaaaaatcttgcttaaggaatttaaaaatacaattgaaagttttatcaatagactggatcaagtagaagaaaaaatttcagagcttaaagacaggtctttcaaactaagccagtacaacaaaaataaagaaaataagaaattttaaaaatgaataaagtatttgagaagtatggaattatgtaaagcaaccaaatctatgatttatt

SEQ ID NO: 869170 - DNA, 657 bp, Homo sapiens
atgaggctatagaaacaaagccaaaaactcaacacagcattatctacagtcacactccctagagaggggaaaaaattgaaaggcagagaaaaataatactaatgataatattgggaataaagaaaaaaatcctatccactcaaaaatattttaaaaaacaagaagtgctgttgtctccagatgagaaggaaccagcacagggactacggcactatgaaaaatctgaatgtaatgacacaaccataagatcacactagctctccaggaatggttcctaacaaaaatgaaaactcagaaattacagataaagtattgaaagcatggattgaaaagaagttcaatgagayttaagacaagattgagaataaaaacaaataaacttctgaagaatccaggaaattaaagaaggattaacatctgaaaaagaaatcaatcaggactactggcattgaaaaatcttgcttaaggaatttaaaaatacaattgaaagttttatcaatagactggatcaagtagaagaaaaaatttcagagcttaaagacaggtctttcaaactaagccagtacaacaaaaataaagaaaataagaaattttaaaaatgaataaagtatttgagaagtatggaattatgtaaagcaaccaaatctatgatttatt

SEQ ID NO: 869171 - DNA, 684 bp, Homo sapiens
cattagacagatgattggggtagaacactaacacagaaattctgaacttaaacttgatatttgagcaattggacctaatagacatctacagaatacttgacccatcaactgcagaatatgcattcttatcatctgaacatggagytcaatcctcatccataaaataagtctaaaaaaattcaaaacaatcaaaatcacacaaaccatactctcagaacacagtggaataagaatagaaattaataccaagaagacttccaaaagccacacagttaaatagaagttaacttgctcctgaatgactttgagtacgcagtgaaatacaggcaagaatttttaagtctttgaaacaaatgaaaacagaggcatgacaaaccacaatctctgcgatgcagcaaaagtagttttacgcggaaagtttctagcactacacacctatctcaaagaagttacaaagatctctaattaacaatataattgtccacctagaagaattagaaaaacaagaggaaattaaccccaaaactagtgaagaaaagaaataactatcatgagagcaaaactgaataaaatggggaaacaaaatccatataaagaactgatgaacccaaaagttggttcttttttgttgtttgtctgtttgagatggagtctcactctgtcaccaggctggagtgcagtgat

SEQ ID NO: 869172 - DNA, 632 bp, Homo sapiens
tgcagagggacaatgttgacagagtaaatcaattaagaaaatgtatatttttgtgattcataagtataatgatggagttttcaaattcacgtgtgtgatgtgcccccctcaaacctctttatgatgtcagcatattgctcatctgacataaaaaaattacaaaaaaaatagaaaataaataatatagaggaatacatcactttagctgttttatatgtagccatagtcacaagttagtcaaatcaacaaaaaatctattaagatagtgcacagtaataattgttatatctatttttatgaataccttatttctagagcagtctcaggttcacatcaatattgaaagaacagtccagagatttttcatatacccccttcccccaaaatatgtgaatcctccccccattattgacatctcccatcagattgatacatgtgttacayttgaagtaccaacattgaaacatcataataaccccaagtccatagtttacattagagttcactcttggtgttacacattctatgaatttggataagtgaataatgacatgcatccaccatcagagtatcatatagagtagtttcactgccctaaaagtcctgtgttctttgcctattcatcctcctcc

SEQ ID NO: 869173 - DNA, 632 bp, Homo sapiens
tgcagagggacaatgttgacagagtaaatcaattaagaaaatgtatatttttgtgattcataagtataatgatggagttttcaaattcacgtgtgtgatgtgcccccctcaaacctctttatgatgtcagcatattgctcatctgacataaaaaaattacaaaaaaaatagaaaataaataatatagaggaatacatcactttagctgttttatatgtagccatagtcacaagttagtcaaatcaacaaaaaatctattaagatagtgcacagtaataattgttatatctatttttatgaataccttatttctagagcagtctcaggttcacatcaatattgaaagaacagtccagagatttttcatatacccccttcccccaaaatatgtgaatcctccccccattattgacatctcccatcagattgatacatgtgttacatttgaagtaccaacattgaaacatcataataacmccaagtccatagtttacattagagttcactcttggtgttacacattctatgaatttggataagtgaataatgacatgcatccaccatcagagtatcatatagagtagtttcactgccctaaaagtcctgtgttctttgcctattcatcctcctcc

SEQ ID NO: 869174 - DNA, 610 bp, Homo sapiens
aggtaattgctcaacaggatctagcatgttgatgaatgattacttgtcattcaaattaagtgtgtctagtcctttaaagccaattcattttcttttgaaaaatatgaaaatatctcatacccttgcatggattttgatgtgttactttagtggggccatgtcttccctcttggctatgagtgtctgtggcccacacgaaggtttayaatagtatcctcaaaagctctgtcctgtcctgtttatttttataaacgctatggatgaagacagggaaggcaagtctgtaaattttccatcagggataaatagctactgtggtaggtgacacagatgggttcagtaaagctctcaacagcctggaatgattaactgaaattaatgattggttttattagggtagaaatataagctcttgcatataggttaaaaaaatatgccagctttgagacgaggagtacttggtttacaatagtgtataaagaaaaatctagggcttttagttcattgcaagcttaaaacaagccaatttatttaaggggccagaaaccctaaagcaatttcagactgaagatgtaaaatcatatgtccagaacaacgaggttctactcta

SEQ ID NO: 869175 - DNA, 676 bp, Homo sapiens
tgtgctttcttacttctctagagaaaagcagtgaaaaaagtgtatttttgctgtgttcagcaagtctctcaggcacatatttatgaagactacatctgcaaaatggctttgtctttcagcataatgcaaacaattcttagtgttgaagaagagaaagaaagatttcatgcttcttccagatcattctgctaccaaggtcagaatttaaagagaattccatgctctgatcaaccattcagggttcagaagcaaagagcaaaatgggttatgactataaagtcttcatatgagttgccactgtggcagtgtaaacccmtgtagactggaggagaaggttgttcttttccccatccattagtatgtctattcttttctttttaggagtctttcttttacttttcctgttacattttccttttgtttcccaacactttctttatgtaggaaaatatgtaatttcatttttatttgtttaccaagcattgattcacctcatctatttaccaaacatttcttagttgcctactctttgttagctattatatcaaatgtcgggtatttaaaatttaatgaggattcagcccctgacttcaaggagctcactttttaaatggcagaaggtcaagtaaaccattaatgatacaggacatggcaatccatgctctgatcctaggag

SEQ ID NO: 869176 - DNA, 624 bp, Homo sapiens
ttttaattataacgggatgctggattttgtcaaatgcttttttctgcatctattgagatgatcatgtgatttttgtttttttaattctgtttatgtggtgtatcaaatttattgacttggatatgttaaaccaactctgcatccctggtatgaaacctacttgatcatggtggattatctttttaatatactattgcatttgkttagttagtattttgttgaggatatttgcatttatgttcatcagggatattggtctgtagttttcttttttttgttatgtccttccttggttttggtattagggtgatactggcttcatagaatgacttagggatgattccttctttctctattgtgtggaatagtgtcaataggattggtatcaattcttctttgaatgtctgatagaattcagctgtgaatccgtctggtcctggactttttttgttggcaaatttgaaattaccatttcaatctctctgcttgttattggtctattcagagtttctgtatcttcctggtttaatctgggagggttgcatatttccaggagtttattcattacctccaggttttctggtttatgtgcataaaggtgttcatagtagcttgaataatctt

SEQ ID NO: 869177 - DNA, 553 bp, Homo sapiens
ttgtcttttttgatctttgttggtttaaagtctgtcttatcagagactaggattgcaacccctgcttttttttttttttttgctttccatttgcttgataaatattcctccatccctttattttgagcctatgtgtgtctttgcatgtgagatgggtctcttgaatacagcacaacaatgggtcttgactctttatctaatttgccagtctgtgtctttggggtatttagatttacattattatgtgtgaatttgatcctgtcattatgatggtagatggttattttgcakagtagttgatttcatgtcttcatcgtgtcattggtctttatattttcatgtgtttttcagtggctggtactggtttctcctttccatatttaatgcttccttcagaagctcttgcaaggcaggtctgatggtgaagaatttccttagcatttgcttgtctgaaaaggattttatttcttctttgcttatgaagcttagtttggccagatatgaaaacctgggttgaaaattcttttctttaagaacgttgaatattggcccc

SEQ ID NO: 869178 - DNA, 553 bp, Homo sapiens
ttgtcttttttgatctttgttggtttaaagtctgtcttatcagagactaggattgcaacccctgcttttttttttttttttgctttccatttgcttgataaatattcctccatccctttattttgagcctatgtgtgtctttgcatgtgagatgggtctcttgaatacagcacaacaatgggtcttgactctttatctaatttgccagtctgtgtctttggggtatttagatttacattattatgtgtgaatttgatcctgtcattatgatggtagatggttattttgcagagtagttgatttcaygtcttcatcgtgtcattggtctttatattttcatgtgtttttcagtggctggtactggtttctcctttccatatttaatgcttccttcagaagctcttgcaaggcaggtctgatggtgaagaatttccttagcatttgcttgtctgaaaaggattttatttcttctttgcttatgaagcttagtttggccagatatgaaaacctgggttgaaaattcttttctttaagaacgttgaatattggcccc

SEQ ID NO: 869179 - DNA, 567 bp, Homo sapiens
ggagaactgacactggaccgtttctccttattacatccatttggctgaaaagacttaactagaaagttgtgttctactgccctttacaaatttcagaattatatgtgacagttaaggtagctgcaacacgagcacattgtaccagagaacgctgaatcaagaacatttatcgccaggtcttagttctagcttctgtcaattatacaaagagtcagctattaaatattaatggcatgccatttgcgctgcagctctcgcaaagagcctcctgctaccaatttttgtgatgaaagaaaacctgtcattttctagataaaccccaggccacgagaatccctcaratgagcgatcgaattctgtccttcccaggggaagctgtcagggccacccccatataccggggaggaggaggaggaacctgagggagggcgggtccccgaggtcctgggtcaagggtctcgtgttccccttctctcccagccatccgcgacaggtcgggaggcgaggcggggcggggctgggccggctgtccgcacaaagagagccagcgagctagcccgcgaccag

SEQ ID NO: 869180 - DNA, 560 bp, Homo sapiens
gcttggcagctttcccttggagactggcaggctcagcccatggcacaggtgctgaatgtagcatttaataacaacgtggccttgctcagcacttgcacccctcctccttccctctcctggctgctttctgtggctggcactctgttgggcttatgaaactggtaattagatctccagacagtttgtgaacccctgcaatgttcatataactctgagtgagaagtcacagccggatgtgtgggcattgattatataaacacatacacacacctgccatctggcaaggaaggcagagagctggcatctcctttcttggcttaatctccccccaggttttacttgacttctcaattgggccacgttaatcytgactccaaatcaaaccatctcatttcagtttgattctgggtccaggggagttacagactcctgtgctttccactcacctttagggttggagcatcatgaaaaagagtgctgtgtctgtataatcgtataatccaagaaggggtgggtaaacaaggagacaggaccttataaggatggaaaacaccacactc

SEQ ID NO: 869181 - DNA, 541 bp, Homo sapiens
gtcggcttttcctgaaaactttaacctttttttttttttttcaaagagacaggcttttgccatgttggccaggctggtcttgaactcctgacctcaagtgatctgtctatctcggcctcccaaagtactgggattataagcatgagccaccgcacccagccacctctttttttttttttttcaaacaagaatctayacatacgtaactactatggttacaaaattaagatttaaaaaactgtaaaaagtggtaccaccaaaataaatttgttaattctcacaattgactttatttcatccaagccctctagttatttttctaaacaactcaatattccaagttcatctcccaaagctgtgaccacaataatgaggagtacgtagctcccacttctggtcttaccctggtcatttacaatgtgactggaggagcatcaactgagactaaatataaaagcacacgataattactgacacattactcaggattctatcttgtgagaaactcaacattgaagtatatacagagactttcacttcc

SEQ ID NO: 869182 - DNA, 656 bp, Homo sapiens
tggatatttttaatgtcattctctaatgattgaaacatacaagccattgtaaaatataataaaacaaatatccttgaatatattgccaaaattgaaaaacaaaaaacttgcctatatatttgaaagattctcagactcattcaccacaaccactctcttccttttcaagggtaactactgccctcacattattgatttttatccccaagtgtctgttagcacttttttgacagcatttctgagaatgcaattcacatactatgcaacttaccacaattttaagcgatgcaattcgatagcttttagtatgttcacacttttacaatctttttgtctattttctgyctctgtagatttgcctattgtggacatttcatataaataaaatattaatatatggtgatatgtgattgagcttctgtcacagatgataactttttaaggttcatctatgttgtaacatgtgtcagtatttcatttattttaattgcaaataatttcccattgtgtagatacatcacactttattcagccactcatcagttcatagacattttgggttgtttctactttttagcaattatgattaatgatgctaggaagagtcatacaaaattttgtatgaacatgaacatgttctcatttatcttgggtat

SEQ ID NO: 869183 - DNA, 583 bp, Homo sapiens
gtccacatgtctaatttttcctggacatgagacaagaacctggacctagctgagcctttagcaaaaattctgcatcacgatgaggccgaagaaacttaagcaggatgaacacaaagaaaaccacaccacatcacattataatcaaattactgaaaaccaatgataaagaaaaaatcttaaaagcaccctgagaaaattatgagacagcttaaaatttaaggarcaacttaaaatttaaatatgtgcagtataatacttcttaaataatactgatttagtaagacatggatacttttgattttataagatagtatctttatttttggatatccatgctgaagtacttaagggtgaaatatcatgatatctgaaacttactttcaaacagtttggcaaaataatatagataactagctagctagctaggtaaagtattaacaagggcaaatgggtatacattgtagtatgcctttaacttttctgcaagtttgagaatttcatttgaaataccatattcaacccccagggcctgaacagatttatttggtggaacttaaacaacaacaacaaaaacctgtcagtt

SEQ ID NO: 869184 - DNA, 583 bp, Homo sapiens
gtccacatgtctaatttttcctggacatgagacaagaacctggacctagctgagcctttagcaaaaattctgcatcacgatgaggccgaagaaacttaagcaggatgaacacaaagaaaaccacaccacatcacattataatcaaattactgaaaaccaatgataaagaaaaaatcttaaaagcaccctgagaaaattatgagacagcttaaaatttaaggaacaacttaaaatttaaatatgtgcagtataatacttcttaaataataytgatttagtaagacatggatacttttgattttataagatagtatctttatttttggatatccatgctgaagtacttaagggtgaaatatcatgatatctgaaacttactttcaaacagtttggcaaaataatatagataactagctagctagctaggtaaagtattaacaagggcaaatgggtatacattgtagtatgcctttaacttttctgcaagtttgagaatttcatttgaaataccatattcaacccccagggcctgaacagatttatttggtggaacttaaacaacaacaacaaaaacctgtcagtt

SEQ ID NO: 869185 - DNA, 616 bp, Homo sapiens
agctgacttagtcatggtggataagctttttcacatgctgctggatttggttttccagtattttattgaggattttcacatagatgttcatcagggatattggcctgaaattttcttttttgttgtgtctctgccaggttttggtgtcatcatgatgctggcctcataaaatgagttaggaaggagtccctccttttcaattgtttggaatagtttctgaaggaatggtaccaactctttgttgtacctctggtagaatttggctgtgaatctatctggtcctgggctttttttggttgrtaggctattaattactgcctcgatttcagaaattgttattggtctattcagggatttgacttcttcctggtttggtcttgggaggatgtatttgtccagggatttatccatttcttctagattttctagtttatttgtgtagaggtgtttatggtattctctgatgttagtttgtatttctgtgggatcagtggtgatagcctgtttatcattttttattgtgtctatttggttcttctcagttttcttccttatcaatctagctaacagtctatgttattattatttttcaaaaaaacatctcctgtatttattg

SEQ ID NO: 869186 - DNA, 623 bp, Homo sapiens
gtcagctcttattttgttgaataatttttacatagatgagtggtgaatttgagatatagttagtaaatggaagataagtatgtcatttttttccctccttagctataatgatgggttctattaagagatttcctagtgttgaaccatctttgcattcctggatgcaacatgccaggaaaaccactgttgttttttgctttttagttgtttatttgtttatgctgacagattctgtttactaatgctttatttgatatatgtatatactttttgaagatatgaggtctcattacattttccagactggagtgcagtggctattcacaagtacgtttacagtgcactatctctgggctcaagtgatcctctcacatcagcctcctgagtagctgggacracaggtacctgccactgcacctggcactctttgatattctttagtaagattgatctgtcttctttttttgatgcagttagtttttggttttaatgacacattctttatagaaaagaactggaggattttctttgcttttctgtgctgtaacatagtttcaggagcagttgggattcttgatttttgcaaatgtgatagaattcctatgaaaaaatattcagggctg

SEQ ID NO: 869187 - DNA, 682 bp, Homo sapiens
aacgaggaaaaggatggaaataaagtaagtaaggagcagggtaatgtcgtgtgatacatcactaccctgccacccagggctttaccctgagttgttagaaaacatagcagctcactcccagcaggtgtgcttgattcccatggggtcttctccagaggtgtgttttatgggctgaattgtgacccccccaaaacttcacaagtggaagccctaaccctgagtagctctgaatgtaattacatttggagatggagcctttaaacagtcaattcagttgaaacaaggccctgttagtaggcctaatccaatctgtctggtatccttccaagacattgtatgcaaaaagggaccccagagatgctagtgcataaggaaagaccatgcaatgacacagtgagaaagcagccatccatatgccatggagagagccctcaggagagaccaaccatgtcgacaccttaatcttgaacttccagcctccagtactgggaagaaataaatttctgttgtctaagccccctattttgtggyattttgttagggtggctctagaaaactaatacaatttggtagaaaatctgcaccccaaagctgtacaaagagagcagaaaggatgagaaagcggtttcctcccaactctcatcgcagtggtcaagtttcattccacagggagcaaatgccc

SEQ ID NO: 869188 - DNA, 550 bp, Homo sapiens
gctctatagccagttagctgggtttttgtaatgttaccttttctgaggtttccccagacttctaggcatctggagtcctccctggaacagaaggtttttaagatcctacaaatggagccaatcttctctagcaggggacagagtaaatggcttaataggcctatcacatcttaatttttttaatggttttatatcctggggtaacagtgaggaaggcatgattttattattattaattattattctattatyacagttttccagtctggctctttgatgtttacaagttcagacaacatgtggttttcaagccaggtttcataaccttaaactacctttccatgtggcttctgtccaccctattttgttttagatcttgtttatgtttggcttaaatcatgagttggctgtggtgtgtattttgccacatggattcaaggcatcagatgaagacagcattttggatggcatctacatcgaagcacagttacaaaacttgtgtgccaatgcttgccagactctggctgggtggatgagtcctgggctgccc

SEQ ID NO: 869189 - DNA, 588 bp, Homo sapiens
tctcaaactcttgggctcaaacagtccacctgcctcagcctcccaaagtgctgggattacaggcatgagccactgtgcctggcacctcatctgttgaatgccctatttgtgaagtgaatcttgatttttgctaggcctcttggattttttactgttgataacctgaaacacaaattgtctggatttgtctttaaatgtggcaaaagtcaggggtgacagatgatgacattttctctccagctaaagctgggtgcaggagcttgctaggtgaagcagacactacttcagcagtcagtcctgtagtgacctctcaatcttgtaagagaaggaaaatgttttttcctaactctttttttttcrggagagtaaaaagaaaaagggagagaccagtgtaatttttagtcttttttttttttttttcactgtaaaaaaggaactgggagctatcactacaaacaaacaaacttggcatttagcacttctgcatttgtaacttttgtaacagtgtcccttctgttttcctcttcacagggcacacataatttttattgcagccttagggggcactaaccatcctggtttgtgcag

SEQ ID NO: 869190 - DNA, 587 bp, Homo sapiens
ttcaattcatagataatctaagattacccattttatttattctgtatttttatttttttgggacagagtctcgctctgtttcccaggctggagtatagtggtgcaatcttggctcattgcaacccccgccgaccccctcctggggttcaagtgattcttgagcctcagactcccgggtagctgggattacaggcttgcaccactacgcccagctaatttttgtatttttagtagagatgaggtttcaccatgtyggccaggctggtctcaaactcctggcctcatgtgatctgcctgcctcagcctcccaaagtgctgggattacaggggtaagccaccacacctggcctaagattgccctctttatagattactcctttttaaccttttaaccaatatattatttggctttggctgctttcagaggtcgggaatgcaggtatttgcccttatcagtgtttatgtttgtaaatatgttggtagcctaagaggttgaaattaatgattcatgaatccagcttgtaattatgatattcataatttttaaggatcttttcacttgcctcctcttttgaaaacttaaaatt

SEQ ID NO: 869191 - DNA, 587 bp, Homo sapiens
ttcaattcatagataatctaagattacccattttatttattctgtatttttatttttttgggacagagtctcgctctgtttcccaggctggagtatagtggtgcaatcttggctcattgcaacccccgccgaccccctcctggggttcaagtgattcttgagcctcagactcccgggtagctgggattacaggcttgcaccactacgcccagctaatttttgtatttttagtagagatgaggtttcaccatgtcggccaggctggtctcaaactcctggcctcatgtgatctgcctgcctcagcctcccaaagtgctgggattacaggggtaagccaccacacctggcytaagattgccctctttatagattactcctttttaaccttttaaccaatatattatttggctttggctgctttcagaggtcgggaatgcaggtatttgcccttatcagtgtttatgtttgtaaatatgttggtagcctaagaggttgaaattaatgattcatgaatccagcttgtaattatgatattcataatttttaaggatcttttcacttgcctcctcttttgaaaacttaaaatt

SEQ ID NO: 869192 - DNA, 696 bp, Homo sapiens
aacaaacttctctgataaaatgtgacttaaaaagttagatgaaagatacattgtaaaaagttactttaatttggggttttttcccttttaaaactatagaatgctacttaaagagcagataatttaaacatcattggatatgtgtatgtatcttaattctaacaaagcatttcaatttgaggtgattcttggttgagatgtagggcaaagtaaaaagggtcacaggaaatgaaaatgagaattggtataagaaaaggtggaataaggaaaaataagagaaaaccattaagaaacttatttatttattcttttagagggaaggaattaggagcgggaaggagattgactgttagtttcttaggtgagtgttggagatgctgttgaactttaagcttaattggtcacctgctgtcctytgttctttgaaataattgacattgatccttgctgttcagccacattgacacttatatcttgggagttctaggattggactaacaaaagtggaggttgttacttacactgcaaaagaaacaaccagagctgtgtcactcagaaggctgaaaagaatcaggctgacaggtaatttggcccctcaaaaggtcctagtggctgatataggaccttcagaatgagtgtaggtgacaggcaggtaacaaattattttacacagtgggaagtcaggtattaggagct

SEQ ID NO: 869193 - DNA, 603 bp, Homo sapiens
gtgacacttacttcattgacatttaagtaagcatgaaatagcaagtaatttatctttaatgtaacttaaaatccacagtcaaacatttggccattttatgcattgcaaacaaaagctaatgatgactggctatatgttcatcttctcaggggtttggttatatcactgtctttatttactgtgagtatgatgaaaacaatctgcttgtgcagtttaatccttttcagtttaggtaaataactgaaataaccgcagaaaagggttttcttttccaataaatagagattattttaatgttcattctaaattgatatgggtcaggataaaaaaaaatcagtccagttaaatgcytagatggaatgaataataagttactatatagataattgaaacaaacaaaatacaaaacttgtatatttgtgcacaaatatagaccttttcaaacagaacacattttacatgttcagaatagaaaaattttatgttagctgagtcattgccaggaatccacagttgaatcaagatagctatgtgattttcagtttttatgctaacctagcataggaacttgttcaatcaaggacttctatttatttctatcat

SEQ ID NO: 869194 - DNA, 640 bp, Homo sapiens
tctaatgatcagtgatgttgagtgttttttcatgtttgttggccacataaatgtcttcttttgagaagtgtttattcatgtcttttgcccactttttgatgggttgtgtttttcttgtaaatttaagttccttgtagattttggatattagacctttgtcagatggatagattgcaaaaaaatttctcccactctgtaggttgcctgttcactctgatgataatttcttttgctgtgcagaagctctttagtttaattagataccatttgtcaatttttgcttttgttgcaattgcttttggccactgcatcataaactctttgcctgtgcttatgtcctgaatggtattgcctagattttcttstagggttttcatagttttgggttttatgtttaagactttaatccatctggatttaatttttgtacaaggtgtaaggaaggggtccagtttcagtttttttaatatggctagccagttctcccagcaccagttattaagtagggaatccttttctccattgcttgtttttgtcaggtttgtcaaagatcagatggttatagatgtgtggtcttatttctgagttgtctattgtgttccgttggtctgtgtgtctgtttcggtaccagtaccatgct

SEQ ID NO: 869195 - DNA, 599 bp, Homo sapiens
ctggtggaggtaaaggaagggcagggaggatataaggcagccagctgagccagtgcaagtgtccaagtgagaggtgagggtggcctggactaggcggcagtagtaaagatgaagagaagtggatggattcaacagatacttgagaggcaaaattggcagacaataaaggtgagagaggtgccaagagccttctagtgtgtacaaccaggtttcaagtggtgcagtccactgagcctgagagccccggaagaagatcagggctagaaaactgacctgcaatcttgctaggtccacgtaatactattcagcataaaaacagggttcttttggaggaaccagcatacactctaggactgggagcatatcttccactcacaatctttttcacttgggtttggtaaaccttaattttctatgtgcaaggtgatggtaaaagacttatcctyggaggacaggcgcagtggctcacgcctgtaatcccagcactttgggaggccaaggcagccggatcacttgcagtcaggagttcgagaccagcctggccaacatggcgaaaccccagctctacttaaaaaaaaaaaaaagtaaaaaaggtagcc

SEQ ID NO: 869196 - DNA, 624 bp, Homo sapiens
gggttcaagcgattctcctgcctcagcctccccagtagctgggattacaggtacctgccaaaacgcctggctaatttttgtatttttagtagagacagggtttcaccatgttggccaggctggtctcaacctcctgacctcaggcgatcctcccgccttggcctcccaaagtgctgggattacaggcgtgagccaccgcgcctgtcccttcatctaagttttaagttctacatgcattagatatttgtcctaatgttctccctcccctttccccacaccacctgaaaggccatggtgtgtaatgttcccctccctgtgttccatgtgttctcactgttcagttctcacttatgagtgagaacataccatgtttgattttctgttcctgtgttaaattactgaggatgatgrtttccaacttcatccatgtccctgcaaaggacataaactcattcttttttatggttgcatagtattctatggtgtatatgtgccacattttctttatccagtctatctttgatgggcatttaggttggttccaagtctttgctattgtaaatagtgctgcaataaacatacgtgtgcatgtgttttatagcagcatgatttataatcatatgg

SEQ ID NO: 869197 - DNA, 619 bp, Homo sapiens
taaatatcaaattatgaatacaaacagctcattttgcttcttttttttcaaaaagtagtgaaggaatatatctacataatttttctttaactctgaaaagattgttgtagttttatagttccccagagattttaactgaaatatatgactgtttaactaaataaaatgtatgcatactaaaaaagaaagaatatgtatgatttgtgttacatgactttattttagaaagcatgaatacagtgttagtgaaagatgaacaaaggtgattaaaaaaacacatsaaattattaatgttcttatttgtcggctaaaaatgtgccctgtgtatctttgaatttttttcatttttattttagattttcttagtaatttctcttctctctctcccatagtttttgtttgtttgtttgtttgttttgtttttgtttttgctttatcagacagggccccactctgtcacccaggctggagtgcagtggtataaacatggctcactgtagcctcgaccttgttgattcaagagatcctcctggctcagcctcccaaagtgctaggtttatagacacgaaccattgttcccagtgccacatttcttaataaacaaaatatttatttttgt

SEQ ID NO: 869198 - DNA, 619 bp, Homo sapiens
taaatatcaaattatgaatacaaacagctcattttgcttcttttttttcaaaaagtagtgaaggaatatatctacataatttttctttaactctgaaaagattgttgtagttttatagttccccagagattttaactgaaatatatgactgtttaactaaataaaatgtatgcatactaaaaaagaaagaatatgtatgatttgtgttacatgactttattttagaaagcatgaatacagtgttagtgaaagatgaacaaaggtgattaaaaaaacacatgaaattattaatgttcttatttgtcggctaaaaatgtgccctgtgtatctttgaatttttttcatttttattttagattttcttagtaatttctcttctctctctcccatagtttttgtttgtttgtttgtttgttttgtttttgtttttgytttatcagacagggccccactctgtcacccaggctggagtgcagtggtataaacatggctcactgtagcctcgaccttgttgattcaagagatcctcctggctcagcctcccaaagtgctaggtttatagacacgaaccattgttcccagtgccacatttcttaataaacaaaatatttatttttgt

SEQ ID NO: 869199 - DNA, 537 bp, Homo sapiens
aatgtggaaaatgaaagcataaaatgagattcttttatggagaaaagttgatggcataaatagagtaagggggtgagggagtatatacatatttttaatttgagctattctagaaactttgcccacagtagagcaaataataataataataatattctgaatgaaataaaaggtgaagaaaatttggcagaaatgaatagttttaattacaaaaataaagaatattcttgtaggacctgtttatgcatttacctttatagcccacaaaatattttttaagtaaataattatctatttatattcacataraataatacaaagctttaacgaagaccgcagaagaacttcatatctgagtaccatttgcaatcgatttacaaataatgccagcatccttagcgacttcttcaggcaaggttatactgggggtttttgaggctaagcaggtgagagtgctaacataaatgagaagaaagtacctcattgttaccaaaactgtagccaggctttccacgtggggtttgaaaagagattgac

SEQ ID NO: 869200 - DNA, 630 bp, Homo sapiens
ttaaatattgcacctgtatgggatatcatgtagtatttgtcgttatgtatctggcttattgcacttagcataatgtcctccaggtttatccatgtggcaaatggcaggatttccttctttttaaggctgaataatccattgtgtgtgtttgtaccacattaaaaaaatctatgcatctgtagatgaacacttagtttgtttctatatcttggctagtgttacaatgctgcagtgaatttgagagtgcagatatctctttaagatagtggttttatttcttttgcatacrtacctagaagtgggattgctgttattatatgagaagtttatttttttttttttgaggagcctacatactgtcttcaataatggttgcactaatttatatctctaccaaaagtttacaagggttttgtattagtccgttctcacactgctaataaagacatatctgagactaggtaatttatataggaaagaggtttaactgacccacatttcagcatggctgggaaggcctcaggaaacttatagtcacagtcatggtggaagaggaagcaaacatgtctttcttcacatggtggcaagagagagaagactgagaactgagtaaaggataaagccccaggt

SEQ ID NO: 869201 - DNA, 630 bp, Homo sapiens
ttaaatattgcacctgtatgggatatcatgtagtatttgtcgttatgtatctggcttattgcacttagcataatgtcctccaggtttatccatgtggcaaatggcaggatttccttctttttaaggctgaataatccattgtgtgtgtttgtaccacattaaaaaaatctatgcatctgtagatgaacacttagtttgtttctatatcttggctagtgttacaatgctgcagtgaatttgagagtgcagatatctctttaagatagtggttttatttcttttgcatacgtacctagaagtgggattgctgttattatatgagaagtttatttttttttttttgaggagcctacatactgtcttcaataatggttgcactaatttatatctctaccaaaagtttacaaggsttttgtattagtccgttctcacactgctaataaagacatatctgagactaggtaatttatataggaaagaggtttaactgacccacatttcagcatggctgggaaggcctcaggaaacttatagtcacagtcatggtggaagaggaagcaaacatgtctttcttcacatggtggcaagagagagaagactgagaactgagtaaaggataaagccccaggt

SEQ ID NO: 869202 - DNA, 582 bp, Homo sapiens
atgttgggtgtattcatatttataactgttctattatcttgatgaattgactttcttaccaatatctaatgaccttctttgtctcttgtgacagtatttaaagtctattttgtgtgatacacatgtaactgctactgctcttttttggttttcattttcatggaatatttttgttttttatcyctttacttttagtctatgtgtgttattaaaggtgaagtgagtttcttgtaggcagcatttagttggatcttatttttataaatcaattcagccactttttgtcttttgattgacaaaatttgcttatttatagttggtaagtaaagatttattattgtcaatttattgttttctggttgctttgtaggtcctttattcctttattactcctttgttgttttcctttgtgatttgatcattttcctcggtggtatgctttgattcttttctgtttatcttttgtgtatttactataggtttttaatttgtggttgccatgaggcttacataaatattcttattgttttaccaattcacttaaagacgataacatcttcactttgattgctaaagaagctc

SEQ ID NO: 869203 - DNA, 582 bp, Homo sapiens
atgttgggtgtattcatatttataactgttctattatcttgatgaattgactttcttaccaatatctaatgaccttctttgtctcttgtgacagtatttaaagtctattttgtgtgatacacatgtaactgctactgctcttttttggttttcattttcatggaatatttttgttttttatccctttacttttagtctatgtgtgttattaaaggtgaagtgagtttcttgtaggcagcatttagttggatcttatttttataaatcaattcagccactttttgtcttttgattgacaaaatttgyttatttatagttggtaagtaaagatttattattgtcaatttattgttttctggttgctttgtaggtcctttattcctttattactcctttgttgttttcctttgtgatttgatcattttcctcggtggtatgctttgattcttttctgtttatcttttgtgtatttactataggtttttaatttgtggttgccatgaggcttacataaatattcttattgttttaccaattcacttaaagacgataacatcttcactttgattgctaaagaagctc

SEQ ID NO: 869204 - DNA, 582 bp, Homo sapiens
atgttgggtgtattcatatttataactgttctattatcttgatgaattgactttcttaccaatatctaatgaccttctttgtctcttgtgacagtatttaaagtctattttgtgtgatacacatgtaactgctactgctcttttttggttttcattttcatggaatatttttgttttttatccctttacttttagtctatgtgtgttattaaaggtgaagtgagtttcttgtaggcagcatttagttggatcttatttttataaatcaattcagccactttttgtcttttgattgacaaaatttgcttatttatagttggtaagtaaagatttattattgtcaatttattgttttctggttgctttgtaggtcstttattcctttattactcctttgttgttttcctttgtgatttgatcattttcctcggtggtatgctttgattcttttctgtttatcttttgtgtatttactataggtttttaatttgtggttgccatgaggcttacataaatattcttattgttttaccaattcacttaaagacgataacatcttcactttgattgctaaagaagctc

SEQ ID NO: 869205 - DNA, 601 bp, Homo sapiens
ctaagccaaaccactgtttgggcttctgagtggggcaggtctagcccttgtactttaccaaaatatgctgtggtcatctccccctctggacaaggctttgtggtaggatctggggctggcatggaggctgattgtctagggattcaagccaggtagaacttcctatttcccggggcaaccagcttgactttgttggtttgttatactgttygctaatgcccctaatcacataccactgctggtggttacatagacctaccaccaagatctgcatgtttgtcactatgagctttgccttcctgctttgtttctacctgaccacaggtagtctagccatgctattacccctatgctccttgcaaggtgagaccagagttggcttcctgggggaggtatcttggaacacagggaacgtgaatgtccacctctagttctcttttcctactgtagaaactgtgggcctagaaaaattctaagtggtgttgtgctgacttgggagaaagggagaggtgatgtggtcagagtgaggctattctttttacacttctcatgtggcattttgtttggttatttagttcacacaggtttctcaggcttaatc

SEQ ID NO: 869206 - DNA, 601 bp, Homo sapiens
ctaagccaaaccactgtttgggcttctgagtggggcaggtctagcccttgtactttaccaaaatatgctgtggtcatctccccctctggacaaggctttgtggtaggatctggggctggcatggaggctgattgtctagggattcaagccaggtagaacttcctatttcccggggcaaccagcttgactttgttggtttgttatactgttcgctaatgcccctaatcacataccactgctggtggttacatagacctaccaccaagatctgcatgtttgtcactatgagctttgccttcctgctttgtttctacctgaycacaggtagtctagccatgctattacccctatgctccttgcaaggtgagaccagagttggcttcctgggggaggtatcttggaacacagggaacgtgaatgtccacctctagttctcttttcctactgtagaaactgtgggcctagaaaaattctaagtggtgttgtgctgacttgggagaaagggagaggtgatgtggtcagagtgaggctattctttttacacttctcatgtggcattttgtttggttatttagttcacacaggtttctcaggcttaatc

SEQ ID NO: 869207 - DNA, 601 bp, Homo sapiens
ctaagccaaaccactgtttgggcttctgagtggggcaggtctagcccttgtactttaccaaaatatgctgtggtcatctccccctctggacaaggctttgtggtaggatctggggctggcatggaggctgattgtctagggattcaagccaggtagaacttcctatttcccggggcaaccagcttgactttgttggtttgttatactgttcgctaatgcccctaatcacataccactgctggtggttacatagacctaccaccaagatctgcatgtttgtcactatgagctttgccttcctgctttgtttctacctgaccacaggtagtctagccatgctattacccctatgctccttgcaaggtgagaccagagttggcttcctgggggaggtatcttggaacacagggaacrtgaatgtccacctctagttctcttttcctactgtagaaactgtgggcctagaaaaattctaagtggtgttgtgctgacttgggagaaagggagaggtgatgtggtcagagtgaggctattctttttacacttctcatgtggcattttgtttggttatttagttcacacaggtttctcaggcttaatc

SEQ ID NO: 869208 - DNA, 651 bp, Homo sapiens
tggggcccgcagaggacgtctccccaagacccagtggcaaccgggtgagcttcccccaaggcaccattacacttcctaactcttgagggggctgcaaaccattttgagaacgtgatgaaagctcttctctcttcagggcgaaatacgtatatgcacaaacttttgtctagagttccgggggtactcaggccttcgtgaagacccaaaytcatgcagtctgtggaggtcaatgtgcccaggttaagaagatggaccttcacggcctaggggctgagctgccctcctcaaaacagtcctgtttggcttctttcaagagaggcagtgctcatgttttataaggtccaataggtcaccttctcatttggctcctgaaaagaaccttttctggtctcttctaaccaattacccagctccggctctcccattctcaaatttgacttgttttggggagctggggagaaagcaatacaatagtggggaaataggcgctcagctggcatggggcgagtgttctactctggcgtcaagcacagccatgctggaagatcaggggtctttagatttcgtttctgatgccccacccctccacctaacagggaagctcacgaatctgcctagagaaagtatcttgtttggagcttgctggctatt

SEQ ID NO: 869209 - DNA, 625 bp, Homo sapiens
tccacaggcccaccaccctcagtctttgaccactgctgtcaaccagcctgtgcttatcctctgctgaaaaaccaaaactgccactcattaagtacttattagatcccaggcactgggttaagggttttatatatattatcccagttaatttctataacatcatgctgtagtaactattacctctattttatttgttttgttttttttttttttgagacggaggcttgctctgtcgcccaggctggagtgcagtggcacgatctcggctcactgcaacctctgcctcccgggttcaaacaattctcctgcctcagcttcctgagtagctgggattacaggtgygcaccaccacgcctggctaatttttgtatttttagtagagacggggtttcaccatgttggccgagctggtcatgaactcctgacctcaagtgatccgcccacctcagcctcccaaagtgctgggattacaggcgtgagccaccacgcccggcctattacctctgttttataggtgaaggaccttaagcctagagaggtcaaatgactttccaggactgcaaagttaataaatgacaatgtggggctttgtcttacagcaaaacccatgcttttaacaggaaat

SEQ ID NO: 869210 - DNA, 632 bp, Homo sapiens
taaaatttttaggacttactataaagttacagtaatcaaaacagtggaatggaattggtgaagagataacaagtggatcagaacaaaatagagtccataaatatacttatacaaacatggccatttgatctctgacaaaggcagttgacaaaaaccattcaatgaagaaagaatactcttttcaatcaatggttttggaacaatttatctttttatgtaaaaacatgaatttgacctaaatttcacactttatgcaaagattaactcaaaatagagcctagctctaaatataaaacatgaaactacaaaactttaagaagaaaacataagagaaaatctttatgamctggggttagatgatgagcccaaatgacaccaaaaataccatccataaaataaaaactggatatattagtcttcatcaaaattaaaaatttttgctctgttaaggacatggtcaaaagaatgaaaaaataagccacagactaggaggaaatactacaaattacatatcttacaaaggtcttgtatcagtatatataaagaactctcaaaactcaataaaaagacgacaacaacatttacaaatgggcaaagggcttgaacagacacttcaccaaagaggatataag

SEQ ID NO: 869211 - DNA, 627 bp, Homo sapiens
cagctctctgaggcctcttttagctccaaaattccatgacttttatgggctctgtatttttaaaagcgtgtctggttcttaaatgttttcttcttggaaaggttttatcagaggcagagaagccaccaagagggcctatttccctttccctaccacctcttgtccctctctgtccccatcagtttagaagacctggagatgagccccaaatgcctgttccagataaatgttttgatccagaagctttctcagcaaagaaccacagacggcaagctaactttgggaaaagataattcagactaacgctgaaaggaccagagctgactaggaacagtccagatctagtggccttttatgagtgagaatagagctctttgggtttgcagtttaaatgagatgatacacctgggaagaggccacccaaatatcttccatatccagtcagtccatcacwtggaaggcagatgagctctgataaaaacagaccatatcacttcttggctgaaatatctccatgggatttcagcaacttttaggataatccaaaattccaagcacagcctccaggctcctccagaactttatccctcttaccgttcccagccctaactctaaacccatgcttat

SEQ ID NO: 869212 - DNA, 611 bp, Homo sapiens
ctggcagtattcaattcaaaaccaggagcacatgattgtcccttttcctagttttcctttctgccagatttttggctctggccccataggtggtcattcaaaccagatgaggtctttatacttggaaatcacagacacgctggagaattctgctcttggttggtacagggacacaaaactatattatctcagaaaaaaatatgtatttctctcattacgtatggtatctaatataggtatgtgtgacatttataaaatatatgtttctgtatgtaaaaagagaaagagatgcataggctgaaattttttttaatcaataaaagttctatctgaaataaaataggatgcccttaagaagagactgctcttactagtctctattctccaccaatctctcatctagaagggaaacttctttgctaaagagggaactctcagaatcaccatttacccacctgtmtctgttgtgggagtcttcacacttctactacataagtagtaaaacccacaggtaacctgcaggataaggaattccagttggggtaggttacagttacatacaaggacaccactcagttccagtttggttggttaaggcttaatgagaatct

SEQ ID NO: 869213 - DNA, 495 bp, Homo sapiens
ggaagaacacggtggtgcagtggcccacctgagagccacacagggcaggggaccctcctccccctagccaagggaggaagtgagtgagcattgggaattgaataaatgaatgagcacaaattattgccaagtaaaaatttgtaaagaatagaacactcatacaaatgtatgaaaaagcaaggaaaccatgctttttccacggaactgtgtaaccaatggatcggaagatcccgctcacgaacccacaccactggrgcctagcgtcccaaccctggaacacacagattctcaacagcctctcagctggaatctgtttaagcctactgaactcctggggagaggggtgaccagcaccacagctgtgatttcctgctgtgtaagcctgtttgagctccttgggtgagggacagcagccagtactgggactcccaactgcctaacacgctaagctccctgggcggctgaagagctgcatacatctctatagctaaaggc

SEQ ID NO: 869214 - DNA, 599 bp, Homo sapiens
attaaatcaaatgtaagcataatttaaaaatcatgaaattgaaatcacgaaatcaacagagaaaatcaataaaacaaaaagttggttcatcaaaaacatcaaaaatagagatatctctagcctggctaacaaagcaaaataaaagatgtgacacaaattgctaatatcaataaaacaaaaaaggggacatcactacagatcccttgcacattaaaaggataataaaagaatactatgaataactctacgttgacatatttgataacctaaatgaaatagaccaattccttgaaagacaatctgctaaaactygcatgagaaaaaataggtaatctgaataggcctatatctattttaaaataattaatgaccttccaaaacagaaagcaccaggtccagatgggttcactggtgaattccacaaaatatttaaagtaggaattttactaattctctgcaatctcttctcaaatgtaaaagtagaggaaatactccctaactcatgctatgaggccagcattaccttaaaaccataagcagataaagatgtcacaaaaaactacacaccaatattttttcatgaacaccaatgcaaaaat

SEQ ID NO: 869215 - DNA, 590 bp, Homo sapiens
aaatatgtacatatattgaatctgtaaattactttgggcagtatcaccattttcatgatattgattctcctatctatgagcatggaatgtttttccttttgtttgtgtcctctcttattttgttgagcagaagtttgtagttctccttgaaggggtccttcacatcccttgtgagttggattcctaggtattttattctttttgtagcaattgtgaatgggagttcactcataatttggctatttgtctattacttgtgtgtattccaggaatgcttgtgggttttgtatatttattttttatccttagactttgctgaagttgctcatcagcttaaggagattttggcctgagacaatggggttttcttattggggtgatcagacccaacaccaggtcatgggggtgacaaagtctgtcggagtcaaaggattgagaaaaagwcagtttgagaattaaagtgggcaccagggggccatcgtgtctgtggaggctgcaaaggccctgagctctgggagcccacgttatttattggtaatccaacagagaaacaggtggtgagaacgtggaggtcgaacgggtgcattgca

SEQ ID NO: 869216 - DNA, 584 bp, Homo sapiens
atgtaaacaaagaagtgaaagatccctacaataaaaactataaaacattaatgaaggagattgaagaggatacataaaaatgagaagatattccatgtttataaattgatagaataaatattgttaaaatgtccatactacctgtattagtctgttcttgcaatgctataaagaaatacttgaaactgggtaatttatagttaaaagagatttaattggctcatggttacaaaggctatacaggaagcatgactggggaagccttaggaaactttcaatcatggcataagggaaagcaggtacatcttaaattattagagaaggagagaaaagggggaagtgctacacaattttaagcaaccaaatctcatgataactcactatcacaagaacaacaaggaggaaatctgcctccatgatccaatcaccacccamtaggtccctcctacgttggaggttacaatttgacatgaggttgggtggaaacgcaaacccaaaccatatcactacccaaagtaattgaaatattcaatggaattccttgcaaaacaccaaagacactcttcacaaaagtagaaaaaaag

SEQ ID NO: 869217 - DNA, 662 bp, Homo sapiens
agcacgaggccctatgcaactacgcaagatgcacatttctaaagctaaccctgtcaataaagaagaagacatttctggtttcctttagttttagaatctgactttatataacttcttttccttcttctgtttcctctccttgtcttaattccctcttctttttcttctgtgatgtcacactaaggattacacaggggaggcactgttacaagagggactggggaaagggcagacatttgtatgcaaagcaagctaccatcatcaattggagattattagaaaggagtaaagagcccctccttcttctggtctgttctcttggcaactcctgtgggactctgtattatcaacatactgctaggatggaacatcacaacccaggagttttcactgctgtccttcccctaggatgctgcctgctgaaatgaaaaccaaagctgacattcatcagagttgtaatactctattttgaaacctctagagtaactgtatctatrttcatcacacacggcaaaattccttcctttcttccctttcatttacttttgtgtatcacttgtcttcatttgtctctctcattacatggttaaatccttatttagccaagatcgtgattatagctatcctccacaatctcataaatagcataatattttgcagtg

SEQ ID NO: 869218 - DNA, 600 bp, Homo sapiens
gcaagattataaaaagaaatggaaaagaaataaatctacatggtacctttatactgagtcaaagtgaagtaagtattaaatatcatgagaatgattatgttggttttattaaacatacttcctagtgtatttgataatctgattgaatagatactttgaaaactgaatttcttatctaataktctcaccctcggcctcccattgccttatggaacctatggtctgtccagccatacattgctgtggtggtcaatgtggctgtagtatgttgagagaattagtggcctttttaatgttatgcctatgtcaggatcaatttctgacttgaggaatggtcaaatataaacccttcatggtctaggtgaatgacatacagtcagaagagaagaaggagatacactttctaataaggaacctagaacctgcattgcataaaatgaggtgggatcctgtgagacaattttccatatgtttctgtactacatcctttttttcctgaactgtcttaaggacattgacataagaatagtcttggatgatatagtgtcaacatcagacaggcaaaaagtttgcatattgtgcagtgaatgtttcatatac

SEQ ID NO: 869219 - DNA, 566 bp, Homo sapiens
gtcctgctcctccgcggccgccgccgccttccctcttcccggcagggggcgccggagagcaggggcgtttgcaccacctgcacggggagcaggggtccggaatattatggggctggggggaaaatgaggctaggagttggggtatcggatgcaaacccagcagagaagcaggtaaagggggtacctgcggtgtccggctggcgygagggccctgaggttcaagttgtctcgtcgggacgttcacgtccgattgacagacttgctggactcggcttggggctgcgccctcgcctcttccctctccctcctctgggagaagcgcgcagggtggggaaagcgggcggttgtttgcattttgcaccagggtctcacgaccgggaggaggaggagctgattctccaccggggagaagagggagggggaagagaggggttaataagcttccttcctgttgtccatgggtttctaaagcccagggtcaggccagtgttcgtctttcctccgtgaggacctaccctgagatttgcaactatcttagtcttcttttctcttagattatgtgagga

SEQ ID NO: 869220 - DNA, 566 bp, Homo sapiens
gtcctgctcctccgcggccgccgccgccttccctcttcccggcagggggcgccggagagcaggggcgtttgcaccacctgcacggggagcaggggtccggaatattatggggctggggggaaaatgaggctaggagttggggtatcggatgcaaacccagcagagaagcaggtaaagggggtacctgcggtgtccggctggcgcgagggccctgaggttcaagttgtctcgtcgggacgttcacgtccgattgacagacttgctggactcggcttggggctgcgccctcgcctcttccctctccctcctctgggagaagcgcgcagggtggggaaagcgggyggttgtttgcattttgcaccagggtctcacgaccgggaggaggaggagctgattctccaccggggagaagagggagggggaagagaggggttaataagcttccttcctgttgtccatgggtttctaaagcccagggtcaggccagtgttcgtctttcctccgtgaggacctaccctgagatttgcaactatcttagtcttcttttctcttagattatgtgagga

SEQ ID NO: 869221 - DNA, 670 bp, Homo sapiens
ttttgtgacaagttcattattactacaactggtatttgagaaagccaatgcactaaggctatttataaccaagaaatctcacagtctgtgtcactccgctgtcaccccaatcagagctggtactggtagccactgctgggaatgtagaggacaattaacatcactggaccacttgcagacattccacagcaccagcctgaagtgtagcaacctcacttggtggctagacttagaggggcgctagcattcatagtagtctgtccctaagggattattaaacctgagggaaggrgtgtgcaccacatcaaggaagtattccatgggacaaaattatccagatggcaggacttgagtcccagaacattccacatgtgggtcgtttctttcagcagaggcataggtacagtgctgggttaagtggggaaattctggctccaccctaatagtcaggcagtcctggtgttcatgaagtacattgtataagggtacttatttttcctctcatccatcactgaagacaaagatgggacttctttcctcagggatagacatgggtgcacctctagacagacttttaaaaacacatcagggtgaccgcatctccataggagaagtgcccttcaggttcaggcttaaatgaagagtagattcacaatacctttctatatga

SEQ ID NO: 869222 - DNA, 662 bp, Homo sapiens
acattttccccattgtcttcgtggttaagtttgtcttcttgctacttacgcaaatttctgcagctggcttgaatttctccccagaaaatgggtttgtcttttctactgcatcatcaggctgcaaatttttcaaacttttatgctgtttcctcttgaacactttagaaatttcttccaccagattccctaaatgatctctctcaagttcaaagtttcacatatctctagggcagggacaaaatgctgctagtctctttgcatagcaagagtgacttttactccagttcccaagaagttcttcayttccatctgagaccacctcagcctggatttttttgtccatgtgattattagcatttttctcaaagccactctagagtttggaactctagaaagttctaaactttcccacatcttcctgtcttctgagccctctaagtctctaagaagttccaaactgtcccactttttcctgccttcttctgaaccctccaaactgttccaatctctgcctgttacctagttccaaagttgcttccacatttttgggtgtctttaaagcagcaccccactactcctggtaccaatttactgtattagtccattttcataatgctatgaagaaatacccaatatttggtaatttataaagaaaagaggtt

SEQ ID NO: 869223 - DNA, 662 bp, Homo sapiens
acattttccccattgtcttcgtggttaagtttgtcttcttgctacttacgcaaatttctgcagctggcttgaatttctccccagaaaatgggtttgtcttttctactgcatcatcaggctgcaaatttttcaaacttttatgctgtttcctcttgaacactttagaaatttcttccaccagattccctaaatgatctctctcaagttcaaagtttcacatatctctagggcagggacaaaatgctgctagtctctttgcatagcaagagtgacttttactccagttcccaagaagttcttcacttccatctgagaccacctcagcctggattttwttgtccatgtgattattagcatttttctcaaagccactctagagtttggaactctagaaagttctaaactttcccacatcttcctgtcttctgagccctctaagtctctaagaagttccaaactgtcccactttttcctgccttcttctgaaccctccaaactgttccaatctctgcctgttacctagttccaaagttgcttccacatttttgggtgtctttaaagcagcaccccactactcctggtaccaatttactgtattagtccattttcataatgctatgaagaaatacccaatatttggtaatttataaagaaaagaggtt

SEQ ID NO: 869224 - DNA, 553 bp, Homo sapiens
  misc_feature 153: n = A,T,C or G
aacataccttccaaaagtagctgtttttcatcagagaataacaagtgcatacctcaatggaacttctatgaatacatccactgttgaaggttgaacacaagcaaatgtacttttggaaagaacagaaaggaacttttgtggtttccccacccntagttctcaccaggccctggggatgctttcagaagtagaggatgatggagtgttgacttctagaagtccaccttcctgtcttgagcagaatatcaaagtgaaggcagcctttctgagagagcttcctctccatgctgggccccactgaaagaccattattaaccccaccaattcatgtccaagtggcatcaatcatttrgatcacacaatggctgactgtacattatgacattatctctgagtacgaaggtgataacaataataatcattttaaaaaagctcctggcatggcctcggccaactgaggaccttagccagatctgtcatacttgttcttaacatgaaaggtttggcttttcccttgcatgctcatacatcactggacctgtcaagggtttct

SEQ ID NO: 869225 - DNA, 615 bp, Homo sapiens
agttctttactgtacacttacctgcaagatagattacttagtgttgctatgtgtattcgttcatttttacactgctgataaagacatacctgagactggaaaaaaagaaggtttaatttgacttacagttccacatggctggggaggtctcataatcatggtggagggcaaaaggcacttcttacatggcggcagcaagaaagaatgaggaagaagcaaaagcagaaacccagataaacccatcagatctcatgagaattagtcactggactagcaagagaaagaccagcccccatgattcaattacctccccctgggtcccacgtgttgtgggaattctgggagatacaattcaagtggaaatgtgggcagggacacaggcaaaccatatcatcctgcccctggcccytccaaacccatgtcctcacatttcaaaaccaatcatgccttccccacagttcctcaaagtcttaactcatttcagcattaacccaaaagtccacagtccaaagtttcatctgagaaaaggcaagtctcttctgcctatgagcctgtaaaatcaaaagcaagctctacttcctagatacaatgggggtacaggtatttggtaaatac

SEQ ID NO: 869226 - DNA, 583 bp, Homo sapiens
ccctggagggaaataacctcccagggtggcaaacctgagaggttatgattcaaaatatgaatatatgattcaaaatattcgtggatctggtcaaagtaatagggaccagatatattctctgcctgaaacaacagcaaaatacattaatcaacaggtgatctctgagggatgggaaacaaacaagataagccctacaactgccccagctaacagccttgagagagtttctaggctgcrgtgccgggaggcagaactgaggtgggttccctaacatgaggagatgaagcttggtcctggaagacctgggcagtgagagttcacaggggagagttccagagaggagagagctgcacagacagccaactccagagatctgcagagggactctgatgggaatcagcacatgagtgaggaagctacccaggaaagaatcatcaaaagagggaacagagacggtgctgatgctggcctggaaaaaatgcctgctcccaccaagcagacaggaaaaacataatgctcaaggcagtgggcaaagttctcaggaatattttgcctcacaagtgaagaataattaaccttagac

SEQ ID NO: 869227 - DNA, 583 bp, Homo sapiens
ccctggagggaaataacctcccagggtggcaaacctgagaggttatgattcaaaatatgaatatatgattcaaaatattcgtggatctggtcaaagtaatagggaccagatatattctctgcctgaaacaacagcaaaatacattaatcaacaggtgatctctgagggatgggaaacaaacaagataagccctacaactgccccagctaacagccttgagagagtttctaggctgcggtgccgggaggcagaactgaggtgggttccctaacatgaggagatgaagcttggtcctggaagacctgggcagtgagagttcacaggggagagttccagagaggagagagctgcacagacagccaactccagagatctgcagagggrctctgatgggaatcagcacatgagtgaggaagctacccaggaaagaatcatcaaaagagggaacagagacggtgctgatgctggcctggaaaaaatgcctgctcccaccaagcagacaggaaaaacataatgctcaaggcagtgggcaaagttctcaggaatattttgcctcacaagtgaagaataattaaccttagac

SEQ ID NO: 869228 - DNA, 583 bp, Homo sapiens
tctcccatttggaatgattatatttacccaatgcctgtatccccactatatctaggaagtaactaacttgcttttgattttacaggctcataggtagaagggacttgccttgtctcagatgagactttggacttgggttaattctggaatgagctaagactttgggggactgttggaaaggmatgactggttttcaaatgtgaggacatgagatttgggagggaccagctgtgggatgatattgtttgtgtccttagtcaaatctcaccctgacttttagttcccataatccacatgtgtcataggagagatccagtgaaaggtgattgaatcatgggagcagttactataatgctattctcatgatagtgagtaagttctctgagatctgaaggttttataaagggtttttccccctttgctcagcacttctctctcctgccaccttgtgaagaaggatgtttttgcttccccttctgccatgattgtaagtttcctgaggtctcctcagccatgcagtgctgtgagtcaattaaacgaatttcctttattaattatccagtctctggtacttctttgtaga

SEQ ID NO: 869229 - DNA, 694 bp, Homo sapiens
agtaaactatcgcaagaacaaaaaaccaaacaccgcatattcccactcataggtgggaattgaacaatgagatcacgtggacacaggaaggggaacatcacactctggggactgttgtgggatggggggaggggggagggatagcattgggagatatacctaatgctagatgacgagttagtgggtgcagcgcaccagcatggcamatgtatatatatgtaactaacctgcacaatgtgcacatgtaccctaaaacttaaagtataataataaaaaaaataaaataaaataaaataaaataagagaaggaaaaaaaaagaaaaatatctacaattatctaaagagcaataaaatactgctcccttctctaactacatctctgtgaaaggatggatttttttttcatgtatttcaattaagacaacaaatcacaacagaatgaatgtagaaacagatatgagaatctagatgtcatctattaagccagacattaaagagactagcaaaaaaatgctacttgctcactgaaatttttgttttgttttgtacagcataaagcatacacttttaatatataaacatttatgttaacatgtaatggtcatattattattttaatgaattaaatatttaaaaacctctttaaattttctggtcaatagtgatagataatgatacacaaaaataagcacat

SEQ ID NO: 869230 - DNA, 571 bp, Homo sapiens
aaagaacctcagtaagatacttcacaaaaagatgatccccaagacacatagtcatcagattcttcaaagtcaaaatgaaacaaaaaatgttcaaagcagctagagagaaaggtcagatcacctacaaagggaagtccatcagactaacagtggacatgtcagcagaaaccatacaagccaaaagagactgagggtcaatattcaacattttcaaagaaaagaaattttaacccagaattttatacctggctaaactgagcttcgtaagtgaaggagaaataaaattcttttcagacaagcaaattctgagggaattcattaccaccagaccccccttacaagagcatgtgaaggaagcactaaatgtggaaagaaaagaccattactagccattacaaaaacacactggagtacacaaacyggtgacactataaagcagccacatcaagaactgtgctgagcataaacaagtctgaaaaataacaagctgaaaacatgatgacatgatcaaatccacacatatcaacactaaacttgaatgtaaatgagttaaattccccaactaaaaggt

SEQ ID NO: 869231 - DNA, 660 bp, Homo sapiens
agatagaagactagctaaaccaatcaagaagaaagaagagaagattaaaataaacacatctagaaacaacaagggggattttaccgctgacccccagaaagacaaacaaccatcagataatattatgaacacctttatgtargtaaactagaaaatctagaaaaaatagataaatcactggacacatacaccctccctggtatgaaccagaaagaaattgaatccctgaatagatcaattaataggctctgaaatcgaggcagtaataaatagcctatcaaccaaaaaaagcccagagccagacatattcacaactgattatatcagatgtacaaacaagagctggtaccattcctactgaaacaattccaaaaaactgaggaggagagacttctctttaatccattttatgagaccagcatcattctgataccaaaacctggcagacatacaacaaaaaaagaaaatttcaggtcaatatccttgatgaatatcaatgcaaaaattctcaacaaaatactggcaaaccaaatccagcagcacatcaaaaagtttatccaccacaattaagtaggctttatctctgggatgcaaggttggttcaacatatgcaaatcaataaaaatgattcatcacataaactgaactaaagacaaacac

SEQ ID NO: 869232 - DNA, 640 bp, Homo sapiens
acaaacataatgtagtatttatctatataaacgtgttccattttattatagtctctgagggtcctaaagaacaaacacttaaaaaatgtttggacagtttgttatctatagtcactcaactcaaatgtaaataattgccatttgtttgggtgcttaaatagcacttaattttgattggtaatgaataactcaatacttagttaattgtgtatccactggcaattctgaactttcattggtctgtggttttttttttattattattatactttaagttctagggtacatgtgcacaacgtgcaggtttgttgcataggtatacatgtgcygtgttggtttgctgcactcattaactcatcatttacattaggtatttctcctaatgctatccctcccccctccccctaccccacgacaggccctggtgtgtgatgttccgctccctgtgtccaagtgttctcattgttcaattcccacctatgagtgagaacatgcagtgtttggttttctgtccttgcaatagtttgctgagaatgatggtttccagcttcatccatgtcgctgcaaaggacatgaactcatccttttttatgactgcatagtagtactccatggtttatatgtgccacattttcttaat

SEQ ID NO: 869233 - DNA, 607 bp, Homo sapiens
agtgaatgacctataagacttgtcacagatttcatcatctccttttctttcacctttctgtccacttctccaggatgatttatcctcctgccagaaggtgtagtccttcaatgacagcttagtttttgatacatcaaggattttatcatgaacattgagacctatccaatcaccagttccacagctacaggccaaccttcagagaagtcttcctggaatgctaagaaaaggctagagttttttagataaaagttcctctttttggtttgtttttaaaattggtgacaataggtgctgtcttacagattaattccaaggtattgtcctcctttgccaccttggacagttcccacaaaacgttctaggccttactytctttcaaaaattatgcattcatctgagtgctctgtgcaggaagaaaggtgatgtaacagttgtcccatatctgtaagaggtattgtcaaggccagctgatacaggagggaccaatatggaccctttagtcttcttagtttgtaaaacaccttagttcacatttgacagtcatgggaaggattgccaccactgattctatctgggaatagtgatgtctgagatggagatatgt

SEQ ID NO: 869234 - DNA, 617 bp, Homo sapiens
cttcggcttggatgaggtaattggcattgatgatgactgtccctggggttaattcactctctttagaccctgaagcgagagtggtacacagtgttttatgtcttgtactctagatggagattgcctgaaggaaagggataaataaattctacatggaggaaagttaaaggactgttagacttggttcagtagcacattctgcatcccttctgagaatagaagtttcattctcaatcaagaacatgaagtttcccatgtgtgaatagaagctcaataaatatttaatcaaaagaaatgctaaataggagtggtgagagagggcatccttgtctttcaccrgttttcagagggaatgcttacagcttttgcccattcaatgtgatattggctgtgggtttgtcataaatagcccttattattttgagttatgttccatcaatatgtagtttattgagagttttaacatgtagaaatgttgaattttatcaaaggccttttctacatctgttgagaaaatcatgtggtttttgtctttggttctgtttatgtgatggattacgtttattgatttgcttatgttgaaccagccttgcatcccagggatgacgctgacttga

SEQ ID NO: 869235 - DNA, 604 bp, Homo sapiens
tcccacacagaatggtgggaaagtcttgcttcacaagttccatctgtgcttatcagtgtccgtaccacccaaatgtccttctgggactagtgttaagacctcaagattaagcctctgtccaagcggaatttctgagcaaatgtagattgtcacggaagtctgctgttacactgagacagaatagtccygaaatgttaaatttacattatgctcaccctgtaattcattttagaccctcttagtcctgctcttgttaagggcaggactcactgtcacagactgatttggggtgttaattaatgcctcttctctcttcctcaagggacaccctgagttttcaaaggcctctgctagccacgctcagtgcaacctgcaggctccaccctccagccctgacacagatttagcccaaattagacatgatggagaagaaagggagggaggctgaaggagccctgtgggtcctgggctttgtgaatgcgtttgagcaagagcgttgctagagtgcttctgatctcagaaaataccagataggcaaatcaccagagatgaaaaaaacaaacacaacacaacaaaaaaaccttttttaaggtaaaactataga

SEQ ID NO: 869236 - DNA, 604 bp, Homo sapiens
tcccacacagaatggtgggaaagtcttgcttcacaagttccatctgtgcttatcagtgtccgtaccacccaaatgtccttctgggactagtgttaagacctcaagattaagcctctgtccaagcggaatttctgagcaaatgtagattgtcacggaagtctgctgttacactgagacagaatagtcctgaaatgttaaatttacattatgctcaccctgtaattcattttagaccctcttagtcctgctcttgttaagggcaggactcactgtcacagactgatttggggtgttaattaatgcctcttctctcttcctcaagggacaccctgagttttcaaaggcctctgctagccacgctcagtgcaacctgcaggctccaccctccagccctgacacagawttagcccaaattagacatgatggagaagaaagggagggaggctgaaggagccctgtgggtcctgggctttgtgaatgcgtttgagcaagagcgttgctagagtgcttctgatctcagaaaataccagataggcaaatcaccagagatgaaaaaaacaaacacaacacaacaaaaaaaccttttttaaggtaaaactataga

SEQ ID NO: 869237 - DNA, 543 bp, Homo sapiens
gtttttctcaattattccctcaaatatattttacagacttttagatttctcttcttcctcgggtacaccaattattcttaggtttggacacttaacatagtcccaaacttcctggcagctttgttcattttttaaaattctttattctttgtctttggtggatggggttaattcgaaaacctcgtcttcgagctctgaagttctttcttctgcttgttcagttctattgctgagactttccagtggattttgcatttctataagtgtgtccttgatttccagaagttgtrattgttttttatttatgctatctatttcactgaagatttttccctttatgtcctatatcatgtttttgatttctttaagttggacttcacctttctctggtgtctccttgatagtttaataatcaactttctgattctttgtctgccaattcagtgatttcatcttggtttatatccattgctgttaaactggtgtgattttttgggggtgttagagaagcctgttttgtcatattacccgaattgttttcct

SEQ ID NO: 869238 - DNA, 631 bp, Homo sapiens
tgaaacagctctggagacacaagcataaagcagaaaaaaactgatttgagtgtcatgtgcagacagaggtgaggtttaggccacaagagagaataagctctccgagagaaagagaggcagaaccttgcaaagtatacctgtgaccttgtagaatagtactagggcaaacctcccaggttgctgaacactgaaccgttagtgaggaaataaatgtttttcaagaatcacagtggaagtgaggctgaaggcccacatttcattagacagaagagcacactcctcccgtgcccctatgaaatgtaatgtctgatgaagcccagcaagaattttactgaccctttggggctttgcaatttgrctgaaacaggttgtgaagtcagcagccattttcttcagccttcacaacctgaaaatctttcactcaatccagaaaggataggaatgagagggtgaggatttgtgagcgagcttctcaatcatagcaagttaaccagattcgaaatggaggaacgtgagtctctcacgcaccagtcttaggtacagattttgcatctggcttttcaacaactgtgcagaacttcagaggtcccttctctcttctgtaagccacgggtcttccagcaccagctga

SEQ ID NO: 869239 - DNA, 662 bp, Homo sapiens
ctcatgcttgtaatcccagcactctgggaggccaaggagggcagattgcttgaactcaggagtttgagaccagcttgggcaacatggagtaaccccatctctacaaaaaatacaaaaattagccaggcttggtggtgtgcgtctgtagtcccagctacttgggaggctgaagtgggaggatctcctgagcccagggagatggaggctgaagtgagccgatagtgccactgcactccagcctgggtgacgagagtgagacccccatcccaaaacaacaacaacaaacagacaaaacccccaaatctgcctttgccatttattatctgtttgattttgaataaaatcctttatataaaaaatggggataataacagcacctaccaggtaaggtggttatcaggatgaaatgaaataatatctgcataatgcytgacaaatagtaataaaaacacatttattgatattattattagtttttattactattattgtgacagtaacacggaggcaagcaacattacttattccagatgaccattcaccttcccagaaacctgggctgcagtgtttatagccttctgtgatgtaaatttcctataagctatatattacaatagttttgaggatcaataaagacattgattataaagtatggtgaatgc

SEQ ID NO: 869240 - DNA, 662 bp, Homo sapiens
ctcatgcttgtaatcccagcactctgggaggccaaggagggcagattgcttgaactcaggagtttgagaccagcttgggcaacatggagtaaccccatctctacaaaaaatacaaaaattagccaggcttggtggtgtgcgtctgtagtcccagctacttgggaggctgaagtgggaggatctcctgagcccagggagatggaggctgaagtgagccgatagtgccactgcactccagcctgggtgacgagagtgagacccccatcccaaaacaacaacaacaaacagacaaaacccccaaatctgcctttgccatttattatctgtttgattttgaataaaatcctttatataaaaaatggggataataacagcacctaccaggtaaggtggttatcaggatgaaatgaaataatatctgcataatgcctgacaaatagtaataaaaacacatttattgatattattattagtttttattactattattgtgacagtaacacggaggcaagcarcattacttattccagatgaccattcaccttcccagaaacctgggctgcagtgtttatagccttctgtgatgtaaatttcctataagctatatattacaatagttttgaggatcaataaagacattgattataaagtatggtgaatgc

SEQ ID NO: 869241 - DNA, 647 bp, Homo sapiens
ccaaaagctccttaagctgataaacaactttagtaaaggctcaggatacaaaatcaatgtacaaaagtcaccagcattcctatgcaccaacaaccatcaagccaagagccaactcaagaatgcaatcccattcacaactgccacagaaagaataaaatgcctaggaatacagctaaccagagaggtgaaggatctctacaatgagaactacaaaacactgctcaaagaaatcagagatgacacaagccaatggaaaaacattccatgctcatgaataaaaagaatcaatatcattaaaatggccatactggccaaaacaatttatagattcaatgctattcctatcaaactaccaataacatccttcacygaactagaaaaaaaactattttaaaattaatatggaaccaaaaaagagctcaaatagccaaggcaatcctaagcaaaaagaataaagctggaggcatcatgctacccaacttcaaactatactacagggctacagtaaccaaaacagcatgatactggttttataaaaagaaaaaacagacacatagaccaatggaacaggatagagagtccagaaataagtccacacacctacaaatctgttttttgacaaagttgacaaaaacaagcaatggaga

SEQ ID NO: 869242 - DNA, 699 bp, Homo sapiens
tcacttcacatttgtcaggatggctattattaaaagaaaacgaacccctcccaaaaccccaaaaaacaagtgttgaagatgtggaggaagtgaaacccttgcacactgttagtaggaatggtgcagccttctcaaaaaaattaaaaatagaactaatgtgtgatctaggaattcaaatttgaataattatccaaaggaaatgaaatcaaagtattgaagacatattagcactctatgtcactagactcatggctacggaaagaataagagggcctttacataggacaatgaaaacttcccgaactgaaataaaaagaaaaaagaaaaaataataaaatccaaacagaacatcaaaaacttcaagaactgtggagcaattacaaaaagtataacctaagtatagttagaatacyggaaggaaaaaaaggaaagaagcagaaaaaatattttaagcaataatatttgggaacattccaaaattaatgacaaataccaagtcacagatccatgaatctcagagaacatcaagcaggattttaaaaagccatctcaggtaccccacaaatatatacacctactatctacccataaaaatgaaaaattaaaaaaatgccccaaacacccccccaccggctgccaccccaaacacaactaggcatattgtagtcaaattacagaaaaccaaataaaatttttagc

SEQ ID NO: 869243 - DNA, 407 bp, Homo sapiens
atgtctttattagcagtatgagaacagactaatacagtaacttggtaccagatagtagggagctgctgtaaagatacctgaaaatgtggaaatgaatttggaactgggtaacagtcagaagttagagcagtttggagggctcagaagaagatagaaaaatrtgggaaagtttggaacttcctaaagacttgtaggactcagaagacaagaagatgtgggaaagtttggaacttcctagagacttgttgaatgtctttaaccaaaatgctgatagtgatatggacaataaggtcttggctgagctggtgtcagatggagatgagaaacttgttggaaactgaagtaaaggtcactcttgctatacaaagagacacgacattttgccccttatctagagatctgtggaa

SEQ ID NO: 869244 - DNA, 587 bp, Homo sapiens
ggataagatctcaatctcttttatggctgcatagtattccatggcatatatgtacgttttctttatccagtctattattgatgaacattgggttggttccatgtctttgctcttgtaaatagtgctgcaataaacatatgggtacatgtgtctttattgtagaatgatttataatcctttgggtatatacttggtcataggaatgctgggtcaaatggtacttctggttctagatccttgaggaatcgccacactgtcttccacaatagttgaactaatttacattcccaccaatggtgtaaaagcattcctatttttccatagcttcaccaacatctattgttttctggcttttaaataatctccattctgactgatgttatctcattgtggttttgatttgcatttctctaatgatcrtcgataagcttttttttaaatgtgtttgttggccacataaatgtcttcttttgagaagtggctgtatatatcatttgcccactttttgaaggggttgtttgttttttttttttcttgtaaatttgtttaagttccttgtagattctggatattagacctttgtcaga

SEQ ID NO: 869245 - DNA, 593 bp, Homo sapiens
tgtgtgtctttttctggttttggtatcaaagtaatattggctttataaaatgagtttggaagtattccctcctcctctattttttttttaatagtttgagtaggattggtattagttcttctttaaatgttttgtagaatttagtagtgaagccattgggtcccaggttttgtttgctgggagactttttattacagcttccatctcattaagtgttattagtctgttcatgttttggattacttcacggttcaatcttggtagattatatgtgtctaggaattcatccatttgaaatttrtcaattaaagttagatttttcaaattatttgccatagttgctcatagtagccactaatgatcctttgaattcctgtggtatcagttttaatgtctcatttttcaactctgattttatttatttctgtcttctctcttttttctttcttagtctaccgaaaggtttgtcaattttgttttctttcaaaaaaatcagctttttgttttgttgaccttttgtattattttcttcatttcaaattcatttacttctgctctaatctttgtcagttcttttcctctaataattctgg

SEQ ID NO: 869246 - DNA, 624 bp, Homo sapiens
tgtctctgcaaaggacatgaactcattcttttttatggctgcataggattccatggtatatatgtgccacatcttctttatccagtctatcactgatgggcatctgggttggttccaagtctttgctattgtgaacagtgcygcaataaacgtacacgggcatgtctttatattagaataatttataatcctttgggtatatacccagtaatgggattgctgggtcaaatggcatttctggttctagatccttgaagaatcgccacactgtattccacaatggttgaactaatttacactcccaccaacagtgtaaaagcattcctatttctccacatcctctctccagcatctgttgtttcctgattttttttttttttttttttttttgagatgaagtctcgctctgtcactcaggctggagtgcaatggtgcaatcatggctcactgcaacctccacctcctggattcaagcgattgtcctgcttcagcctcccaagaagctgggattacaggcgtgtgccaccatgcctggctaattttttgtatctttagtagagacggggtttcaccatgttggccaggctggtctcaaaatcctgacctcgtgatctgcctgccttg

SEQ ID NO: 869247 - DNA, 624 bp, Homo sapiens
tgtctctgcaaaggacatgaactcattcttttttatggctgcataggattccatggtatatatgtgccacatcttctttatccagtctatcactgatgggcatctgggttggttccaagtctttgctattgtgaacagtgctgcaataaacrtacacgggcatgtctttatattagaataatttataatcctttgggtatatacccagtaatgggattgctgggtcaaatggcatttctggttctagatccttgaagaatcgccacactgtattccacaatggttgaactaatttacactcccaccaacagtgtaaaagcattcctatttctccacatcctctctccagcatctgttgtttcctgattttttttttttttttttttttttgagatgaagtctcgctctgtcactcaggctggagtgcaatggtgcaatcatggctcactgcaacctccacctcctggattcaagcgattgtcctgcttcagcctcccaagaagctgggattacaggcgtgtgccaccatgcctggctaattttttgtatctttagtagagacggggtttcaccatgttggccaggctggtctcaaaatcctgacctcgtgatctgcctgccttg

SEQ ID NO: 869248 - DNA, 624 bp, Homo sapiens
tgtctctgcaaaggacatgaactcattcttttttatggctgcataggattccatggtatatatgtgccacatcttctttatccagtctatcactgatgggcatctgggttggttccaagtctttgctattgtgaacagtgctgcaataaacgyacacgggcatgtctttatattagaataatttataatcctttgggtatatacccagtaatgggattgctgggtcaaatggcatttctggttctagatccttgaagaatcgccacactgtattccacaatggttgaactaatttacactcccaccaacagtgtaaaagcattcctatttctccacatcctctctccagcatctgttgtttcctgattttttttttttttttttttttttgagatgaagtctcgctctgtcactcaggctggagtgcaatggtgcaatcatggctcactgcaacctccacctcctggattcaagcgattgtcctgcttcagcctcccaagaagctgggattacaggcgtgtgccaccatgcctggctaattttttgtatctttagtagagacggggtttcaccatgttggccaggctggtctcaaaatcctgacctcgtgatctgcctgccttg

SEQ ID NO: 869249 - DNA, 587 bp, Homo sapiens
gatgccttgccctgctttgactcatgctcggtgtgctgcacccactgtcctgcacccactgtctgacaagctccagtgagatgaacctgggatctgagttggaaatgcagaaatcactcgtcttctgcattgcttgctctgagagctgtagaccggagctgttcctattcagtcatcttggaaccacccccttgagagtttttaatatgaagtgatgttgaattttatcaaaagtcttttctgcatctattaagataatcttgtaatttttgtctttagttctgtttatgtgatgaatcacatttattgatttgtgtattttgaaccaaccttgaatcccaaggataaagcctacttgatcatggtggattagcttttcgatgtactgctggattagctttgcaagtatgttgttgatttttgcatsaattttcatcaaggagattggcctagggttttcttttttcttgtgtctctgccaggttttggtatcaggataatgctggcctcatagaatgaggttttgggatagtttcagtaggaatggtaccagctcttctttgtatatctggtagaattcagctgtg

SEQ ID NO: 869250 - DNA, 569 bp, Homo sapiens
aaagatctcaaaataatactctaacatcacaactaaaagaactagagaggcaagaacaaattaatccaaaagctagcagaagacaagaaataactaagatcagacaagaattgatggagatagagacacgaaaatccctccaaaaaatcaatgaatttagaagatggtttttcraaaaaattaagaaaatagatagaccactagctagactaatctagactaataaagaagaaaagacagaagcatcaaatagacaaaataaaaattgataaaggggatatcaccactgaccccacagaaatacaaactaccatcagacaatactataaacacctctatgcaaataaactagaaaatctaaaagaaattggtaaatccctggatgcatacaccctcccaattcaaaaccaagaagaagttgaatctctaaatagaccaataacaagttctgaaattgatgcagtaattagtagcctaacaacaaaaaaaatccaggactagaatagattcacagctgaattctaacagaaatactgagagaagctggtaccattccttctgaaactatt

SEQ ID NO: 869251 - DNA, 594 bp, Homo sapiens
tttgttacataagtatacacgtgccctggtagtttgctgcacccatcaactcatcacctacattaggtatttctcctaatgttatccctcccctagccacccaacccccaacaggccctggtgtgtgatattcccctccctgtgtccacatgatctccytgttcaactcccacttacgagtgagaacatgcggtgtttgactttctgatcttgtgatagtttgctgagaatgatggtttccagcttcatccatctccctgcaaagcacatgaactcatccttttttaaggctgcgtagtatattccatagtatatatgtgccacattttttaatccagtctatcactgatggacattggggttggttccaagtctttgctattgtgaatagtgcctcaataaacatacatgtgcatgtgtctttattgtagaatgatttataatcctttgggtatatatccagtaatgggattactgggccaaatggttatttccagttctagatccttgaggaatcgccacactgtcttccacaatggttgaactaatttacactcccaccaacagtgtaaaagcattcctatttttccacaa

SEQ ID NO: 869252 - DNA, 610 bp, Homo sapiens
cccacctcggcctcccaaagtgctgggattacaggtgtgagccaccgtgtctggcctgagccactgcgcccggccgcatgtgtcttcacagtagaatgatttatattcctttgtgtatacactcagtaatggaactgctgggtcaratggtgtttccggtcatagatccttaaggaatcaccatactatcgtccacaatggttgaactaatttgcattcccaccaacagtgtaaaaggattcctatttctccacagcctcacataggatctattgtttcttgcctttttaataatcaccattccgactggtatgagatggtatctcattgtggttttggtttgcatttctctgataatcagttctggtacattgtctctttgttctcattggtttcaaagaacttcttgatttctgccttaatttcattatttactcaggagtaattcaggagcacattgttcagatttcatgaaattgtgcggttttgagcgagtttcttaatcctgagttctaatttgatcgcaccgtgatctgagagacggtttgttatgatttcagttcttttgcatttgctgaggagtgttttatgtccaattatgtggttgatt

SEQ ID NO: 869253 - DNA, 528 bp, Homo sapiens
tcatatttgctccatttcccaacaagttcctcatctctgtttgagaccatcccagcctcgacttcattgtccatattactatcagcattttgggcaaagccattcaacaattctctaggaagttctaaactttcccacatcttcctgtcttctgggccctccaagtgtctaggaagttccaaactttaccacattttcctatcttcttctgagccctccaaactgttccaacccctgcctgttactcagtttcaaagttgcttccacattttcaggtatycttatggcagcaacccactcctggcaccaatttactgtagtagtctgttctcacactgctaatgaagacatacttgagactgtgtaatttataaagggaagaggtttaattaattcacagttcagcttggctgggaagtccccaggaaacttgcattcatggcagaaggagaagcaaatacgtccttcttcacatggcagcaggaataagaagcacagagcgaagtgggggaaagccccttataaagc

SEQ ID NO: 869254 - DNA, 619 bp, Homo sapiens
  misc_feature 107, 108: n = A,T,C or G
ttcttcccctttttttccctaaaaatcatatagttttgcattgacatgtaagtccaggatccatatggagttcatttttgtacaaggtgtgaggtttaatgtcaatnngatcttttttttttttttttcatctacggatgtcctattgttccakcaccatttattgaaaaagcaattctttcctcattgaatttctcctgcattttgtcaaatatcagttgggaatatttgtgtgggtctatttctggattatctattctgttccattgatctatgtgtccatctttctgtctcactattactgtagctatatagtaagccttaatattaattacagtgattcctcccactccactctactttttgaagattatagctattctagtgcttgtgcattttcaaataagtttcagaagatatttttatttgtataatgtaaattacattatgaatatacaataaaatttataaaattaatttcagaataaactcatctatgattacaaaataccttgctaggattttggtaagaattgcattggacctataaaattaatttggggagaactgatgcctttactatgttgagtttggaagcccacttttgcactacaattta

SEQ ID NO: 869255 - DNA, 639 bp, Homo sapiens
tttaatgggtgacctcgtcattttgccagtagccttccctaaacagaacagttccgtcctcttcttaatcccactgagcaagggagttttccttagcctcataaaagagaaatattttgtgaaggaaaagtaggactcatgccactttatggaaagacctgtgttacacaaattcacatgaaagacacattctaggggaaatgtgaaaagccaccaaaagtagaagcagacagatgtagtgtgaatccacctgtcctacctgtatgagctcaggaaattaaatcttctaagcccccttaattttttttttttttttgagacagagtctcgttctttcacccaggccggagtgtagtggcactatcttggctcactgcaagctctgcctccttggttcacgccattctcctgcctcagcctcccaagtagctgggactacaggcaccyaccaccacgcccagctaattttttgtatttttagtagagatggggtttcaccgtgttagccaggatggtctcgatctcctgacctcgtgatccaccctcctcagcctcccaaagtgctgggattacaggcgtgagccaccgcacccagccctaagccccctttaaaaacagaaataagaatatcactcaaaa

SEQ ID NO: 869256 - DNA, 639 bp, Homo sapiens
tttaatgggtgacctcgtcattttgccagtagccttccctaaacagaacagttccgtcctcttcttaatcccactgagcaagggagttttccttagcctcataaaagagaaatattttgtgaaggaaaagtaggactcatgccactttatggaaagacctgtgttacacaaattcacatgaaagacacattctaggggaaatgtgaaaagccaccaaaagtagaagcagacagatgtagtgtgaatccacctgtcctacctgtatgagctcaggaaattaaatcttctaagcccccttaattttttttttttttttgagacagagtctcgttctttcacccaggccggagtgtagtggcactatcttggctcactgcaagctctgcctccttggttcacgccattctcctgcctcagcctcccaagtagctgggactacaggcacccaccaccacgcccagctaattttttgtatttttagtagagatggggtttcaccrtgttagccaggatggtctcgatctcctgacctcgtgatccaccctcctcagcctcccaaagtgctgggattacaggcgtgagccaccgcacccagccctaagccccctttaaaaacagaaataagaatatcactcaaaa

SEQ ID NO: 869257 - DNA, 635 bp, Homo sapiens
tttcatccagatctagaaagtaaaccaagggatgattacctttaacggcagaaaggaaagctgatgtctcagcctgggcactaagctctgcaccccagccatgtctagttcttcagtatttctgtcctggtcttgtgtgtgtgacaacaaacttccctggtacccgaagctcaggatgtctgtagaggagaccccagaattggctgtgctattcttttcttcatctgggttatttccaccaacacctataaaaacaagccaagaaaaagtcaacagcttaaaaaggccggtttcttggtggcatctctatgtgggcacagcgttttcctccagtgacagagtgatcgtttatagctgctcgggtacaatatgaatttagctcctcytgaaagatgttacatttagattagagaaagggaagattctacatgggatttagaaacctagatagagcttacgtgacccaactatgaatgcgtaggctcaaaagaagttcataaggccagctatcccttattaagctctagccatgtgatgggcaccttagatatacatataggaagatatggacatcttcccatcttctcagcaaacccaccaggaaggtgtaatcccagttcaaacatgagaaaaca

SEQ ID NO: 869258 - DNA, 691 bp, Homo sapiens
ctgaggaaatgccaaaccgttttccaaagtggctacctcattttatatttccaccagaaatgaatgagggttcaacttctccatatccatgccaactcttattattacctgtcattttgacagtagtaattctagctgtaaagaggtatctcattcaagttttgatttgcattttcctaataactaataatgtygagcatcttttcacatgtctattggccatttgtacatttctttggagaaagtattcaaatctttgctcatttttaaattgggatatttgtctttttgttattgagttgtaatctttatatattctagaaactaggcccttttcagatatatgatgtagattatcttttcactttttttttttttttagatggagtctcactctgttgcccaggctggagtaaagtggtgcaatcttggttcaccgtaacctctgcctcccgggttcaagcaattctcctgcctcagcctcctgagtagctgggattacaggcacacaccaccacgcctggctaatttttgtatttttagtagagacgaggtttcatcatgttggccaggctggtctcgaactcctgacctcaggtgatccaccctccttggcctcccaaagtgctgggattacaggcgtaagtcaccgtgcccagcccttttcactttcttgatagtggccttcaaa

SEQ ID NO: 869259 - DNA, 691 bp, Homo sapiens
ctgaggaaatgccaaaccgttttccaaagtggctacctcattttatatttccaccagaaatgaatgagggttcaacttctccatatccatgccaactcttattattacctgtcattttgacagtagtaattctagctgtaaagaggtatctcattcaagttttgatttgcattttcctaataactaataatgtcgagcatcttttcacatgtctattggccatytgtacatttctttggagaaagtattcaaatctttgctcatttttaaattgggatatttgtctttttgttattgagttgtaatctttatatattctagaaactaggcccttttcagatatatgatgtagattatcttttcactttttttttttttttagatggagtctcactctgttgcccaggctggagtaaagtggtgcaatcttggttcaccgtaacctctgcctcccgggttcaagcaattctcctgcctcagcctcctgagtagctgggattacaggcacacaccaccacgcctggctaatttttgtatttttagtagagacgaggtttcatcatgttggccaggctggtctcgaactcctgacctcaggtgatccaccctccttggcctcccaaagtgctgggattacaggcgtaagtcaccgtgcccagcccttttcactttcttgatagtggccttcaaa

SEQ ID NO: 869260 - DNA, 691 bp, Homo sapiens
ctgaggaaatgccaaaccgttttccaaagtggctacctcattttatatttccaccagaaatgaatgagggttcaacttctccatatccatgccaactcttattattacctgtcattttgacagtagtaattctagctgtaaagaggtatctcattcaagttttgatttgcattttcctaataactaataatgtcgagcatcttttcacatgtctattggccatttgtacatttctttggagaaagtattcaaatctttgctcatttttaaattgggatatttgtctttttgttattgagttgtawtctttatatattctagaaactaggcccttttcagatatatgatgtagattatcttttcactttttttttttttttagatggagtctcactctgttgcccaggctggagtaaagtggtgcaatcttggttcaccgtaacctctgcctcccgggttcaagcaattctcctgcctcagcctcctgagtagctgggattacaggcacacaccaccacgcctggctaatttttgtatttttagtagagacgaggtttcatcatgttggccaggctggtctcgaactcctgacctcaggtgatccaccctccttggcctcccaaagtgctgggattacaggcgtaagtcaccgtgcccagcccttttcactttcttgatagtggccttcaaa

SEQ ID NO: 869261 - DNA, 691 bp, Homo sapiens
ctgaggaaatgccaaaccgttttccaaagtggctacctcattttatatttccaccagaaatgaatgagggttcaacttctccatatccatgccaactcttattattacctgtcattttgacagtagtaattctagctgtaaagaggtatctcattcaagttttgatttgcattttcctaataactaataatgtcgagcatcttttcacatgtctattggccatttgtacatttctttggagaaagtattcaaatctttgctcatttttaaattgggatatttgtctttttgttattgagttgtaatctttatatattctagaaactaggcccttttcagatatatgatgtagattatcttttcactttttttttttttttagatggagtctcactctgttgcccaggctggagtaaagtggtgcaatcttggttcacygtaacctctgcctcccgggttcaagcaattctcctgcctcagcctcctgagtagctgggattacaggcacacaccaccacgcctggctaatttttgtatttttagtagagacgaggtttcatcatgttggccaggctggtctcgaactcctgacctcaggtgatccaccctccttggcctcccaaagtgctgggattacaggcgtaagtcaccgtgcccagcccttttcactttcttgatagtggccttcaaa

SEQ ID NO: 869262 - DNA, 617 bp, Homo sapiens
tattagggtattgaaaaagtgtgggacaatgttaaatccagttattcaaaaaggacaagaaaatgggaatagaaaacaaaagtgtatgagctcctagagaaagtggataatttaattagaaagaagacagaaaagttccattgtaggagggacaagaagagtggcaagagaccagttttattaggtcagtccgttgcttgccaatcttatttaaacttcatcactttccagattggaagggtgagtttctaattagctcctttttcatcagtcaaggctcmatcactctaaacaatctttgggtaatgatcatatccccactttgatcaactttggggaaatttcagagccaaatattaaacaggtgcttatgaaattttgctcaaccacctgttctctcgacccctggctgacccagttaacaaagaccagtgtacttcaattactccaagtgatatcaaatataaccaacccttaattaacactgggcacttttctctcaatcttgcaatctgattttctcaaattaatcttcagtatattttatatctcaatgaaagactcagaaagaacctgtaactcaaacctaaaataatatacgtataagcttggctaca

SEQ ID NO: 869263 - DNA, 683 bp, Homo sapiens
attgatggagtttcttcatagtgtcattggtctttataatttggtgcatttttgctgtggctggtaccagcttttcctttccatatttagcacttctttcaggagctctttcaaggcaggactggtagtaatgaaatccctcagcatttgcttctctggaaaggattttatttctcctttgcttatgaagcttagtttggctggatgtgaaattctgggttgaaattcttttctttaagaacattgcatattggcccccaatgtcttctggcttgcagagtttctgctgagaggttcactgttagtctgttgggcttctckttgtaggtaacctggcttttctctctggctgtccccagcatctttttccttcatttcgatcttagagaatctgatgattatgtgtcttgtggttgacttcttgtggagtatcttagtggtgttctctgtatttcctgaatttgcatgttggcctgtcttgctaggtgagggaacttctcctggataatatcctgaagtgtgtttttcagcttgtttccattctccccatctccttcaggtacttgaatcaatcatcggtttggtatttttactaagtcctatatttcttggaggctttgttcattccttttcattcttttttctctaatcttgtctgcatgtcttatttcagcaaggtgctc

SEQ ID NO: 869264 - DNA, 683 bp, Homo sapiens
attgatggagtttcttcatagtgtcattggtctttataatttggtgcatttttgctgtggctggtaccagcttttcctttccatatttagcacttctttcaggagctctttcaaggcaggactggtagtaatgaaatccctcagcatttgcttctctggaaaggattttatttctcctttgcttatgaagcttagtttggctggatgtgaaattctgggttgaaattcttttctttaagaacattgcatattggcccccaatgtcttctggcttgcagagtttctgctgagaggttcactgttagtctgttgggcttctcgttgtaggtaacctggcttttctctctggctgtccccagcatytttttccttcatttcgatcttagagaatctgatgattatgtgtcttgtggttgacttcttgtggagtatcttagtggtgttctctgtatttcctgaatttgcatgttggcctgtcttgctaggtgagggaacttctcctggataatatcctgaagtgtgtttttcagcttgtttccattctccccatctccttcaggtacttgaatcaatcatcggtttggtatttttactaagtcctatatttcttggaggctttgttcattccttttcattcttttttctctaatcttgtctgcatgtcttatttcagcaaggtgctc

SEQ ID NO: 869265 - DNA, 597 bp, Homo sapiens
actgataaacgaattcagtaaatttgaagataacaaactcaacatacaaaaatcagtagcatttctatatgccaacagtgaacaaaatgaaaaagaaataaaaattaattgcatttacaatgccacaaataaaattaaatacctaggaattaaccaaagaagtgacagatgtttacaattaaaactataaaacactaatgaaagagattgaagagaacaccacaaaatggaaagatattctatgttcatggattggaaggatattgttaaaatgttcatactacccaaagcggtctacagattcaatgcaatccctatcaaaataccgatagcattctttgcataaatagaaaaaaaatcctaaaacttatatagaaccacaaaagacccagaatagccaaagctatcayaagcaaaaagaacaaaactggaggaattacgttacctgacttcaaattatactacagagctatagtaatcaaaacagcatggtactggaataaaaacagacacatagatcagtggaacagaatagagaccccagaggtaaatccacacacctacagtgaactcatttttgacaaagttgtcaaaaac

SEQ ID NO: 869266 - DNA, 635 bp, Homo sapiens
aaagtattaatcaataagcatcgtatttaagctgaaaagtctctatgtatcagtgactaaaacattttgtccttgctgacaaaaacttcctttatggtagactgtattaaggtcactttgatcctcaccgaaactgttaatatacaagaaaaatcacagatacgtgtattcttttgagcaacaacaaaaaacattaaatggagaaatgattaaagttagacagcatcccctttaaaatatgtaggttttaaaaataacattataaagaagttctcagtattgtacactggtacttgcaaatagttttgaaattaaaattatgctgtaatttacagtttcaaaatagctgtattcaaawgtctttctatggttacacccagaaaggaaatcatttaaaaaatcactataaatgggaatatgatgacaatggagtgaatttggctatactttactaatttgtcagaatgttggtagcccaaagagatactaagttgaatattttgtaaagattttgaagcactaacagaagtttcatgatttaaggggaaaaaaaagccatagacagttccttcagattatcaaatagtgcatttctcagtcttctacttggacttacatctggatgattctatatg

SEQ ID NO: 869267 - DNA, 608 bp, Homo sapiens
catcacctggaccaagcagggggatggccttcctgctcggtctgcagttgcctcttctgagctcagtgagtactttgttctgcttctcctgtgtggttttaaaatgttagccaagagattagaggaactagaattattactcttggagtaaagagctggtgggggcggggcggggtggggtggggcggagttctcacacagaaaagagtgaccagttaatctccaccttggctgagaagaggagacacgtaataaaaaaagttaatkttactgtgacaacaaaacgtcacaagtgaaagggcatttcggtgatagcaaagggcctgagggcagttcgatctcaaaggggaaggggtacgttcccaggggacatgtgtgggcttttcctctctcctccatcactgccacaggaatccagctgttgtcttctcagctgtatcctacagaatctctctctggactgctcttgaaaatagcatagaccttcatttcaacaaatgagtgatgtgaggcctagactctaagcagaggcttttccaggtgacctcctgggacacctggcaatgccgcaggtttaggaaaaacatgatctatattgcagtgtctaa

SEQ ID NO: 869268 - DNA, 608 bp, Homo sapiens
catcacctggaccaagcagggggatggccttcctgctcggtctgcagttgcctcttctgagctcagtgagtactttgttctgcttctcctgtgtggttttaaaatgttagccaagagattagaggaactagaattattactcttggagtaaagagctggtgggggcggggcggggtggggtggggcggagttctcacacagaaaagagtgaccagttaatctccaccttggctgagaagaggagacacgtaataaaaaaagttaattttactgtgacaacaaaacgtcacaagtgaaagggcatttcggtgatagcaaagggcctgagggcagttcgatctcaaakgggaaggggtacgttcccaggggacatgtgtgggcttttcctctctcctccatcactgccacaggaatccagctgttgtcttctcagctgtatcctacagaatctctctctggactgctcttgaaaatagcatagaccttcatttcaacaaatgagtgatgtgaggcctagactctaagcagaggcttttccaggtgacctcctgggacacctggcaatgccgcaggtttaggaaaaacatgatctatattgcagtgtctaa

SEQ ID NO: 869269 - DNA, 686 bp, Homo sapiens
acaaacatgaaaaaaagcttaacatcactgatcattagagaaatgcaaatcaaaaccacaatgagataccatctcatgtcactcagaatggcaattattaaaaagtcaagaaacaacagatgctagtgaggctgcactgttgggaatgtaaattagttcaaccattgtggaagacagggtggagattccttaaagacctagaaacagaaattccatttgacccagcaatcccattactggatacatacccaaacgaatataaatcattctattataatgacacatgcacgtatatattcatttcagcactagtcacaatagcaaagacatggaatcaacacaaatgtccatcaaagatagattggataaagaaaatatgacatatatacaccatggaatactatgcaggaatgagataatgtctttttcagggacatggatggagctggaggtcattatcctcagcaaactaatgcaggaacagaaaaccaaacactgcatattccatgttctcatttataagtgggagytgaacaatgagactatatggacacagggaggagaacaacacacactggggcctgctggcaggatgtaaggggaaggagagaatcaggaaaaatagttaatgcatgctgggctcaatacctaggtgatgggtttacaggtgcaacaaaccaccatgg

SEQ ID NO: 869270 - DNA, 653 bp, Homo sapiens
aaaacattatataaatacaaggttttatttttgcagtttggtaagtaattttcattattcaaatacttaaatttttttccttaaaatttttgtttgtttgtttgtttgttttgagacagagtctcgctctgtcgcccaggctggagtgcagtggcatgatctcagctcactgcaagctccgccttctgggttcacgccattctcctgcctcagcctcccgagtagctgggactacargcgcccgccaccaaacccagctaattttagtgtatttttagtgagacggggtttcaccgtgttagccaggatggtctcgatctcctgacctcgtcatctgcccgcctcagcctcccaaagtgctgggattacaggcgtgagccactgcaaattgttttctataaatgcaaaacacagggtattgttgaggttggtacgtagggaagtgcttgcagattctgagtttgtgcagttcttgcaagttttcacagggcaatgtctctttatcacaaaacacttctcaaataacttcagttaaaaaaaagtctcctctgctgctgactttatgtctaaaggtccttcattgccctcaagtagcacaggcagcaagttgtaaagaacacagaccacgtggagcaaaactaaactgactgctc

SEQ ID NO: 869271 - DNA, 648 bp, Homo sapiens
aatggtagagaccatcaatgctatgaagaaactgtatcaattaacaggcaaaataaccagtgaccatcataatgacacaatcaaattcatacatagcaatattaaccttaaatgtaaatgggctaaatgccccaattaaaagacacagactggaaaactggataaggagtcaagacccatcagtgtgctgtattcaggagacccatctcatatgcaaagatgcacataggctcaaaataaagggatggagaaagatctaccaagaaaatggaaagcaaaaaaaaaaaaaaaaaaaaaaaaaggcagcggttgcaatcctagtctctgataaaacagactttaaaccaacaaagatcaaaagagacaaagaaggccattacataatggtaaatggatcaattcaacaataagagctaactatcctaaatatacatgcccccaatacaggagcacccagattcataaagcaagtccttagaaacctacaaagagacatagatycccacacaataataaagggagactttaacaccccactgtcaatattagatcaatgagacagaaggttaacaaggatttgaactcagctccacaacaagtagacctaatagacatctacagaactctccaccccaaagcaacagaata

SEQ ID NO: 869272 - DNA, 643 bp, Homo sapiens
ggtctcataagacttattcactatcatgagaatatcactggaaagaccagcccccatgattcaattacctacccctggggcccttccacaacatgcaggaattctgggagataaaattcaagttgagatttgggtggggacacagccaaaccatatcattccatccctggcccctccaaatctcatgtcctcacatttcaaaaccactcatgctttcccaacactcccccgaatcgtaactcatttcagcattaacccaaaatcttcagtccaaagttttatctgagagaaggcaagtcctttctgcctatgagcctgtaaaatcaaagcaagctagttactccctagatacaatgggggtacaggtattgggtaaatacagccattccaaatgggakaaattggccaaaagaaaagggggttacagggcccatgcaagtctgaaatccagtgaggcagtcaaattttaaagctccaaaatgatctccttcaggccatgctgatgcaagaggtggattcccatggtcttggggagctctatccctgtgcttttgcagggtacagcctccctcctggctgctttcatgggctgctattgaatgactgcagcttttccaggcacacagtgcaagctgtcagtgga

SEQ ID NO: 869273 - DNA, 665 bp, Homo sapiens
tttaaatattatttatttggggagttttttttagagccttgactctagtgcctcacttgcctcaccctattctggccctgtatcacttgtgtaattaaaaaataggtggggaacaggcatatctctatgattacataattcactaatcaaattgagagaaacaggtgtggtcccaccctctgaatgaatgggagacattaatatcctgacggtgaggatactttttcactattcaagtcattcattttttttttttttttttttttttgaggkggagtctcactctgtcacccaggttggagtgcagtggcatgatctcggctcactgcaagctctgcctcccaggttcacaccattctcctacctcagcctcccgagtaactgggactacaggcgcccaccaccacgcctggctaatttttttgtattttttttagtagagacgaggtttcaccatgttagccaggatggtctggatctcctgacctcatgatccgcccacctcggcctcccaaagtgctgggattacaggcatgagccaccgtgcctggcctattcaagtcatttcttatgccttctttcaaatacttagctttcctaagagcatttctagaaatagtttactaagaaattatttgcacaactgtttaaaaacatctcaccta

SEQ ID NO: 869274 - DNA, 662 bp, Homo sapiens
tgaccatgtcctcaagcttaaagtcccaaatgaaatgtggcctctcgagatctcagccacgatctctgtttctagtaagatgctgtggacagtctcttcaacccattttctgaattttctgccagtggggaaggcctacaaatagcttctgggcaattgtgggacactgccagagcttcctaaagccaccagctaaacttgcaaatctttggcaattcctttctcatgatagactttacttaaaaatgaaattaagcttaacagtcaatgaaagaaaaggcagcaattattgagcacagtaagcaacatgaggaatataagatcttcctttcagtttttgttctatacccaggcttgtgcacctgtgtayccgtaggtctattcagtgctgttaaacacctattgtcctcaggaattttactcacatacatttttatacctgtgcatgaactggtttatagtgctcccaaatttggttcattgctattggattgattatttctagatgttaagattcagcagcaatatctattatccattttctgaccctgtacaatagcaagagtcagtaactcctatctaaccgaaattataaaaaacagttgcaatcttacactgtattgcctccaaataaaatgttagttctgtcctggaatagacag

SEQ ID NO: 869275 - DNA, 662 bp, Homo sapiens
tgaccatgtcctcaagcttaaagtcccaaatgaaatgtggcctctcgagatctcagccacgatctctgtttctagtaagatgctgtggacagtctcttcaacccattttctgaattttctgccagtggggaaggcctacaaatagcttctgggcaattgtgggacactgccagagcttcctaaagccaccagctaaacttgcaaatctttggcaattcctttctcatgatagactttacttaaaaatgaaattaagcttaacagtcaatgaaagaaaaggcagcaattattgagcacagtaagcaacatgaggaatataagatcttcctttcagtttttgttctatacccaggcttgtgcacctgtgtatccgtaggtctattcagtgctgtyaaacacctattgtcctcaggaattttactcacatacatttttatacctgtgcatgaactggtttatagtgctcccaaatttggttcattgctattggattgattatttctagatgttaagattcagcagcaatatctattatccattttctgaccctgtacaatagcaagagtcagtaactcctatctaaccgaaattataaaaaacagttgcaatcttacactgtattgcctccaaataaaatgttagttctgtcctggaatagacag

SEQ ID NO: 869276 - DNA, 614 bp, Homo sapiens
gcagacttttgtatttgtattatttaacatcataccatttaatgagagcccaatatgcaaaagtagaatatatttttatcaaatccaaatgtcataatttctggaatatgttttactgggctacttagcaatcatctattagaactcagatgccacctattcagtatgtcacttttgttggtaataggctacagctttaaaatttgcatcactttgatagactcctacattagttttctagggatgctgtaacaaagtgccacaaactgggcacaaatttattgtcttggttctggagctagaagttcaagatcagggtatcagcaaagttgatttcttctaagcccaatgagaaagaatctgtttcttgcctcttcccagcttctggtaktttgtctgcaatctttggccttccccagcttatagaaacaccacactgattcctgccttcatcttcaaatggagttctccctgtgtgtgtgtctatgtcttcatttcctctttttataaagacaccagtcatgttggattagggttttatcctactctggtatgaccttatcttaactaactacattcgcaacaaccctatttccaaagaaggtcacattctg

SEQ ID NO: 869277 - DNA, 629 bp, Homo sapiens
ttacataggaactcctcaatctgaacagatcaatggtgttcatcaaccaatgtcacgatttgagcagccaataccaggtacgaccctagaagcttcttttgccttcttcacacactggaagggcagagggaacttctttgcaagtaccagtgaggaagaaggggggttttgtgccttctgcagctattggaaatcttcttatactatctaaggcagtgcctgcttcatccacatcatgtccctaactgccacttgggatggcatctgccarcagttctctgaaacaggttcaactagtaaaatcagttaattgccaagcacagattttcatgaccctgatgcttccattagaaaaaggtcaaaaccctgccactgaaaagaggtgtcagaaaacacagggaggtggttctggtgcaatgattccagcagcagacaagtcttttgttcaacaattatagcttacttgtccatgttatggattggattgtgtttgcccaatatttgtatgttgaaatcctaacccccagcacctcagaaagtgacctaatttggatggggttgttgcagatgtaattagttcagatgaggtcataccggagtaggatcagccccaatacaatatgactggc

SEQ ID NO: 869278 - DNA, 679 bp, Homo sapiens
tgttccaggcattttgctagatgctgcccttaagaagttcatagtctataattttacatattttatatctgatacatatttatgtttttaaaagctccatatactctcatgtagcaatttctccattttgtttatgtgtgttagtgtagacatgcccaactaggtctaacacccttgaaactacagatatcttcaagttcaaaagaaagttttatcaattttagacctattagacaaagagattaagagactgtttcatataaaaacaaataaatcaataataaaaaataatttatccaagcacattaagggaatactatagctatttttatcacatttttcaggtaaggtagaaatcagtaatttaagtgcctgattgtgartgaagatgggtggaatgaaatccaaatgagattggagaaacatattttcctgcaaattctttctcactaattcttaaccgtatttgcctggaagtgctatgtcacaaatctttaaccattaccaatcattacttaaatttgtacagaaatctagtataaagttagatcaatcaggcaaataaattcagatttcatttctgattatatttttatcaaattcgaataggcttcaaactccattagctagatttacaatttctaatccaattcctgtaagaccctataaaatgacctat

SEQ ID NO: 869279 - DNA, 623 bp, Homo sapiens
aacacatcagagcattagacaaacaactctagacatttaccacatttccattcttgtatattgacccaagggatagggagggacaaggcttggtgaggcagagagcatcctgttacacataacccacccaaaagtacagaattcatttcttgaattgctatgayaccctgggcccctttgtttctcaataatagatggactcatgtttccttccaccttataaaaattcccttagaaggaatttaaatgcagtctgtgagcattaaaacattctttactgggaccacccattcataatgctaccctagaaaagataaagaaaaatgaaatctagatataagaaccaaagggatcaggtgaacaggatcttaatcacttccacagagaataagctagtgaaatgaactagcatggttttcccttcaaaagcaatcctgaaatgaaagaaaaatgtcttatgttgggtgaaacatacatttttagatggtagacacaaactgaattatttgcacccttagattttttgaaggccagagagatcaaacatttccctgctgtttgtttgatttggtctgaggtgaagccaagagatgtggtgatggaagcttggaaaaacaattaaa

SEQ ID NO: 869280 - DNA, 585 bp, Homo sapiens
agggaaaataggcaacaaaattaaataaaaggcatccacattgaaaaggaaggaggaaagctatctctatttttagatgacgtgatcttgtatatagaaaatcctctaggaatctactaaaaactattaaaactagtcaattagttcagcaagtttccaagataccacgaatattatttgtatttctatatagtagtaatgaataagtcaaaaataaaaycaagaaaataatttgacttaaaattgcatcaaaaagaataaaatacaaataaccttatcaaaggaagtgtaaaactcatgtactgaaaaccccaaaacattattgaaacaagttaaaggcataactcaatagaaaaacatttcatgttcatggctcagaacatttaatagtgttacaatggcaataatcccaaaatcgatctacagattcaatgcaattccaataaaaataccagctgacttctttgcagaaattgaaagctaattctaaaacacatatggaaaggcaagggttgcagaatagtcaaaactctcaaacaaaattggaggattcacacttcccaatttcaaaacttacaaagctac

SEQ ID NO: 869281 - DNA, 661 bp, Homo sapiens
ctgtacaggcccaactgagcagttacaaaagaaatggtaggacccacctagcctaatgtcattactatctaagccctttagagccaaaagtttgctggccttgtagttggggttgtagtgaagaggagagtcgtaataggaggagggctgttctccatcgcctaaggttggcattaaggaagtttccctggtagaacacttatacccacttctacttgtrtgatttattctcatcactattatcctttgttctgcctgctcctcccaccggtgggaggaggtcagtttttcctactgaaagaaaagaggaagggcggcagttctaatgcccataactataggaagattaggcacttattcgaaacagcaggaaacagctcaaccttcacatgagaaattctctgcaggccaatgaatttgagaatttgaatatattctgaacattcaatacaaaacaggaggatgagcatgcgggacattgattggccagttaatttagctctgcctttctccacctctgacctcctcagcaacctcatttccccaaaggtcatcagccctctggattgggcccctgtcacatgtgatttggactgcatcccacaaagacagtcagcccagttctggggaagaggagagatgcactttgattctaactctc

SEQ ID NO: 869282 - DNA, 666 bp, Homo sapiens
agtgttcaacctttgcagaaggtttacaggcaaagcaaggctatcgattgtcccatgatgagaaaatgaagaaggatgtggcgcattttgtgatatcaatctgacctattagcaacagtggcaggtcactccatcctccccaaatcttcttcatgttctaagcaccatgggcaaaaaggaagtagagcttgggtgaaagattccttttttaggaagagcaatgtgtgtgtaacagagagaggagagagagacagacagagcaagaaaaagaaagaacaggagatagaaaaagagctagagagagacacagagagaagcatttctaatggggtagacaacagcattgatcaactttaagctaggaaaacaggcagttcagttatgacctgccaagatgctaaggtcataaattcttgagaactcgaattgaagaataagtagttgtctraacgaatagcatgaagagacagaacaatctttcagaggcacaagatactggtcttcacagctagatttccttggcttttggaagaccctgttctttcctttaccaattgtcatgcatgaaattccactattagagaccgatcctgggaaaagggaaagtctaaattttgcaggaagatcccattttaaaggaaaaatagtacttcttggatggggaac

SEQ ID NO: 869283 - DNA, 634 bp, Homo sapiens
cattagttgatgcagtttcttcatagtgtcaatggtctttacattttgctttgtttttgcagtggctggtaccattttttcctttccatatttagtgcttccttcaggagctcttgtaaggcaggcctggtggtgacaaaatcccttagcatttgcttgtctttgaaggattttatttctccttcccttatgaagcttagtttggctggaaatgaaattctggcttgaaaaktcttttctttaagaatgttgaatattggtccccactttcttctggcttgtaggctttcttcttttatttatttatttttttgaggtggagtcccgctctgtcgtccaggctggagtgcagtggcgtgatctcggctcactgcaaactctgcctcccaggttcacgccattctccttcctcagccttcctagtagctgggactacaggcgcccgccaccacacccagctaattttttacatttttagtagagacaggatttcaccacattagccaggatggtctcgatctcctgacctggtgatctgcctgcctccgcctcccaaagtgctgagattacaggtgtgagccaccacacccagccctggcttgtaggttttctgcagagagatccgctgttagtc

SEQ ID NO: 869284 - DNA, 624 bp, Homo sapiens
tgaattttgagttgagtaaagaagggagatttgcctgtatgatcaagaacttgtacctttgtctttaaaggctgcctgggtggaaggctggtgcatgtgtttggagcgggattttctccagggaatgtctcagctgctgtgtgtggtgctccctgccgagtcctggctaatgctacagtgtctgccttcagctgcttggttctgcccctggatggtgagtaaagatgccacacacatatattttaaagcatatatatggaaatgatattctttggttaattctatttttgtgattaatgctgtactgactactaatttctctatgtgtgcctaggaaaagaatttctctactcctcatctaaaatgatagttagaatctgaggccacctgttamaatgattcatcataacttttgtcatattaatatgtcaatgttagatgaatattgaaacacttatcacctgtgttcttaactgcagtcttaggatgacagaggaagtaattctgaattctgaatattagtttcaatgacagctataggagtcatggaggaaacaagctcttggctttgttctgaggtgaggttgctgaagacatctgcttattggaggtaccagtaaaggg

SEQ ID NO: 869285 - DNA, 614 bp, Homo sapiens
attttcatggaaactttaacttttccataaggcatggaaagctaaagtgattaaggtcacacagctatttagtggcagaactttgagtaaaacccatagattttgatccccagccctgggtgattttcataatcctgcttgtcaatttgcatctacttaatcacctttaatgaattcattattttataggtgtggagcttgtttttatttgccttagggcttactaactggaaagttcttatgttttgtctgttcatacaagagtcctactgtcagtcatttttattgctctaattcattcaaaacacattcacagccaacctcctaggtgccaggtgctttagaatataacagcaacaatagtactatttgggcatgattgyataactacaaaccctcccccacgtacttatctcatgtaacccttgccacagcactgtaatgaggcggggaagcagaggtctaagcctacggcccttgataacctctgttgcattacccacatgggcaggcttgctgcagaggaagcaggctacagagatttttttaaattttccctctttattaaggttttcagacagagctgctcctaaaccatatcatgtggagctttg

SEQ ID NO: 869286 - DNA, 614 bp, Homo sapiens
attttcatggaaactttaacttttccataaggcatggaaagctaaagtgattaaggtcacacagctatttagtggcagaactttgagtaaaacccatagattttgatccccagccctgggtgattttcataatcctgcttgtcaatttgcatctacttaatcacctttaatgaattcattattttataggtgtggagcttgtttttatttgccttagggcttactaactggaaagttcttatgttttgtctgttcatacaagagtcctactgtcagtcatttttattgctctaattcattcaaaacacattcacagccaacctcctaggtgccaggtgctttagaatataacagcaacaatagtactatttgggcatgattgtataactacaaaccctcccccacgtacttatctcatgtaacccttgccacagcactgtaatgaggcggggaagcasaggtctaagcctacggcccttgataacctctgttgcattacccacatgggcaggcttgctgcagaggaagcaggctacagagatttttttaaattttccctctttattaaggttttcagacagagctgctcctaaaccatatcatgtggagctttg

SEQ ID NO: 869287 - DNA, 614 bp, Homo sapiens
attttcatggaaactttaacttttccataaggcatggaaagctaaagtgattaaggtcacacagctatttagtggcagaactttgagtaaaacccatagattttgatccccagccctgggtgattttcataatcctgcttgtcaatttgcatctacttaatcacctttaatgaattcattattttataggtgtggagcttgtttttatttgccttagggcttactaactggaaagttcttatgttttgtctgttcatacaagagtcctactgtcagtcatttttattgctctaattcattcaaaacacattcacagccaacctcctaggtgccaggtgctttagaatataacagcaacaatagtactatttgggcatgattgtataactacaaaccctcccccacgtacttatctcatgtaacccttgccacagcactgtaatgaggcggggaagcagaggtctaagccyacggcccttgataacctctgttgcattacccacatgggcaggcttgctgcagaggaagcaggctacagagatttttttaaattttccctctttattaaggttttcagacagagctgctcctaaaccatatcatgtggagctttg

SEQ ID NO: 869288 - DNA, 633 bp, Homo sapiens
gattttcacaacaacaactagagatgggtgttattttaaaaccaattttacagatgcaaagactgaggcttaaaaaggtaagaaactaacccaaggtcatataatttgtaagtctgtcggctgcattcaaagccaggcactcttactccagaattcacacttaaaatctctayttcctaatgatattttcctagaagtgaaataactgggtcaattttgaaggtcctctgccaacgtgctctttagaagggtaacacctatacatattactaccaagaatgtatgaaaatatccatttcaggactatttaaaaaaataagaaaaaagtcaacagatgaattaagtaaagtaaaagagtagctaacagacattctgtttgaaaaatgaattgtatttctaaggtaataaggtatggattagaacaattatgcagtgtataaatcactactaaaatggagaaaaatccataaatatcatagttagtagtgttaataattaatttctgaactagctatactttcccctgaaattttctttagattacaaattccctctctaatatgacaaaataatttaaattgtagcttgttaaaaataaatataacaaataatttattgctgataatctacata

SEQ ID NO: 869289 - DNA, 628 bp, Homo sapiens
ttttctctatttctttgcttttaacccatcagagtcttaatatttaaagggggccgggcacagtggctcacacctgtaatcctagcactttgggaggctgagggaggcagatcacgaggtcaggagatcgagaccatcctggctaacatggtgaaaccctgtctctactaaaaatacaaaaaattagcgaggcgtggtggcaggtgcctgtagtcccagctactcaggaggctgaggcaggagaatggcatgaacctgggaggaggagtttgcagtgagctgagatcacgccactgcactccagcctccagcytgggcaacagagtgagactctgtctcaaaaaaaaaaaaaaaaaaatatatatatatatatatatatatttaaagggtttcttacagaaaacaaaaagctaggtgttcattctacttctttaatccactctgaaaatttctgtcttttaattgtgtgtttagatcagcagtacccaacctttttggcaccaggaactggttttgtggaagataatttttcaatggaccaagggttgagggagatggtttggggatgaaactgttccaccttagatcaccaggctttagttagattctcataaggagtgcacaacct

SEQ ID NO: 869290 - DNA, 628 bp, Homo sapiens
ttttctctatttctttgcttttaacccatcagagtcttaatatttaaagggggccgggcacagtggctcacacctgtaatcctagcactttgggaggctgagggaggcagatcacgaggtcaggagatcgagaccatcctggctaacatggtgaaaccctgtctctactaaaaatacaaaaaattagcgaggcgtggtggcaggtgcctgtagtcccagctactcaggaggctgaggcaggagaatggcatgaacctgggaggaggagtttgcagtgagctgagatcacgccactgcactccagcctccagcctgggcaacagagtgagactctgtctcaaaaaaaaaaaaaaaaawatatatatatatatatatatatatttaaagggtttcttacagaaaacaaaaagctaggtgttcattctacttctttaatccactctgaaaatttctgtcttttaattgtgtgtttagatcagcagtacccaacctttttggcaccaggaactggttttgtggaagataatttttcaatggaccaagggttgagggagatggtttggggatgaaactgttccaccttagatcaccaggctttagttagattctcataaggagtgcacaacct

SEQ ID NO: 869291 - DNA, 679 bp, Homo sapiens
aactaagggtaaaagaagaaatcacaagggaaatagaaaatatattgaactaaatggaaattaaaaggcagtgtataaaaattcatgcaatatatagaaagtagtgctttgagggaaatttatattattaagtgctctcataataatgttataaacttttacattaaaacactttgagagtaaattaaacattgataagaataaagaaaaataataaaaatcaaagcaaaaaataaataaaatagaaaagaaacaatagtgaaaaataaaagaacccaaaatctggcttattgaaaaaaccctgcaagacaacttaggcaataccattcaggacataggcatgggcaaagatttcatgacaaagatgccaaaagcaattgcaacaaaagcaaaaattgacaaataggatctaattaaactaaagaacttctgcacagccaaagaaaccatcaactgagtaaacagacaaccaacagaatgggagaaaatttttgcaaactatgcatccaacaaaggtctaatatttagcrtctacaagggacttaaacaaatttaaaaaaaaaaagcaaccccattaaaagtaggcaaaggacatgaacagatgcttgtcaaaagaagacatacatgtggcccaccaggcgcggtgactcacgcctgtaatcccagcactttgggaggc

SEQ ID NO: 869292 - DNA, 671 bp, Homo sapiens
aaagcattcctgtttctccacatcctctccagcatctgttgttgcctgactttttaatgatcaccattctaattggtgtgagatggtatctcattgtggttttgatttgcatttctctaatgaccagcgatgatgagctttttttcatgtttattggccacataaatgtctttttttgagaagtgtctgttcatatccttcacccacttgttgatggggttgttttttttttcttgtaaatttgtttaagctctttgtagattctggatattagccctttgtcagatggatagattgcaaaaattttctcccattctgtaggttgcctgttcattctgatgatagtttcttttgctgtcagaagctctttagtttaattagattccatttgtcaattttggcttttgttrccattgcttttggtgttttagtcaagaagtctttgcccatgcctatgtcctgaatggtattgcccaggttttcttgtagaatttttatggctttaggtcttacatttaagtctttaatccatcttgagttaatttttgtctaagatgtaaggaaggggtccagtttcagttttctgcatatggatagccagttttcccaacaccatttattaaatagggaatcctttccccattgcctgtttttgtcaggtttgtcaaaga

SEQ ID NO: 869293 - DNA, 675 bp, Homo sapiens
gtaatataattagacagatgggaatctttccaattgagggaagcttccaatatgaaagtcataaactagcaaaaacataaacaaacccaaccacatgcctacaaaaggaatctgaaggaagcgcaggcaatgtggttaaaaaagaaaatattttttaaaacttgtgagagaaataggagaaaatattttatccagaaagtaatatcaggatgctttaaaaatataaacactcagaggatattaatgtgttctagaaaattaaaaataacatagaagaaataaaaaatattgaatacaattttggaaggtaaagtagaggaatggccaggcatggtggctcatacctgtaatcacagcactttgagaggctgaggcaggtggatcgcttaatctcagaagttcaagaccagcctgggcaacatggagaaaccccrtctctactaaaaatacaaaaattagccaggcctggtggcacgagcctgtggtcctcctgctccttgggaggttgaggcacaagaatcacttgaacctggaaggcagaggttgtagtgagctgagattgcaccactgtactcagccagggagacagagtgagtctgtctcaaaaaaacaaacaaacaaataaataaataaatgaaaaagaaaaagaagagtataagaaagtatacaaataaa

SEQ ID NO: 869294 - DNA, 677 bp, Homo sapiens
atttgtttttttcatgaattcattttgtgtgtaagattgatgtcctacaaaattagccccaatttactcaaaatttccgtgtgcttatcattttgacccattaactttattatttctcatggtccttcttgcctttttgcccctctttgtgcatagtttcagtcttacttccccatattaactatcccattctctttggactcctagtttaagttccttaaaacataatctgattggaccagtttatctatatttagccagaattatttgttttgtcrtctcatgggctactgattagtataggaaatggcttttcttggtcaagtgaccatttgtagtctaatctcctgttttggcgtactggttgtagagaagcataaaatgaaacatcatgtgggaagaacataatcaagaaaataccaggggtcacttcctccagcaggagtcttgctcgcaatcgtgcgtagaatgagctttgacctagtaggcattatgcttggctgattgaaaacatctgtgaattaaataaattaacacagaaaacctaaatctacttctgaagtgattttgtcttttcctctttattttcatcaatagtgtcttagcttacatattattttcatctcttattaggacctttgctaacttgcctaactgtttctgatcttttcttcatg

SEQ ID NO: 869295 - DNA, 596 bp, Homo sapiens
  misc_feature 292, 296: n = A,T,C or G
ttaacagaatgaaaataaagcattatatgattatatctaaatatgtggaaaaatcatctatcaaatttcaacatccttttacagtaactctcaacaaattaggtatagaaggaacatacctcaatataataagggccrtatatgataaacctacagcaaacatcacactcaattgtgggaagttcaaggcatttcctctaacatcaaaaaaaaaaaaaaaaggacaaataacgcccactctaaccacttctattcaaatggtactggaattcctagccaaaaaaaaaggaanatanaaaaagaggacagacacatgaatggaaaagaaataaaactgtctctgtttacagatgacatgatgttgtatgttgaaaaccttaaagattccacaaaaacaccgttaaaactaataaaatcagcactttcaagacaaaaaatctacataatcagttgtgtttctgtacagtaacaacaaactatacaaaatataagagaacactcctgtttacaatagaatcaaaaagaataaaatgcttaggcatcaatttaaccaaggaggtgaaatatatctacaccggaaattataaaacattgat

SEQ ID NO: 869296 - DNA, 596 bp, Homo sapiens
tttcaaagggaatgcttccagcttttgcccattcgatatgatattggctatgggtttatcataaatagctcttattgagatatgtccatcaatacctagtttattgagagtttttaacatgaagggagttgaatattatcaaaggmcttttctgcatctattgagataatcatgtggtttttgtctttgattgtgtttatgtgatgaattatgtttattaatttgcatatgttgaaccagccttgcatcccagggataaggccaacttgatcgtggtggataagttttttgatgtgctgctggattcagtttgccagtattttattgaggattcttgcatcactgttcatcagagatattggcctgaagttttctttttttgttgtgtctctgccaggttttggtatcaggatgatgctggcctcatgaaatgagttaggaaggagtccttcctttttaatatttggaatagtttcagaagggacagtaccagctcctctttgtacctctggtagaattcagctgtgaatctgtctggtattgggctgtttttggttagtaggctattaattaccacctcaatttcagaacttgtc

SEQ ID NO: 869297 - DNA, 651 bp, Homo sapiens
tgtgtattgtattctctgatggtagtttgtatttctgtggggcaaattctttaagaatgttgaatattggtccccactctcttctggctggtagggtttgtcctgaggtgtccacttttagtctgatgggcttacctttgtaggtgaccaggcctttctctctgtctgtccttaacagcttttccttcatttctaccttggagaatctgatgattatgtgtcttgtgattgatctcatggagtatcttagtggtgttctctgtatttcctgaatttgaatgttggcctgtcttgctagatttgtaaagtgctcctggataatatcctgaagtatgtttgccagcttgtttccattctccctgtctccttcaggtattccaatcaatcataggttctgtctgtttacatagtcccatatttctcagaggctttatttgttcmtttttttctctaattttgtctgcatgtcttatttcagcaaggtggtcttcaaaaactgatattttttcttccacttggtcaactggtctattgatagttgtgcatgcttcacgaagttctcgttctatgtttttcagctccatcaggtcatttatgatcctctgaaaactgattattctagttagcggctctctaaccttttatgaaggt

SEQ ID NO: 869298 - DNA, 609 bp, Homo sapiens
tggcctcccaaagtgctgggattacaggcatgggccactacacacagccaaccaagcagatttaaccccaataagatgatcttaggcctttaagaataaaattaccaaagatcaaagacaaaggaaagacctaaaagcagtgacaggggaaacaagtaacatacttaaaaaaaaaaaaagctccaaaacgtttgtcagcagacttcctggtgaaatccctaaaagccaggagagagcagcatgacatacttaaagtgcttaaggagaaaaatttccagaatagtatatccagcaaaaatatcaaacacaaaggagaaatacttctgacaaacaaaagatgaaggatatcaccaataccagactcgctctacaagaaatgctaacaggagttcttcaagtrccaaatttaactacaaaaagttttcaagatacagacaatatagtaagatataaatagaaacaacagaaagtttaaaagggggatgaaattaaagtgtgaattcctttagttttctctttgcttgtttttgcaatcagtgttaagttgtcatcagtatcaccagagaaaatcaccttcataaaaagggagacagcaaggaaagaaaaaac

SEQ ID NO: 869299 - DNA, 593 bp, Homo sapiens
tgggctgcaactacttaccctctcaaggatgcaaatgaggttactcccttgtgtaatcatgttttcactccaacccattgcctccttggtgggcttagaggaattccttcactgatacagacaacctcaaagctgaccaggattgttttcarggattttacaagtaggggagaagagctcagaggtagggatttcagtttccattgttaattcaacatcctttcttcctggaagtggaatcaattacatattctctagcagaatcaactctttttttaaatagcaggtgataaggatctagggaccattctaagggatttctcttttccatgatcaaattctttagaaaccatgaattcttctgacagtctgttatttcacaaagggactttctaaaaattggcctacgttggtagcagatttgcactattgtcaaaaactacccccatgtgctgtgcttaactgtttgggtcctaatccaagctctaccactcctatctgtgacttcgggtaaattacttaacctccctaggcctcagaataacaatatctacctacatgcacctgaatctcttagaacaatgcagcagaca

SEQ ID NO: 869300 - DNA, 599 bp, Homo sapiens
gatactatgaatagtcctccctagggaaagaagtaatatacaggctatattatggaaaaaaaaaaaaccaaaatacaaaaaaaaaaaaaaagaaaacaaaaatccctaactctttaaatatattgctgagcagacctggtattaaatacacacacacacacatgcacacacatatgcaaaatgaagtgacaccaggcaccctaggagataggaagtccagcctccatcctgagggctcccatcaratcctgaaatattgagcttccacactgagagttacataggtcatgcaggcagacagtaagcctaggaccaggccatgtaggaagaaatctaacaggagatttcccacacaaacctggaaactcaaagattttactgtcatgaaaggacaaaggtagaagagcaaggtgagggaaggtaaagaacaaggcagcatgctatttcaaagttcatgccaatcggaaggggataaatctttctcctgggaatttggaactacaaatgagccctgacatgggttttcattctgaattcccaatatgtatgaagtctaaaattaaaggaaaacagatttgtaatgcatataggcaaatagc

SEQ ID NO: 869301 - DNA, 647 bp, Homo sapiens
ctcgtctgaattcgtctctttgtatgttgagtccagccctgtccctgtccttagccctaggtctttgtcaagttctgctcctggaacattattgactcagtgacaccccacatttttgctcatcttcaagctgagaaacctttaaccttacttcatcagaaggctatagctcacaaagtaaatttaaaattttgagcaatcttcaaattataaaaattatagatactrtagtataagtattcaaatttaataaataacatgtattttgtacatttttcagaatagaaacagaaaactggatcccttagattaaaacaataagaatcacaaatcctgacttgggggcagaaaggaatctaggaagttgggtggcacatctgccctgtgtggccttcttacctcaagaaacagaaggcagtcaggcacggtagctcacgcctgtaatcccagcactttgggagaccgaggcaggaggatcatctgaggtcaggagtttgagaccagcctgtccaacatgtgagacccctgtctctactgaaaatacaaaagttagctgggcgtggtggcacacacctgtagtcccagctactctggaggctgagacaggagaatcacttgaagcccagaggcggaggttgcagtaaaca

SEQ ID NO: 869302 - DNA, 493 bp, Homo sapiens
atagtctaatataagaaacaggtccaaaataggcaatttcagtagactgtgattgataaaacacttggctaaggatgctttaggggcataaaatggtctgaagaaggtgatattgttaatggcttctctttgtcagcatttgttaaatggccttttgtagagtatagaccactaattacagaaaataagagtcattggggggactcaaatttgtttagcaaggtctatataagttaaatgatataataatatattaaaattwatacattaagcgtaataattaagtgctcaatttattgattatatttatataagctactacatagcaatatattattaatttatatttagattgtctcaataggattaattcatagattgattattttaatgtatggattatgtaaatgtagttcattatgtttatgtcaatatattaaatttttttttttgaggcagagtcttgctctgtcaccacactgcagtgcagtgg

SEQ ID NO: 869303 - DNA, 660 bp, Homo sapiens
aaaatgactaatgattttctttatccagtaaaggatgtggaggatggggcggtaaacttgggtacttttctacatcctcctcttttcctggcaaagtcccagtaaatacttatgatagctttgtgtaaaaacagcacctgtagccagacatggcaccatggaaggcaggttggtgggcaaatgccctctaagtgtaaaaaagaaggagtgttgtgggtccccagatcacccaccagatttgatgatttgctagaaaggctcacaggactcatcttgtagtcatatatrtagctacaatttgttacagcaaaaatatagaaagcagaattaacaaagggaaaggtacatggggcaaagtttggaggaaactgggtgtaagcttcctagagtcatcctccggtggggtcacacaggattgcttaatttcttcagcaaggagttgtgacaacacataaatgccttccaaggagtctaattggagtctcagtgcctagagtttctataaggggctgctcacctaggcaacttctccatgtaccaaattccagacatcctgaagtgttcagcatagaccatatggtttgcataaacaggcaaggcacgaggagccattcttatcagggaatggtgggaactctcttcaaatcccactttccagac

SEQ ID NO: 869304 - DNA, 660 bp, Homo sapiens
tcttgtccatccagtgcaggggttggaggattacagaagttcttattcctttatgtattatgacccccaagcttgtgagctggtcatgagcctcaaggttttcatccactttccatctcattaggctttcagccatccctgcaaatagcaccatcttcctaaagccctggtcattactccgtaactctccaaacacaagtatttactggtcctgactaagagacttggcttataggggatctgagtgagatgttggcccttattcttagtgagttacaatcttctgagcagacaaatacgcaggaaataataagagactaacagaagataaccaggtggtttggatgatcagtgccatttcaatctctgctcaaagctgacatacttaccactaacccrccaagtacagatttgttctccaaattcagaaatgaacaaataattaaaaataatggtaagatgatcccagaaaagattagtgtagaaggagaggggtttgaggagacggtggtaacagcaaataatttgcagctcgagaaagatgatcatgatgatttcacattgatcaaattctatttctatcatatttatatgaattatctcatttgatcttcacaaccctaagatataaataattatcttaacacacgaatgtacagt

SEQ ID NO: 869305 - DNA, 665 bp, Homo sapiens
tacacaatggaatactattcagtcattaaaaatgatgaaatagtgtcattttcagcaacgtggatagaatggaggtcattatgttaagtgaaaaaagccagacacagaaagacaaatattgcatgttcttactgatatgtggaagctaaaacattgatctcatggaagtaggaagtagaatgatagttaccagaggctgggaaaggtgggagtagaagaagaaaagatgttatttaatgggtacaaacatatcattacatggaagaaataggttataatttgatggcacagacagctaactatagttaataataatttattgcatatttcaaaacagctagaagagaagatttgaaatgttcccaacaaaagaaataaatgtttggggtgttggatatcctaaataccccracttaatcattacacactgtatgcaggtatcaaaatatcacatgtaccccataaatacaatgggactccaaaaagcttatgagaaaacatggaatcaaaatatacactttatttctccacataaactttaccaaagtcaagacacttttgtaagctatgacaccagccatttaatacatttctaaagaactgagggtcctggaaatttaaccatgtcaatgcagtctttttacattattaaacagagaaaaatg

SEQ ID NO: 869306 - DNA, 671 bp, Homo sapiens
atgtttccactttcctaattttctctttggcctgtgctgtggttcatacctattacagttgtcttaagagggaaataggagcttttatgttcactcattcattataaaaacaaaacaaaacatatattgagcacttgcctgtgccagatatgtgcctagtagctgaagatacatcagtgcaggagatgaatatggctcctgcctacatggagtcttccttctagtacaaatgtggagtccatctcgttgcttaatttttctttgmattgtggctttaaaaaactaatcagtatagagattttaatgtatctttggccaaaaaaaatacagtgcaggaaaaaattgaaaagaagtaattttttgattccttcttttgttcagcacatattcttgaacacacattggacctagagattaaactttccccctggagctgtctgaacgtgtggaataatgtagaggaaagtcttccattatggagtgtggcagactctattgtttatcttgataatatgcattatttcctttctaacccccaaatgcctagataaatgagtgattttgggtatccagccccactgcaagatcgtgtgctttaagaggaggctcttaattggtctaagttggtcatgatggtttcatgtaatagaaatgtgatcaaactctggtct

SEQ ID NO: 869307 - DNA, 671 bp, Homo sapiens
atgtttccactttcctaattttctctttggcctgtgctgtggttcatacctattacagttgtcttaagagggaaataggagcttttatgttcactcattcattataaaaacaaaacaaaacatatattgagcacttgcctgtgccagatatgtgcctagtagctgaagatacatcagtgcaggagatgaatatggctcctgcctacatggagtcttccttctagtacaaatgtggagtccatctcgttgcttaatttttctttgaattgtggctttaaaaaactaatcagtatagagattttaatgtatctttggccaaaaaaaatacagtgcaggaaaaaattgaaaagaagtaattttttgattccttcttttgttcagcacatattcttgaacacacattggacctagagattaaactttccccctggagctgtctgaaygtgtggaataatgtagaggaaagtcttccattatggagtgtggcagactctattgtttatcttgataatatgcattatttcctttctaacccccaaatgcctagataaatgagtgattttgggtatccagccccactgcaagatcgtgtgctttaagaggaggctcttaattggtctaagttggtcatgatggtttcatgtaatagaaatgtgatcaaactctggtct

SEQ ID NO: 869308 - DNA, 572 bp, Homo sapiens
ttctctatatgccacatcttacagtgggaaccacaatcactcaactggaaaacttaaacacaatgggaataattggatcctgaggtggcaggggccaactggaggcacgcaacagtcaaaggcaaggtgggtgtagttaccataatgaacagcagaggcaaagaagcaatcagaatagtctgattcatgtagagctctggcattggctaattaatcacagtattcctggaagtgaaattgatmggaggcctgctgtattcttacataatttgtacatgcagaaaacttccaggctgaatggacaaaaaactaattttaattataaaaatagggaatcatgacccctcaatcagttttcagacttgaaccagttaacagagccagaacccctttaatgaaggagaggtcaggtcccgttgaggaagaaccccacaacactactgacaatttatactgttaatctctctcccatccttccccagggagacatccagccttttactagggtgtatcagtccattcttatgctgctaataaagccatgcccaagactgggcaatttataaagaaaa

SEQ ID NO: 869309 - DNA, 614 bp, Homo sapiens
cagagtacctcatttcaactctttttccacatgagaaaacggagtcctgctgcctttctcaagagcacagctagcatgtggcagggctagggttgaagattgatgctgtccccaaagcccttgagcctttcatgtgatagacagttcctccccactgccatgcagtggccatggcccataaaacccagacataaagcaaatatcttcaccagcgtggggtgaagaccacaggtgaacgagtacctgcttagctttagcaaggcaatatcttttcgtgtgggctccaagaacagcctagacacttctatttcctgaacatgcggttcgagattcacttcttggtgtgcacccaggatgaccttgtaggatgaaggccttggggacctagaaaagatgaggaygtcaagaggaaaatatggtccagccccttcaggtaacctctgtgccatgaaattggtgctgtctccctgacacccttggccactcagaattagtgacttctgagtggcaagaagcaaaattcatgatttgcttgaaacaggcagttaaggaatgttcttgggctgtttgggcagagactgatacagcctatggtagtgaacagctctgttctg

SEQ ID NO: 869310 - DNA, 611 bp, Homo sapiens
gtagttttgacatggttcattataggatgtggagatgttaacactaccacctagcttaattttgtcatctaagacctgaaagggttgtgtctattagctgcacccccggtcagccacgtaacctcgggaaggcctcagccccactcctcgtatggcaggaatgataacagcaatgcctgttgggaagcttgagggaggctatggatgtgcagcgcttggcagaaagtctcgtcatggaaggtaccagcaaatgtgagatacttttatgattttattttgtccaaaagaaagggaatgaaaggagagaggaggaaacaagactaatcaggagatgtgaaggtgtagtggtgaggggaggagtcagcaggaataaagtcagcgtggagcagccgaggtgggagattgctttcaccacttcccagcayctattgcagattccaccctcaaacattttgtaaggaccctttattcaaggtaatgtttgaaccctgctgagccagtggcatgggtctctgagagaatcattaacttaatttgactatctggtttgtgggtgcgtttactctcatgtaagtcaacaacgtcctgggattgggacccactttctgggc

SEQ ID NO: 869311 - DNA, 630 bp, Homo sapiens
ttacataggtatacatgtgccatattggtttcctgcacccatcaactcgtcatttacattaggtatttctccaaatgctatccttctcccaacccccatcctctgacaggccctggtgtgatgttccccaccctgtgtccaagtgttctcattgtttaattcccacctatgagtgagaacatgcagtgtttggttttctgtccttgtgatagtttgctgaaaatgatggtttccagcttcatctgtgtccctgcaaaggacatgaactcatccttttttatggctgcatagtattccatggtgtatatgtgccacatgttcttaatccagtccatcattgatggacatttgggttggttccaagtctttgctattgygaatagtgctgcaataaacatacatgtgcatgtgtctttagagtagcatgatttataatcctttggttatataccaagtaatgggatggctgggtcaaatggtatttctagttctagatccttgaggaattgccacactgtcttccacaatagctgaactaatttatactcccctcaacagtgtaaaagtgttcctatttctccacatcctctccagcacctgttgtttcctgactttttgatgattgccatt

SEQ ID NO: 869312 - DNA, 747 bp, Homo sapiens
atgtgcacaatgtacaggtttgttacatatgtatacatgtgccatgttggtgtgctgcacccattaactcgtcatttacattaggtatatctcctaatgctatccctctcccctccccctaccccatgacaggccccagtgtgtgatgttccccttcctgtgtccaagtgttctcattggaacaaaaattttttatcctaataattaaaataacttgggaatagaatagttaagtattggtgtgtctactaarttcatctcccaagatgagataagaaagaaagaataaaagttctttgttaaattccctttgtcagtcttcacagattggaaaaaaagaaaagtgtacgttggaaaagctgatattacatattgtacagaccacatataatttatttatctttatgtcacaggatttaaatagagataagatactgcaaataaaataatatccaatcaaaatatttgccacattttctagttaaccctatcccttcccatcctttctaaactccttttctgctttaacagtatatcatctaaaaaatactgttttatgtactcatggtagtataccttaagttaaatgttttgatttcagcttcaaaggaaaaaaagaaaagaaaagaattgagcactagaattttgatagtagaacatattttcttaaatttcattccaatcctatttagaattaacaacattttatacaagacttacacttcaaaaaatatatgtttcaggcaa

SEQ ID NO: 869313 - DNA, 614 bp, Homo sapiens
tccatattccacatcttaaccaccatctggtattggcagtattttttttaagtcatcctaataagtgcagtaggagctcatcatcatttttaaaaaaacaaatatttattttttattttcttcctctgagaatctactttatacctttactaaaaatttcttctgactccccactctgttctaagtgctagagaatctatgctctaaggaagattaaactcactccttcgacatgtttcttttcccctcatttttggtcatcccaacmtaattgtagacatgatttctctctcagaaggagcaaactcatttgggtgggtagtgctggagaggaagctgttaatggagagtgaatcacctacttggaagcaacacccctatttgccaggaatcagtcatgttgatgcaggtgtgtgtgtggtgtttttgaagtagaactggattatcccagcaaggtagtgtacctacaaattatagtacaaacccaggcttgctgtctaaaggacatttgtaagaaataacaatgtatctcaatatatgttgacaatctataccataatgggattacacaagtagctaaacttgaaagtcaaattggcatttgcatatctaat

SEQ ID NO: 869314 - DNA, 683 bp, Homo sapiens
tgtcatgcctcaggacttgctagaattgctttattcataaaatgtttaagagggatttctttttttttttttttttttttgacagagtctccctctgtcgcccaggctggagtgcagtggtatgatcttggctcactgcaacctccgcctcctgggttcaagtgattatcctgcctcagtctctcgggtagctgggattacaggcacacaccaccatgcccagctaatttttttgtatttttagtagagacagtgtttcaccatgctagccagtctggtctcaractcctgacctcatgacccgcttgcctcagcctcccaaagtgctgggattacaggagtgagccacttcacacagcctaaaagggatttcttaaagaataatgtgaagtatttctgaaaacaaacaaacatgatgcaggattttcacccaagtcatatttcaattgaaatacgtgagaaattaggtatgttctcagtacgagttcgtggagtaacaaatatggttttccactgaaattccatgatagcacagacctcactgcctctcctttcttctctgcagacctttgcaggaaacatgaatgctgacagcgtggtgcaccacaagctattgcactcagtgagagcccgatttgttcgctttgtgcccctggaatggaatcccagtgggaagattggca

SEQ ID NO: 869315 - DNA, 669 bp, Homo sapiens
cacaattagcatttcagctgtctagggactttttccagattacaagggaaaatcctgggaacccaatttcataaacaacactacaacgtctgctctctggaggcaacatgagtcttctctctggatttataagccccacagaatatatatctaatctactctgttttattttttatttatttcttttgtgtgygtgtgtgtgtgtatatatatatatataaattattattttttttttcttgagacagagtctcactctgtcacccaggctggggtgctgtggcatgatctcggctcactgcaacctctgcctcccaggttcaagcaattctcctgtctcagcctcctgagtagctgggactacaggtgcatgccactgtgcccagctaattttcatatttttagtagagacagggtttcaccatattggtcaggctggtgttgaactcctgaccttaggtgatccacctgccctggcctcccaaagtgctgatattacaggcgtgagccactgcgcccagcctctaatgtgttttaaaagacagtaagctatacagaaatgggtcagtggattaccccctctccctgtgaaccacccttctctcttttcagcacctttcctttcttgtgtcctgtcctagctgtcccaggcatggtaagcatccaaat

SEQ ID NO: 869316 - DNA, 574 bp, Homo sapiens
gtcccaatctgaactttttgctgggccctgttataaaacgctctaccaccagagtttatacaatgtaagttagtgttataaacttctgtgagcttggtaaaaatatgcaacccaggactttacctattgccctaagcctaacactgagaggaaaaatattttttattgtctgaatcccaatgtaagtttcattatcatggctgtgaactgaagaaaggtatatgtcatcatcccatatatgagcaaaaaattagtcagaagggtaatatcacttagatgctatgtcagggaatatgtaacaatgccttttctaggcatggtacaagaaattgggtcaaattaactgagtcctagacctgtcaatatgacaccaccccacatgtggaaaaaaaacagccaagttatgagagccaaaacacytacataatgggcttaagatatgtcaaaatactttcattcgcttgagctcaggaagaagagtcacatcatagaagtgctaggcccagcaatacacggtatgtcataattttctctttatgcagaagcaaggttgtagagtgacatcatctgtgtt

SEQ ID NO: 869317 - DNA, 636 bp, Homo sapiens
ttatattttactatatcttgcttcaatcaaacacagtaaactttgtttaaatttctgggactttttaaagctaatattggtgtttctctttgttagattaaccttggagtctctgccaaattatagcttgtgagcaggagtcactacttttctacccgtgaagttaccctgtagtcttcattctgacttctccaagcatctattattcctctcacattcacctgtttaccctgttgaaatcctcatgatgcctttttatattaggcaaaggtaaaaaaaaaaaaacacagcctttgcaaatgtttcttctgcatgataaattcacttgattattggggatgtaacaaaggtactatagaagaacaagggagaagatcaattcaattgataatactaaaaagaaatcaacagctcaaattaaaccaacagcrttggtttcttctaactctgttccatcacattaaaccccttgaaaatcactactcaaggtatctggagtgtacatctactttagagttatttttttccaatttaaaagataaactctaaggaactgtgtgcccatcatgtgtgcttttctgaagacataattgcttgctaaagtctggatctaaaagtcacagtgaatcttggtta

SEQ ID NO: 869318 - DNA, 613 bp, Homo sapiens
ttatatttttaaaggaagctttataactttaatggcttcaaaggtcaagttatttcttttcttcaatttaaggacatgttcttgagtcaatcaatattaattcaacataagaccttagtccccaatttcacctcttatgttagctaacataattaaacctgtgttgctgagcaaaatgtcaaatacctttttcttaggacaaagtactctatctgggttttctttttcaattttcattaatttaaacaagcaaatttatttttattgtattgagcatcaaataaaagcaattactcagcatgcttctggatttggtaatgaatatttttttctgaatttgagaatgaggctttccatgtgccccctccccatctgtcargcatagaattggttggactgtggtgagcagcagtcacttgggatagtgtttgcttagtcttaggttccaaaccctcagtaaaactcatttaaaaactgactgagacagagctcaatgcactaaaaagtcttcttgactctttctcaatctctcttttaataccatgagcactgacctgaattagactgactattctttcttggtatttaatttctgcataatactttccatata

SEQ ID NO: 869319 - DNA, 577 bp, Homo sapiens
taataacatgacacagtgcctggcaccttgcgtgtgtgtgtgtttttttatttgagaatgcatgacatgaacacactatacagcctaaataaatccctgttttcttttattacagccataaagcagttgtaaaatgaagaggagatggyctgggtgctttgacatagtgggtggatgtctgaaggtgaaggtgggaccgattttaaaggaggtgtctataggagcttccaggtcccctaaatcccactggctctgccagtgtttggccttcaggtctgtgaacttgtctcccgaggaccccagggttaactagactcagggatgctgatcaagacaaaccaatcccccagacaccaatggtcataaccagaatcatgatttattaatttgcagggggagctgcatctgttggaaagaccagatacagacactcctgtaagactatcacaatccctacctgtagaaaagccccatgggagccaaatcataatcagagggctgcttgtggagaatgcaacccaagcagagagatgtagtaaaggaaaaaactgtccttggcatcaggctgaaaccactg

SEQ ID NO: 869320 - DNA, 634 bp, Homo sapiens
ttctcatttgtatgcttatactgcatttacatctggaagtccaattgcttagaatctgctacaggacttctatggatatatttaataaggacaacttggccataatgagcttaaattttgaactgtcagaagcagatggattagaatgtgtggttcattgatttatatataaatacagattccaccccctcagagactcccgttttacattctcagaaaaacataagaaagaaaagatcaaaagccacagaccttttgaaacatgttaagttagcctataaaataatatttcctaggctcatgtggctttaaaaktgctgtaaatttccctgaagcatgtttgaagcaagcattcctaagaagcttaatagaaactcttttaacaaaatgtctttccatccctccctattttctatgatttattttgtttctactcatttaacaaaatagttttacatttgtctgtgtataaaaaccttttatttcagaattttccattgaagattctattatgtacttcttttatgctattaattatcaagtaggcacacaaatttactcaatttaaaatttagaaatatttaattttctgttttcttgttgccattatttgcttatagttttacaaagttta

SEQ ID NO: 869321 - DNA, 634 bp, Homo sapiens
ttctcatttgtatgcttatactgcatttacatctggaagtccaattgcttagaatctgctacaggacttctatggatatatttaataaggacaacttggccataatgagcttaaattttgaactgtcagaagcagatggattagaatgtgtggttcattgatttatatataaatacagattccaccccctcagagactcccgttttacattctcagaaaaacataagaaagaaaagatcaaaagccacagaccttttgaaacatgttaagttagcctataaaataatatttcctaggctcatgtggctttaaaattgctgtaaatttccctgaagcatgtttgaagcaagcattcctaagaagcttaatagaaactcttttaacaaaatgtctttccatccctccctattttctatgatttattttgtttctactcatttaacaaaatagttttwcatttgtctgtgtataaaaaccttttatttcagaattttccattgaagattctattatgtacttcttttatgctattaattatcaagtaggcacacaaatttactcaatttaaaatttagaaatatttaattttctgttttcttgttgccattatttgcttatagttttacaaagttta

SEQ ID NO: 869322 - DNA, 650 bp, Homo sapiens
ccaagggagaaaatctggcatttccagctcgctcacagtggaccatcttttaatttataattcagctaacaaagcaaataaactattagaatattttttaactccctgaggtgcaacattaaatgcagaatccctacctagtgggcccaaatcaaaaaagtcagcctgattcaactctatgttccttccaccattatcccacacccttaatatccattctcatgcctgttatctagattcctgcttatacaaattagaaaactcaagctgttcttttcaagtgtagtgyacctcctcgtgggtcacactctgacctcacctctatgggcccactgggacttcaatctagttataggtctagaagcacacaagggtgttcggggtgggtattgaggagaatcaacattatcttgcctcgtagctgcctcaggagaggccatcactgttgcctcagttagtgcagggtttatctcctcagacaaaggtggaaaggctgatggcagcatgggtcttggaggggatcttgccactactggggatggggaagctgtttcttctggtaaaaagattcatcagagtttacaagctcagtgtccccagcttcatcagggtcctcccacacatcacctttccaagttgcggggtcccat

SEQ ID NO: 869323 - DNA, 575 bp, Homo sapiens
cagttttcaaagggaatgctttcaacttttgcccattcagtatgatattggctgtgggtttgtcataaatagctcttattattttgagatacgttccatcaatacctagtcaattgagagtttttgggagaaaggggtgttgaattttattgaaggccttttctgcatctattgagataatcatgtggtttttgtcattggttctgtttacggtgattggattacatttttttgatttgcrtatgtcgaaccagccttgcatcccagggatgaagccgacttaatcatcagtggataagctttttgatgtgctgctggatttggtttgccagtattttattgaggattttcacctcaatgttcatcagggatatgggcctgaaattctctttttttgttgtgtctctgccaggttttggtatcaggatgaggctggccttataaaatgagttagcgaggagtccctttttttctactgtttgaaatagtttcagaaggaatgataccagctcctctttgtacctctgatagaattcagctgtgaacacatctggtcctgggcttttttttttttt

SEQ ID NO: 869324 - DNA, 600 bp, Homo sapiens
aatgttgtaagtgctgtcacagagatacacaggttcagaatagtgtacccttagtgagacatgggctcaggagctgaactactcagattcaaatgcggcttccataaccatctagacacacaacctcacatatgtttargcagcttgtctcatttcctcaactgtaatggaaataaggaaagtgcagacttcataaggctcttgtgagaatcaatgagacgatgcttgcaaggtgtctggagagctctcagcctatggagagagctcagtaagtattcagggatctccgttattatgcaatggaagcacaaagaaggaaataactaaaagcggctaactcctacccagaggggtctgggaaggcttctcaaggaggtgacaaaagttgaatcctcttctgggaaggagggaggggagaggcagtccagggggaaggagtggatagccaaaaatcctgagggtgatggggaacccagggaagttggtgagcaagaaaatgacacaaactgatgtgtgttttagaagaatttcttgagtagccatgtagaaaacagattggaacagaaggaatctgaaggcagagagaggagaggagctatg

SEQ ID NO: 869325 - DNA, 596 bp, Homo sapiens
cttcaaattcattaaatacagagagtagaatggtgatattcttatatggaactcttatatcaacttaaggattaaatgttatctctgcttttccataaagaaactattaagggaaaagtgagactttgagcatgctttcaggttcatgatctctacattatgcccaggcccaccttagacacctctgtctatgcatgataatatgaggcttggataggcaggacagagaaaaagaacaaagtcaggatgcctaggccatcccttagagtatatagcacctgcaacagatgccctaacacactgtataatctaaaacaaaaaggaattggtctttaacataattgccttgcctgtcttcttagctattgatgaactaaggcatcatcttaaaaaagaggttgtttcagatcaytgtgcatcaacattttgcatctgtgactagacctgctgatccaggatgttttacatctcaatccacaactattaaccaatgttcatgcagtgcctgagcacacatacagaacttgtgatctgcagcactggctgaggatgtcagtccactggtgtatattggaaagctaattggggattcttta

SEQ ID NO: 869326 - DNA, 622 bp, Homo sapiens
aaattactttgggtggtatggccattttcatgatattgattcttcctatccatgagcatggaatgttcttccatttgtttgtgtcctcttttatttccttgagcagtggtttgtagttctcgaagaggtccttcacatcccttttaagttggattcctggtattttattctctttgtagcarttgtgaatgggagttcactcatgatttggctctctgtttgtctgttactgctgtataggaatgtttgtgattttgcacactgattttgtatcctgagactttgctgaagttttttatcagcttaaggagattttgggctgagacaatgggattttctaactgtacaatcatgtcatctgcaaacagagacaatttgacttcctcttttcctaattgaataccctttatttctttctcttgcctgattaccctggccagaacttccaatactatgttgaataggagtggtgagagacggcatctttgccctgtgctggttttgaaagggaatgcttgcggcttttgcccattcagtatgatattggctgtgggtttgccataaatagctcttattattttgagatacgttccatcaatatctggtttattgagagttttca

SEQ ID NO: 869327 - DNA, 553 bp, Homo sapiens
atttcatggtgtatatgtgccacattttcttaatccagtctatcattgatggacatttgggttggttccaagtctttgctattgtgaatagtgctgcaataaacatatgtgtgcatgtgtctttatagtagcatgatttattatactttgggtatatacccagtaatggaattgctgggtcaaatggtatttctagttctagatccttgaggaatcgccacactgtcttccacaatggttcaactaatttacactcccaccaacagtgtgaaagcgttcctatttctccacatcctctscagcatctgtggtttcctgactttttaatgattgcattgtaactggtgtgagatgttatctcattgtggttttgatttgcatttctctgatgactagtgatgatgagcattttttcatgtgtctgttggctgcataaatgtcttcttttgagaagtgtctgttcatatcctttgcccactttttgatggggttgttttttttcttgttaattgtttaagttctttgtaggttctggatattagcccattgtcag

SEQ ID NO: 869328 - DNA, 638 bp, Homo sapiens
tccttgcccatgcctatgtcctgaatgatactgcctagattttcttctagggttttatggttttaggtctaacatttaagtcatcaatccatcttgaattaagttttgtataaggtgtaaggaagggattcagtttcagctttctacatatggctagccagttttcccagcaccatttatgaaataggraatcgtttccccatttcttgtttttgtcaggtttgtcaaagatcacatggttgtagttgtgtggtgttatttctgaggccactgttctgttccattgatctatctctctgttttggtaccagtaccatgctgttttggttactatagccttgtagtatagtttgaagtcaggtagcatgatgcctccagctttgttctttttgcttaggattgtcttggcaatgcgggctcttttttggttccatatgaactttaaagtagttttttccaaatctgtgaagaaagtcaatggtagcttgatggggatggcattgaatctataaattaccttgggcagtatggccattttcatgatattgattcttcctatccttgagccttgaatgttcttccatttgtttgtgtcctcttttattttgttgagcagtggtttgtagttctgcttgaag

SEQ ID NO: 869329 - DNA, 627 bp, Homo sapiens
gcccacaaaaggcctgcagccttcaatgactggtatcatggacagcaccatgggcagggcatatatttaatgtgaaagtcatcaccaaactgaaaaataacgggtttttttggttgtggttttttttttttttttttgagatggagtctcgctctgtcatctaggctggagtgcagtggtacaatctcagctcactgcaatctccgccttccaggttcaagcaattcttatgcctcagcctcctgagtagctgggattaaaggcatgtgctaccacacccagctaatttttgtatttccagtagagatggggtttcaccatgttggccaggctggtcttgaactcctgacctcaagtgatccrtctgcctcggcttcccaaagtgctgggattacaggtctgagccaccatgcccggccccagactgaaaaataatggccaagaattgtcactcctgccattcccaacaggttttttttggttgtgtttttttgtttttttgtttttttttgttttgagacggagtctcgttctgttgcccaggctggagtgcagtggcacaatctcagctcactgcaacctacgccagcctgcaattcctgccccagtgaccaaacagtgagagag

SEQ ID NO: 869330 - DNA, 591 bp, Homo sapiens
taataacaaacttgtccaagctaaaggaggatgttcgaacccattgcaaggaagctaaaaaccttgaaaagagattagacaaatggctaactagaataaacagtgtagagaagaccttaaatgacctgatggagctgaaaaccatggcacgagaactgtgagacgcatgcacaagcttcagtagccgatttgatcaagtgraagagagggcatcagtgattgaagatcaaattaatgaaataaagcaagaagagaagtttggagaaaaaagagtaaaaagaaatgaccaaagcctccaagaaatgtgggactatgtgaaaagacaaacctatgtttgattggtgtacctgaaagtgacaggaagaatggaaccaagttggaaaacactcttcaggagattatccaggagaacttccccaacctagtgaggcaggccaacattcaaattcaggaaatacagagaacaccacaaagatactccttgagaagagcaacctcaagacacataattgtgagattcaccaaggttgaaatgaaggaaaaattgttaaggacagccagggagaaaggtccggttacccacaaagggta

SEQ ID NO: 869331 - DNA, 661 bp, Homo sapiens
gcatggaatgttcttccatttgtttgtatcatcttttatttcattgagtagtggtttgtagttctccttgaagaggtccttcacatcccttgtaagttggattcctaggtattttattctctttgaagcaattgtgaatgagagttcattcatgatttggctctctgtttgcctgttattgctgtataggaatgcctgtgatttctgcacattgattttgtatcctgagactttgctgaagttgcttatcagcttaaggagattttgggctgagacgatggggttttctagatatamaatcacgtcatctgcaaacagggacaatttgacttcctgttttcctaattgaataccctttatttccttctcctgcctgattgccctggccagaacttccaacactatgttgaataggagtggtgaaagagggcatccctgtgttgtgccagttttcatagggaatgcttccagcttttgcccatttggtatgatattggctatgggtttgtcatagatagctcttattattttgaggtaagtcccatcaatacctaatttattgagagtttttagcatgaagggttgttgaattttgtcaaaggcgttttctgcatctactgagatagtcatgtggtttttgtctttggtcctgtttatgtgc

SEQ ID NO: 869332 - DNA, 614 bp, Homo sapiens
aaatactcttcttcagccacacttcatcttagtagaatgatcctatattaaatgaacgttcctgttcttgcagttggttagacttcagtctagtttcatgcacatcaaacttacctagtggtgccttcaggttttagcgctaatagtggatttgaagtatgtgaaatatctgttacatggtaagtgctcatttcctctgagtttgtargtgaaactttaaaattactggttattgattgggtaggggagaaaaaacacctgctgaaacttgttggccggaagtttttacccctgggaagaagaaaggaacggggtgggggagataagggaattcagttcttggctggcaacactccagaaccgtcctgatggaagggttgtggccagttgaaagcagcagtactggagaggggactgggggttgttctttcaaaggcagggttgaaggttattaatggactaagttaaatttctagctgttccttcctgttactctagatactttttatatatttattatgtcacagcagtattgacgccctgaaaagaaagaaaagtgaaagaatagttcacgtaagatcccacaagtcctacaaattttaactttccaatag

SEQ ID NO: 869333 - DNA, 656 bp, Homo sapiens
cactggctattccttcccggttttctttgctgcatttttcctccactagatctctaaatgtcagctttttccttggacttttcctccccttttactcactctccaaactctaaaatagatattttctgagctgaaatcttctctggatcctagactcacatagcctaatttttactagacacttctgctcagaggtctcagagcaagttggatttcagaaactaccggttcaaaataaaaattatygtttccttttcttcccttatcaaatcatctcagtatctggctccactatccatctaatttctgaagcagaaacctagcagtctaattcttgttctcttcccatagctaatctattagcaagtccttgtggttcagtctccaaggacctcagaaccagcaacttccctccacctctctgccaccactcgaatccaggctgtcttcatctctctcttggaatgtgcaggagctctctaactgttctttctgtctctacccatgacttctgacagtccacttaccatgtgcagacagagaaatattttaagataacaatcgaattacatcctcaccttgatgaaattcatcatgattttccattccatatagcataatgcccagggtcccataaatgcctacaaaggcccaca

SEQ ID NO: 869334 - DNA, 535 bp, Homo sapiens
ggcacgatggctcacacctgtaatcccagcactttgggaggccaaggtgggcagatcacctgaggtcaagagttcgagaccagcctggccaacatggtgaaaccccgtctctactaaaaatacaaaaattagctgggtgtggtggtgggctcctataatcccagctactcaggaggctgaggcagaagaatcacttgaatttgggaggcaaatgttgcagtgagccaagatcacgccactgcactccagcctgggcgacagagcgagactccatcttaaaaaaraaaaaaaaaaaaaaaaaccctcttcagttttcatgctctgcagaatttctcatcacttattttgcttgggatttgtgggtttcctgaatttgaggatttacgtctttcaatgattctgtaaatttcttagccattgtctcttcaaatattgcctttaccctattctatttcttctatcctttgcagctttgattagaaatagctccctttgctttccatgtctcttaacttctgtgctatgttctaggtaa

SEQ ID NO: 869335 - DNA, 635 bp, Homo sapiens
agttcgtctgtgttatagcaaatattaacacttcattccattttattgctatataacttcctatgtatggatataccacattttgatttctttatactttcttgactagtatgaatactgctgctatgaacattcttgtacaagcttttgtgtagacatatgttttcctttctcttgggcayatacatattgaagtgcaattgctgggttataaagataactacatgtttaatatttggaggaattgttaaactgttttccaaagtcatggccctgttttacaatcccgtcagcaatgtgctgatccaatttctccacatctttgccaagacttgttactgtcttttcattgtagtcatcctagcaagtagaaagcgctgtttgtggcatagatttgcatctacctaatgactaattgacttgagcaacttttcagtacttattgttgaattgtatatctccttgaagaaatgatcattcaaatcttttgctcattttaaaaattgggttgtctttttgtaactgagttgtgatagttctttatgcattttggatttcagtcccttattagatatgtcatttgcacatattttctgacattctgtgagttaccttttgactttcttgctggtgtt

SEQ ID NO: 869336 - DNA, 635 bp, Homo sapiens
agttcgtctgtgttatagcaaatattaacacttcattccattttattgctatataacttcctatgtatggatataccacattttgatttctttatactttcttgactagtatgaatactgctgctatgaacattcttgtacaagcttttgtgtagacatatgttttcctttctcttgggcacatacatattgwagtgcaattgctgggttataaagataactacatgtttaatatttggaggaattgttaaactgttttccaaagtcatggccctgttttacaatcccgtcagcaatgtgctgatccaatttctccacatctttgccaagacttgttactgtcttttcattgtagtcatcctagcaagtagaaagcgctgtttgtggcatagatttgcatctacctaatgactaattgacttgagcaacttttcagtacttattgttgaattgtatatctccttgaagaaatgatcattcaaatcttttgctcattttaaaaattgggttgtctttttgtaactgagttgtgatagttctttatgcattttggatttcagtcccttattagatatgtcatttgcacatattttctgacattctgtgagttaccttttgactttcttgctggtgtt

SEQ ID NO: 869337 - DNA, 635 bp, Homo sapiens
agttcgtctgtgttatagcaaatattaacacttcattccattttattgctatataacttcctatgtatggatataccacattttgatttctttatactttcttgactagtatgaatactgctgctatgaacattcttgtacaagcttttgtgtagacatatgttttcctttctcttgggcacatacatattgaagtgsaattgctgggttataaagataactacatgtttaatatttggaggaattgttaaactgttttccaaagtcatggccctgttttacaatcccgtcagcaatgtgctgatccaatttctccacatctttgccaagacttgttactgtcttttcattgtagtcatcctagcaagtagaaagcgctgtttgtggcatagatttgcatctacctaatgactaattgacttgagcaacttttcagtacttattgttgaattgtatatctccttgaagaaatgatcattcaaatcttttgctcattttaaaaattgggttgtctttttgtaactgagttgtgatagttctttatgcattttggatttcagtcccttattagatatgtcatttgcacatattttctgacattctgtgagttaccttttgactttcttgctggtgtt

SEQ ID NO: 869338 - DNA, 607 bp, Homo sapiens
agtaaggagcaaagctaggattcattcccaggaaggctgattccagaatttgtgttcttaacctctttgttatatttttttgtcttttttgtatttttgtgtacatcttcacttttttattatactttaagttttagggtacatgtgcacaacgtgcaggtttgttacatatgtatacatgtgccatgctggtgtgctgcacccattaactcttcatttaayattaggtatatctcctaatgctatccctccctcctcccaccccacaacaggccctggtgtgtgatgttccccttcctgtgtccatgtgttctcattgttcaattcccacctatgagtgagaacatgaggtgtttggttttttgtccttgccatagtttgctcagaatgatggtttccagcttcatccatgtccctacaaaggacatgaactcatcattttttatggctgcatagtattccatggtgtatatgtgccacattttcttaatccagtctatcattgttggacatttgggttggttccaagtctttgctattgtgaatagtgatgcaataaacatacgtgtggatgtgtctttatagcagcatgttttataatcctttg

SEQ ID NO: 869339 - DNA, 707 bp, Homo sapiens
ccaccaggccccctctctaaaactggagattacaatttgacatgagatttgagtggggacacaaatccaaaccatatcagtacacaaatatgtataaataatatataaacatacatgcaaacacaaacgtgtgtgtgtatatatgtatgtatgtgagtatatatgtattatgtatgtgtgtgtgtaagaacaataaattaatgtcttaaaagttctcagcacaagtgatataaagtataaacatgggcaagagaataggatataaggataataaagtggatattgtccacacttccttacttgctctctttatgtaagtgtgtatatgtgtgtgtctataacaggtttttttcctaacagttgtatgtgtgtttggaagtttttaaaatagatttttcaaggctattttatgtacactttttttggttagtattttggtgatttttagttaaagaaaaacaatgttttccaagggcaaaaaaawgaactgaagttcggaaggaagctggatgtggacttcttacaagctcttgctccaaaacctggaaacgaggaaagagggccctcccgggaaacctgagaaacattggcacagcagagggaatcctttggtggggtgggcggagatgccagcccacttgtgtgactgtattgttttgagtgggctctaaggcaatttctgtgtgccactccattgacttaattaa

SEQ ID NO: 869340 - DNA, 634 bp, Homo sapiens
agattccgtgggcgtaggaccctccgagccaggtgtgggatatagtctcgtggtgcgccgttttttaagccggtctgaaaagcgcagtattcgggtgggagtgacccgattttctaggtgcgtccgtcacccctttctttgactcggaaagggaactccctgaccccttgcacttcccaggtgaggcaatgcctcgccctgcttcggctcgcacacggtgcgcacacccactggcccrcgcccactgtctggcactccctagtgagatgaacccggtacctcagatggaaatgcagaaatcacccgtcttctgcgtcgctcacgctgggagctgtagaccggagctgttcctattcggccatcttccattccacagatttcttttagaaaaacagtcaccagtggcagcacatttcagtgacacagaatgggtcacaaaatttgctcagtcgtatgacatatttaacctgctcaatgaactcagtctgtcacttcaagggagaatgacaactgtgttcaagttggcagataaagtggctgcattcaaaatcaaactggaattatgggggtgatgagttaacactgggatttttaacatgtttcgaatattagcagagattttgaaagagactaa

SEQ ID NO: 869341 - DNA, 638 bp, Homo sapiens
agtgagaattttgtagttgaaaaagaatcagaaagagaagcttttgataaataaaccagagtactgagctaaaccttgtacaacacaagctagatttcaaagtagatggtgagaatgagcctagagtttgaaaattctgccagaaagttttgttttatgtttttgtggagttttttaaagaaacattttgcttttttgttttggacttgaagattgtgctcaatacagtttttcttcctttaagtgacacctattaaaagagaaaagtaaattgttcaaatagaagaattaataagacaaataaatgcccttttctgaagaatytaaattttcttacttgggatctgattatgaaattccaattataaataaactcccaaccccttacccaaaaaaggaatgtctccaagtttagactgaggtaggataaatactcaacattctattccaaataccaagaacaaggtaggtattttccctgctgcttccttaccctgaaatttgacgttcattttaatgatgcttactttattacttgtcagaaaagtgaaatggcctgtcaattttatggagtttctcctacctttcaaatgattatattacattttgaaataagtgtatagctcccacctcctttt

SEQ ID NO: 869342 - DNA, 593 bp, Homo sapiens
gaagtaggtggagtacctacctcctgggattattaaaattaaacaagttaatcccattatgtgctcacaatagtctctggcatatactaggcacagtatctaatatttacttctttaagcttaaagaagtagtctaatatatggaacaaaccaaatagactgagtcytgaagcatttacaaggtctgtggactcaggtatttaacctcttggtgcttttatttcctcatgtgttaaagtttattttataaggattagatgagatcacacgtgaaaaatattagcttagtccgtcaccaaataaaaacaggttaattccttctctatctttaaaacagcaaatgagaagatatttgatcaaatctcatatgccttcccatgctgaacacatcattattttatctcccactaagaaaaaataaaacactgccaattcaactgtgatccaaggtctccttagcattgagatgtctcattttatatttattgaaataacccttttgatagattaagctatagactttaatgcattataattaaaaatgggaaagataagggtcagtgtgatagggctggcacagcaggaaaatgtgc

SEQ ID NO: 869343 - DNA, 593 bp, Homo sapiens
gaagtaggtggagtacctacctcctgggattattaaaattaaacaagttaatcccattatgtgctcacaatagtctctggcatatactaggcacagtatctaatatttacttctttaagcttaaagaagtagtctaatatatggaacaaaccaaatagactgagtcctgaagcatttacaaggtctgtggactcaggtatttaacctcttggtgcttttatttcctcatgtgttaaagtttattttataaggattagatgagatcacacgtgaaaaatattagcttagtccgtcaccaaataaaaacaggttaattccttctctatctttaaaacagcaaatgagaagatatttgatcaaatctcatatgccttcccatgctgaacacatcattattttatctcccactaagaaaaaataaaacastgccaattcaactgtgatccaaggtctccttagcattgagatgtctcattttatatttattgaaataacccttttgatagattaagctatagactttaatgcattataattaaaaatgggaaagataagggtcagtgtgatagggctggcacagcaggaaaatgtgc

SEQ ID NO: 869344 - DNA, 596 bp, Homo sapiens
ttaggtttggtggtatagagtgacaataaagaaaaaccatgtaaataagatgttagcatttgcatacattgatatggtatatatttacaaaaacatgtaatagaacatccaagagttaattcaaggaatcactgtcgttttataacaaattataattcaaaagcttagagtttttaccttatactggttcatgtaatacaataaagggattaatatccaccaatatcaatccaagggtggatataaacacacattggcatttgagaaaccatagtcactatttttaataatggaattttaggacatctggtaggatttcagtttgattcatcatttactgtatttgaataaatgatctgcaaccttaataagcttatgccartgcagaaatggaatggcatcccattctttacagtgaaatagcaattagtaagaacttaaaaactattagataactagattttgtaattagaatttaataacagcactgactcaaatagcagataaaaataaaaaccttctgctggagatttttcacttgggattcacctcagcccaggcaaattcaaaatatctttatgttggtcttcctcaat

SEQ ID NO: 869345 - DNA, 679 bp, Homo sapiens
tttgtatgtctctatttatgtcctttgcctactttttaataaggttattgtaaattttttgttgaattatttgaattccttataaattggtcccatgttggatgcatactttgcaaatattttctcccattttgcaggttgtcttttcactctgttgattattactattattattattatttgctgtgcagttttgaagttgaagccccattgtcgatttttcattttatttttttttcttgtgcttttgagttcttagtcatcaattatttgcctagaccaatgtccagaagtattttttcctagattttcttctaggatttttgtattttcaggtcttacatttaagcctctaatctgtcttgagttgatgtttctgtgtggtgagaaacaagagtccrgtccatttattcttctgcatatggcaatctgattttccaagtacattttattgaaaagattgttcttttcccggtgtatgtttttgttgacattgtcaaagattaattggctgtaaaatgtggctttatttctaggtgctcagttctgtgtcattgatctatgtgtctatttttatactagtacctttctgtttagttactattgccttgcattataatttgaggttaggtagggatgttttcagctttcttttgcttaggattgctttcaatatttg

SEQ ID NO: 869346 - DNA, 609 bp, Homo sapiens
tcttgatggagatggagagagatggcagctgtactagtttggagttctggtaagatcctttttcgttcactatttgatttatgctgaatattatgctcctgagagtcatccttgtggatggggtagctgtatttgttttcttttccttccgtaagatattccaatgtatgactttaacaacaagcgtttccatagtcttctgattgatgaaatgtttggttgtttcctccttttaaaaaatatactgcaatttgggaggccgaggtgggtggatcacgaggtcaggagatcaaggccatcccggctaacacagtgaaaccccttctctactaaaaaaaaatacaaaaaatcagycaggcatggtggctggcacctgtagtcccagctactcaggaggctgaggcaggaggatggcatgaacccaggaggccgaacttgcagtgagccaagatcgcaccattgcactccagcctggggacacaaccagactctgcctcaaaaaaaaaaaaaaatactgcaatggacaattttatgtttatattctggtgcacgtgtcgatgttcaggcatttcataagttatctagaactggaagagctaatctatgatg

SEQ ID NO: 869347 - DNA, 599 bp, Homo sapiens
agaaataatatttggctcaactacacctacagactagtatgggaagattgctgaattcatggtaacccatataaaagagacaaatcctgattattcatcttgtttccaagtatcaatctttatctatcagataaaatgtgggtatagaaattttccatactagacatctgagttgcatcctggatttggagttggccttgtcctaaccttaaactgctgaagttctgatatgctctgacatgctactttgttcttcccagagcctttctctgggtatgaatcttcttacctcaactcacaactagagactgcgttttgtaaaatgaggatctcaaatctcagactctgtctttttttttgttgttgttgttgttgttgttgttgttgttktttgagatggagtcttgctttgtcgcccaggctggagtatagtggcgcaatctcggatcactgtaacctctgcctcccagattcaagagattcttctgcctcagcctcccgagtagctgggattacaggcgtgcaccaccatgccagctaatttttgtacttttagtagagacagggtttcaccatgttggccaggctggtctcgaact

SEQ ID NO: 869348 - DNA, 601 bp, Homo sapiens
ttccttttgttgtgattacttttgtaatgaaatctttgtcagttcctgtgtccagaattgaatagcctatcttaccttccagggattttatagttttggattttacattgaagtcttaatctatcttgagttaatttttgtaaatgttttaaggaaggggtccagttttaatattcttcttayggctagccagttatcccagcactatttattaaatagggagtccttttcccattgtttttttgtcagctttgtcaaagatcagatggttgtaggtgtgtggccttattctgagctctctgttctgttttattggtctatatgtctgtttttgtaccagtaccatgctgtttgggatattgtagccctctagtatagtttgaagatgggtagtataatgcctccagttttgtttttgttgtttaggattgccttactattccagctcttttttttggttcaatatgaattttgaaataatttttttagttatgtgaagaatgcctttggtagtttaatggaaataacattgaatctttaattgctttgagaaatatgggcattttagtgagattgattttccctattcatgagcatgaaa

SEQ ID NO: 869349 - DNA, 601 bp, Homo sapiens
ttccttttgttgtgattacttttgtaatgaaatctttgtcagttcctgtgtccagaattgaatagcctatcttaccttccagggattttatagttttggattttacattgaagtcttaatctatcttgagttaatttttgtaaatgttttaaggaaggggtccagttttaatattcttcttacggctagccagttatcccmgcactatttattaaatagggagtccttttcccattgtttttttgtcagctttgtcaaagatcagatggttgtaggtgtgtggccttattctgagctctctgttctgttttattggtctatatgtctgtttttgtaccagtaccatgctgtttgggatattgtagccctctagtatagtttgaagatgggtagtataatgcctccagttttgtttttgttgtttaggattgccttactattccagctcttttttttggttcaatatgaattttgaaataatttttttagttatgtgaagaatgcctttggtagtttaatggaaataacattgaatctttaattgctttgagaaatatgggcattttagtgagattgattttccctattcatgagcatgaaa

SEQ ID NO: 869350 - DNA, 527 bp, Homo sapiens
ctaggaggcatcaactgtaggtgtgggtagatctggagccactcagtgaagaaactgatcctggagtcaccctgacaaccttagtataactgggggcactgcttttttcatgaaccatgtaaaaaagtgagtgcacggccaggcatggtggctcacacctgtaatcccagcattttgggaggccgaggcaggtggatcacttgargtcgggagttcgaggccagtgtgaccaacatggagaaaccccgtctctactaaaaatacaaaattagctgcacatggtggcacatgcctgtaatcccagctactcgggagggcagaggcaggagaatcgcttgaacctgggaggcagagcttgtggtgagccgagatcgtgccattgtactctagcctgggcaacaagagcgaaactccatctcaaataaaaaaaaaaaaaaaaaaaaaaaaaaagtgagtgcatgcttttttaagccattaactttagagctacgaatatggtggacatgttttcctcttttcccctctcc

SEQ ID NO: 869351 - DNA, 580 bp, Homo sapiens
accaatacccttcaaaactgtccagggcatcacaatagaaagtctgagaaactgtcgtagccacaaggagcctaaagaggcttgataactaaatatactgttattctggatgggattctgtgagaaaaaaaggacagcaggcaaaactagagacatataagtaaaatataaactttagttaataatagtcaatatttgttcactaattatggcaaacgaaccatttttaggatgataataataaaagaaactattatgaatatgggtgtgtgggaactaccttcacaacttttctatagmactaaaactattctaaaatagaaaagtttataaaaatagaaaagatgaatattaaagatatggaatgactgagtgagacactatgtatgatagggttttgcacactacaaagtgcaagaaaaagacatttcctatgtgtgtttgtgactcatacaagtaggtgacaggtgatatttctggcagagaagacatcttctgtgattaagttagttcagtaaatttgtggggaaaggccatggaatgtaggcctaagaacagtggtcactgtggtgtctgcaag

SEQ ID NO: 869352 - DNA, 616 bp, Homo sapiens
tccattaggcattgccctaattgcgactctttgcagtggccccactattatagcagccctttgcctgggttctgtgtccaaggctcaggagttccatccttcaaattccaggtgaaggtggccatagcccattgctcaggcacttttgtggtgatagcagagatggcaccttgaggtttacagtttgtgccctctggtgtcgtggtcaccccagcccaaactgcatctggtcccactggagtcacatmtgaggtggccaatgagtactataccagaatttggagagtgcagctttgaagtctatgcatgctccaggatcttgtagtctggctcatgctaagaggggcagccccagtgatctctgaaatttatttggaaatattcttccattgtcttggagaaaaagtcctggtttctgtttagatggcagatcaaactaatctctatcaaaaggtccctcagggacaaccttgttctctcccaaacaagctttctcttttctttcaatatagataactgaaaattttccctttttttaaggttctattcttttgattaaaaatcccaactttaaactgtctctcttttcacactttactataagtactcaagagaa

SEQ ID NO: 869353 - DNA, 616 bp, Homo sapiens
tccattaggcattgccctaattgcgactctttgcagtggccccactattatagcagccctttgcctgggttctgtgtccaaggctcaggagttccatccttcaaattccaggtgaaggtggccatagcccattgctcaggcacttttgtggtgatagcagagatggcaccttgaggtttacagtttgtgccctctggtgtcgtggtcaccccagcccaaactgcatctggtcccactggagtcacatctgaggtggccaatgagtactataccagaatttggagagtgcagctttgaagtctatgcatgctccaggatcttgtagtctggctcatgmtaagaggggcagccccagtgatctctgaaatttatttggaaatattcttccattgtcttggagaaaaagtcctggtttctgtttagatggcagatcaaactaatctctatcaaaaggtccctcagggacaaccttgttctctcccaaacaagctttctcttttctttcaatatagataactgaaaattttccctttttttaaggttctattcttttgattaaaaatcccaactttaaactgtctctcttttcacactttactataagtactcaagagaa

SEQ ID NO: 869354 - DNA, 674 bp, Homo sapiens
attcagccttgggaggttgtgtgtttccaggaatttatccacttcccctaaattttctagtttgtgtgcagaaaggtggtcataatagtctctgagtatcttttgtatttctgtgagatcagtcataatgacacctttgtcgtttctgaktgtgcgtatttggatcttctctcttttttatttgattatctagctagtggtctattgatcttgtttatcctttcaaaaaaccagcttttagttttgttgatcctttgtatagattttggggtctcaactgtactcagttctgctctgattttagttatttcttttcttctactagatttggggttagttcttattattccagttcctctaggttcaatattacactgttaatttgagatctttctaactccttgatgcaggcctttatagctataaattttccttctaacactgcttttgctgcatctcagagatgttggtatgttatgcttctgtttccatttatttcaaagcattttttgatttctgccttaatttcattgtttacccaaaagtcattcatgagtaagtcatttaatttccatgtaactctgtggttttgagagatcttctggtattgattagtattactattccactatgatttgaaagtatggttggtatgatttcaacttttttgaatc

SEQ ID NO: 869355 - DNA, 605 bp, Homo sapiens
gatattctaagcagatgataaaatgtatatgcgcaggaaacaatttatattatccttagtgacagaaaggagccaacatatttagcttctaggtttataaagaaataaccttttttgttttcaagattttattggcaaaggcaatatttcatagctasaaaatcactttttataaaatctcttcaattgatttgtaaaagtttacagatgttatagcctcctagaaatatagtgagaaaatacacaaaaaagaataaatgaaacactcataatttactcacagataataatctgtttttaacatttttgtgtttgtctttttagacaaggacaaatatgcattttccccttgaaatatgttaattttataaagactgttttgtagcttggtttttaaaagttttttcaatgtcttattttacttgtaccataatttctaattgttgatcatgtacattttctgtcaagtgtttcacattacaaatattgacatgaatgcccttgaggctaatttttgtcattcattctataactacagttgtcaaagttgctaatatatctatacacttgatagcattactatcagttgtagatttcaagagatg

SEQ ID NO: 869356 - DNA, 662 bp, Homo sapiens
gaagcattttgtagatagatagatagatagatagatagacagacagacagacagatagacagacagacagatagatatttgtggggaatacatacattatatatatatgtgagtaaattagtgagggcaaattggagtcaaattataattaaaaaaataggaaggcctcaggacacttgcaatcatagcagaaggcaaaggggaattaaggcaccttctttacaaggtggtaggaaggaaaatgaacacaggaggaactaatgaacacttataaaacaatcaggtcttgtgagaactcactcactatcacaagaacaacatgggggaaactkcccccatgattcaattacctccacttggtctctcccttgacatgtggggattatggggattataattcaagatgagacttgggtggagacacaaagcctaaccctatcattctgcccctagcccctcccaaatctcatgtccctttcacatttcaaaacaaatcatgctttcccaaatgtcccccaaagtcttaattcatttcagcattaacacaaaagtccaagtccaaagtctcacctgagacaaggcaagccccttctacctaggagcctgtagaatcaaaagcaagttagttacttccaaaatacaatgggagtacagacattgtg

SEQ ID NO: 869357 - DNA, 494 bp, Homo sapiens
taagatacttcttgagagtcttttaaaggtccaatatacaacaacatccagagataagaaaagggtttttattcttattgaaatcataacaccttggccagaagttctccttccagcagattttcccttttaactcacygacttacgaataaacaaatcaaattttttttttttttttttttttgagacggagtctcgctctgtcacccagagctggagtgcaatggcgcgatctcggctcactgcaagctccgcctcccaggttcacaccattctcctgcctcagcctcccgattagctgggactacgggtgcccgcaaccacgcccggctaattttttgtagttttagtagagatggggtttcaccgtgttagccaggatggtctcgatctcctgacctcgtgatctgcccgcctcagcctcccaaactgctgcaattacaggagtgagccaccacgcctggccaaacaagtctatttcaaacagaattatg

SEQ ID NO: 869358 - DNA, 573 bp, Homo sapiens
ataatcccagcactttgggaggcacaggtgggcacatcacctgaggggaggagttcgagaccagcctggccaacatggcaaaaccccatctttactaaaaataccaaaattagccaggcgtggtggcatgcacctgtaatcccagctactcagaaggctgaagcaggaaaattgcttgcagtgagccgagattgcaccactgtactcaccctgggtgacagagtgagactctttcaagaaaaaaaaaaaaacaaacaccmcataaataaaccttggaaacaccaaactaaagtactcaataagacggggttgagtaatgaatttcagctggggcaaaaagactttaggaaaaaaataaaattaaaaatgaggaaatgacttggggaaagcaagcaagtatttggtgtttgtatgtgggtgggtgaattcaaaatgtgggaaataacttagtcaccattccatagtgcagttcaaggggggaagcacagaaattgctgttattatctatctcatactcagctggtttattttcctggtaattaagtttttcatttcttgtttctgttcgggttg

SEQ ID NO: 869359 - DNA, 573 bp, Homo sapiens
ataatcccagcactttgggaggcacaggtgggcacatcacctgaggggaggagttcgagaccagcctggccaacatggcaaaaccccatctttactaaaaataccaaaattagccaggcgtggtggcatgcacctgtaatcccagctactcagaaggctgaagcaggaaaattgcttgcagtgagccgagattgcaccactgtactcaccctgggtgacagagtgagactctttcaagaaaaaaaaaaaaacaaacacccmataaataaaccttggaaacaccaaactaaagtactcaataagacggggttgagtaatgaatttcagctggggcaaaaagactttaggaaaaaaataaaattaaaaatgaggaaatgacttggggaaagcaagcaagtatttggtgtttgtatgtgggtgggtgaattcaaaatgtgggaaataacttagtcaccattccatagtgcagttcaaggggggaagcacagaaattgctgttattatctatctcatactcagctggtttattttcctggtaattaagtttttcatttcttgtttctgttcgggttg

SEQ ID NO: 869360 - DNA, 608 bp, Homo sapiens
tggattctgggtatttattaagaactttaaattcaacacaaagactattcaataccaccggctcagctctgaaaaaggactcctggctttctttatctccataatcatccaaatacactgccatcccaatcccagcccaatctggggcccttgaaaaaataacctatcaccctaactacaagggaggaactcccttcaagttaataggcctggatgacttacatgacttcaaaattatggaaatgacaagggctacaaagacaggaccagcacctcctccagtcctatcagagcaacgtttctgggaatgcatccctacagaaacccatttgaggcccaatatcaatgcacacygagctaaaattccaggcaccactttgtattaagagaagccacatttctggtcaggccctgggaaacttgaaaagtcatcaatgtaactgcaccctagagattaacccctcacataatcatgtaagctacgcagttacccaaactgcatcatttagaaaacctgtatggttttcatggaaaccattcctagataagggcactttaaaggatatacagtataagtactgtcaaagtaagcccactagctacatttt

SEQ ID NO: 869361 - DNA, 634 bp, Homo sapiens
ttattacaattcaacgtgagatttgggtggggacatagccaaaccatatcatttcatccctggcccctcccaaatctcatgtcttcacatttcaaaaccaatcatgccttcccaacagttcctcaaggtcttaactcatttcagcattaactcaaaagtccacagtagaaagtctcatctgagacaacaaggtaagtaccttttaccttatgagcctgtaaaatcaacagcaagttagttacttcccagatacaatagagtacaggctttggataaatacacctcttccaaataggagaaattggacaaaacgaaggggctacagaccccatgaaagtccaaaatccaataggggagtcattaaatattaaagtttctaaatgatctcctttgactccatgtctcacatttagggcatgctgatgcaagaggcggctcccatggctttggcagctctgcccctgtggctttgcagggcacagyctccctcctgtctgctttcacaggctggcattgagtatctgtggctttcctaggtacatagtgcaagctgtcagtgaatctaccattctggggtctggagaatagtggccctcttctcacagctccattaggcaataccccagtaggcact

SEQ ID NO: 869362 - DNA, 595 bp, Homo sapiens
ttatttccctaaagtatggaagccagataagatttgttctcaagaactccagacatccatattcaatctcagcaggtgtaaatcttctttcccaaagagtttaagtttttggatctcaagcagtgagacaggccggaaacttgtcctagggaatcaactgctctctggtggttcaaatatattagcataaagaaatcctctgtttccctatcttgtacttcctgtcccaactcaatcacaaaatgagagaaaaattgtagtagagcaggagacttttcaaatctccgatagattcctttcttagctaaaccattccatttatacatcttggcagtagtcattagcagtgagaaagctaaagagacaacaaaagaaaaatgtacaagtctttttcargagcttctgaagtgttgaaaagtgtttctatttaaaagctcctgacaatgattggcaggatctgagaaaacttcacaagaggagccccaccctctgagaattaatgttagaagagcagtaattggctaacacctaatccattcttaccacagttgagggattacaatctaattgtgactttctggtccctctcaaatgt

SEQ ID NO: 869363 - DNA, 563 bp, Homo sapiens
agggttttttaacatgctacaattagttttttatccagtactcatcaattgagatcaatttacaaagtagccggacttggagtatcattccatactgtctctttagtttgtatcattacattcttattcatcatctaccctgtgacaataacggkgctgaagtctagagtataaaaataactaagacattttcactatcaaaatagcgtgagaactagtttggggaggcatgcataaacagataattttaaattaataaagtaaacatcgtgtagaaatagaaacaagatgcaatggagcatagaagaggaacctaaggaattggcctgctccattaagtgtgtgagtgtatgtgtgtgagcttcaaagaagagtttctacagcagattcttcctgggtttgatccttgaagtaaagaagaacatatgcatgtaaagaaaaggagtgaaggaattgctaagggagggagacgcatgagtgaagacatgggactgttaaattgtctcattaaaaactgaagttacagcagcttagtaatactagagcataaatttcaagacagt

SEQ ID NO: 869364 - DNA, 563 bp, Homo sapiens
agggttttttaacatgctacaattagttttttatccagtactcatcaattgagatcaatttacaaagtagccggacttggagtatcattccatactgtctctttagtttgtatcattacattcttattcatcatctaccctgtgacaataacggtgctgaagtctagagtataaaaataactaagacattttcactatcaaaatagcrtgagaactagtttggggaggcatgcataaacagataattttaaattaataaagtaaacatcgtgtagaaatagaaacaagatgcaatggagcatagaagaggaacctaaggaattggcctgctccattaagtgtgtgagtgtatgtgtgtgagcttcaaagaagagtttctacagcagattcttcctgggtttgatccttgaagtaaagaagaacatatgcatgtaaagaaaaggagtgaaggaattgctaagggagggagacgcatgagtgaagacatgggactgttaaattgtctcattaaaaactgaagttacagcagcttagtaatactagagcataaatttcaagacagt

SEQ ID NO: 869365 - DNA, 563 bp, Homo sapiens
agggttttttaacatgctacaattagttttttatccagtactcatcaattgagatcaatttacaaagtagccggacttggagtatcattccatactgtctctttagtttgtatcattacattcttattcatcatctaccctgtgacaataacggtgctgaagtctagagtataaaaataactaagacattttcactatcaaaatagcgtgagaactagtttggggaggcatgcataaacagataattttaaattaataaagtaaacatcgtgtagaaatagaaacaagatgcaatggagcayagaagaggaacctaaggaattggcctgctccattaagtgtgtgagtgtatgtgtgtgagcttcaaagaagagtttctacagcagattcttcctgggtttgatccttgaagtaaagaagaacatatgcatgtaaagaaaaggagtgaaggaattgctaagggagggagacgcatgagtgaagacatgggactgttaaattgtctcattaaaaactgaagttacagcagcttagtaatactagagcataaatttcaagacagt

SEQ ID NO: 869366 - DNA, 563 bp, Homo sapiens
agggttttttaacatgctacaattagttttttatccagtactcatcaattgagatcaatttacaaagtagccggacttggagtatcattccatactgtctctttagtttgtatcattacattcttattcatcatctaccctgtgacaataacggtgctgaagtctagagtataaaaataactaagacattttcactatcaaaatagcgtgagaactagtttggggaggcatgcataaacagataattttaaattaataaagtaaacatcgtgtagaaatagaaacaagatgcaatggagcatagaagaggaacctaaggaattggcctgctccattaagtgtgtgagtgtatgtgtgtgagcttcaaagaagagtttctacagcagattcttcctgggtttgatccttgaartaaagaagaacatatgcatgtaaagaaaaggagtgaaggaattgctaagggagggagacgcatgagtgaagacatgggactgttaaattgtctcattaaaaactgaagttacagcagcttagtaatactagagcataaatttcaagacagt

SEQ ID NO: 869367 - DNA, 604 bp, Homo sapiens
gacaaatactgcttgggctatgcttacttgtttactactgaattaacatagggttgaaggtgattgacagatatatttctgattctgaagtcatatttactcaaatgataccaacctgaattgctttcgagatgctcttctcattaggtttcctgagattgactgttgacatgaggtctaaaattctctcaaggtttcttctcttttattaaaggtgaagttggtaaatcgggcatttaagaatagcacatcaggcttccacattttcctaattttttattttgttttaaccaattttaataattggacatcatactagtgtgcttttattcatgtaattgcaattttctctatactgatgagaaaactactggttctagaaactaaatattttttcctamttcaacggggtaaataattagcaaatccagaattcaaaatccaaatttcttgtttcctttcctatgttatgctgtgctaaacagggttttttttttttttttctttttcccaaagtgatttggtcagctactagcatcacttctgagaatgtttttctggtctgtgagtttctaggccaagtagagaattcaatctttgatat

SEQ ID NO: 869368 - DNA, 637 bp, Homo sapiens
aaaaacaattgcaacaaaaacaaaaataaacgagtgggatctaattaaactaaagagcttctgtacagcaaaataaactatcaacagagcgaacagacaacctacagactgggagaatatatttgtaaactatgcatctgacaaaggcctaatatccagaacctatagggaacttaaagaaattgactagcaaaaaaaatccaaataaccccattaaaaacatgggtgaaggatgtgaacagacagttctcaaaagaagacatacaagtggccagcaaacacataaaaaaagttsattatcactaattatcaaggaaatgcaaatcaaaaccacaatgagataccatctcacaccagtcaaaatggctactgaaaagtaaaaaaccagcagatgctggtgaggttgtggagaaaaagcaatacttttatactcttgatgggaatgtaaattagtccagccactgtggaaagcagtctggagatttctcaaagaccttaaaacagagctactatttgacccagcaatccctttacccaaatgaaaataaatcattctgccaaaaagacacgtgcacttgtatgtttattgctgtgctattcaaatagcaaagacgtagaatcaactcaggtgcccacc

SEQ ID NO: 869369 - DNA, 637 bp, Homo sapiens
aaaaacaattgcaacaaaaacaaaaataaacgagtgggatctaattaaactaaagagcttctgtacagcaaaataaactatcaacagagcgaacagacaacctacagactgggagaatatatttgtaaactatgcatctgacaaaggcctaatatccagaacctatagggaacttaaagaaattgactagcaaaaaaaatccaaataaccccattaaaaacatgggtgaaggatgtgaacagacagttctcaaaagaagacatacaagtggccagcaaacacataaaaaaagttgattatcactaattatcaaggaaatgcaaatcaaaaccacaatgagataccatctcacaccagtcaaaayggctactgaaaagtaaaaaaccagcagatgctggtgaggttgtggagaaaaagcaatacttttatactcttgatgggaatgtaaattagtccagccactgtggaaagcagtctggagatttctcaaagaccttaaaacagagctactatttgacccagcaatccctttacccaaatgaaaataaatcattctgccaaaaagacacgtgcacttgtatgtttattgctgtgctattcaaatagcaaagacgtagaatcaactcaggtgcccacc

SEQ ID NO: 869370 - DNA, 631 bp, Homo sapiens
tccctgtctggtattcctacaatgtgtatgttggtaagcatggtagtatttcactggttgttcagctatatttatttttctcattcttttttcttttgctcctcagactggaaaatttcaaatgtcttcaagcttgctgctactctcttctgcttgtgtgaatataccattgaatttctctaatatggttttaattttagttttactaaataatttattagattttccagaatttcwtttctgtttatttatattatttttctttatttcttttgatattctcatcttgttcagacattattttctctgatttctttggttatttgtatgttttcctttaaaccatcaaacatatttaagacatccgacttactgttattgactaataattctaaagtctgcgcttcctcaggaattctttcaaacaaattctttagtttctgcaaatgagctgtattttcttattttttatgttttaaaatgtttgtttataactggagggaattctgagtaatatgtaaggtaattctggaaatgtaattatctcgtttttcagggattgcttgttctttgcttgtttatggctgaagcaatgctattgtgattttccaaactattttgcaatcatatt

SEQ ID NO: 869371 - DNA, 631 bp, Homo sapiens
tccctgtctggtattcctacaatgtgtatgttggtaagcatggtagtatttcactggttgttcagctatatttatttttctcattcttttttcttttgctcctcagactggaaaatttcaaatgtcttcaagcttgctgctactctcttctgcttgtgtgaatataccattgaatttctctaatatggttttaattttagttttactaaataatttattagattttccagaatttcatttctgtttatttatattatttttctttatttcttttgatattctcatcttgttcagacattattttctctgatttctttggttatttgtatgttttcctttaaaccatcaaacatatttaagacatccgacttamtgttattgactaataattctaaagtctgcgcttcctcaggaattctttcaaacaaattctttagtttctgcaaatgagctgtattttcttattttttatgttttaaaatgtttgtttataactggagggaattctgagtaatatgtaaggtaattctggaaatgtaattatctcgtttttcagggattgcttgttctttgcttgtttatggctgaagcaatgctattgtgattttccaaactattttgcaatcatatt

SEQ ID NO: 869372 - DNA, 631 bp, Homo sapiens
tccctgtctggtattcctacaatgtgtatgttggtaagcatggtagtatttcactggttgttcagctatatttatttttctcattcttttttcttttgctcctcagactggaaaatttcaaatgtcttcaagcttgctgctactctcttctgcttgtgtgaatataccattgaatttctctaatatggttttaattttagttttactaaataatttattagattttccagaatttcatttctgtttatttatattatttttctttatttcttttgatattctcatcttgttcagacattattttctctgatttctttggttatttgtatgttttcctttaaaccatcaaacatatttaagacatccgacttactgttattgactaataattctaaagtctgcgcttcctcaggaattctttcaaacaaattctttaktttctgcaaatgagctgtattttcttattttttatgttttaaaatgtttgtttataactggagggaattctgagtaatatgtaaggtaattctggaaatgtaattatctcgtttttcagggattgcttgttctttgcttgtttatggctgaagcaatgctattgtgattttccaaactattttgcaatcatatt

SEQ ID NO: 869373 - DNA, 577 bp, Homo sapiens
tgtaattatctcgtttttcagggattgcttgttctttgcttgtttatggctgaagcaatgctattgtgattttccaaactattttgcaatcatattttgcaaaccatttatttgcaaacaattttgcatatttgtygtgtatggtcactgaagtttctgttccattcttccattttatcttcagtcattggttacctgccaataattcccttaaatttctggttcccaagtgggtagggagtgaaattcctgtctctttgaatctcttcttgtctataaatcaatttcatcacactgaggttgaaacaaattttgctcagctcatttattgcctctaatgtttttagtggattctttagaacttcctgtgtacaagatgctatcatctgtatataggtgtagttttacttttttgtttttgaaatctggatatagtttatatcatttcctttcaaattaccctaggagaacttccagtaaaatattgtatacaaagaaatggcaagaacagaaattttatcttgtttcttattgtagagaaaatgtttccagtctttcactttttagtgtgaggtta

SEQ ID NO: 869374 - DNA, 630 bp, Homo sapiens
tttgtgcatctttctgtacagtccataccaagctttactacaggcctccatcttgttttatatcatttggggcatggcctgtaacccagtggcaggctttgtttagcttccatatggcccagattcaatcctggctaggggatgagtttcatatctgcatgaccttttgctatttgttgattcccttcccctccatgaaatgccttggattttcctttctctgagcctttaggaaagtttgaaaggcagaaatattggccacttggcaccactaaagttagataataagggagttaaaagaattwttttgagaagtgcccagctcaattaaaggtggatatccaacatatagtaatatttaaaagacctttatgttctcctttttttgaaccttggtttgctggaaaaatacatggtttttttttggtaaactgaattatttttctccattttggcttgccacttttaatgcatgcatgaaaggggagagacctctgttttcctcatgaaatcccaggaattaaaagcatctgaaggccaataattcaaatagaagattggcaaatgaaagatcttatggggactggattttcttctgccagtctgcatagttacatatgcattgcatgt

SEQ ID NO: 869375 - DNA, 723 bp, Homo sapiens
cctttaagcaataacttcctatttttcctttttgacagcttcttagtaacctctattctgctattcatctcgatgaatttgcctattctagacagtttgtttaagtggaatcagaaaatcatgctctcttttttatattatttttcagaagtcatgtaaaccacttcatctatttaagctggttttttctttcccacattttggaacatgttttctgttggtgctacctttttttttttctttaattttttatattatttttgagacagagtctcgttctatttcccaggctggtatacagtggcaaaatctctgctcaatgaaacatctgcctcctaggttcaagaaattctcatgcctcagcttcctgagtagctgggattacagatgcacaccaccatgcccagctaaggtgccatctttcttttcgatagcacaattctctcatcatttcccctcgtgaatggtagccgagttatcagattacaattaccaattactgactactgaatgttttgrtggccctcaaaggagcaaggttacataagatactcaaaaactgaggtgatccttgtataacagcctttgccatggtctgtgtcaatggccttaaatgactgtgtctctcagatggtcaaagaacaaacatcaggtttcctgccagcactgttaacatccctactatttcagaaggagtaatccatttgttagtcctgatggctt

SEQ ID NO: 869376 - DNA, 641 bp, Homo sapiens
caattatgtattcctctcatgcttagtaaatgaacaatttacataagataaagtaaacatagagtagcacctgtggagacatctggccttctatctccagcaatttctttgtgtgactcagctttcagtttaacgtttccctttggcatagtgcatttaaggtcctgagattttattttcctttcacaactgctaaagtagtttaaatcagactcattacaatagcttttaatcactttctgcccttacctcatcgttctgtctgcccctggacattaattatttctgctaagcaacaaatattgcaatgtcttattcctctgtctggcatgcttttccctgatcaacagggytcctcgaccctgactctggcttatcttctccaggagcctttttctaatcaccctaaggaaaactgcaacatcctctaccaccaacattcccttttctcttctatgctttatgcttctctgtagtattctcagcatctgaattagctttctattgctgtcataagtaatttccacaaactcagtggcttaaacaaagtaagttgggaactcactgcactgaattgagcactgcacaaggctgtgctcctttctggaggctctaggagagaatgcacttccttgccttct

SEQ ID NO: 869377 - DNA, 639 bp, Homo sapiens
gattacatggtaacacatttaagatgtgtgttatgaatttgaaatgttgagttggtgaaatttgcaatatcatttcataccttaggatgcactagtgaaacagaatcacttacagaaaaacgagacagttctggaagaagtcccagatctttgcaacagtgcagaatctaatgtgggataggataaatttccagctcagacagaggtgtgagtgtccagtgtgcaaaactgtgttaagaaattttgagtttgcttattataccttttgtaaaagtttctaattgaaaatatagtgcrcattaaataatttctgattaatattaattttaagctggcaaatagtcatgattcaagaagatgttaactttaaagaaaccaaattaaataaacataaattaatgtgaagagtgtaaagcccaaagaaggcttgcctgcaagtcagaatgcaattcattctgacaattgcaagaacatatctgttgggtaaattcaggaaaaactaatttatccagaattaatcaatcactactcccttcacctcatggaaatgctgctctcaatgcaagtgttccactgcagtgggattatccaggtatcttcctgtgccctccaaaatgcaggagagatgaaaaccctgga

SEQ ID NO: 869378 - DNA, 645 bp, Homo sapiens
ctcacctatgtttcttagcacattgagcatatttctatgttattattattaatttccttgagagtgggaagtaaacaccttggtcatgtctgcacctctgctttgcaacagggcttgacactaagtaaaaagcacagaaaatacttgttgaacatttttgaattgaatcagattaaagtgaattgacctgattaaggtttatagaattgcctgggatgagttggcctccaaagagctgttttccttttttttaaacaaataaattcagacttaattacagcaattaatttcattttaaatactattatggatgggtctttaatttaatattgcttcacctttacatttactgtaataatgttcttctgtagttatcaatyggcagtatttattattttccctgtggaggtaattataaaattataagaacccagaggatgcactgaattttagaggctaaagttattttggaaccgtcaattttgttctattttgttgctttatatgaagtggtagacatgactaaatatgctttagaaatttagattatttaaaggaacagaacaccagtatcagagacaaattcttgtctctcatcataaaaatttaacacatccaggacatgccttttgaaaggaatagaca

SEQ ID NO: 869379 - DNA, 662 bp, Homo sapiens
actaagtaaaaagcacagaaaatacttgttgaacatttttgaattgaatcagattaaagtgaattgacctgattaaggtttatagaattgcctgggatgagttggcctccaaagagctgttttccttttttttaaacaaataaattcagacttaattacagcaattaatttcattttaaatactattatggatgggtctttaatttaatattgcttcacctttacatttactgtaataatgttcttctgtagttatcaatcggcagtatttattattttccctgtggaggtaattataaaattataagaacccagaggatgcactgaattttagaggctaaagttattttggaaccgtcaattttgttctattttgttgctttatatgaagtggtagacatgactaaatatgctttagaaatttagattatttaaaggaacagaacaccagtatcagagacaaattcttgtctctcatcataaaaatttaacacatccaggacatgccttttgaaaggaataracagagagctctgaagtggcctttcccgtgagtggctaccatctcaaatgtgacccttatgtctcaccaaaaagcagaaaaacctctttcacaagttactacttgacttccagaactctcccttggctctttctctgca

SEQ ID NO: 869380 - DNA, 632 bp, Homo sapiens
ttccatgaagtactagcctattatttcacattcatccgctgaaagttaaattttatatcccaccttctcaatcattcttctgtaaaactcctcagtgagaaagtgaagaaaaaaaagatttaaactgcaaattaccctgctattttcaattgtaatccacacaggaacctaactagataatgttttctccattttaactgatgagaaaaataagattcaaagtgataaattatctttaacagaagttagttaatgatttgtgtaatttagataaaaactatatattgtcttttgtgaaagcttggaatctctcctacactcctcttcctagaygggatagcacatgatttgtggagcagcagactggaagagaagaaggagaatgaggaagagccatagatagggatgacttagaaaagaaatggccaaattctactttattcatttttttcaaaatagtttgaattcgtgacatgaagctgtgttattttcagaaaaaaatggtacgacattttcatataatggaaaaggcaaataaaaatgtttggccacaaagataacagtaaaattttgaaataattgtttgtggggtagaaatttacaatcactaaaaacaaacaaaactaacaaaa

SEQ ID NO: 869381 - DNA, 686 bp, Homo sapiens
tgatatataattacatataataatatattttataatatctacaataatatataatatataatatggaatatcttacaaatatgttaacattaatataatatataataaatataaaatatatgcattataatatttaaatatcattktatatataatataaaatactttatagaataaaatacataataatatataataatatattttgtgtaagaatcctgtatatttgtttagatttgcttctatctgtgtgatgtttcttgatgccattgtaagtgatagaatttaaaagttattttataattgctggtatccaataatattgtatctagagacattgctaatttcatgtttattctcatagcttacccataaatatttaagggaattacaattatagtaacatttttatttcttaatttaaaattcttaaaacctaatttcaatttcttctcttgtagcactaaccaggacctccaaaaaaatgtttaaattaggtgaccttaataagaattcttgtctcatttctgaattcaaggagcaagtgattcatagtttatcattaagtatgataactcagggttttctgtagttatcctttgacttttaaggcatctcctggtgtacacatgtatacaactccatccccttgaatgtgagcaaggcctgtgaataagatcgatttt

SEQ ID NO: 869382 - DNA, 662 bp, Homo sapiens
tccttacaaccaccttgcaagtaatttcaaactactatctatttttaggccatagcatatgaaaatataaatgtaacacttctgaaataaaatactgacttatctgttcaaggtaatgggcatttcaatttggcaggaattatttcaggaatttggtaggaactatttcaattatgaacatgaggatggagaagataaaaaggaatggcaaaaataatttgtgatatattaatcccagtagaagaactagtacttcatctttgccaaagttatgcattgcaaatgtcaatttagctttggctactgcagggtatgaaaaggaaaaaaaaatcttgagtgtgmgtaattattgttaatgtaagttatctaattgggagtatttattttctgattgtagggcaaatgttagtgagtaaagcataggtttattttcttgtctattcatattttcctgaattccttaaacaaaaccttaggaatgtccaatatatatctgtgattataatctgcttaaaggatatcatggaaaacaagagtctttattgtgtgccttgtgcattcctaaggtaagctgaggaaaatcactctcaacgtacaattagaaatagttgtaacataaaactgtgtcatggatgtaagggaaaatgtttactgaggaaagg

SEQ ID NO: 869383 - DNA, 602 bp, Homo sapiens
ttactgatttgttcaatcctagcacacacatagcttcagaatactaacctatgcctttttaggagataaatttactggatacagtatttctgtgtagttctttttgtctttagactcagagtattcaagcccaaaacctgttttgcaaggttacttacgtatgttccttcagtttaattattcacttttaatgaggtaagtttatgttttttttaatttgctgttcttcctagttttatttgtcaatatgatttctcaggacttgagtgttgttataaagccataatcgagggtcaagtgcaaacactggagtgtgttacttttggagatacactggctagtaaagaaatgaactatcaaaccataaacaacatttaaaagcacagcataaataaatgagccttwaaccaaaaatttatctgaaagaaagagcattacattaaaaagttaacagagcagttgttcaatatctgacgtctaaacattggtgcattagagattcccatacatagcattttatctataatgtagttgctaagcatgtacaattgccaaatcattattgccaaaaactgtatcagagatgcttgtttagaaaagct

SEQ ID NO: 869384 - DNA, 590 bp, Homo sapiens
acaatttataactagctatatgagtacccattaacataatttttaataattgtttttagtacatttatcttctgacttttatattaggattaccatttactaaccactgttacagtaatatcttttttgtctgtataattacctttgccaattactttcatactttcttatttatttatttgatacatattttcctgtttcttaatttttttggattctttgtgttggtttatgtaygttaggtaagacaactgcctctcttagtcttaccagtctggactcatgtcagagatggatctcagcagtcaacccagcaggaaattgcaggtgccactccaaattttgtgaattgtctaagccactgtctttattattagggattcctaggaaattaggatgtgtcaagtctcattggtgcccccaagacatatgggataaaagtcttttcttaaaggtgcagctggaacagggggtgatagatcaatgctctacttttttctatcaggaagatgatgagagctttagttcatctaccatttgttctgcacttcaccttctagagctcaattatgagagtatgtttaacgttt

SEQ ID NO: 869385 - DNA, 618 bp, Homo sapiens
tggatgaagacagattgattatcagtacaaacatacagttagatagaagaaataagacccaatatttgatagtgaactcagatgactatacttagcaaaaatattgtgtctatttcaaaataactagaagagaggactttaaataataccaaaacaaaaaatgataagcactcaaggtgatggataacaccaaaaaatatttttgaggggctaaaaatgaaatatctaaaatacataagtaaaaattgtgagatattatcagagaaagtgttctagacatcttgtattgtttaggagaatgaaaaagatactgagtttttcgtgaacatgagagttaaatattatggtaaatacaaaagtaatagaagtagagtgggcttacctgtttgacaaattcttcttttatgagattattactgagtctataaaagtaatccagctataaaacaacaacaacaamaaaaaaaaacaagtgttgtgatgctgataaaataaacaaatgaggagttatttaggaaagcatgttgaaaatttgaatgctcaaaaaaatcatttggtctattcttaatatattgtttttgttatttagttgtatttttattaaattctgatcagtga

SEQ ID NO: 869386 - DNA, 633 bp, Homo sapiens
gttacaagcaaagcctcagcagataagcttaaggaaaagtaactttctacttggcatagatttctagacatggattgctttataagaagtaaatactcatttaattttgctaactattaccaaagtgccaaagtgttctcaacagcaggtatatgatttttcactcccatcaggaattgtagatgtctctttcttcaaattcttaccagaaaatgctgttgagatttagtttttgataatgtaaaggatgaaaaaatggtaacttatgtagttcaaatttctatttctctttgagtgaggaaacacatctttttcttgaaaaattggtctttttctaaattagcaggttttattttttagaacagttaaagacttatagaaaaattgarcagaaagtacagagagattttcctcttgcctcaccacatgcacatagtttctctcttagcatctgggattattgcagtacatttgctacaatagattacaaacactgatatattactactgacttaaggccatagttcacacatatatattccatatttaaaatttttattgtgactagcttgatttaaatcaaatcaatacaaactacattttgaatgttgctgggggcaaaaaaagagataa

SEQ ID NO: 869387 - DNA, 695 bp, Homo sapiens
aatcattttcttcattttctcctctaatttttgcttgcagtaaaatacacataacatatatcattttaacccttttaagtatacaaagtagtagcagtaagtacattcacaatattgtgttaccaaccattactactggttccagaagatttcatcatcccaagcacaaactctctaccctttaagcaataacttcctatttttcctttttgacagcttcttagtaacctctattctgctattcatctcgatgaatttgcctattctagacagtttgtttaagtggaatcagaaaatcatgctctcytttttatattatttttcagaagtcatgtaaaccacttcatctatttaagctggttttttctttcccacattttggaacatgttttctgttggtgctacctttttttttttctttaattttttatattatttttgagacagagtctcgttctatttcccaggctggtatacagtggcaaaatctctgctcaatgaaacatctgcctcctaggttcaagaaattctcatgcctcagcttcctgagtagctgggattacagatgcacaccaccatgcccagctaaggtgccatctttcttttcgatagcacaattctctcatcatttcccctcgtgaatggtagccgagttatcagattacaattaccaattactgactactgaatgtttt

SEQ ID NO: 869388 - DNA, 549 bp, Homo sapiens
aagatctagaaggttcaaggatttctggaaagtgttcgtacactggcagctctagcacttctgaagaagtcatgtggtgcagctccttgtctagaacagatccacttaaaggctggagagagagtgcgttgaatcctggagaggtttctttgtgtgtgtttttgttttgacagaaattttgcttttgatttatatatgttaatttcctggtgggtcttttatttaagaatacrgatgtttattgtttccatgacatactgagtaaatagaacacaagatcagctttgatttcttatttaagacaagtcttgtgaaagtttgttcatttaaacattttcttttattaaagaattctttaattcctgtttgttttatatagtttaaatatttgagattagtttaaacttcagatttacttaataaatatccatttactttggtactaaaaaataaattgaaaacattgattttctttcaaatgacatatttattctgaagattaaagttaagagagtagagacctaggtttttgtcttaattttgttatca

SEQ ID NO: 869389 - DNA, 678 bp, Homo sapiens
ataatcaaacagttgctaagctcacaacattggcatagtggaaaacgtgctgagcataaagcattctagaataacatttagtgcacagtaggtgaaaacttagcagattctgcagggttctagcaacctcgttaaactttggtgtctatgggagatctgctagatgggagaaaggtaacagagaagtgacatttaamacagcccttctgtgtcaacgtactggtggttgatccactcatttaactcataatgacatctgtattaagcaagtcaaagcgtggttatttatatcgctgactttgtataattcaagcaaaaaagtaaaattcattttttaatcatatcaaggtttatgcttctcatactgcagtaaatcagatgactaaaaaagagactagctgcaggaaagctaggcaaacagaacacgcattgcaatttcctcttcaaacatccctgcctcagaactaccctgcccaataaactcctccgcagtggctcaccttaaacattcctctgcacagaagcccttcctgatcctcagacttaaaagcagcaatatgttttcaggatacgttcactgtagaagcacttttcatgaatttaactgaagagttatttgtttaattctgtatttaatgccttcctcgtgcctagtcgagagaccccttgaaggcggga

SEQ ID NO: 869390 - DNA, 636 bp, Homo sapiens
agaagaatcaaacagaagcaataaaaaatgataaaggagatatcaccgccgatcccacagaaatgcaaactaccatcagagaataccataaacacctctatgcaaataaactagaaaatctagagggaatggataaattcctggacacatacaatccccgaagactaagccaggaagaagttgaatctctgaacagaccaataacaggctctgaaattgaggcaatkgttaatagcctaccaaccaaaaaaagtccaggaccacacggattcacagccaaattgtattgtaggtacaaagaggagctggtaccattttctctgaaactcttcctatcaatagaaaaagagggaatcctccctaactcattttatgaggccagtatcatcctgataccaaagtctggcagacacacaacaaaaaaagagaactttaggccaatatccctgatggacatctatgtgaaaatcctcaataaaatactggcaaaccgaatccagcagcacatcaaaaagcctatccaccacgaccaagtcagcttcatccctgggatgcaaggctggttcaacatacacaaatcaataaatgtaatccatcacatacagaaccaacgacaaaaaccacatgattgtctca

SEQ ID NO: 869391 - DNA, 636 bp, Homo sapiens
agaagaatcaaacagaagcaataaaaaatgataaaggagatatcaccgccgatcccacagaaatgcaaactaccatcagagaataccataaacacctctatgcaaataaactagaaaatctagagggaatggataaattcctggacacatacaatccccgaagactaagccaggaagaagttgaatctctgaacagaccaataacaggctctgaaattgaggcaatggttaatagcctaccaaccaaaaaaagtccaggaccacacggattcacagccaaattgtattgtaggtacaaagaggagctggtaccattttctctgaaactcttcctatcaatagaaaaagagggaatcctccctaactcattttatgaggccagtatcatcctgataccaaagtctggcagacacacaacaaaaaaagagaactttaggccaatatccctgatggacatctatgtgaaaatcctcaataaaatactggcaaacygaatccagcagcacatcaaaaagcctatccaccacgaccaagtcagcttcatccctgggatgcaaggctggttcaacatacacaaatcaataaatgtaatccatcacatacagaaccaacgacaaaaaccacatgattgtctca

SEQ ID NO: 869392 - DNA, 584 bp, Homo sapiens
ctgcccccaaaccacgcctgcacagccacaggacaggcatattccaaggctctcagctacactgtggtctgaagattgacaagagtgtgcatctgaacccagagtcatgagtcccagagcaagggcaagaaagggaaataaatgatgttcctgcctatctgggctgtgaatgtagtgtagccctctcacccgctggagagaccttgacatatttcrccaggtatgtccccagctgcccagtcagggctggtgccagtactcatcactggggtattcatgggcaagccatgtgatccaggtctgcccagctgtgtccttaccctaccctaaccaaacgcttgctgaacaggaagctcaggacaccaggcattccactgtccagcccatcacctgaaacaacaggcagcacctcacaatgaacagaggtcaagtacatacccatctgcttttgctggtcagatcttacccataagtgccgcctactagtctagaggttgaactacacaacccaatataacctgccaacagaagtgcacagggctacagaaacaaagccaaataactctacccagcacacgctacag

SEQ ID NO: 869393 - DNA, 615 bp, Homo sapiens
tcagctccctgctttatacaggcatacctcagagatagtgcaggtttggttccataccagcacaataaagtgaatatcacaagaaagcaagtcacatgaattttagtttctcagtccatgtaaaagttatgtttacactcaacccaaatgtccatcaatgatagactggattaagaaaatgtggcgcatatacaccatggaatactatgcagccataaaaaaggatgagttcatgtcctttgtagggacatggatgaagctggaaaccatcattctgagcaaattatcgcaaggacagaaaaccaaacaccgcatgttctcactcataggtgggaattgaacaatgagaacacttggacacagggtggggaacaccacacactggggcctgtcatggggtgggggaaggggggagggatagcattaggagatatacctaatgtaaatgaygagttaatgggtggcagcacaccaacatggcacatgtatacatatgtaacaaacctacacgttgtgcacatgtaccctagaacttaaagtataataataaaaaaaagttatgtttacactataatgtagtctagtaagtgtgcaatagcactatgtctaaaaaaa

SEQ ID NO: 869394 - DNA, 559 bp, Homo sapiens
gtggctcacacctgtaatcccaacactttgggagtccgaggcgggtggatcacctgaggttgggagttcaagaccagcctgaccaacatggagaaaccccgtctctactaaaaatacaaaaaaattagccgggcatggtggcccatgcatgtaatcccagttactcaggaggctgaggcaggagaatcgcttgaacccaggaggcgaaggttgcagtgagcggagatcgtgccattgcactccagcctgggcaagaagagcgaaactccatctcaaaaaaaaaaaaaaaaaaaagaaaagaaaaaaagaaatagtagccagcattgactgagtgcttactatatgccaggcctgtgctgagtgcttggcacccattatctcatttactcctcacagtgataggagaarggcattaccattaccattatcctcatcttacagatagagacatttagtgactcccaacattgcataggcaccaagtagctaaggtgggctgtggtcccagcctgtctgtctccaaagctgagctcttactcatcttccaaggctggagagg

SEQ ID NO: 869395 - DNA, 646 bp, Homo sapiens
atttgaaattctggctagggaagttacttgccgtgagacctaggacgtggatcctaccatatctgagcctctgttttctcatataaaatgaagctgaaaataatgcttcctaccttgcagggctgatgtaagaaataatttgtcagggtatacaaggatagtttgtaaaatattctatacctgttagctgctgatttggtttggttggtttggttttatgactattaactacttttgttcattagcaagttgtgttcccacctggtcagcccaccaaacagcctaggccaatagtccctgtacatctcccttccccatttcaactaaacagcctatgagggggagacttccatattccattcttttaaaacataaaatgagtgtttatataaaaatcaactctgccatttttattggatttttggaaacataaaagctatttcgagccaaatatatagaacyggatataaggtatatttgtaagaaaaaccacagacatgacattattttatgctattatctttttctctcttctcacttatgaaaaggttttgagaaacttaaaatataaggcacaaatatgataaaactgaaaaatcactaaagtgagtaaaaagtcaaaagaaaaataaaaagcagatctaca

SEQ ID NO: 869396 - DNA, 646 bp, Homo sapiens
atttgaaattctggctagggaagttacttgccgtgagacctaggacgtggatcctaccatatctgagcctctgttttctcatataaaatgaagctgaaaataatgcttcctaccttgcagggctgatgtaagaaataatttgtcagggtatacaaggatagtttgtaaaatattctatacctgttagctgctgatttggtttggttggtttggttttatgactattaactacttttgttcattagcaagttgtgttcccacctggtcagcccaccaaacagcctaggccaatagtccctgtacatctcccttccccatttcaactaaacagcctatgagggggagacttccatattccattcttttaaaacataaaatgagtgtttatataaaaatcaactctgccatttttattggatttttggaaacataaaagctatttcgagccaaatatatagaactggatataaggtatwtttgtaagaaaaaccacagacatgacattattttatgctattatctttttctctcttctcacttatgaaaaggttttgagaaacttaaaatataaggcacaaatatgataaaactgaaaaatcactaaagtgagtaaaaagtcaaaagaaaaataaaaagcagatctaca

SEQ ID NO: 869397 - DNA, 640 bp, Homo sapiens
ttttcaggtttgctttggctctgagtattgcctgcaggagctctgcagcaagcaaggccctccacgttctcagctccatccatactccagccccaactcctgccactctagccacatcaagagctgatagcttaccagaacgtcacattaggtctcatttccatgtcttctctcattctgccttataattccttcttcctcttactctcccttggctaactcatgctgcttgtacaaagcgctacaaaaagcttccttccttctcaatgaagttttctctgacctttccccacactgtttgtgtgtccccactctgtgttcccacagcaatccaatatctctatcactggactcatcacagcctatttatgtttttaaatgtaggcttacatatgctaatgtatstatgttctccttgggtgaggaaaccttgttctctatccccagtacctaacacagagtagaaggcacgtagtagaaattcacagaatacttggtaaataaacaagtgaaagagcaattcctcaccagcttcagcagcttaaggataaagaatcttgcatctaaagaggacaaggtcatctcagcatttgacactatgttcaggtctagacctgcactgcctaatacacagtggtca

SEQ ID NO: 869398 - DNA, 614 bp, Homo sapiens
ttttagaattcagaaaaaggacatttcttttacacctataaaataaactgagttttgctcatatacaatattgttttattatactccaatgatataacatttcccctggtattatattgtaattgcatttctccttctgaagtcaattttcttttgctcaataaatgaagatgattcaaacagcagaggggtaattacctaattgacattttttggattaaccaattaagaaaaaacaaaacttggaaatggcaactataaagatcaatatgtcaccattcagtgtaccaaggaaagagaaaaatatgtcatamtttactttaaatgtcacagctttattgcacttgctaattaaatgatgcttttccatcccagccacattgaaaatgatttagaattttaggagtgatatttaattgttccctcaagaatgattttctaccatgtgactgtgcaccatgtaactaatgaggcttggatatggcttaagaaaggatgcgctaatgtgtcagcctacagccctcaagtggtgatgtgctatcagtgctcaatattcgttccagaactcaggactgaacaactgattgaactgtgggatggagtctagcgtgaga

SEQ ID NO: 869399 - DNA, 588 bp, Homo sapiens
tgtagatcaagacagagtgggacttttggccaggctttttctgggtccctccaatcaaaatcctctagacaaaagagatccatatactagtccagtcacactctttgttattcttacctgggactttgagccaaacccttatattaagccatacataaattccccctcagccttgctttgtcctttgaaaaaggtagatggttaagaacaggatctgatttycaggaccttttctgtataaatatctattggcagtctaattctgtgcaatacccagcacgtaatagaacaactatgaaagagatggcttctgtgtcttacaatcattttctgtattctgcctcatgtttttttaaaagcaaatagaaaatgctataaaatacttatttacataatttagcaaacagcaaacatgacagtgttctttttccatatctatatagttttatcttcaagaatactatgccattttcagttacaaattactttgtatatattatactgcctttccttggtatgtttaaaattcatataatttcagttgttgcttattttttttttgtcattgagttggattcattttgtgtt

SEQ ID NO: 869400 - DNA, 679 bp, Homo sapiens
tatttaattgtttcatatgttcataacaactagacacaccttagagagctgtcttgaactgaattggaaaatatattaagagtgtgcatcatcgtactggacatgtagtaagcatgcaataaatgttgttttctatgtttcttattttctcatagtcattatagccactgataagagatcaaagcaagaaagaggattaccccttgttttttacctgtgaatgcaggtaacttctttggaaaatcagtgtacatatatctgtagctgttatagacaatagaaagaagactgccattttaacataacagggatacaatgtactaactctatgaagatgtcacttcttttaataggtacatttgccaagtaaaccctgattttgaagaaaaatagtcacctattaaatgcaaaatatgattcacattacataaatacacaaaagaagacatttttattttcaaatgtccatgtatagaaggttacagaagatgatgtaatctctgttaagtcttttttcatagaacattatagagyaaaatgttggaatggtagaaggaggaagaaactaaaagatgcttgaatttcctgtttgtatcacttttacctgaacatatttttctgcatgttcatttcctttgtgtgcttttctttcttaaagaataaaaaaaaaatctgcctc

SEQ ID NO: 869401 - DNA, 648 bp, Homo sapiens
agctgtgagaagaggggcaccgtcctccagatcccagactgttagatccactgacagcttgcaccgtgtgcctagaaaagccacactcaattccattcaatgaaagcagccaggagagggtctgcaccctgcaaagttataggggtggagctgcccaaggctgtgagaacccacctcttgcatcagcatgacctggctgtgagacatggaatcaaaggagatcattttggaactttaagatttgactgccctgctggatttcagacttgcatggggcctgtagccccttcattttggtcaatttctcctagttggaatgagtgtatttacccaatgyttgtatcccccttgtcttttgattttacaggcttataggtggaagggacttgccttgtctcagatgagacttttgactgtggacttttgagttaatgctgtaatgagttattaagtatttgatagactattgagaagacataattcattttgaaatgtgaggacatgagatttgtgaagagccaggggtggaatgatatggtttggctgtgtccccatccaaatctcatctagaattgtagctcccgtaatccccatgtgtcatgggagggacctggtagagggtaattgaatcacagaggcaggttttcc

SEQ ID NO: 869402 - DNA, 639 bp, Homo sapiens
aaaaggttattaaattaaagatacttccacaatcacaagaaaaactccaggaaccctttgaataattctaaccaaatgtaagtaaacttctaagaaaaaaagcttaggagttttgtttttaaaaagaagatgaaagaaatcctaaataaatatttattgaagagaagactcactagtaaagaagaatctgtacttctacccaaaagcctagctacatatttgttacaatttcaatttaagtctcaataagattttcattgaaattgaccagccagagcttttactctttatgtgcaataataaaaaataatttttgaagaaaaatagtaaagtaccaagacccaatatcaagccttaaaataacagtataatatgtaagatcatatgttattgataaaagagagaatcgataaccttgaatcagaattataaaaacttgrcattaccaaagatgccattttaaataaacgcagaaaagagagactatttaataaacagtacaagggcaattagctttccacatagagtcaaagtaaaattagaaccatagtttagagcaaaataaattccaggtagatagatcataatataagacataaaactttgtaacttttctaagaaaacaattgaaaatttagt

SEQ ID NO: 869403 - DNA, 634 bp, Homo sapiens
gaaatgctgagaagctattctttctgacaacgttggaatcaaagagtggtcaccaaggtagtagagtcaccagagaggtggtgcacttcctaggctgctggactcacagcagcccaccccttcttgcactgccttcattgccggcaactgtcactactgtcagagcaagaaccacacaggttctattttctggtctcctccaatgcctcccattggcagaacaaacaggaagccagctggcaaaggcatctgggaaatgtagttttcaattcccaagcccagcagcattgatcaaagaatagaaatgtgtgggagctaagaccaaacagaaaaataaccagcccagcccaaccatttggctagtcaatattcaaacactgcctttacccacatttaagcttccagacagcaataacaccctctttatgcttccacctagtatgatgcaattaagccttgtacaagtgaagatggtcttaccccctcttaawaacaagctgagatacaaagatccaccaatcatgttattcatctcttgctcaggcacaatctcatctgattattctgtacccaagagtccaaattattaagtaaaccaccacaggactcataatataaaattgtaatgaaaaga

SEQ ID NO: 869404 - DNA, 684 bp, Homo sapiens
tgtccatgtgttctcattgttcaactcccacttatgagtgaaaatctgacaaaagtctaatatccagaatttacaacaaacttaaacaaatttacaaggaaaaaaaaaacaaccccatcaaaagagggagaaggatataaacagatacttctcaaaagaagacatttagtggccaataaacatatgtaaaaaagctcaacatcactgatcattagagaaatgcatatcaaaaccccaatgagataccatctcatgccagtcagaatggcgattattaaaatgtcaagaaacaatagatgctggtgaggctgtggagaaactggaatgcttttacactgttggtgtgaatgtaaattagttcaaccattgtggaagacagtgtggtgattcctcaaygatctagaaccagaaatatcatttaacccagtaatcccattactgggtatatacccaaaggaatataaattatttgactataaagacacatgcacacatatgtttattgcagcactatttacaatagcaaagtcatggaaccaagctaagtgtccatcaataatagactggataaagaaaatgtgggacataaacaccatggaatgctattcagccataaaaaggaatgagatcatgtcctttgcaaggacatggattaagctggaagccatcatcctcagcaaacta

SEQ ID NO: 869405 - DNA, 606 bp, Homo sapiens
ggctggtctcgaactcctgtcctcaagaggtccacccacctcaacctccgaaagtgctgggattatatgaataagtcaccgtgcctagcatattttgtattctttactgcagctgcttctcagtcaaaactcttatttttactcagtaaacaatcttgataattaartatttatttgtcttagatctggtatacttttatacttttttgatatattatgtaataaaattaaactaataactgtattgagatggtgaaaaactgcattattgaaactgaaatgatgaacgcagacctacaattaaaattttcctctcagcattattattgcatcttggtttacattttcctttttctgattattgataaaattatgtacttttattggatttttgcatatatcattaaaaaatatctgatgaagactttgcactattttcccactgtgttgttgctctttctcttattgatttattttggttatttatatattctacatggaatttcttatcagatataggtaccatattgactttcttccactctgtggcttgcgaaatcagtcttttagtggtcatttttggtgatataagttcttcattttcat

SEQ ID NO: 869406 - DNA, 623 bp, Homo sapiens
gagaagagcaaaaatatccaaaaaatctttgcatttcaaatagattttctaagcccgaacactaaaatacaatagaaaggtgatgagagataccgtgattaaagaaataggaaacagggctgaatgtttagggttgctgagtactgagaacagtccagggacctgaactcagacccaaggaaggggtaagtgaaggaactctggagctttatattccaaccatgggtctctgtgatcctagctacatgctttcttccctgccaccttacaagacaggactttgatcctcatttgccttctgccatgattgtgaggcctcccctctttcctttataaattacccagtctcagatatgtctttattagcagcatgagaacagactaatacacccrggacacaagcataccatccagggtcatgaagataagattggtgatatgattttgagcaagagaggagctccattgccagaaaagcaagaaaagtgtggcatatgtttgtgctgtgatgtagaagctggacactcctcctttcaaaagaatgaaccaagaaggttgtggcctgatattgcagtttttcctccaggtagggagtcatctggaaggcctcagggatctgaaca

SEQ ID NO: 869407 - DNA, 597 bp, Homo sapiens
ccatgcgcaatcctggctcagctggccaaagactcagatatatatcatgtaataatactttatctataaacatacaaaataggcaatttcactaaaaaaaatgcaaggcttaggtatttttattcccacaagatattcttcagacttttgtcttctactatgttatgagaatgtacgaaggcttgctctgttgtatatcttttaraaactacagaaaatccaatttccagttccctgcatgagaaataaaaaattcaccactgtcaaattttcttgacatataaaaaggtgacctcaaagggggaaaaatagtgaccaattgtatacatagtctttccaggataaaaccttttttatccatctttcctaaaatgggagtggttaatactgtacttggacctttgaaacaattcaaagaggaaaatttcactgataaaagtgttagaaatacatgaaggtaataactggcctttacttaatgtggtattatatagaaaaagaaaagactacattgaaaatcccttccaatgctttcacttactgccttagaaaaataattattaattaaattataacctggcaaaaagtagggagtct

SEQ ID NO: 869408 - DNA, 597 bp, Homo sapiens
ccatgcgcaatcctggctcagctggccaaagactcagatatatatcatgtaataatactttatctataaacatacaaaataggcaatttcactaaaaaaaatgcaaggcttaggtatttttattcccacaagatattcttcagacttttgtcttctactatgttatgagaatgtacgaaggcttgctctgttgtatatcttttagaaactacagaaaatccaatttccagttccctgcatgaraaataaaaaattcaccactgtcaaattttcttgacatataaaaaggtgacctcaaagggggaaaaatagtgaccaattgtatacatagtctttccaggataaaaccttttttatccatctttcctaaaatgggagtggttaatactgtacttggacctttgaaacaattcaaagaggaaaatttcactgataaaagtgttagaaatacatgaaggtaataactggcctttacttaatgtggtattatatagaaaaagaaaagactacattgaaaatcccttccaatgctttcacttactgccttagaaaaataattattaattaaattataacctggcaaaaagtagggagtct

SEQ ID NO: 869409 - DNA, 637 bp, Homo sapiens
ttcttaaaaaggtggaataaaaaatgacttcataataaagaaatataaaataataaagaaaacagggggaaactaaaataatttgtcaaacatttctatttccttttttattctatttcagcctaacttctgttcttctattcctcacctacagcaattttcctaatgaaatttcacacctgtccatttctgacaccatttaacgtttagtaataatgcaagtgttaacaatgtattttgggtatatgtttctgtgtggcctgcattgcaagtagattcataaagaatttcagaaatcccaattctatttttcttttccattttattcagtttggttttggtgtagaaaaagacttaagcagtgtacctaattttaatttccaaaattgattttctactctattttctgctgcttgcttaggaaacaaaatttaccaagtctatctcctaaatgattaacctcagcaacctttggcaagcaaactattytaagagaccctgggactgtgttatgctccctctctttgcccaaatgcatttttaaaaaaagttagaaatcaaaggaaaaatgtggaagtgaaaaagaagccaagtggttaaaaaaaaatagaaagaaagtatcactaaggatcataca

SEQ ID NO: 869410 - DNA, 623 bp, Homo sapiens
agaatggctacagccttgctgtagagtgagtccagctgctacgtgggaagggagttggattcttaataacaagggcagcatgacacaagtatttggtgagcaagaaggaggtagtaatgaggaaggagaaaatgcttcacaatttaaataaaagacaccatcaaaaggcactgctttttattgagtaccttaatattttaataataattttaactgttacatgaaaggttctctcatttttttcatatttggcgttagtttatggctttctaccgtgcatgtaatggaaaacccactttaaatctggagtaattgagaggatgggcttgccagaatagaatatcctaaaatgctttcataatgtctagtaaaaatggattgcagacaagaagaatgatwtgaaaacaagggaaatgagcaggataaggagaagctgtgaactggaagccagctctgcagtgtttagttttgtctggtggtttagttttgtctgcagtgtttagttttgagctgtgagcatttaccagctccatgatgctgtgatggctgcttggttcacaggagagggaggcagggatcccagcagaaccgtcttctgtgtagtttgcaagcactgtgctcag

SEQ ID NO: 869411 - DNA, 555 bp, Homo sapiens
ggtgcactgtgagaagaacatagtagaaactattctgccatcatgtcaacgtcactctcccagtgaggatatatttaaactgatgctgatctgcacaggaaaaaaaaaaatggaaatttgatcattgaaaaaaatatgtgtataactgtatcttttctctgtatcttttcatttttctacctagaaatcgatgtagtctttcttacctaaagtttctaaagttattattctagggcttaagtataaaaaatatttacctttgggcctttagaagaatctagatccccctgaagtggacccctgaacattctcayttattgagttgaggaaaaacgtaagtttctgcattttcacaaggaattccaataatcctggtgtggatatttcttagaccacatctttgaatattttaaataattatctccatcagtatcaaatgcagttatgcattaagtaacttatttttgttgatggctgatatagtctagctctatgtccccagccaattctcatcttgaattgtaatccctacaggttgggggaaggaccttgtgg

SEQ ID NO: 869412 - DNA, 550 bp, Homo sapiens
acaggaagcacagcatggcagggagagcttcggtgtcccagcaagagaggactcacagtaggtttctacgtctctatcagagttcttggtggaaagcaacagaatcagactgtagctcccttgagcaaaaaatacttttttaaggatacaggtggctcccaaatctaagaaaaagttgagggaccagacctcagaaggggcaggaatcagggcaattctcaggattcaggtagcaagaataagtgaaaaatctcttcccagtgtcaatttcaacagwtttctatgcttttttattttcacccaagatcaatttccagtggaggagacagcctgattgcctgagcttgagccatctgcctccactttggcaggtgatggagatgcaccttgaataatagaaccctgaaaactgtgtgcacggaaaccatagtaatgaactttttatgttgttacattaatatgtattgatctgtcttgcactttgaattaatcttttatacgtgcataattttgtaaagtcaaacattggtcatttggaaaatactggttc

SEQ ID NO: 869413 - DNA, 592 bp, Homo sapiens
gtaagtcctaaagcaatcactttttaaaaaaccagtagtgaagataaaaactgaatactaaaggctactcacattcaccacttctattcaacattgtactggaagagctattcagtgcaataaaaaaaggaaggaaaattctttattctgaagcaaaataatcatgtacagagggaaaaaaactgtgatcaagtaaatatgaaaacgaactggcattcattgatagatactaygatttttttttttttttttttgagacagagtcttattctgtcgcccaggctgcagtgacacgatcccagctcactgcacctccacctcctgagctcaagtgattctcatgcctcagcctcccaagaagctggaattacaggtatgcaccaccaccacctggctaatttttgtatttttagtagagacggggtttcaccatgttggacaggctggtctcaaacccctgacctcagatgatccaccctcctcagcctcccaaagtgctgggattacaggtgtgagccaccacacccagccggaattcttgttaatacttttaggtttgataatggtattgttgttatattttaagagtcct

SEQ ID NO: 869414 - DNA, 596 bp, Homo sapiens
gttattattcattaattttgtttcagcctagtaaaatgggggaggaaggggtacaaaatatttcttttctccttcctttctttccctttctttctttttctttctttctttcttttctttttctttcttcttttctttcctttctttctctttctttccctcccttcctttctttccttccttccttccttccttccttccttccttccttccttccagggtctcactctctcacccaggctagagcacaatgcatgttcacgactcactgcaaccttgaccttccatgctcaggcaatcctcaagcctgaaattatttctttccttyctttctttctttcttttgttttgttttggtggaggacagagtttcgctcttgttgcccaggctgcagtgcaatggcgcgatctgggttcactgcaacctccacctcttgggttcaagcgactctcctgcctcagccttccgggtagctgggattacaggcatccaccaccaagcctggctaatttttgtatttttagtagaaacagggtttccccatgttggccaggctggtctcaccctcctgacctcaggtgatccacccaccttg

SEQ ID NO: 869415 - DNA, 633 bp, Homo sapiens
taatgtggtgttttaaaacattgaaaaagctaaatacagcaggcatttttaacataaaatttaaagataaaacattactgatattgaatgaaacactggtgtttcaatttcattcctaatactgctacaacagtaaaaattatattgtataatttattccgtgcatagcataatggtttaaatacaaaaccttattctgtataagatattttccaatatagctacattaaattactatttaattattacaaaatttttattaagttatcaagtataactgtgttttacaaatgtccttcaaagtgaaattatctagatagactttattctgaaataaaaaataaattcagaaccaatataacataaatattttatacatattttgctttaatattgtattagaagcaaattgggatccaagccctgatttcatgttttgaatattaactgttgaagcttcatggaaattttcaagagtctgtgaaatccyaagtaatcattattatattgtaaaagataaaaaatatctattaaaaactagtattctattaggtcaatataagaaggtacaaatgcctcaaaattaagatgaacaaaaaactattgataagcttacaagaaaaaaggacattt

SEQ ID NO: 869416 - DNA, 598 bp, Homo sapiens
aaaggctaaaactgggcatttgcacattaaatttctgtttagcttataaaaccaaaataagaaatgccatctaacataatttcttaaaccctcaaacaactgcaatactatcttaactgttaagtatctcaacatggatgagagtataggttaaacgggtgaaaattaatttwaaaaatattgtttacctgtttgaagctgttcaagtttatcttttttgtgtgaagccaagtctcctataaagcagataccacctttagctagcaaagcactgccagcctgaatgctaactgctccagttccatacttattcctggatagagtgggaaaaatttcagtagagactagatgacgtataccacgggggacaaggtttatgctaaaattcagaagcctagggaaaaaaaataaacttttcattactattatttaattttcaaaagtcacaatgtattaaatttaattttattctgtgtttactgagcacctgtgatacaccagctattgtgctagggataaaaatatatatgactaacatggtaaaatcccgtctctactgaaaatacgaaaattagccagacatgctagtgcatgcctg

SEQ ID NO: 869417 - DNA, 599 bp, Homo sapiens
gaaaatctagaagaaatggataaattcctggacacatacaccctcccaagactaaaccaggaagtagttgaatccctgaatggaccaataacatgttctgaaattgaggcagtaattaatagcctaccaaccaaaaaaaaagtccaggaccagatggattcacwgccaaattctaccagaggtaaaagaggagctagtaccattccttctgaaattattccaatcaacagaaaaagaggcactcctccaaaacacattttatgaggccagtatcatcctgatacgaaacctggcagagacacaacaaaaaaaagaaaatttcaggtcaatatccctgatgaacattgatgcgaaaatcctcaataaaatactggcaaaccaaatccagcagcacatcaaatagcttattgaccatgatcaagtcggcttcatccctgggatgcaaggctggttcaacatatgcaaatcaataaatgtaatccatcacataaacagaaccaatgacaaaaaccacatgattatctcaatagatgcagaaaaggccttcgataaaattgaacaccacttcatgctaaaacctctcaataaactaggtgttg

SEQ ID NO: 869418 - DNA, 572 bp, Homo sapiens
caagcagctctgccaacccattgtaatccaacctcagtacacaactaaaaatatgcccaatgacttcttgaaccactcaaagtaaggttcttacaatgaccatgagtcaagtcaatggccgtgaaatttctgattacctcttttatcttgcctccaatgctacactcttctctctagtttcacactctttactacttarttattttgtaaaatgggaaagtgtctgtagcaacacatcacataaaatgtatgacagcattaagagctcttaagaagaaaaatattttataaatccaagttgatgggaacactgccagttcacctaatgtgacacatagatcactgtccttcactgagcaagacaaattactcaatgactatgtctccccacaaaactggatgtgaatcaagccttctgtcacctgatttactgtgaatagccttgatacctctgcagggaaatgggaagtattactttgcttgactttgaagatgacttaataaggcaagaatgaatcagttgccatgtgttttcagtcacatccagtcccattcattgtataggtccagtc

SEQ ID NO: 869419 - DNA, 639 bp, Homo sapiens
attttaatatggtggaaagagaaaaggttttgaagtcagattttttcacactggcttcatcacttcttatatgtaggcaaagtagtcgatttcttttactgtcagtatcctcatcaatggaaacacagagttttcatatgcacacttataatttgtttgaagagtacagtgagataacatataaaatgcctggcatcctgtgagacatgtattcagttctccatcaatggtagcccttgtggttctttgaggaagagaggggaggtgaagaagtgtatatctcccccaaaaaacatcagaggcagctttgcacagagggtgataatgcagccttttaagacggtttagactttgataagtaaacctagaatggaaagcatttccaatggaagaaatagaataatytaaagtttcaggtgagaaatcaagagaccagtgtgaagtatataggtcagtttagtaataaaagaagaaagtatggtatagatgagctgaagccccagaattatcattagtatcagcaactatttcgtagaccacctactatatgaaagataatatcccaagttatgagggagatacagatgggaattacatgtgatattagaaaccctacaagattacaggctcattaagagg

SEQ ID NO: 869420 - DNA, 654 bp, Homo sapiens
ctgaagttacttatcagcttaaggagcttttgggctgagacaatgcagttttctagatacaggatcatgtcatctgtaagcagagacagtttgatttgctctcttcttgtttgaatacctttctttctttctcttgtctgattgcctctgccagaagttccaatactatgttgaacaggagtggtgagagagggcatgcttgtcttgtgccggtttcaaaggggaatgcttccagcttttgcccattcagtatgatattggctatagtatccccacttttaaacaaatgtcaattaaggtgcaggttattcagaactttctggaaaagggacagagagtttccagaaccatataagataacttccaggccaytgccatggtccacagccatggcatttgtaaactgtcatggtgcctgtaagagtatctttatgctatcgacaagtggggcaactagaggttgctttcattgccatttgctggttttggctgggttcttcactgcatctgttttgaccagaattttcttcaatcagcagggtattggctagaaaacaagtcctgctagccttctatctcatccctccccttagaaattacacactcttccttaatctttaggaggtttcagaagaacagaggtccatcttctgt

SEQ ID NO: 869421 - DNA, 739 bp, Homo sapiens
acattctagcacagtgatgctcaacctgggcttcacattagaatattctgtgggaacttgcaaaactcccagtgcccaagtatagcacagactaacccaatcagcatcagtagtttaaaaatagtgaatgcatctcagaccgtttcatgatgcatccaaaattgakaactactgctctagtatggaatccattgacaagagaccacacacacatgcatacacatgtgacacacacacacacacacacacacacacacacacgtgcactgtcctgttctttcctatgggaaagagaaaattcaactttataataagggagaaaaagtggggacatgattaggtggaagatggtggggctgggtgaacacataacatgttgaaaagtttggaataaatgggacacagcagggaacatgattaagatagaaccctaaacgatatttaggaaataagtgaagtcttccttttacctgaactggtgtatatttcacctttatacagtatctcatctaataacatgtaatgaaggttaagtttgtttcaggctttcagcttgaaaaaatgacactaaaaatatttcaagtggatagacattctgtaatattcatacataaataaattatggtatataattaattgatataattaattgaaaatatgattactatgagtgattctatgtttcaaactaccagttatgcaatttacaggtcattaaaattcatccttccctttgtgt

SEQ ID NO: 869422 - DNA, 578 bp, Homo sapiens
accacaatgagataccatctcataccagtcagaatggctattattaaaaaataaaaaataaaataaaaaacctcagaatggctattattaaaaaataaaaaataaaaaactccgaagtgctattattaaaaaataaaataaaaaaacaacagatgctggcgaggttgtrtagaaaagggaatgcttttacactgttggcgagaatgcaaattagttcaaacactgtgaaagacagtgtggtgattcctcaaagacctagaggcagaaataccatttgacccagcaatcctattactgagtagtatacccaaaggactagaggtcattctattgtaaagacacctacatgcatatattctttgcagcactattcacaatagcaaagacatagaatcaacctgaatacccatcaatgatagactggataaagataatgtggtaaatatacaccatggaatagtatgcagccataaaaaggaacaagatcatgtcctttgcaggggcatggatggagttggaagtcattatcctcagcaaactaacgcagggacagaaaaccaaacaccacatgttctcac

SEQ ID NO: 869423 - DNA, 593 bp, Homo sapiens
ttatcaacaaacacatatcgattatatgcctgatactatttcaatccttggggattcaaatgttaataaaataagagctctgctttcaagcaggaaagatggacatgtacaaaattaattagaatatgatatgacaacccctctagtagagtcctataaaaagttttgtatacactgaaatatatatggataatgtaataggatacctaggattggcttcaaaatgatatgtggtggagggaatgatttctgtacatgaaaaatatgttcataaatgttgaatctgggtaatgggaatatagggattcattctttctgtgttttaaaatgttcaacattttccataataaaaagtgaaaaaaaatmtatggcaatataatggatgaaacagtaactgttcctatgctgaggaggagtctttgcagaggaaacagtatttagactgattcctcatggaaatcaaagcaagaactcattaaaatggagagcaaaagaagggcagccccacccttatgtcacatctgccctgcaaagaaacagaacaatgcctgggctacaaattagatgtggctcagtccagttgggtgatagaa

SEQ ID NO: 869424 - DNA, 610 bp, Homo sapiens
gctagccagttttcctagcaccatttattaaatagggaatcctttcttcattgtttgtttttgtcaggtttattgaagatcagatgcttgtagatgtgcagtcttatttctgagctctgtattctgttccattggtctatgtgtctgtttttgtactggtattatactgtcttggttattgtggcctcgtagtatatttgaagtcaggtagcatgatgcctccagctttgttccttttgsttaggattgtcttagctatacgagcccttttttggttccatatgaattttaaaatagttttttctaattctgtgagaatttcaatggtagtttaatggaaatagcattgaatctataaattactttgagccgtatggccagttacatgatattgatgcttgctatccataagcatggaaagattttccatttctttttttttattattattatactataagttttagggtacatgtgcacaatgtgcaggtttgttacatatgtatacatgtgccatgctggtatgctgcacccattaactcgtcatttagcattaggtatatctcctaatgctatccctcccccctccccccaccacacaacagtcccc

SEQ ID NO: 869425 - DNA, 610 bp, Homo sapiens
gctagccagttttcctagcaccatttattaaatagggaatcctttcttcattgtttgtttttgtcaggtttattgaagatcagatgcttgtagatgtgcagtcttatttctgagctctgtattctgttccattggtctatgtgtctgtttttgtactggtattatactgtcttggttattgtggcctcgtagtatatttgaagtcaggtagcatgatgcctccagctttgttccttttggttargattgtcttagctatacgagcccttttttggttccatatgaattttaaaatagttttttctaattctgtgagaatttcaatggtagtttaatggaaatagcattgaatctataaattactttgagccgtatggccagttacatgatattgatgcttgctatccataagcatggaaagattttccatttctttttttttattattattatactataagttttagggtacatgtgcacaatgtgcaggtttgttacatatgtatacatgtgccatgctggtatgctgcacccattaactcgtcatttagcattaggtatatctcctaatgctatccctcccccctccccccaccacacaacagtcccc

SEQ ID NO: 869426 - DNA, 610 bp, Homo sapiens
gctagccagttttcctagcaccatttattaaatagggaatcctttcttcattgtttgtttttgtcaggtttattgaagatcagatgcttgtagatgtgcagtcttatttctgagctctgtattctgttccattggtctatgtgtctgtttttgtactggtattatactgtcttggttattgtggcctcgtagtatatttgaagtcaggtagcatgatgcctccagctttgttccttttggttaggattgtcttagctatacgagcccttttttggttccatatgaattttaaaatagttttttctaattctgtgagaatttcaatggtagtttaatggaaatagcattgaatctataaattactttgagccgtatggccagttacatgatattgatgcttgctatccataagcatggaaagattttccatttctttttttttattattattatactataagttttagggtacatgtgcacaatgtgcaggtttgttacatatgtatacatgtgccatgctggtrtgctgcacccattaactcgtcatttagcattaggtatatctcctaatgctatccctcccccctccccccaccacacaacagtcccc

SEQ ID NO: 869427 - DNA, 610 bp, Homo sapiens
gctagccagttttcctagcaccatttattaaatagggaatcctttcttcattgtttgtttttgtcaggtttattgaagatcagatgcttgtagatgtgcagtcttatttctgagctctgtattctgttccattggtctatgtgtctgtttttgtactggtattatactgtcttggttattgtggcctcgtagtatatttgaagtcaggtagcatgatgcctccagctttgttccttttggttaggattgtcttagctatacgagcccttttttggttccatatgaattttaaaatagttttttctaattctgtgagaatttcaatggtagtttaatggaaatagcattgaatctataaattactttgagccgtatggccagttacatgatattgatgcttgctatccataagcatggaaagattttccatttctttttttttattattattatactataagttttagggtacatgtgcacaatgtgcaggtttgttacatatgtatacatgtgccatgctggtatgctgcacccattaactcgtcatttagcattaggtatatctcctaatgctatccctccccsctccccccaccacacaacagtcccc

SEQ ID NO: 869428 - DNA, 594 bp, Homo sapiens
agccctgagcatttccaaggtttgaaagtgtgaggatggaggtaaagaatacacttttctaagaatgttcacatcgagtttaaccacagaagggatataggaaggaaagagggaaatggtacatgtgtttgaccatttcagcttcttcttttctcttttcttttctgacatcgagtgggtactgtacttgtgtcatattctgagtcccctctacctatggcttatggtaaatcttcaggtaaaatacacatatcagggttgctcctgatatgtatattttgaaaattaaaaaaaatagtatttcttttttctgtaaaacctagctttcaagaataatgccttcttatggacacaggaaagttaactttgaatttkttctcagtagaatctgctctctctcttttccttgcatgataaaccacatggtatattataaatggggaaagtcagatttaaattgagatagaaaattatttaaatttttgcaaaatattacgcctgtttgcaattatgtctttctgctcctctttccgtctccccaggatgtttataggagagtcctgttgtttgtgctctaatttaaaaaaataataa

SEQ ID NO: 869429 - DNA, 637 bp, Homo sapiens
ccctagagaagacctgccatttactaaacacttcctatgtgtccaagaaataagcactattttattattcttcacataatatatgtgtagtagtcattattttactcattctacaggtaaagaaattagcattcagaaaggttaagtcatttcccacaaaaattgtacagcctgtacatatagaaactagaattcaattcaaggactacattaactacaaagcctgggtctttcgtcattaacttcaaaacaaaatggtgtatggctataagaaagacagcatgccttagtggttaacagcaaagtcttataagccagatgtccaagtataaattccagttctgccactaagaactctgaaaccttagcatgtcactcaaactctgtatcttaccttcctcatctataagacaaagatagtgacagtaataatataataatawctcctttctcaggttgttttgtctcctaaatgactaaaacatatttaaagcttaggactgtttgtgggatatttccagccagttaatgtttcctattatttttccaaagaggactattcttttgttcagatattcactcctcttcctcaaagccctgttcacccaagggaagctggactcatccccaactccag

SEQ ID NO: 869430 - DNA, 583 bp, Homo sapiens
atgaactacttcaacttgagggggaattcaggtgtcagaggaaatcctgctgaatgtcgaaatgataaagactaaagattttctaggaaagtttgaacatatgacaaatattcttggaaacagaagagggattacataaaagggcattgtaaaagaagcaaaacattggattamaaagataaacaactatgtcaaatatttttaaaaagaaaagaaagacacacagtcagaaagagtggggatgacaaccaatccaaagggcataaaatgtggtggaggattatgaatcggataggagaaaggaacatggagctagaaagtgggcgaggagtacatgagtggaattgatcagcctctttattccagtcagaaatttggtgtgcagttgtgggataactttgtaaatgaatactttaagcataatcttaactgtgaatcaaaattgcacataaatttatatttattaaacattaaacaaacattcactgatgattatattgtgcatacaaacatgcatagaaattggctctccataaaaatatataattttagcattggtaataccaaataaagataatgctat

SEQ ID NO: 869431 - DNA, 608 bp, Homo sapiens
ccatctgatctttgacaaacctgacaaaaacaagaaatggggaaaggattgcctatttaataaatggtgctgggaaaactggatagccatatgtagaaatctgaaactggatcccttccttacacattatacaaaaattaattcaagatagattgaagacttaaatgttagacttaaaaccacattttctttagcctgtctatcattgatggtcatttgggttggttccatgtctttgttattgtaaatagtgctgcaataaacatacgtgtgcatgagtctttatagtagaatgatttatattcctttgggtatatacccagttcctgggtcaaatagtattattggttctagatccttcargaattgctgcactgtcttccacagtggctgaactaatttacattcccaccagcagtgtaaaaacattccaatttctccacagcctcaccagcatttactgtttcttgactttttaataattgctattctgactggcatgagatggtatctcattgtggttttgatttgcatttctctgatgatcagtgatgatgagcctttttttttgtttttgtatgtttgttggccacataaatgtcttgaga

SEQ ID NO: 869432 - DNA, 680 bp, Homo sapiens
gtgattaaccacataaacagaattaaagatgaaaactatgattgtctctcagtagatgcagagaaggctttcaataaaattcaacttcctttcatgttcaaaaaccctcaataaactgggtatcgaagaaatatacctcaaaataatgagagccatctataacaaactgacagccaacatcataccgaatgggcaaaagctggaagcattccccttgaaaatcagcatgacaagaatgtcctctatcaccactcctattcaacatagtattgtaagtcctggccagagcaatcagacaagagaaagaataaaaggcatccaaataggaagaraggaagtcaaactatccctgtttgccaatgacatgattctatatctagaaaaccccatagtctaagcacaaaagctccttaagataacaaaaaaaaaaactttagcaaaatttcatgatacaaaattaatgtgcagaaatcactagtattgttataaaccaacgacagccaagacgaaagtcaaatcaggaaggcagtctcattcacaattgctaaaaaaaggataaaatacccaggaatacagctaaccatggaggtgaaagatttctacaagtagaactacaaagcactgctcaaagaaatcagagatgatacaaacaaatggaaaaacattccatgctcatggat

SEQ ID NO: 869433 - DNA, 680 bp, Homo sapiens
gtgattaaccacataaacagaattaaagatgaaaactatgattgtctctcagtagatgcagagaaggctttcaataaaattcaacttcctttcatgttcaaaaaccctcaataaactgggtatcgaagaaatatacctcaaaataatgagagccatctataacaaactgacagccaacatcataccgaatgggcaaaagctggaagcattccccttgaaaatcagcatgacaagaatgtcctctatcaccactcctattcaacatagtattgtaagtcctggccagagcaatcagacaagagaaagaataaaaggcatccaaataggaagaaaggaagtcaaactatccctgtttgccaatgacatgattctatatctagaaaaccccatagtctaagcacaaaagctccttaagataacaaaaaaaaaaactttagcaaartttcatgatacaaaattaatgtgcagaaatcactagtattgttataaaccaacgacagccaagacgaaagtcaaatcaggaaggcagtctcattcacaattgctaaaaaaaggataaaatacccaggaatacagctaaccatggaggtgaaagatttctacaagtagaactacaaagcactgctcaaagaaatcagagatgatacaaacaaatggaaaaacattccatgctcatggat

SEQ ID NO: 869434 - DNA, 646 bp, Homo sapiens
ggctctcagcttggctgttgctrttgtataggaatgctagtgatttttagacattgattttgtatcctgagactttgctgaagttgttgatcagcttaagaagcttttgggcttggactatggtgttttctagatatagaatagtgtcatctgcaaacagtgatagtttgacttcctgtcttcctatttgatgccctctgtttctttcttttgcctgattgctctgtccaggacttccaatactatgttgaatatgagtggtgagagagggcatccttgtcttgtgctggttttcaagggaaatgcttccagcttttgcccatttggtaagatgttggctgtgggtttgtcataggtggctcttaatgttttgaggtatgttcctgcaatacccagtctattgagagtttttaatgtgaaacgatgttgaattttatcaaaaaccttttctgcatctactgagagacaatcatatggtttttgtttttagttctgtgtatgtgatgaatcatatttattgatttgtgtatgttgtaccaactttgcatccctggggtgaagtctacttgattatggtgaataaacttttttatgtgcttctggattcagcttgccagtattttgttgaggatttttgcactttata

SEQ ID NO: 869435 - DNA, 636 bp, Homo sapiens
atccttcgttcctggtagactgcgtagctcatttccatttaaatgcttttagaaatattaaactatggatttaagatttatctgctttttaaattaagtaatgctgctcttagccttccacaggacttgagggttataaaaaaaaaggaagaaaataattattttataccaatagtatgaaaaagagactgggaatgactatattaatagcagacaaaatagacttaaaaacttaaaagagacaataagacattatatagtcatagattgtccatttggcaggaagatagaaatagtttaaacccatacctaataataaaacattgagatatagaaagcataacttgacagaattaaargggcaaaaaggcagttctaaaataatagttgaagatgttaatactccactctgagtaatgaatagaaaaatgagatagatgataaattaggaaatagagttcttgaataactcaatgaaccaaattgatctaacagatatatacaatatactccatccaacaaaagagactacacactcttctcaaatgcacatggggatttccccacgatgggctgtgtagtagatctcaaattaaatcaataacagaagaaacgttagaaagtttacaaaactgt

SEQ ID NO: 869436 - DNA, 567 bp, Homo sapiens
  misc_feature 400: n = A,T,C or G
aaaatgataatagatgttgatggggttttagagggaaaaaaccacttatacactgttaataggaatgtaaattagttcagccactgtggagagcagcttggagattttccaaataactgagagttaaactgtgattcaacccagcaatttcaccgctgggtatatacccaaaagagaataaactattctaccaaaatagcacatgcacttgttggttcatcactacactattcataagaggaaggacctgaatcaacctacgtgcctattcatggtaattttttatttttttgagatgacgtctcactctgttgcccaggctggagtgcagtggcacgatctcaactcactacaatctccacytcccaggttcaagcaatcctccttcttcagccacccnagtagttgggactataggcgcatgccaccaagcctggctaacttttgtatttccagtacagacggggtttcattacgttgtccaggatggtctcgatctcctgacctcatgatccacccgccttggcctcccacagcactgggattacaggcatcagccaccatgtc

SEQ ID NO: 869437 - DNA, 654 bp, Homo sapiens
aatcctcaataaaatactggcaaaacaaatccagcagcacattaaaaagttcatccgcaacaatggagttggctttgtccccaggatgcaaggttgattcaacatatgcaaatcaataaatgtgactcatcacataaagagaactaaatacaaaaaccacatgattatctcaataaatgcagaaaaagcatccaataaaattcagcattctttcaggtttaaaattctcaataaactaggaagtgaagaaacatacctgaaaataataagagccatatacaacaaacccacagccaatatcatactgaatgtgcaaaagctrgaaacgttccacctgaaaactggcacaagaaaagaatgccctctttcaccactaccattcaatatagtatcagaagccttggccaggaaaatcaggccagaggaagaaataaagagtattctaatagaaagagaggaagtcaaattatctttgtttgcagatgacctgatcctacatctagaaaacctcattgtctcaggcccaaagcttcttaaggtgataagcaacagtagcaaaatctcaggatataaaatcaatgtgcaaaagtagctagcattcccatgcacaaacaacaggcaagcagggagacaaatcatgaatgaactttcatt

SEQ ID NO: 869438 - DNA, 654 bp, Homo sapiens
aatcctcaataaaatactggcaaaacaaatccagcagcacattaaaaagttcatccgcaacaatggagttggctttgtccccaggatgcaaggttgattcaacatatgcaaatcaataaatgtgactcatcacataaagagaactaaatacaaaaaccacatgattatctcaataaatgcagaaaaagcatccaataaaattcagcattctttcaggtttaaaattctcaataaactaggaagtgaagaaacatacctgaaaataataagagccatatacaacaaacccacagccaatatcatactgaatgtgcaaaagctagaaacgttccacctgaaaactggcacaagaaaagaatgccctctytcaccactaccattcaatatagtatcagaagccttggccaggaaaatcaggccagaggaagaaataaagagtattctaatagaaagagaggaagtcaaattatctttgtttgcagatgacctgatcctacatctagaaaacctcattgtctcaggcccaaagcttcttaaggtgataagcaacagtagcaaaatctcaggatataaaatcaatgtgcaaaagtagctagcattcccatgcacaaacaacaggcaagcagggagacaaatcatgaatgaactttcatt

SEQ ID NO: 869439 - DNA, 590 bp, Homo sapiens
atccatatgtcacaatacccctgagaaatgagcccaggcaaagagtgagaggcccacagatattttgcaatggctcctgtgggtagcgctctgtaaaaagacagtcacattacctagagtctgcccgcaacgatttgtaacaatccctgctataaacaggtagcagtcaggagaagtgagtcccatcacctgggtggtcagtgtagagatatgtcactatgccccctgtaggcaaagtctagacaagagttacatcacctgggtgttggacccagcaatatgtcacaatggctcrtgtgggcaaagcacaggacagagtcacataacaaagtgccaggaccagtgttaggtcaggatacccattatgggcagtgccaagacaggagaatagaagcatattaattagatgctggattcagagatatatcacaatctcatctgtgggctacacccaggcaaaaatgtcaaatcactcaggtgctggctagaggtgtatgtcagaatcacacctgcaggaaggtccatggatgagattaacaatcccacataagttccggttctgggtatgagagtgaacgcctcctgtacgt

SEQ ID NO: 869440 - DNA, 598 bp, Homo sapiens
attgagaaaatggttagatattattaagaaatttctatatatcctccagctgagaataggtattctgatgtggcccaaatattttctcaccgctaccttcagggtctcaactagcaaatcaggacacctgcagaggacagttgrccgttttcaaatagaaagagaaataccccgttcatgagagtaatccagtgattttcaaaaagacaagacacactgacatccagcgcagtcagggcacaattaccttggaaaaatcacctcacacagaatggttgaggagactttctaaggtgagcaaatttgggcaacataatcctttcttatttatttccagcccccgctgcccccctgattcctaatggccactccacagtgtggtcagcagtggggtgcagtgttgtgagagaggggctcaaggacgggatgaaggtctttaccgcgttaccaaaatgcaggttaaaaagttgctaaaaacatgtctaaatattctaattcctactgttacatagctgctaagatgcattatacaacagacccaggtaagggaaagagcatgtgcatttcaagtctcagctcacgtcttaattagctgtga

SEQ ID NO: 869441 - DNA, 682 bp, Homo sapiens
aaatttttactagagtctgaatgatcaaataactaggtcaattgccactcttgattatattattgaattatggattctctcttggtatagtttggttctaaagaacatgttattttctgtaacatgtatgtaggcatgttattctttgtaacatatgtaatatatgtagacgtgttattctctgtaacatgaatgcagacatgttacacaggtttccactaatgtgtaatgttcacatgcagcatactcggtcatgtattatattaatccctgtgacatttcaacaactactatgcatctcctatatactagttgtagttctaggtactaaaaatatagtggtgggagaggaaagacaaaacataagtcctaataaacaaataagacaatcgtgagatcttgataagtgctatgctgatgggacaataactgacccatccaggaaattctccccatttgagtctaaggtggatgacctgaaagggccagtcaagcaaacatcagagtggtgagctctgtagggagaggaaacaactactgmaaatgctgtactgcagggatgagtttggtattcagagaaaccaaagaggatcatcacatctggaacatcaagggtaagagagagaatgaaaaagataaaaagagagtcagccagtaggaatgtacaatagtatacctgcta

SEQ ID NO: 869442 - DNA, 587 bp, Homo sapiens
cagagagcatacacatcacttgagaggaatgatttttacagcttccagggcatcagagtaattccagttgcttactgtgtaacccagggccacagctgggcaggatctgccccactcagtgactcccagcctaggagagacctgggagctgaaatctaggctgatcctcagatcgccaagtcctggaggggagctgattaaggaagggaggcctttttctaattgttaaagggtactgataacttccctaaggcacacacccacagggcaaaggctcctgagagagcacttttttttttctttctttctttttttgagacagggtcttgctctgtcacccaggctggagtgcagtggcgtgaacgtggctcactgcagcctccacctcttgagctcaaatgattctccygcctcacctccccctgtagctgggaccacaggtgtgcgtcaccatgcccagctattttttgtgtttatttgtagagacgggatttcagccatgttgcccaggctggtcttgaacatttgaagaggaaggatgaccaaaattagtttgtagagctaataggctttagttttatattatt

SEQ ID NO: 869443 - DNA, 625 bp, Homo sapiens
ctcagtatatatttatttttatttttattttttttattttactttaagttccgggatacatgtgcagaatgtgcagatttataacgtaggtatacatgtgccatggtggtttgctgcacctgtcaactcatcatctaggttttaagctccacatgcattagatatttgtcctaatgctctccctccccttgcctggcaccccctgagaggccccagtgtgggttgttcccctccctgtgtccatgtgttctcattgttcaacttccatatatgagggagaacaagcagtgtttgrttttctgttccagtgttagtttgctgagaatgatggcttccagctttatccatgtccctgcaaagacgtgaactcattcttttttatggctgcatagtattccatggtatatatgtgccacattttatttaaccagtttatcattgatggacatttgggttagttacaaatctttgctattgcaaatagtgctgcagtaaacatatgtgtgcatgtgtctttatattagaatgatttgtaatcctctgggtatatacccagtaatgggattgctgggtcaaatgatatttctggttctagatgcttgaggaatgccacactgtcttccac

SEQ ID NO: 869444 - DNA, 704 bp, Homo sapiens
tataatggacaggatttggctagatgacttctgagaatccttctaatgtaatatgttcggactttgtgaattaagccccaaagcataccttatacttaaaagcacttatccatcactaaaaattataaactgcattctagtgaacaactctggtaatgttgatccacatatatggacatttcctagatataaagttgaactttttagccagaagatttatatattggtacatctcttccttccttttctttccttcttttcttcctttttgctttctttccttcctttcttctgccatccaaccatctatacatcctttagttgctctcaaaagcaactcattatgcttgtttttaaaaactgctggaaatatttgcaactactaacattttattagaaaagacacaattatcaaaagttttcacagaaatatgattcacatgtttaagaaaaaatagatacaaaatttgtttttsctttaggatgagcattttcccagattagaattagatttgttaagtatatctaatatctttaattttaaatattctgccatcttatctgggctgggagggtttatttatatgtttcaactcagtggaaacaggtgaaatataagaatacctttcaaaattatttcaatattgactaatgtttcagcaatttgaggagatgataaggattatcaaggccttacccactga

SEQ ID NO: 869445 - DNA, 625 bp, Homo sapiens
taccttgtctttttaagcttcaatttctttgtctccaaataggtataacaacaagagttgtataaagagttgaattagatgagacatatagaacatttggcacacaattagtgcataatgtgcattagccattgttcctattctgctaaattttgggccactctccagtcttttctgtgcatctacctctgtatttgtaaagtgaggatattaatctgtattgtatggaagttgaaggcactcaaaaatagcctcaggtgccttttatttattattattattattattattattatttttagacagagtcctgttctgtcgcccaggctggagtgcagtggcacgatcttggctcactgcaacctctgactcgyggtttcaagcgattctcctgcctcagcctcctgagtagctgggactacaggcacccatcaccatgcccagctaatttttgtatttttagtagagatggggtttcaccatgttggccaggatggtcttgatctcctgacctcgtgatccacccacctcatcctcccaaaattctgggattacaggtgtgagccaccatgcctggccttattattatttttaaacttatttttggttcaggtttgttatccag

SEQ ID NO: 869446 - DNA, 577 bp, Homo sapiens
agaatagtattaactctataaattttgggggttagcatggctattttaacaatatgaattcttcctatctgtaagcatgaaatgtttttccatttgtttatgtcatatctgatttatctgagtttatagttctccttgtagaaatgttcacttcccttgttagatgcattcctaggtattttattcttttgtggcaattgtgaatgggagttcatttaygattttactctcagcttgactgttgttggtgtataagaatcctagtgatttttgcacatggattttgtatcttgagactttgctaaagatgtttatcagcttaagaagctttggggctgagacgataggattttctggatataggatcatgttatgtaacatcaggtgtagtttaacttcctctctttcaatttgaatgccttttatttctttctcttgcctgattgctctggccagtaacttccaatactatctcaaatagaagtggtggaagagggcatccttatcttataggggtttcaaaggggaatgctttcagcttttgccctttcagtatgatgttggctgtgggtttgtc

SEQ ID NO: 869447 - DNA, 627 bp, Homo sapiens
taacacctcacacctgtctgaatgagtattatcaaaaagatgaatgataagtgttgatgagaatgaggagaaaaggaatcccttgtacactgctggtgaaaacataaattagtacaggcactttggagaatagcatgaaggctcctcaaaaaaactagaattaccatattcagcaattttcagctagtttacagcaatttcacktctgttatatccaaaggaattgaaatcaggatgtcagagagatatttgaactcccatgttcatttcagcattattcacagtaggcaagatactaagtgtccatcaacaaatatatggatttaaaaatgtggggggtgtgtgtgtgtgtgtgtgtgtatatatatatacactatatatatatagtatgtatgtatagtgtatatatatatacactatatatagtatgtatgtatagtgtatatatataaaatatgttatatatattatatataatatatacacacacgtacacacacaaaataggatactatacagccttaaaaaaaagaagaaaattctgtcatttgcaacatcagtggatactgcatgattatatgtggaatctaaataagtcaatctcatagaaacagagaataggaaggt

SEQ ID NO: 869448 - DNA, 627 bp, Homo sapiens
taacacctcacacctgtctgaatgagtattatcaaaaagatgaatgataagtgttgatgagaatgaggagaaaaggaatcccttgtacactgctggtgaaaacataaattagtacaggcactttggagaatagcatgaaggctcctcaaaaaaactagaattaccatattcagcaattttcagctagtttacagcaatttcacgtctgttatatccaaaggaattgaaatcaggatgtcagagagatatttgaactcccatgttcatttcagcattattcacagtaggcaagatactaagtgtccatcaacaaatatatggatttaaaaatgtggggggtgtgtgtgtgtgtgtgtgtrtatatatatatacactatatatatatagtatgtatgtatagtgtatatatatatacactatatatagtatgtatgtatagtgtatatatataaaatatgttatatatattatatataatatatacacacacgtacacacacaaaataggatactatacagccttaaaaaaaagaagaaaattctgtcatttgcaacatcagtggatactgcatgattatatgtggaatctaaataagtcaatctcatagaaacagagaataggaaggt

SEQ ID NO: 869449 - DNA, 607 bp, Homo sapiens
aaaattgtgatgttggtcgttgaatggtgtacatttgtgaaacacaagcttagacaaatgcatgaatggctgttggtcaaatatattctggctcttgcatgcaaaatagcttcacaagacccaaaggtgaacgtgtgacacagcttaggaatayatataagtggtttaggctatatagcacaaatgaatgactctaatcagaacacattcacatcctagaatctgtgaattgtattttgaatatatattttatattattattattcccttgatttattattaatgctgttataacagtttaataccttgaatattggctgcattttcttttattttgaatgcttatttactataacatttatgcaaattcagttcatggaagtttattcttgaatgctatcagttcctaatgtacgaatatctgtttagtctgatgacacctggagtcccacatcttcccacctacttcagtgttggtgcataatttgggggaaaagtagtaagtttagagaaactccaaattcaagagtgagggaaagaaaggacaagtaaacatcaagaacagctcagaagaactgaccatagaggtcattagaggtaacacttg

SEQ ID NO: 869450 - DNA, 694 bp, Homo sapiens
gcataagagggtgccaattgtcatcactatgacaatgcacttggctgccagaaacacctaaagttttcagggtttttttttatattaacatcataaaatgaaaacttcatgttttcaactcccaaaagtccatcattctttccacctaaacttgatttataaattttgttttgttaatcccttatgtttaataaaactggatactggattcagaaatttactgtgatcctgagaaggaactgcatcttataaaaagaagcaactctgtcactgattaactgggcacttctaaccaagtcataaatatctctgggcttattccttcatatggctaaaacaaacaaaaacagacaaacaaacacaaatgcaaatgtttgactaacrgatctctgctccttctctcttgatagatggatcaaaatggtagactgaagatttaaatctaccttcccacttgacaaaaacattgaaaatggtagaaaagttagttaatacatttcaatccaaggagttctagtaataatgaaagttaaatttgggatgccagaagaagttaggagatcttggaagatagcagctaatatttgtggaggacttacagttgcttaatctaattactctagcacagcaattctatgaggcaatagctgttatccttattttacaggtgaaaaattggaagccctgggtttga

SEQ ID NO: 869451 - DNA, 501 bp, Homo sapiens
ttgctgagacgggaagcacaaggggaaaggtgaagggtgaggattaatggctgtcagcaggctagcatcaaaagaatcaagtcaggttctctattatagggacaaaactgcctggcagtggaatattcaagtggggagggtggtgatggaaatggctcactccaatgggaggaataattttatcattgatattrtttaaaattgctggtgcatggtgataataaaaagttgataattacatatcaacttgtaattaggctttattattttttaaaatgtctaccgacaaagcatcctattagtatctggagctacaaaatacagctcccatggcaccctccccaacccaccttggtatacttcatgcagctagagaaacatagaatctctgtttcttgcatactagtaaaacacttttctattataaagaaggcctgacactcagaataggttcctgatcttacaagcctattccccatggaaaaatatagggtgggattt

SEQ ID NO: 869452 - DNA, 598 bp, Homo sapiens
gtttgatagaggaagagacactgggtcccactcaaaaataaagtatctcaactttttcactgaatttacattcccaaagaatagattgtaaaataagtaagaatcccagacttttcggtacttgaaggtcactatgaggtcacctggmatagtgatctactgcaagaacagcctgactggtcttcactgatgctacattctattttgtactctgtctcaagctagctgaacttgagagacttctaagtctatccaaggacatttgaaacatttgtgataaatgcagagtatttatctctgttaacaatgaagaaaagtcaccttccagaagaattgctgtgaaagcccacatcgtgtgcactattttttaaaaagtaacatagaaaagctgtttaacataccaggaaagtcaaggagaactttaaaaaaattataaccataatacctaatttcatcaaaatgatgtaagcaacaaagatctaatttatattgagataaactatataggctcagactattcaggcaaggaaccagtaaatgcttatttcatactgaaatttacaggacatgaatgacttagcaatatatattgaccctg

SEQ ID NO: 869453 - DNA, 598 bp, Homo sapiens
gtttgatagaggaagagacactgggtcccactcaaaaataaagtatctcaactttttcactgaatttacattcccaaagaatagattgtaaaataagtaagaatcccagacttttcggtacttgaaggtcactatgaggtcacctggcatagtgatctaytgcaagaacagcctgactggtcttcactgatgctacattctattttgtactctgtctcaagctagctgaacttgagagacttctaagtctatccaaggacatttgaaacatttgtgataaatgcagagtatttatctctgttaacaatgaagaaaagtcaccttccagaagaattgctgtgaaagcccacatcgtgtgcactattttttaaaaagtaacatagaaaagctgtttaacataccaggaaagtcaaggagaactttaaaaaaattataaccataatacctaatttcatcaaaatgatgtaagcaacaaagatctaatttatattgagataaactatataggctcagactattcaggcaaggaaccagtaaatgcttatttcatactgaaatttacaggacatgaatgacttagcaatatatattgaccctg

SEQ ID NO: 869454 - DNA, 647 bp, Homo sapiens
ctctgatgctagtttcttttgctgtgcagaagctgtttagtttaattagatcccatttgtcaattttggcttttgttgcaattgcttttgatgttttttgtcatgaagtctttgcctatgcctatgtcctgaatggtattgcctaggttttcttctagggtttttatggtttggggtttttacatttaagtctttattccatcttgagttaacttttgtataaggtgtaaggaagggatccagtttcagtttttggcatatggctagccagttttcccagcaccatctattgaataggagatcctttccctattgcttgtttttgtcaggtttgttgaagatcacatgttgtagatgtgtggttttctgaggtctctattttgttccattgttctatatgtctattttggtaacagtacyatgctgttttgcttactgtagccttgtagtatagtttgatgtcaggtagcatgatgcctccagctttgttctttttgcttagaattgtcttggatatacaggttcttctttgacttcatatgaaatttgaagtgttttttttctaattctgtgaagaatgtcaatggtagtttgataggaatagcattgaatctataaattactttgggcagtatggccattttcat

SEQ ID NO: 869455 - DNA, 612 bp, Homo sapiens
cattgttcaattcccacctatgagtgagaatatgcggtgtttggttttttgttcttatgatagtttactgagaatgatgatttccaatttcatccatgtccctacaaaggacatgaactcatcaattcttacttgagataattttcaaaagtttttactttccagtcaatgaactttctttgtttagcttgtatttgaattgactgttcttaagtcaatttttatgtgacartgttgctacataggacactcttagtcatatagctatagctgtgagttggtttaaatatcccatataaaaagttataaaaacaaatagtaaagctgttattatgaatttacctataggaaaactgaaattttattaaaagtttcatatcagcattttgtgattttgtaacaacaccgtgaacgaaaacccagtaagtaggagggaaagtgttctgtatttatagttaggattgtatctgttagattcaaaatgatgagttagattttaaacttattttggagcccaactattcttgagtttccaaatgaataaagatatttatataataaaaattcagtttattgttgaaaaatgaattaagatgacagtaaataacctca

SEQ ID NO: 869456 - DNA, 716 bp, Homo sapiens
cgtattgaaagtcctagctaatgcaaaaagacaataaaataaaatgtaaatagatgggaaagggagaactcaacagtccttgtatctcttgtaattaattaatatgtgttaatttatggaaatgaaatgaatactgccatttaacagaatcacttttcttttcccaaccagccagaatttatacatatttgctagagaaatccagacttgtttcacaacctcttggccagagcaattttctcattttctacttgttgatggatgggttatctgctgaagaaaaatatggacttcatcttaataatttatgtgcacaccggtgagtgactaagtattttgtatctaaaagctatgccttcaaattgtgattgcaatttggtagtcttaaattatcttcttacttttcagagacaaaatggtgagtaaaagataactgttggawactgttaggttgaaaccatccacataacaaggttcccactgtttcttgaatgggtgaagttgtatgtgtgtgaacaaacttatattttactagttttcagatcagaaaaaacttgtgcagatataaactcctatactccttttaagtattttggctataacatgagttatgcactcctaatccatggccctgttttgagataatgggcaatgttatttgagtaagtatgattattcattggtgttggatgaaggtacatcatggattaagatgc

SEQ ID NO: 869457 - DNA, 619 bp, Homo sapiens
aaacagatgtccaggcatggcagttgacaatcttaggaacggaggcaatgaatgcacttctggtctagactcagcactggtcatctcagcacagtgcatgaggactctctcaggcaacttttaccacattggtcatgcaaagtcgaccagcaacctagtaccttattcatggcctgttggcaatatgagacacagtgctgggcccataatagatcctcagtaaagatttgctacttgaataaaaatacttttatcacatgcaaaacgcaaagagttataatgcagtgaaaggtttcaactaaagcagatatgccaataatctaggcagcaagaagataaaactagataaaaccagatgcaagaatagagcagagaacagtaaaccagaaacccatgctataactgagcaaatgaaagtygtcatcagtactatagtatattgctgttattttatgtttcttgaatttggaatagatttatgaaaaaaatctgtgggaaaaacaatttgttaggtgggacagaaatttaatctcccaaagtaagaaagctgagcactcacctactttttacatgtatataatttaatctgaggcaaataatgataaaatctttacataaa

SEQ ID NO: 869458 - DNA, 597 bp, Homo sapiens
tatagattgtgagctacctccttctccataaaggtatttacatttataaggtctttataagagtgaaattactgtgaatgtctctaaaaatgccattagtctctctaaaatgttcacatttctaacgctttttcccctaaacacagatacaatatatttacagcaaatttcttcagagagagttataaatcttccatgcatataaaytgatattcaaataaacctgtttctaaaatataatttccgaagtgcatactaaatgacatctttttgagagaacaattttttagaataattctagatgtcatatactatttttcttggtgaaataattgagatgcaatttactgaaaatcttctattatcataaatctccagttgttttttcagtctgagtaaaagaagagtatcttggttttgatgccttatattctgaaacaaaagcctcatctacactcaatatttccagttttgcacctgattctgtgttggttgcctttgtctttcggtcactgtgctggacaatgggctagcacagtggagaactcaaagtctgtcattctgaagcgtgcattccagtggagacactacttgagt

SEQ ID NO: 869459 - DNA, 664 bp, Homo sapiens
gttgcaagaagatgcaaaatattttttttcctctaaggagaagctgatcacttaccttctggcttcttcttaatatattcacatatattaattagcatcaattttgaaaatcaaagtaaatatttatttactatgtggatgatgggaatatgaaaaccacaaaggctcaccattactctggccaatattcttatagtcaataaacatatttccttgagaaaactacaatggttacccctattcaaggaggaactatagaattttgagatataatggaagttgtagagtagtatttcattgagtaaagakctcttcaaggggcaataataagagaagcttataacatacaaaataatgatgatgtagcaactgagaaaactcctttaatactctgatatttcttccccccttcctccctgctgctcttctcatttcttcatttttcatgcatcattcttacattctccttctgcatctgccttcttttctcttcctctgtggttctgcatgatgtttctattttccctctttatatggcttacgtatgttttggatgtctcttctttctgttcacatcacgtgtatttgattttcaaagccaaatccaaatagtagtatcctttttcttctaaattgaaatagtgcttacatgtcctgaccattt

SEQ ID NO: 869460 - DNA, 586 bp, Homo sapiens
aagacaggctaacattcaaattcacgaaatccaaagaaccccagtaagatactccatgagaagatcaaccccaagagacataatcttcagattctccaaggtcgaaatgaaagaaaaggtattacaggcagccagagagaaagaacaggtcacctataaagggaagctcatcagactaacagcggacctctcagcagaaaccctatgagccagaagagaatgggggccaatattcaacattctttaaaaaaaaaatgtccaaatcagaattcatatccagccaacctaagatgcataaatgaagaaaaaaataagatcctttwcaggcaagcaaatactgagggaacttgtcaccatcaagcctgccttgtaagagctcctgaaggaagcacaaaatatggaaaggaaaaaccattaccagccactaaaaaacacactgaagcacacagaccactgacactatgaagcaaccacataaacaagtctgcaaaataaccagctagcatcatgatgacaagatcaaactcacacataacaatattaaccttaaatgggctgaatgctccaatttaaagacactgaatgg

SEQ ID NO: 869461 - DNA, 374 bp, Homo sapiens
agtctctagggagttccaaaccttcccacattttcctgtcttcttctaagccctccaaactgttccaacttctgctggttacccagttccaacgttccttccacattttcaggtatctttatagcagcactctactgtctgcagtagcaatttactstatcagtctgttttcacactgctataaagaactgtctgagactgagtaatttacaaaggaaagagttttaattggctcacagttcggcatggctggggaggcctctggaaactcacaatcatgtcagaaggtgaaggggaagcaaagcactttcttcacaaggcatcaggaaggaagaagggggaagaaccctttataaaaccatcagatcttgtga

SEQ ID NO: 869462 - DNA, 681 bp, Homo sapiens
gaatacggatttccaataactaaatagtgccaaacagtaaaacagaataattaggaggcatagtatttagagtcaggaacagatatgagagatatgagaggaggtaacagcaaaaacagcctgaccaaggagaaataaatgaatcaaaatgcaaggtttgaggacataactcgatgaagaattaacaaaggtcctcatagcataaaagttgtccacgcaatacayacctacattgtgacgttagttacctttgataaatgttcacaaaaaatatcccaacacttgccactcaagtccaaaccaacctgatttcaatcttttccaaactatctctatagtccatgcaatataatggtacaatgtttcttgcacaccaatactgctgaaatatgttagtgagtagtggcatttaacctcaaaatagatttgaatgacataatcatgaagtttttactttcaaccatatcattgattccagtactctttttcaggtattatatttccgagttcattcttgctgacccagtgtaattcttttttttcctttttttttttttttttttttgtaatttcaacacttattttagattcagtgggtacatgtgtgggtttattacatggaaatattgcataatgctgaggtttggggtctggataccaccaccgaagtagtgagaatag

SEQ ID NO: 869463 - DNA, 681 bp, Homo sapiens
gaatacggatttccaataactaaatagtgccaaacagtaaaacagaataattaggaggcatagtatttagagtcaggaacagatatgagagatatgagaggaggtaacagcaaaaacagcctgaccaaggagaaataaatgaatcaaaatgcaaggtttgaggacataactcgatgaagaattaacaaaggtcctcatagcataaaagttgtccacgcaatacatacctacattgtgacgttagttacctttgataaatgttcacaaaaaatatcccaacacttgccactcaagtccaaaccaacctgatttcaatcttttccaaactatctctatagtccatgcaatataatggtacaatgtttcttgcacaccaatactgctgaaatatgttagtgagtagtggcatttaacctcaaaatagatttgaatgacataatcatgaagtttttactttcaaccatatcattgattccagtactctttttcaggtattatatttccgagttcattcttgctgacccagwgtaattcttttttttcctttttttttttttttttttttgtaatttcaacacttattttagattcagtgggtacatgtgtgggtttattacatggaaatattgcataatgctgaggtttggggtctggataccaccaccgaagtagtgagaatag

SEQ ID NO: 869464 - DNA, 659 bp, Homo sapiens
gaatgatacgtttaaccttcatagatgagggctcagacctgtgggtgcctttaattactgaattaaggccaaaggtaattttataggcagagccttcctgaaaatgattcagctgtgtccatctggagagttgtgtattttaaagtttttccatgtttgagaktaatgctctgacatgggagattgcatgtgacagggcagtgcaaatcctgatctctttctgccccaaccttcaaactcaaatttaaaaaaaaaaaaaaaaaaaaggccaggcgtggtgactcccgcctgtaatcccagtactttgggaggccgaggcgggcggatcacgaggtcaggagatggagaccatcctggctaacacagtgaaacccgtctctactaaaaatacaaaatattagccgggcgtggtggcatgtgcccgtaatcctagctactcgggagactgaggcaggagaatcgcttaaacccgggaggcggaggttgcagtgagccgagatcccgccactgaactacagcctgggtgacagagcaagactccattctcaaaaaaaaaaaaaaaaaagttacaatgttcaggattatgaaatgctatacagtcagttaaaaaggtatttctttagtaacaaatgacttaatctttgttctgttgacaagaa

SEQ ID NO: 869465 - DNA, 659 bp, Homo sapiens
gaatgatacgtttaaccttcatagatgagggctcagacctgtgggtgcctttaattactgaattaaggccaaaggtaattttataggcagagccttcctgaaaatgattcagctgtgtccatctggagagttgtgtattttaaagtttttccatgtttgagagtaatgctctgacatgggagattgcatgtgacagggcagtgcaaatcctgatctctttctgccccaaccttcaaactcaaatttaaaaaaaaaaaaaaaaaaaaggccaggcgtggtgactcccgcctgtaatcycagtactttgggaggccgaggcgggcggatcacgaggtcaggagatggagaccatcctggctaacacagtgaaacccgtctctactaaaaatacaaaatattagccgggcgtggtggcatgtgcccgtaatcctagctactcgggagactgaggcaggagaatcgcttaaacccgggaggcggaggttgcagtgagccgagatcccgccactgaactacagcctgggtgacagagcaagactccattctcaaaaaaaaaaaaaaaaaagttacaatgttcaggattatgaaatgctatacagtcagttaaaaaggtatttctttagtaacaaatgacttaatctttgttctgttgacaagaa

SEQ ID NO: 869466 - DNA, 375 bp, Homo sapiens
ggaagaattcttactggataagagactaaggctctacttcatgagacagagaaagagaaagagagagagagagagaaaaaaaaaactccccatgagacaattattaacatgatttggatatttgtcctttccaaatttcatgttgaaatgtaatcccaggccaagcatggtggcttatgcctgtaatcccaatattttgtgaggctaaggtaggtgtaytgcttgagctcaggagtttgagaccaacctgggcaacatggcaaaaccccatctctaccaaaaacagaacaaattagctgggtgtggtggcacacacctgtggttccagctattcaagaggctgaggtgggaagagcacttgagacttgagcctgg

SEQ ID NO: 869467 - DNA, 594 bp, Homo sapiens
acatacataaatgaaatgatgacacttttctatttatctttggcctttgagcccttaccaaaattgatatcccaaacattgagataaagtattattatcttgggtttctaatatatctaattcttctgtttcagttaacctaccccaagctttaaaaaaatgtaattatctttattctaagggttgttctacctgggtgcctcaagtctttcttcaaagattcacttctgtactgtsataaagccaaatcttattctattactccttgcatttttccaaaaatgttcctttttttatatactttgaaggcacccctaaatcttttgtactttcattctgtcagtcttcagacagtgtattcatgtcagtgatcggaagatatgccctaggagtctcaattaattgctattaaatctgaagctgctttgtcagaattgtgtagggttataaagagctggttcataacagtgttttttttttaattacaaaggataaatacttcttaaccccttttccatttagaaaaaaaaaagtgcagcttgctttcagtgctcacttaattttacattagcacactctgaggttgaagcaaat

SEQ ID NO: 869468 - DNA, 647 bp, Homo sapiens
cagcaaagtagattcaaaaataagagtttgcataagtagtatataaaacaatgaggattctacatcatgtcatttctttttattaatttattaattatatgttttgtttttatgagaatgttttaatgagaactctggacatggtagaaacagaggctacttttttgagtagcagtgacttgatcaattagtttgtgatattgacaaagaaataagatgacattattaaatatacgttggccaatgaaagtgtagtcataatatagaaattgggggagcaaggctttaaccatacaatttataggagcaccttgatagcattgatcttttatacttatactgaattaatattattctmgtctcagacaataagccagagtgctcaaagtttctcagaacagtttagaagcatgctttagttaacctgcattggccattggttatggttatcagcaaatggacagagaatgactaagtcatagattacctttcaaagagtcaaatctgcgagttccaccctaaatcagcaccaagggatgccagaacaaaagcattaatatcgatactttgtgcccacaaacatcaagtattcattgacgatacacactgcatgccaataacctctacaagtatttactgatttaatg

SEQ ID NO: 869469 - DNA, 480 bp, Homo sapiens
gaactcacctgctataaccagaacagcaagaaagaaatccatccccatgatctgatcacctcccactaggtccctcctcaacactggggattacaattcaacatgaaatgtgggggggacacagagccaaaccatgtcaggaggcatagatgaataattagcagacaggaagtgtgtacaatgtccttcagcacacaagccatgacacagtaggatggcttgtccatacttctccatccgtaacttctargtgtcccttggtgacttccctgcattcacctgctccttgcttgaaggaagtaccccaggctcacggacagaagtgcatcacactcagggagggtccagcagaccactgagagcaacggtgctgagcagccactcattctttcattgaacagatttcactgagtcctgtatgggttgggatgagcaagactctgctgtcaaaactaagcccttacaaaccttcaggggttt

SEQ ID NO: 869470 - DNA, 598 bp, Homo sapiens
gctaccacacctggctaagtttttgtatttttagtagagacagggtttcactatgttgaccaggctggtcttgaactcctgacctcatgatccacctgccttggcctcccaaattgctgggattacaggtgtgagccactgtgcctggcctatgatttttatttcagtaattgtatttaaaaatttttttcctcccatctctttctgtttcattgctgagacttgtgattttttttaatagtcatgtgccacacaacaatgtttctgtcaatgatggatagcatatacaatggtagtctcataagaccatataccatagctttactgtactcgttctgtgtttagatatgtttagatacacagatacttaccgttgtgttacatgtgcctacaatattcagtatagcagcctgctgtgcaggtttktagtgcaggagcaatggactcggtttgtgtaagtgcactctatgatgttcttctgacaacacatttctcagaacatgttcctgtcagtaagcaatgcatggctgtacttcaagcacgctcataattgttctctgaagcatttctcttgatgtttttaagcccttgtaaacca

SEQ ID NO: 869471 - DNA, 636 bp, Homo sapiens
ggatatttagactgctattctaattgtggaagaaaaaaggatacattttaaaaataattcatttttctcagttatacacgcaaagtaacttatatattttgtatgtatgtcaataaatgaattcttaattcctaacacacctaatatcagaaatccaagtaataatttacaacacaagaatgtccatcctcctgccatgttttgtgaaatgcttaaaaaataaaaatatatgttgtatagatagatgactcacraagaaatcctgagttaattctttaataaagaaaatatgaatcagagttttaaaattaatatttattttaaatttaataattgaaattaatcatcactgtcatgatattttgggtattattatttggttaaagtaattaaatgaggaagagacagaatcaaatcatgacttcctaaagtataaaagttgattactgaaatctaatatatattaaatataatttcaagttcttatcacccattaccactagaatattcattatgtttgaataaagacagcatttgcattaatgaaaatgtcagtgaaatttctgataaaaccctctcctgaaaataccaagggtacaattgcaaaataatatatgtataataccaatgcaagtt

SEQ ID NO: 869472 - DNA, 654 bp, Homo sapiens
ccaatggaatccagatgtttatataactttcttcataggggagggagcaaatgggaaatgtaggtaattctttcttatttttttctgaatctaatttgaaaagccatgttatttcttttgaggatcaataaattattattagggagaatgagtggatcaaaagttaatctgtaaatgattctctttggaatgtgaatgaccctgagagacagatatctgatgaaaaggtccatcctggtgtggttacattcctcagccttcatctctgtcatagacattgagatttcagggaggggatgggaagcaattgttctccttggtgggtccagtttttatgtagctaagaaaaaacccattcctgcatctgctgatctctaagagccttaattcaaaatactcatcatactgctgcaaygtattttggtgtgaaattattctggtttcctccaccaccattccaaaagggctccagtgtaattcagtacagtgtattacagctgagagatttgaagacacaaattctttctaaagaggagacaaaaataaggacaataggaatttgaagcaaggcccttggccccctaaaggcttgctgaaaaccatcattgacatgaggcagattgattaatgggagaaaaggcatacagatttatt

SEQ ID NO: 869473 - DNA, 609 bp, Homo sapiens
cctgaggtaaacattattttattctattttttaaatttagacacttcatattgagcacttcttagatgcttggcactttatatgtcttgtgtcattcagtcttggccacaatattacaaagctgacttttcatttaattgggggaatatatcatatataaaaatgaataaatgttatctggagagtattaaaaaaaataatgaaatgtgcagcaattacccaggataagaaacagaacattaccagtaccttaaagacctctgtgtacctctctcaaattatagtgccctctcctccctgcaagagaaacrgcatctgaattttgtattaatcatacccctgcttttctttacagtttactaagtatgcctgtatctcttagaatttagtacttagtttggctagtttttgttcttaatataaatgaaagcatactgcctgagttttagtagtttatttctgttgatcatcattcatccatgtttttgagagtcatccatgttgatacatgttgtagtcatttgtaccttttttctgctgtgtaatattccattatataaatataccaaatttacctattctacttttcatggacatttgaagagttac

SEQ ID NO: 869474 - DNA, 609 bp, Homo sapiens
cctgaggtaaacattattttattctattttttaaatttagacacttcatattgagcacttcttagatgcttggcactttatatgtcttgtgtcattcagtcttggccacaatattacaaagctgacttttcatttaattgggggaatatatcatatataaaaatgaataaatgttatctggagagtattaaaaaaaataatgaaatgtgcagcaattacccaggataagaaacagaacattaccagtaccttaaagacctctgtgtacctctctcaaattatagtgccctctcctccctgcaagagaaacggcatctgaattttgtattaatcatacccctgcttttctttacagtttactaagtatgcctgtatctcttagaatttagtacttagtttggctagtttttgttcttaatataaatgaaascatactgcctgagttttagtagtttatttctgttgatcatcattcatccatgtttttgagagtcatccatgttgatacatgttgtagtcatttgtaccttttttctgctgtgtaatattccattatataaatataccaaatttacctattctacttttcatggacatttgaagagttac

SEQ ID NO: 869475 - DNA, 605 bp, Homo sapiens
cctaggcatttgataataagcaaatgtttccattttgtcagtctcacttgcttcactttcaaagtagaactaataatatctatctcaagtgattttatgaactttgaatgctattatataacagatataaaagtgctggcacttcaaaagactcaataaacatgaaccctttttctgcccttttcacttagtaaaccctcctttgcctctctctatatattattgacaatktttagttgctaccttagtttttgtgatgtgtagataaagctttaataactagttccttttatcaggccattgtgaatgtaaatttgaatcaatcaaaaggcattattttagtactttgtacacaactacaagtacatagtcattctgtatcatgtcatccataaaatccccaaagtctcaaagttgagaaaaaacaaaacatctgagtggaacaaaaaatggcaatgccttcactaatctcgggatttcatttgtaatacttaaattctaaacaatgactgacggtactggggagaagtgaaatgtcaataactcctgtagttcatcaaaagtcttgttgctatgtaaagcagagggagaatgaaacttatcat

SEQ ID NO: 869476 - DNA, 589 bp, Homo sapiens
atcctaatagcaatgtaacatgtgtacatatgtacatgcattagatacatattatgttgatatatataagtatatgaattatatatagatcatattgtagtacattaaatatagttatatatctcctttcctaccattttatactttggacatatatatttgatacaatatattatatgttaatattaaatatatattatagattacactaatatataaatatattatgtttatattttagaatgcatacatatataattaatataattaaatagmtaacattatatattgtatttaatatattgttatattcatataattcccatattaatataaggatatattaatgttaaatatagaagtaatatttatattatatatgtctgtaaatacaaaagataacaggaaagaagaaacagggtaacaaaaaagacatgagacattaaaaccaactagaaatatggcagatgtaaatcctatgagatcaataattaagttacatataaatggattaattctccctacaatgaaaaggcagtgattgtcagactagataaaaaagcatgattcaactataagctctctgtaa

SEQ ID NO: 869477 - DNA, 600 bp, Homo sapiens
aaccacccagttgacacacagacttgtgaataataaaatggttagcatattaagccactgaattttaggaaggtgattcataaagccatatagaaataaatatgtcaatgactccaaattctccctaagtgagatagtcttctaagcttccaacttaaatatccaaccatagccctgaaatttccactatgacatgcacctcaaactgagcatgtctttatatcctccactaaacctgaatcataaataattaagcccatctcagtaaatgagaccacctagttgttaaacttaaaacctcaggatattttatttccttccatcccctggacactgtcgattttattttcaaaatatttsttaagtctttccagtttttttcagtatccatggctcttagtgtactcatctgtctcttattttactagaagatattctaggatggtctctttgcttccattcttgaaaacttccatgtcattcgccatgtgaccaccagaatgatttttaatatagtaatttttttaaaaactgagcttcctttaagtgagcagccagattaatattttttcttcataaattatattgaatctgaatatt

SEQ ID NO: 869478 - DNA, 673 bp, Homo sapiens
cacatgatagttttgatagtaaattctgatgggaataaaaacaaaagaaatggtattactctagctaacatgacatgtattattcaatttaatttaatagtataacaatcctgagaactaagaatcactattctactctcataggtgatgaaatggatgctactaaattctaaataatttaccctaggcttcagaactggtaaraggcagaagtagaattcagacacagatagaaccgaaggtttgtctttttcatatgacatcagaagtgtctcctggttatctatggaacccaatatcacgtttgaacttcccaaccatcaatatactttttaattttctataaactctgtttagaattctctgtatttctttatgacaaccaggaaaacttgcttataccatttgagcagtgaagttaaaaatcacagacataacttcaatatgaattttattactggttatctgctagagagcttggaacattctgaatggaattaaaatgcatttcattggtgtggaatcatgaacatttgttaaaattgttttgtaaaaaactccctaggttttcacagctgtagaaatgctccctcaaagaaataagtgcagaatgaataaaaacagatgtggcatttttgcatattatcaacaaaaatctctttttattttatct

SEQ ID NO: 869479 - DNA, 540 bp, Homo sapiens
gggactatgtaaaaagaccaaacctacgtttgaatggtgtacatgaaagtgacagggagaccaagttgaaaaacactcttcaggatattatccagaagaacttcaccaacctagcaagacaggccaacattcaaattcaggaaatacggagaacaccacaaagatactcgttgagaagagcaaccccaagacacataatcttcagattcaccaaggttgaaatgaaggaaaaaatgttaagggcagccagagagacaggtgaggttacccacaaagggaaccctatcagactaacagcagatctctctgcagaaaccctacaagccagaagagagaggggggccaataatcaacattcttaaagaaatgaattttcaacccagaattccatatccagscaaactaagcttcgtaagggaaggagaaataaaatactttacaggcaagcaaatgctgagagattttgtcaccaccaggcctgccttataagagctcctgaagaaagcactaaatatggaaaggaaaaactggtaccagcca

SEQ ID NO: 869480 - DNA, 577 bp, Homo sapiens
tggatttcaaagtatgtatggaaacgcctggatgcccaggaagcagtttgctgcaggggcaggactctcacagagaacctctgctagggcaatgaggaagggaaatgtggggtcagaacccccacaatgcatccctactggggcaccacctagtggagctgtgagaagagggccaccatcctccagaccccagaatgatagatccaccgacagcttgcaccatgtacctggagaagccccagacactcaatgccagcccgtgaaagcagccaggatgggggactataccctgcaaagccacaggggcagagctgctcaaggtcatggaagcctacttcttgcatcagcttgacctggatgtgagacataragtcaaaaggagatcattttggggctttaagattttactgccccactggattttgcagttgtgtgggggcatgtagcccctttgttttggccaatgtctcccatttggaatggctgtatttactcaatgtctgtactcccattgtatctaggaagtaactaacttgcttttgattttgtaggctcataggcaaaagggacttgcctt

SEQ ID NO: 869481 - DNA, 593 bp, Homo sapiens
attacttaaattccagcatttagtacacatgacatttggtctctcttttgattggacaccatactgccatttatgttttgattcctggtcaatttatgtctattgcctacaggtatagcttgtataccaaacactgaaggcatataggaatacctcagagatattgagggttcagttctagaacaccacaataaagctaatactgtgggaaagagagtttctggggtgccagttgagttggtctcccctgtgtgagacacccatggggagccatgggtggcctctgaaragaaaagtctccctattgccttcatgtctttatgcccggagagaataaccactcagcggcatgccacaggttgctcagggagataacactcccttgaagcagtggagtataatcaaacatcttggctcctcctgaaacccactcccacccatttcagtcctgataagttaaagatcttaagtagtttagacacatgcctttgctcaaggaaattcacagaaaccgccactgctatacatcttattgaatgactcacgagttctccttcacatattaatccttttcctcatcggttcctccccct

SEQ ID NO: 869482 - DNA, 643 bp, Homo sapiens
ggtaatgagagttccagatacccaggggactatataaataaaaacagaaaagatttagagaagattgaatgataaaatgacaggatttcttggtcagtagtggggatttgtgaaatgctaagatcagttctagatgagtgatctagggcatgctgtcttctgcacagatggtggttgaaatcaatgaggaggagtgaaataacccagggcaatgcagagaggaaagagtagaacagaaaaacaatcctgktgatcatcagcaattaaaggaaaagtaaagttagaaaatctcttgaaagtgacataaaaccagcaaggtggtcagagaattataagacttgagagagtgtaaggtcatggatgcccaaggaagtaagaaaaacatttcaaaaaacagaaagtgagtcaagtgctgcaaaacactcagaaagatggtactattgaactggttaatgtgacatcaagggtgaccatagccaaagaagttttaggcatgtgataggggtacaagtaagtctgagaaaccagtttgcactggttctgcaaatggtgaagtggtaacataaaagaagttgttttacccccagaaattacctaggaataaatatttttttttaaaaaattgatatatattttctgtttt

SEQ ID NO: 869483 - DNA, 613 bp, Homo sapiens
ttaacatcagctaatttagtgtactgaaaaattttgataagccagtatcctcatgccaaagaacagagcttttgcagtattctgatagatgaatatatatttattgacattggtggtatagaactcacagtcaccacttaattgaatttatttcagttggggaaataattgtttagtttcctcttagcatgatgggcgggtattgtcatcttctcctggcttgatggtactagtacaactttacttgatggaataaaacaacgaatctgaagaggaggtaaaagtcagaaaagtaaaaaagaaaaagtcagaaaagtaagaagtagaastgtgaagaatgattgttttaatgttagggttagaaaagaaacttctaaactcattgtatttaaaaaaaagatcacttggaaacttatgggataaatcatgttctcccaaattcatatgttgaagtcctaacccctataacctgggaatgtgactgtgtttagagacagggtctttaaatagataattaaggtaacatgaggttatatgggtggaccttaatctaatataactggtatctttataaaaagaaaagataagaacacagacagcagagaggaaagac

SEQ ID NO: 869484 - DNA, 613 bp, Homo sapiens
ttaacatcagctaatttagtgtactgaaaaattttgataagccagtatcctcatgccaaagaacagagcttttgcagtattctgatagatgaatatatatttattgacattggtggtatagaactcacagtcaccacttaattgaatttatttcagttggggaaataattgtttagtttcctcttagcatgatgggcgggtattgtcatcttctcctggcttgatggtactagtacaactttacttgatggaataaaacaacgaatctgaagaggaggtaaaagtcagaaaagtaaaaaagaaaaagtcagaaaagtaagaagtagaactgtgaagaatgattgttttaatgttagggttagaaaagaaacttctaaactcattgtatttaaaaaaaagatcacttggaaacttatgggataaatcatgttctcccaarttcatatgttgaagtcctaacccctataacctgggaatgtgactgtgtttagagacagggtctttaaatagataattaaggtaacatgaggttatatgggtggaccttaatctaatataactggtatctttataaaaagaaaagataagaacacagacagcagagaggaaagac

SEQ ID NO: 869485 - DNA, 612 bp, Homo sapiens
ctgtcctccagaccccagaatggtagatccaccaacagcttgcaccgtgcacctgaaaaagccacagacactcaatgccagcccatgaaagcagacaggactggggctgtaccctgcaaaaccacaggggtggagctgcccaaggccgtgggagcctaactcttgcatcagtgtgacctggatgtgagacatggagtcaaaggagattattttgaagctttaagatttaattgctgccttcttggattctggacttgcatggggcctgtagctccttcgttttggccaacttctcccatttgaaacaggtgtatttacccaatatctgtacccctactgtatttaggaagtaattttgattttacaggctcatgtaaaggaaggggacttgccttgtctcagatgagactttggactgtggacttctgagttaatrctgaaatgaattaagactttgggggactgttgggatggcatgattggttttgaaatgtgaggacataagatttgggaggggccgggggagaatgctatggtttggctctgtgtccccacccaaaccaccttgaattgtaataatccccacttgtcatgggagggaccttgtgggag

SEQ ID NO: 869486 - DNA, 670 bp, Homo sapiens
taaaacacacactaaaataataaagggtcctgttaatataatctcaaagctactgacagtaattctgaaattgccacagacttatattagggagatattctggttctcataaggaaaaaaaaaaggttacagaaataattcatttagaaaggtgaaattgatctatatcaaaaattgataacatcttggtctctactaccattccccaccaaatagaaagacagctcttcagacatatggctgactccaggyctgtggtagggtagtatgtagggaaaactctaactgtgtttctcctctgctctcacaccataactgtcatcaacaggaagaagatttctgttaccatatgtgtgagattgtttttcacaaacaccaagcagtggacaccagctaggtatcctcaaattcagttccaatactgtctaccaagagatagcttcagatcccacaggttgagggctagtccccaagactgatccccacacatgccagtcacaagtgtaggcctccagaacttctgaccacctggcttcaagttggggttcccatgaccccctctttgggttcgattaatttgcaggaggggctcataaaactcagggaaacacttacatttactggttcattatggaggctattgcaaacggtacagatgaagagatgcata

SEQ ID NO: 869487 - DNA, 544 bp, Homo sapiens
agctgggtttgaaggatacggttgatggtttgaagatggtaaaggagtcttaataagtctgcagaatggtgggagaagttgaacaggcaagagaggagagagatgtgggcatgggacatctgatgttgggtcatgacaagtcccaagacatggctattggagcagccagaccaagccagggaaggggaggaggacaaaaaaactgtgaggcatgggccgtgatgtggggtagagttttttacttactcaacaaataatcactgaatgtttattatgtgccaaacactactcaaagtgctaggaataaaattgtaaactaaacaggcataaatatctaccttgcagagcttccagtggaaagtgtcaaataataaaaatattattgaatatgtcagayatgtaagataatagtgcattggaaaaattaaaatggtggtactagatctgtgtgtgtgtgtgtgtgtgtgtgtgtgtgtgtgtgttaccatgttaagaagggtggtcaggtcatacttcctgataaagtgatattctattcaaaaca

SEQ ID NO: 869488 - DNA, 650 bp, Homo sapiens
aaggtttatcatgagattgcagcaattcagtcacatcttcaggctccatttctaattctagtttgctttctattaatatttctaccacatctgtagttacttcctctagtgacaacatcttgaacccctcaaagttatcaatgagagttggaactccttccaaactcctgtttatgtagmtcttctgaccttctgccatgaatcacaaatgttcttaatggcatctagaatgctgaatccttcccaaaaggtttttagtttactttgcccagatccattggataaatcactaccatggcacatatatgatgaaacgtatttcttaaatagtcaaagttgaaagtcaaattactccttgatccatgggctgcagaagggatgctgtggaagcaggcatgaaaacagcattcatctcctcgtacatctccatcagaactcttgggtgactaggtgcattgtcaccaagcagcaatattttgaaaggaatcctttggtctgagaactagggctcaacagtgggcttaaattattcagtaaactactcagtaaaaagatttgctgtcatccacactttgtgattccattgatatagaacaggcagggtacatttagcataattcttaaggaccctgggattttcaaaatggtaa

SEQ ID NO: 869489 - DNA, 631 bp, Homo sapiens
gattaactataaagctactctaatcaagaatgtgtggggttttgttgaaaagatagatagatagatcgatggaacaaaatagacaattcagagatagacccacactttttcagttgattgatttttaacaatggtgcaaaggcaaatcaatggataaagtacactctcttcaacaaatggcattagaataattatatttttattaaattaaaacaaacttcactctataccttaaattatatacaaatattaactaaayataggtaataggtataaatattaaacctaaaaataaagtctaaaatattatattgaagaaactatctgaaattttggaaaagggaaagatttatgagaaacaataccaagagcatgttccataaaagaaaactggctgtgttgaattccatcaaaatggagaactgctcttgtaagacaatgtgaagagaataaagagacaaaccacaaactggtagaaaatatttgcaaatcatatatttcttttttttttttttaatttccataggtttttggggaacaggtagtatttggttacacgagtaagttcattagtggtgatttgtgaaactttggtgcacctatcacccgagcagtatacactgaacctgat

SEQ ID NO: 869490 - DNA, 631 bp, Homo sapiens
gattaactataaagctactctaatcaagaatgtgtggggttttgttgaaaagatagatagatagatcgatggaacaaaatagacaattcagagatagacccacactttttcagttgattgatttttaacaatggtgcaaaggcaaatcaatggataaagtacactctcttcaacaaatggcattagaataattatatttttattaaattaaaacaaacttcactctataccttaaattatatacaaatattaactaaacataggtaataggtataaatattaaacctaaaaataaagtctaaaataytatattgaagaaactatctgaaattttggaaaagggaaagatttatgagaaacaataccaagagcatgttccataaaagaaaactggctgtgttgaattccatcaaaatggagaactgctcttgtaagacaatgtgaagagaataaagagacaaaccacaaactggtagaaaatatttgcaaatcatatatttcttttttttttttttaatttccataggtttttggggaacaggtagtatttggttacacgagtaagttcattagtggtgatttgtgaaactttggtgcacctatcacccgagcagtatacactgaacctgat

SEQ ID NO: 869491 - DNA, 486 bp, Homo sapiens
gggcaaaatgccaccagtctctttgcataggaagagtgaccttcactccagttcccaacaagttccttatctccatctgagactccctcagtctgaattttattgtccatgtcactatcagcattttggtcaaagccattaaacaagtctctcggargttccaagctttcccacatctgcctgtcttctgagccctccaagtctctaggaagttccaaactttcaaacatttttctatctgcttctgagccctctaaactgttccaacatctgcctgttatgcagttccaaagtcccttccacatttttgggtatctttacagcagtgccccactcccagtaccaatttattatattagtctgttcttatactgttaataaagacatacatgagactgggtaatttataaagaaaaagaggtttaatggactcacatttccacatggctagggaggcctcacaatcatggcagaaaatgaagaaag

SEQ ID NO: 869492 - DNA, 636 bp, Homo sapiens
gagatcaggccactttgctgtaagctttagaggcagagcctgtaccttggcactacaaaacagagttaatataaagctttctatactttaagatcaatggagaaaaggtgaaatagccaatgaaaaacagggcaaaagagaggaagaagcacttcacaaatgagagaaagctatttaaaaaacttacatcaggggtcaggcaaggtggctcacacctgtaatcccagtactttgggaggccgaggtgggcggawcacctgagttcaggagttcgataccagcttggccaagatagtgaaaccctgcctctgctaaaaatacaaaaaagtagctggacctggtggcacactcctgtaatcccagctactcaggaggctgaggcatgagaatcacttgagtccgggaggcgtaggttgcagtgagccgagatcgtgccactgcactccagcctgggtgacagagtgagactccatctcaaaaacaaacaaacaaacataaccttacagcagaatctagtatagttgaacatatacatcccctaagatctagcagtttcactttcaggaacatgcacagcagaaattcacatatgtacgcaccagaagatgtgttcttgtattgcagcagcattgtttc

SEQ ID NO: 869493 - DNA, 669 bp, Homo sapiens
atcttcaacaaacctgacaaaaacacgcaatggggaaacgattacttattaaacaaatggtgctggaacaactggccagccatatgtagaagattgaaattggaccccttccttacaccatctacaaaaatcaactcaagatggattaaagacttaaatgtaaaactgagaactataaaaaccctggaagacaacctaggtaataccattcaggacatagtcacagtcaaagatttcatgacaaagatgtcaaaagcaactacaacaaaagcaaaagttgataaatggcatctaattaaactaaagagcttctaaaagcaaaataaactatcagtagagtaaacagatgataacctacagaatgggagaaaaaaatttgcaaactatcagtctggacaatggtctaatatccagcatctataaggaatgtaaataaatttacaagaaaaaacaaacaaccccattaaaaagygggcaaaagacaagattacacgcttttcaaaagaagacatacatgtggccaaaaatcatggaaaaaagctcagcatcactaatcattagagaaatgcaagtcaaaaccacaatgagacaccatctcacaccagtcagaatggctatcattaaaatgtcaaaaaatagataatggcaaggttgtggagaaaaagaaat

SEQ ID NO: 869494 - DNA, 645 bp, Homo sapiens
ctgaaaattgcctgttagtatttttttctcttatcaaaatcaatgtgttatctgctatgtaattcattcatttgttcagtaaatttatggaacagatagtatgtgcctgggactaagttagattctgagtggtcataggcaattaagatacagattgtatcctcaaagagtccaggagagggagataagcaaatttgagtgacaaagtgttagtggtactgggagaaatgtctgtctaaacagagcacaattagctgcttttggggactcaggacagcataaccttaatatagcatatgatgcttccgttgctgggtcttgcaaatgagtaggtacttgcttctagttccttcagagtgcttcagcagtctccccacagctggagatctgtgcaagagaaaaaggcwatgcaagtttagaaaactgtgtgaataaaaccatgcaggtggaacgtttagattagggcccaggaatcagaccactgagataggaaatcaggaggagatgttgccacttcccaagagagatgagggtgaagaatttgaagagcctggggaatattcagctggagacattcagcaaacagttgaataacatgtctggagcaaggaagactcattcaagttagaaatctagttgtgagag

SEQ ID NO: 869495 - DNA, 615 bp, Homo sapiens
atcaaatagacgcaataaaaaatgataaaggagatatcaccaccaatcccacaggaatacaaactaccatcagagaatactacaaacaccgctatgcaaataaactagaaaatctagaagaaatggataaattcctcgacacatacaccctcccaagactaaaccaggaagaagttgactctctgaatagaccaataacaggctctgaaattgtggcaataatcaatagcttaccaaccaaaaagagtcctggaccagatggwttcacagccgaattctaccagaggtacagggaggaactggtaccattccttctgaaactattcctatcaatagaaaaagagagaatccttcctaactcattttatggggccagcatcatcttgataccaaagccgggcaaagacacaaccaaaaaatagaattttagaccaatatcctcgatgaacattgatgcaaaaatccttaataaaacactggcaaaccgaatccagcagcacgtcgaaaaccttcaggtgctcttttaaggctggtttggtggtgacaaagtttctcagtatttgtttgtctttgaaagattttatttctccttcccttatgaagcttagtttgttt

SEQ ID NO: 869496 - DNA, 603 bp, Homo sapiens
ctacagtgctctgcatgagcattgcaaccgtcatgagccctaagccaccaggaacgggcctcgtcgtatgccacatcacccacaacttttctcccatttgttttttttatcatctgggacataattgattccacagttgatgactattgctaggtttgatccattcccctttaaccatttcaggccraccagttgcaaccaccaggatgtcgcctttatttacctcctcatccagattggcagtcttggagtggcaggtggtcactgtggcattgttccacagaagcaagtcacgcatcagggccctgactattttactgcacccaaccaccacagcatgccttctggcaatctgcacccctgtctctttcatgagttccaagcatcctttaggcatacaaggaatgaaacagtcatttaggtcacctctagcaagtttcccagcactgatgctagtcaatccatccacatccttttcaggtgcaatagcattgatcactccttcagtgtattgtctgagtctagagatagctgcactacgaacccgtgtacagtagagtcttcattcaaagatatgatgtacttgatcacctcagattctgt

SEQ ID NO: 869497 - DNA, 759 bp, Homo sapiens
caattataaatgtgttaaaatgaattataggccccaatactggtttctttgtaatattatgcatcaacacccaatgctcttccttgtttattgactttgagcttgaccacataaacaactttgaacaatacaattgagatgatgttagtccagtaatgctagtaaagatattgctgagaaatgtgacagaagatacaaaaataaatttaaawcatagggcatattaagcatatgagttcttctaaaccaattaaatgattttttcattaaaacaatcatcagtatgatttatcagagtcattctaagaactgttggtgatatggaagaaggatgtgaaagcagactgggaaacgagttccattgcaggggcatagatgtaggaaacatgtattccaggtgtagatcagaaaaaaatggtaaatagagagatttcagtagatggcttggatggtttagtgattaaccttttttttggaaagggagaagaagataatgcaaaaatttctcacaagaataacttaataataatgttgttattaaagaaataggagtcagaaaaaaaagggctaggttgtggatatgcaaaattgtggcagaaatgactgactttaaaatttatattagactattaatactgaccagtattaaaatgtcttaaaattataatgtcaaaataaaatatcataacacttctaatgcacttaaaaatattatccacataatacaggagtcttttacagatgagaatgcctagaaat

SEQ ID NO: 869498 - DNA, 759 bp, Homo sapiens
caattataaatgtgttaaaatgaattataggccccaatactggtttctttgtaatattatgcatcaacacccaatgctcttccttgtttattgactttgagcttgaccacataaacaactttgaacaatacaattgagatgatgttagtccagtaatgctagtaaagatattgctgagaaatgtgacagaagatacaaaaataaatttaaaacatagggcatattaagcatatgagttcttctaaaccaattaaatgattttttcatyaaaacaatcatcagtatgatttatcagagtcattctaagaactgttggtgatatggaagaaggatgtgaaagcagactgggaaacgagttccattgcaggggcatagatgtaggaaacatgtattccaggtgtagatcagaaaaaaatggtaaatagagagatttcagtagatggcttggatggtttagtgattaaccttttttttggaaagggagaagaagataatgcaaaaatttctcacaagaataacttaataataatgttgttattaaagaaataggagtcagaaaaaaaagggctaggttgtggatatgcaaaattgtggcagaaatgactgactttaaaatttatattagactattaatactgaccagtattaaaatgtcttaaaattataatgtcaaaataaaatatcataacacttctaatgcacttaaaaatattatccacataatacaggagtcttttacagatgagaatgcctagaaat

SEQ ID NO: 869499 - DNA, 513 bp, Homo sapiens
atcagtattttctaaaatgcaacctcttcttgcatgtctctgaagatatgaattacacttactgtaattacatttgtttcttgtcttaattctgattctctgaaattacttattctgtttgctaagttttgtattttgtatcttctttcttgtttttcttaaaagttgggtgacaatattttacatgggtagtttttctgttaatcatagcttatctccaatkattaggaaaataacaactatgaagtaggacaaagtaacctgggttcttgtgttttagcattgctgctccctgttccttcttggttttgttaattacctgagactctgccctgttgatgttagtcagattctaagactcaccttgccaagcaagcactgctttgttattccaaagtgaagttcattcttactttgtctggaaagcagtctctgcatcttttacctcattatttccctcctttcatattatgtttcttcctttaccaattttaatgcagcttcccctttttc

SEQ ID NO: 869500 - DNA, 619 bp, Homo sapiens
acagttgccttggaaacactcactctgaatattctaaattttctataatggaaaatcttgcctttaccttataatttatagtctctctcatttttggattttgctgagaatacataatgagatccaaatgctgataaatgtmattttctgaggacataattgttatattcatgtattagttttgttataaactcattgttgtcagtcaggcttctgaaggacaattatctaataaaaaataaaattttaactaaggctatttaaagttgtgttttaactgccctctgtatagtgtccatttcttttttacttgtacattttaaaatattagtttttttattatctcttccctcataaatcagaattaaagctgtcatttccacatttgtgtttgtagaactgttaggcaacttcttttttaatgtcattaaataccaactagccttaataattcagaacatctggttccaaaaacccgattacagggcacagtcgtaacacattgcattttctactagactcagcatagtctccattagttattgttcctgtttactcagttttgagctagactctcccagagtaccaattatgtcctgagagcaagtcagcacacaca

SEQ ID NO: 869501 - DNA, 619 bp, Homo sapiens
acagttgccttggaaacactcactctgaatattctaaattttctataatggaaaatcttgcctttaccttataatttatagtctctctcatttttggattttgctgagaatacataatgagatccaaatgctgataaatgtcattttctgaggacataattgttatattcatgtattagttttgttataaactcattgttgtcagtcaggcttcygaaggacaattatctaataaaaaataaaattttaactaaggctatttaaagttgtgttttaactgccctctgtatagtgtccatttcttttttacttgtacattttaaaatattagtttttttattatctcttccctcataaatcagaattaaagctgtcatttccacatttgtgtttgtagaactgttaggcaacttcttttttaatgtcattaaataccaactagccttaataattcagaacatctggttccaaaaacccgattacagggcacagtcgtaacacattgcattttctactagactcagcatagtctccattagttattgttcctgtttactcagttttgagctagactctcccagagtaccaattatgtcctgagagcaagtcagcacacaca

SEQ ID NO: 869502 - DNA, 619 bp, Homo sapiens
acagttgccttggaaacactcactctgaatattctaaattttctataatggaaaatcttgcctttaccttataatttatagtctctctcatttttggattttgctgagaatacataatgagatccaaatgctgataaatgtcattttctgaggacataattgttatattcatgtattagttttgttataaactcattgttgtcagtcaggcttctgaaggacaattatctaataaaaaataaaattttaactaaggctatttaaagttgtgttttaactgccctctgtatagtgtccatttcttttttacttgtacattttaaaatattagtttttttattatctcttccctcataaatcagaattaaagctgtcatttccacatttgtgtttgtagaactgttaggcaacttcttttttaatrtcattaaataccaactagccttaataattcagaacatctggttccaaaaacccgattacagggcacagtcgtaacacattgcattttctactagactcagcatagtctccattagttattgttcctgtttactcagttttgagctagactctcccagagtaccaattatgtcctgagagcaagtcagcacacaca

SEQ ID NO: 869503 - DNA, 656 bp, Homo sapiens
gagatggctcatgcctgccttcccagcattttgggaagccaaagtgggaagatctcttgaggccaggagtttgagaccagtctgggcaaagtagcgagaccccatctctacaaaaagaagaagaagaacaaaaaaaaattagccaggcwtggtggcctgcccctgtagtcccagctactcaggaggctaggttgggaggatcacttgagcccaggaggttgaggctgcagtgagctatgatggtgccacttcactccagcctgggtgatggagtgaaaccctttctccaaaaaaaaaaaaaaaaaaagaaaaagaaaaagaaaagaaaagaaaggaaggaggaaagagacagaaagaaaagaaaaaagaaaagaaaagacgtcaactaaattgactctcacccagaggctttcccttccctgaggccattagctctttctcctagcagagtctattaacctcatagagtctgtattagtctgttttgcattgctataaaggaatacctgagactgggtaatgtatataaaaaaaagaagtttaattggcttatggttccgcagggtgtacacgaagcatgataccaacatctgcttctggtgagggcctcagggagcttacaatcatggcggaacatgaagagggaacaagctatc

SEQ ID NO: 869504 - DNA, 622 bp, Homo sapiens
acccagcccagcctagcctctccctgaccttgtgcaaatggtaggaagcctgacggtttgctctgccttaaggtcttgcctcatctgcccagagaactccaacctggcagtagggaaggctgaaaaccagctcaagtcagaacaagaacccccagcaaatgctcaggaattcatggaactagacacctctgaaaatggaaggcaagtgctgcttaaagcaagcagatttgttaaacatctgtataagaagcagttagaacccccagcagagggtaggagttttgtaccctggaaatgctgaatcagtgggactagactctggaaggaaactaaattcagtcaagggtaatggtactgtgctggaaacaggaagattatctagaagtctgcacactgttgggtagtacccaagcccctccmttcaactgggatctcagtcagccaggtttacattcctcagacaggatatggaaaataccctctctggaaagcctctctcatagcctggcttctgcctgggggcctaagcatgccacaaaatacaaacaacagcaacaaaaactggcccatgtgcatcagttactgattgctacaataatgccacataacaaatcatcccaaa

SEQ ID NO: 869505 - DNA, 610 bp, Homo sapiens
ctgctgcctagacaggaagaatccagtcatagcagggctcatcacctgctgactaaagagcccttaagcccttaataaccaacagtgatgtcaagttagtatgccaaggacctagagccctgagatgttgtggcttcagatgtgatccagcacattcccagctgtggtggctatgatgaaagactccttctgtttgaggaaagcagagggaaaagtaaaggggmctttgtcttgcactttaggtaccagctttggccacagtggggtaaagcaccaagtggacacttggagtcactgagtccaggcatataatcttggatagcatgtctggacctgccattgtccagacgggaacccactgccctgaagtgtgggtctcaggcctgacagcatttaccaaaagctgacagaagagcctttgggctttaagtgaatatcagtggtggcctggaagaatcccgtgtgggctggtggtagtggtggccacagggagaggctcctctgtctatggacaggggagggaagagtgggaatgactcttttgtggtttgagtgccagcttaaccatagtagaagagaacatcaagtaaatttctaaggtttttgactt

SEQ ID NO: 869506 - DNA, 640 bp, Homo sapiens
tgtagaactgtgagccaattaaacctcttttctttataaattacccagtctcaggtattcctttgcagcaacacaagaatggcctaacatacctggcaatttctagaagtgtgtcccaaagaaataccctcaaaactgtctaaaaatatgtatgaataggaatatttgcagcattgtttataatcatgaaaaattggaaacaacctaaatgctcaacattaggaggttgaacaacttactgcaatgaaatactaggtaacgtttaagaagactaagtccaaatatactgacatggaaagatgyccaagatataccatatattattaaaaggaaattgccaaacgttattaaatgacttattttttaaaacatgcatatagatgtatttgcatgcatagaaaaagtatctgtttcacaccaaattgtcaatagaaggtgtccctaggaataggataggaagtggggaaatgttctcgttttactttatgcacttccataacatttgaatttttttcaaattttaaatttataattctttaaacatagattcaccaaaagagataaacacgatggtccattatacattcatcaagaagtttaattactagcatgcccacttcattatcaagcagttggggca

SEQ ID NO: 869507 - DNA, 591 bp, Homo sapiens
aaagggaagtgtatgaattctgagtagtgagttggttggtcagtggcgtgtgaagtaacctgatgaagcttagcgtgggttttttattttactgggggcagcatattggggaagagaaggataaccttactaaaccgcttgggtacsccaaccctgtgcaatagatattagcaacatagctaaccatacatggttagtaaatacaacccacacctaactgatgcatgtaaacattccacattacagtgaaatatattggtgtattaatgcattttaataattatggtattattttgatacctttcaaagtgtttggaataattgtgcagatagtcagatcaaccaaaacctaccagttaaatactatcctttaactgctttcttaacctaaaccaatcttggaaaggtaggattagaggccagaaagttaggattaaagtgtgttggatggatagatcagcacaatttcatccatgttggtggtaaggcttttcattaagtgtgttgatgcttcccttttaaattgtttccgcttaaataatctaactgtcctttctcaagcatattggtcaagatgatcaataccagata

SEQ ID NO: 869508 - DNA, 591 bp, Homo sapiens
aaagggaagtgtatgaattctgagtagtgagttggttggtcagtggcgtgtgaagtaacctgatgaagcttagcgtgggttttttattttactgggggcagcatattggggaagagaaggataaccttactaaaccgcttgggtacgccaaccctgtgcaatagatattagcaacatagctaaccatacatggttagtaaatacaacccacacctaactgatgcatgtaaacattccacattacagtgaaatatattggkgtattaatgcattttaataattatggtattattttgatacctttcaaagtgtttggaataattgtgcagatagtcagatcaaccaaaacctaccagttaaatactatcctttaactgctttcttaacctaaaccaatcttggaaaggtaggattagaggccagaaagttaggattaaagtgtgttggatggatagatcagcacaatttcatccatgttggtggtaaggcttttcattaagtgtgttgatgcttcccttttaaattgtttccgcttaaataatctaactgtcctttctcaagcatattggtcaagatgatcaataccagata

SEQ ID NO: 869509 - DNA, 591 bp, Homo sapiens
aaagggaagtgtatgaattctgagtagtgagttggttggtcagtggcgtgtgaagtaacctgatgaagcttagcgtgggttttttattttactgggggcagcatattggggaagagaaggataaccttactaaaccgcttgggtacgccaaccctgtgcaatagatattagcaacatagctaaccatacatggttagtaaatacaacccacacctaactgatgcatgtaaacattccacattacagtgaaatatattggtgtattaatgcattttaataattatggkattattttgatacctttcaaagtgtttggaataattgtgcagatagtcagatcaaccaaaacctaccagttaaatactatcctttaactgctttcttaacctaaaccaatcttggaaaggtaggattagaggccagaaagttaggattaaagtgtgttggatggatagatcagcacaatttcatccatgttggtggtaaggcttttcattaagtgtgttgatgcttcccttttaaattgtttccgcttaaataatctaactgtcctttctcaagcatattggtcaagatgatcaataccagata

SEQ ID NO: 869510 - DNA, 648 bp, Homo sapiens
tttttcataattcttactagggatatttcctcacttttcagttttaagttagtatttttttttttttttttgagatggagtttcactcttcttacccaggctggagtgcagtggcacaatctcggctcactgcaaccctctgcctcccgggttcaagcaattctgctgccccagcctcccgattagctgggattacaggcgtggcccaccacgcccggctaaatttttttttttttttttcattagagacgaggtttctccaygttggccaggctgctcaaactcccaaccacaggtgatctgcccgcctcagccttccaaagtgctgggattacaggcgtgagccaccgtgcctggctttgctagtatttttaatacaaaggatactttttgtttattcttattatttctggcttcatattttatgaaagtaaatcaagataactataaacaatagtcatttaaatagaatactttaaaaatacattatcttttataatcttccttagagagaatgacaggattaggaagaaaatgatatctagaaccaggtttaagccatgtctgacactgccagtatgatcttgaaatctgaggctcatgttctttaactaaataataagaaaataccaactatataaatgtaca

SEQ ID NO: 869511 - DNA, 593 bp, Homo sapiens
taaaaaaaactagagaaccaagagcaaataaaactcaaagctagcagaagaaaagaaataaacaagatcagagtggaactgaaggagatagaaacacaaaaaacccttcaaaaaatcaatgaatccagaagctgttttttttttttttaaagttaacaaatagaccactagctaggctaatagaaaagagagaagaatcaaatagatacgataaaaaatgttaaagaggatatcaccaytgactcctcagaaatacaaccaaccatcagagaatactacaaacacctctatgcaaatgaactagaatatctagaagaaatggatacattcctggacacatacaccctcccaagactgaatcagtaagaaggtgaatctcatttgatcctcagcaatgctaagataggcaaagaagctgctgttatccatgtttttttttaaataatgtcagtgaaattataaatctgataatattaatcccgctgagcaatattaaagagctgaaatctagatctctgaggcaaactccaggctttctaaaacattgtcttgctggaaatctcatgaaatcatttgactctggtataatggtc

SEQ ID NO: 869512 - DNA, 591 bp, Homo sapiens
aggagagtgtaggaaaaagcagacctaggacactgcatacagcccataggacaagttccacagctgcagctagctgtgacaggaattaatgcacacttctggctaagcagtgtctgaacctcccgtaataggactcgttctggtggatcccagagtgaaagtgcatcatgagggaggaaatgggaggaaaagtgtcaaggcctactccactgtartgcatgctgaaacactttaaaaaaggttttaatggtgattatgggattaagctaactccacagaaactgagaaccctttgtgagatagactggccgtcttttaatgcagggtggctggccaaggggacaacagacagggagataattggctaaatgtttcgggtagtcaccaggcttggggaacagcctgggcacctgggatcagtttccgtatatcaactcctggctaagtgtaattcagacgcaccctaagtggctgcaggcctgctttgagacgtactgtaagacactaatggcccagacaaaaccagggacaatagaaagaggctgcaaggcatcagaaaaagaataggagttacaggaaaagcagaaaaag

SEQ ID NO: 869513 - DNA, 426 bp, Homo sapiens
tctcaaatgagacaccccaccccccgcatagaatcatgtgtgaatgcaagccatcatcagcctcatcattgtcatcatcatcatcatcatcatgaagatgcggaagctcagagaagctaagtgactctccagctggtcagcaggctggtgatggagcagcgtgaaacatgcacctcctgaccccactaggaatcttctgtattccaaaagactcatctcaactggttcttctctgccaagcaggtgaaggcccagamaaaaagattgcagttgattgatttctagtagagctagtgtgggtgaccactttgtgatcggttagtgatggttggcggtggggcaggaggtagcacccagtcttattttgctgccccccatctagactacctactgcaggtggccgaggccttgtccttgagggaattc

SEQ ID NO: 869514 - DNA, 478 bp, Homo sapiens
gagaaagaagaaccagttcttgaaatagctcaggttatcattgatgagggctgcaaaggtgttgagattggaggaatgaaagagataactttgaggcagtagatttatagaatctggctgctgattggctgagaggaaaaggaaagtattaaggataacagatgcccrggatttctgtctcaagaacctggactgactgtgacccatttaaccaagggggagactgaggaagtggtaggtgctggctgcagcctagaaaggctgtggaatggggctacctgaaccaggtctggaagggctgtcagaacaccttggtgtatgcagttcctggcctgcagaattcacctctaaaatgaggtgtttccctaatttcctccagcacatttcaaatataaactaaaacatgaccttgaaaatccagaaatctaaatatgaatgaaaaaactactaatcttattagaaatagcccactcactgg

SEQ ID NO: 869515 - DNA, 645 bp, Homo sapiens
ttattgtacagccatagacaaacatatggtctctcaaaacttgtgttatcagttttcaggaaggactatcaatgcctaataaaatcattgagatattataaggaccaaataagaccaagtatttcattgaagatagtacaatagttactgagcctttaccaacgattacaaatagatgaataaaagatttagatgagtttctgccctgcaggggcttttcctccagtgaaggtgacaggcacacacagaggtaggtaggatacaaggtagaacaaagtactcacygaaaagggacacaaacagttctgttcttcatgtggtttttgtcattggttctgtttatgtgatggattacatttattgatttgcgtatgttgaaccagcctttgcagggacatggatgaagttggaaaccatcattctcagcaaactaacacaggaacagaaaaccaaacaccacatgttctcactcataagtgggaggtgaacaatgagaacatatggacacaggaaggggaacatcatcatacaccggggcctactggggagttgggggctaggggagggatagcaataggagaaataagacaggctgatggatgcagcaaaccactatggcatgtgtatacctgtgtaacaaatctg

SEQ ID NO: 869516 - DNA, 645 bp, Homo sapiens
ttattgtacagccatagacaaacatatggtctctcaaaacttgtgttatcagttttcaggaaggactatcaatgcctaataaaatcattgagatattataaggaccaaataagaccaagtatttcattgaagatagtacaatagttactgagcctttaccaacgattacaaatagatgaataaaagatttagatgagtttctgccctgcaggggcttttcctccagtgaaggtgacaggcacacacagaggtaggtaggatacaaggtagaacaaagtactcaccgaaaagggacacaaacagttctgytcttcatgtggtttttgtcattggttctgtttatgtgatggattacatttattgatttgcgtatgttgaaccagcctttgcagggacatggatgaagttggaaaccatcattctcagcaaactaacacaggaacagaaaaccaaacaccacatgttctcactcataagtgggaggtgaacaatgagaacatatggacacaggaaggggaacatcatcatacaccggggcctactggggagttgggggctaggggagggatagcaataggagaaataagacaggctgatggatgcagcaaaccactatggcatgtgtatacctgtgtaacaaatctg

SEQ ID NO: 869517 - DNA, 645 bp, Homo sapiens
gatgagccttgctcaagtctaaatttcatggccactggagtcatttccagaactgactatttagaatggcaattaatttatggtaattaactctagtgttaaccacttgttaggcttggcaatgatgcttgaagtttaaagagagggagagaaaaggagaaggaggagggtttatccaggcaaatgacaaaaatatagctggaggactcacaaargtaaatatgaagaatttgtttgcgcaggagtattttatatcaccattctgtgaaagaatccttcttttaaactaatgcccatagttaaaagtgacaaaacaagcttcttttgtttgactagggtcttggcttcaatcagcagtattattaagagctgagcaatgctcttcattaggcagtgagactcattaataataccattcattggtctaggggttcctctgggaggggacggactttgcagcatgcacattctcatccaaatggttcacgaggaccctacgtggtctgacagtgctggaggacacggttcagggtagagaggggtcaaacctcacccccagctcctgaagagtgcagaggaaaggggctagcccaagacggagttgatgaggtgacagctatggctctttaccacccgaagtgcttg

SEQ ID NO: 869518 - DNA, 625 bp, Homo sapiens
tgctcgcacttccagatttaacatagcagttggaactaccccttggaagatgcagaaacaggcttaaaaaagatagatgaagacaaactatgattgcttagaacaagttgtgttcttattaaagcataattatttttcaaggaaagcagaggaaatttagaatttcaggtatgaagtggccgggcgtggtggttcatgcctgtaatcacagcactttgggaggccgaggtgggaggatcacctgaggtcagaagttggatacaagcctggccaacgtggcaaaaccctgtctctaaaaaaaaaaaaaaaaaaaaaaaaaaaaaaaaaaaaattagtcaggtgtggtgggcacctgtaatcccagctactccggaggctgagacaaaagaatctcttgaatccaggaggcagaaattgcagtgagccgaratcgcgccattgcacttcagcctgggggataagagcgaaactccctcaaaaaaaaaaaaaaaaaaaaaagccttcttcttttggtttaaaaaattcaagtaaaatccaataatatacattttatactgagaaattagtctcaaacagaggctgacttcacaaagtttccaccagtatatgcctttatatctaactt

SEQ ID NO: 869519 - DNA, 511 bp, Homo sapiens
agtggtgccttttcagtctgctttgtgtgtgtgtgtgtgtatgtgtgtgtgtgtgtgatggaatcttgctttgttgcccaggctggagtgcagtggcacgatctcggctcactgcaatctctgcctcccgggttcaagccattctgctgcctcagcctccccagtagctgggattacaggcaggtgccaccatgcctggctaatttttttgtatttctagtagagatggggtttcaccaygttggccaggctggtgttgaactcctgacctcaggtgatccgcccgcctcagcctcccagaatgctgggattacaggcttgagccactgagtctgcttttcttagcaggctctgaagaagcaccattaagattttccaggtattttgagtggggtattaactgccactgctgtctttagcctacctcagactccctgtttgcacatttctctcctagttttcacttctctaagtgggttggttgctaataagcagtttaaattttgtctat

SEQ ID NO: 869520 - DNA, 672 bp, Homo sapiens
ctttttcaactttaaatacatgtatcttgtcacgtttgtttctgctgctttctgtgttaagcataaagacattatatcttttcctctgaagtttttggtctctacttttttttcatcttctctcccctacccttatctctctctgtgcatctttccttctccagttcacctctttaatctgcaggtttgccttggtatctrtaaggtggaattgaagaattatttgttcttagaaaatagaattttatcattaaagctttctttgaaggaagcctgaattgtgttcttatttgcccaaatatcccttgatggaagaaactctcttaactcccatttgagtatgtgcggcagggtaggtgggaaataagattctctttaaaaaattacatgttgaagtattgcttctttttataatcacaagtgaacaagaacagtgtgcttttgatgacgtgctttctttttatgctgctaattagacttttttgatttttgtgcttaccaaaatactaactcttttgttgatagatgctcagaatttctcgtttctacgatgtaaatggtctaaaggaaatgtatgttttttttcaacatgattttttgagataataatctcattaaaaaaaaactttgactccagctaagcttcttattttatagctatgacttcctgtg

SEQ ID NO: 869521 - DNA, 557 bp, Homo sapiens
tttttcaggaaggactagatgttttgaaaggatgaataagtcacatgtgattaaatccacccccaactccaatattttcctaagactttggatttcttgatttatattaaaccaaagcatttctgatatcttcacttcatttgctatagactaccatttggtccagctttaataataaaaaaagtccaagaaaattactaaatctacttccagctatttgggctagtttgacctagtacgttaaatccaraatttattgtaagtgcgccaatatagacattttcaacctgatgtaaaatataatttcccctctttggtctagcatccttaggaccaattccctcatacatatccaaggtcttttgctggtgtaaaatgttgaaatgtataagtcaacatctggatttggtttgttgaatttatccccaagagcatactgggatctaccttcagatgccaggtgaagtagtagagcaaggcagggggagtcttagcaccatgttctttgaagtcattacaatgtcttcaagcatcacaggatcagccttaactgacag

SEQ ID NO: 869522 - DNA, 621 bp, Homo sapiens
ttttataaggggcttttccccaacttcactctatttctttctgctcccgccatgtgaaggaggacatatttgtttccccttctgctgtgattgtaagtttcctgaggcctccccagccatgctgaactatgagtccattaaacttcttttctttataaattgcccagtattaggtatgtctttattagcagcatcagaatgagctaatatagtaaattggtaccaggagtggggtgctgctgtaaagatacccgaaaatgtggaagtgactttggaactgggtaacaggcagaggttggaacagtttggagggctcagaagaagataggaaaatgtgggaaagtttagaatttcctagagacttggagggctcagaagaagataggaaaatgtgggaaagtttagaatttcctagagacttggaggkctcagaagacaggaagatttgggaaagtttggaacttcctaaagacttgttgaatggctttgactaaaatgctgatagtgatatggacagtaaagtccaggcagagatggtctcagatggagatgaggaacttgttggaaactggagtaaaggtcacttttgctatgcaaagagactggtggcactttgcctct

SEQ ID NO: 869523 - DNA, 706 bp, Homo sapiens
gtctctaatgtcagttatatatgctaacttagaggacaaacaattacaaattaattataattatagactcaattgaaccctctttctgtctaagatatcctgattgcctttgtcttggaaatagaagttgcccaatgtatgcctttgtatagatgagtcctgactgatctggcctctaaagtggaaaaataactcagcaatgaagtctggacacctattactactttttcagtaacaagtttctcggatcctggccatgggacttctcctctttggccttacaaaacgtggccttaggaattgaggatgcaaacatctcatttggttctaaagtttatctttttctctttaaatttattcagaaatattgtataacrgttttacactctacatgtaatagaaaaacttttgtaggtattctgctcaagaaatgacttccaaagggaagttagcataaattattgagtagatgccaccattttgcatgccaaaatcgaaggaggccttaacttgagaaacaaacatcatgatctgagacaacagtgggccacaagtatttatcttctgcagcttaatctactcacatattgatgtggggttgctctaccaccaacctacataaacgaattctgattgtctaatcaacaggttgaaaatatgcatgagaatgaagggtaagtacagaagcttaaggaaagaagaagga

SEQ ID NO: 869524 - DNA, 598 bp, Homo sapiens
cacataggctcaaaataaagggatgtaggaatatttaccaagcaaatgaaaagcaaaaaaaaagcaagggttgcaatcctagtctctgataaaacagactttaaaccaccaaagatcaaatgacaaagagggcattacataatggcaaagggatcaatgcaacaagaagagctaactatcctaaacatatatgcacccaatacaggagcacccagatacacaaagcaagttcttagagacctacaaagagatttacactcccacacaataatagtgggaaactttaacacccctctgtcaatatcagacagatcaacaagatagaaaattaacaaggatattcaagacttgaactcagctctcgaccaagcagagctaatagacatctacagaactctccaccccaaatcaacagaatrtacattcttctcaattctttatacaaatatgaaaagataatttatttctcagtaggttaactctaatttctttttttctttttctttttttttttttttttgatgcagagtctcagtctgttgcccaggctggagagcagttgcacaatcttgtctcactgcaactttttcctcccagg

SEQ ID NO: 869525 - DNA, 638 bp, Homo sapiens
ctgtctcctctaaattctatgaactgtttccttggattgagtcattctagttttggacctaaaccaccatggaactgcttttatgaagtgtctctctgttctgctcaccagcctaaggcgagtgccacaggacgggcccacagtgctggattcagtgtcaggattctmctgggactttcaatcttgacattcttctctgggttaagtattgtaaataaatgtgttttccctgagaatctgtttttttctttctttcttaatattacaaacattataaatgttataccacatctgatttctctctttgcactgatggataaaaggtcagagtccaatctgtggcctgcctttagcaagtatatcaaacacaataaaattgaatgcacttgggtaatttactctgttttgttcttttcttcccagcccttaattttcctttgtccttcttcttgaatattcatttttaagtgcttttaaaaatgtcttattgctaccaagtgttatacaaatacaaaataaataactaaagtgggcattccagaagccaaggagtatcttcaattaaattagcccaggtaaaataaattggaacaatgaaaccccatacttatggactctaattgattacaacatatgat

SEQ ID NO: 869526 - DNA, 574 bp, Homo sapiens
gtgggcacacagccaaaccatatcataccgtccctggcccctcccaaatctcatgccctcacatttcaaaacacaatcatgcctttccaacggtcccccaaagtcttagcttattctagcattaacccaaagtccaagtccaaaatctcagctgagacaagacaggtcccttctgcctatgagcctgtaaaatcaaaagsaagttagttacttcctagatacaatggtggtacaggcattgggtaaatacaccctttccagatgggagaaattggccaaaacaaaggggctacaggtctgatgcaaatccaaaatccaatagggcagtcattaaaccttaaagttccaaaatgatctcctttgactccatgactcacatccaggtcacgctgatgcaagaggggggctcccgtgaccttggaaagctctgcccctgtggctttgcagggtacagcctccctcctggctgctttcattggctagtgttgagtgtctttggcttttccaggtgcatggtgcaagctcttggaggatcttccatactggagtctggaggacagtggccctcttctca

SEQ ID NO: 869527 - DNA, 574 bp, Homo sapiens
gtgggcacacagccaaaccatatcataccgtccctggcccctcccaaatctcatgccctcacatttcaaaacacaatcatgcctttccaacggtcccccaaagtcttagcttattctagcattaacccaaagtccaagtccaaaatctcagctgagacaagacaggtcccttctgcctatgagcctgtaaaatcaaaaggaagttagttacttcctagatacaatggtggtacaggcattgggtaaatacaccctttccagatgggagaaattggccaaaacaaaggggctacaggtctgatgcaaatccaaaatccaatagggcagtcattaaaccttaaagttccaaaatgatctcctttgactccatgactcacatccaggtcacgctgatgcaagaggggggctcccrtgaccttggaaagctctgcccctgtggctttgcagggtacagcctccctcctggctgctttcattggctagtgttgagtgtctttggcttttccaggtgcatggtgcaagctcttggaggatcttccatactggagtctggaggacagtggccctcttctca

SEQ ID NO: 869528 - DNA, 645 bp, Homo sapiens
ccttcatttctacccaatcatggactcactcaactattataaaaattattacaagcagtgaatatacctgacaggtatttatgggtgactttttgagaaaatttcaagggtgcatatactttaaatcagtatctacagagtgtctggctaccacaaggattcccttcacctgaccaacagccaggcttatgctggttcctgaacactggcaaaaagtgaaaaagcttactgttaagctttcatcttgttagactaaagcctccaataactgatgtattttatgaaataatgtcaaaataaagaagcttaacactaaaaactctttacrgtaaatgtgatcgccaacctacatttccagcatcattatccactacctgctgacacaaattctacgttttgaccaaacgtactcttcccttgagtattgcatttccaagaaatttccctcaactaaaatgcccactcaatttctcttcttgaacagcttattcattcctcatatcagcactgaccacctcactccagagcactctttttctaaattgcaattttaaaaatcacaggaggtctctaatgccattccatattccttgatgcccatccacttgctaacacttatgaaatggtcattgccttcattgtatt

SEQ ID NO: 869529 - DNA, 531 bp, Homo sapiens
gaagtggaacttttcctctgatcccagagtgttttcaatgtttcaaaatctccaagtactcaacatatgtacaattatacataaacaaacttaggcatagaaataggacaggtaaatgtgaagaaatctgtagatttatctcacattaatcatgaacttaaattagcaaccttctaaaagtaatgatagaaaaagagggctttcctatcacatcacatataggtastgattgcctactgtgtatatgttctttacatttatattttttgttctattcttacagcaaccctttgaggtgaatattattttccttattctatggagaactatggttcaaagagtctaagtaatgtgctaagaggacacatttagtgaatagaggaaatagactttatcctgtcaacttaaaaaaacacaatttatgaatttagaagaggagactttatttctgtcaacttaagataatacaatttataaatttagaagaggagactttatttatcataaagagttgcagcctacagccattct

SEQ ID NO: 869530 - DNA, 548 bp, Homo sapiens
aaatacattttaagatataacatttaggctggcctgatcccagcactttgggaggccgaggcggatggatcacctgaggtcaggagtttgagaccagcctagccaacatggtgaaaccctgtccctactaaaaatataaaaattagccaggtgtggtggcgtgtgcctgkaaatccagctactcaggaggctgagacaggagaatcgcttgaacctgggaggcagagattgcagtgagccaagatcccaccactgcactccagcctgggtgaaagagtaaaactctgtcttaaaaaaaacaaaaaaaaaatgtaaacccaaatgaatgtgttccaaaagggaaaaatactatttgtttcagcctcgtatttaaaaaattatgtatctaaaatttgtattaaatttttcaaggttagtttttgtcattccatgaatcaggcagaatctaaatcaaggccactttttattgcatttttaagtttgtagggaaatataatccaaactcagtagtggatgtactaggataatacattgtaagttgtgatcag

SEQ ID NO: 869531 - DNA, 621 bp, Homo sapiens
gcatttagcccatttacatttaagattaatatgtgtgaattttgtcttgtcattataatgttagctggttattttgctagttagttgatgcagtttcttcctagcattgatggtatttacaatttggcatgtttttgcagtggctggtsctggttgttcctttccatgtttagtgcttccttctggagctcttgtaaggcaggcctggtggtgacaaatatctctcagcatttgtttttctgtaaaggattttatttctccttcacttatgaagcttagtttggctggatatgaaattctgggttgaaaattcttttctttaagaatgttgaatattggcccccactctcttctggcttgtagagtttctgccaggagatctgctgttagtctgatgggcttccctttgtgggtaacctgacctttctctctggctgcccttaacatttttttccttcatttcagctttggtgaatctgactgttacgtgtcttggagttcctcttctcgaggaagttctcctggataatatcctgaagagtgttttccaagttggttccattctccccatcactttcaggtacaccaatcagatgtaaatttggtcttttcacatagtcc

SEQ ID NO: 869532 - DNA, 621 bp, Homo sapiens
gcatttagcccatttacatttaagattaatatgtgtgaattttgtcttgtcattataatgttagctggttattttgctagttagttgatgcagtttcttcctagcattgatggtatttacaatttggcatgtttttgcagtggctggtgctggttgttcctttccatgtttagtgcttccttctggasctcttgtaaggcaggcctggtggtgacaaatatctctcagcatttgtttttctgtaaaggattttatttctccttcacttatgaagcttagtttggctggatatgaaattctgggttgaaaattcttttctttaagaatgttgaatattggcccccactctcttctggcttgtagagtttctgccaggagatctgctgttagtctgatgggcttccctttgtgggtaacctgacctttctctctggctgcccttaacatttttttccttcatttcagctttggtgaatctgactgttacgtgtcttggagttcctcttctcgaggaagttctcctggataatatcctgaagagtgttttccaagttggttccattctccccatcactttcaggtacaccaatcagatgtaaatttggtcttttcacatagtcc

SEQ ID NO: 869533 - DNA, 583 bp, Homo sapiens
cgtgtgcatgtgtctttatagtagaatgatttccaatcctttgggtatatacccagtaatgggattgctggatcaaatgctattactggttctagatccttgaggaatcaccacactgtcttccacaatggctgaattaatttacactcccaccaacagtgtaaaagtgttcctgtttcttcacatcctctccaacatcagttgttctctttttaatgattgtcattctaactggcatcagatggtatttcattgtggttttgatttgcatttctctaacgacaagtgatgatgagctttttttcatatgtttgttgacctcataaatgtcttcttttgagaartgtctgttcatatccttcgcctactttttgatgggttgtctttttcttgtaaatttgtttaagttctttgtagattctggatattagccctttgtcagatggatagattgcaaaaattttctcccattctgtaggttgcctgttcactctgataatattttcttttgctgtgcagaagctctttagtttaattagatcccatttgtcaatgttggcttttgttgccattgcttttggtg

SEQ ID NO: 869534 - DNA, 630 bp, Homo sapiens
tgcttatcagcttaaggagaatttgggctgagatgatggggttttctaaatatacaatcatgtcatctgtaaacagggacaatttgacttcctcttttcctaattgaatactctttatttctttctcttgcctttttgccctggccagaacttccaacactatgttgaataggagtggtgagagagggcatctctgtcttgtgccagttttcaaagggaatgcttccagtttttgcccattcagtatgatattggctgtgggtstctcaaaaatagctcttattattttgagatacaccccatcaatacccagtttattgagagttttcagcatgaagggctgtggaattttgtcaaaggccttttctgcatctgttgggataatcgtggtttttgtttttagttctgtttatatgatggattacatttattgatttgtgtatattgaactaggtttgcatcccagggatgaaacccacttgatcatggtggataagctttttgatgcgctcctaaattcagtttgccagtgttttattgagaatttttgtatcgatgttcatcagggatattggtctaaaattctctttttttgtgtgtgtctcttccaggctttggtatcaggatgat

SEQ ID NO: 869535 - DNA, 617 bp, Homo sapiens
aaactacaaaaaagactcataattttaataaattttgccttcttcatctcttctcaagaaaacaaatgcctctgctttattgggtgacatgatcataaggagatgtaacagctctgatttgtattactgaatctcattttcctcatttgtgaaacacgagtttaaaaatccttttgaargtcaaatgagaatatttgatattattgtgtaaactgtcaagtgctacacaaatattagtcatttttttccacaattgtttttagcatgtgtatgtcacatggttaacgtagcattctcataaaagaaaccttgaaatgtctctcctactcaatttttattttgcaactattttcagtcattattatgtatgatatgctttttaggggcatttgaattttaaagagaataagtaaaaactgaaaggagaaggacaatgaaattatgagattacagtcataataatttcattgattaatttttcatagaactatattatattgctcccaaaagattttccgagaaattaaaaaatgctgcaccaccatttgaaatggctgtacaactgctgcttaggttagagttaacttttttttaagcctgaaaatacagttatattt

SEQ ID NO: 869536 - DNA, 663 bp, Homo sapiens
catttagcactgtaagctttcctcttaacatttaacatgcttttgctacatgccaaagattttggtatgttgtgtctctgttttaatctactttgaagattttttttaaatttttgccttaatttcattgtttacccaaaagtcattcaggagcaagttatttaatttttacgtaattgtgtggttttgggagmtcttcttggtattgatttctattttgcactgtgggtagagagtatggcagagatgatttcaattttcttgaatttattgagacttgctttatggctgaacatgtggtcaatcttagagtatgtttcatgtgcagatgagaagaatgtatattctatggttgatgggcagagtgttctttctgttatgtccaattggtcaagtattgaattcaagtccagaatttctttgttagttttctaccttgatgatctaacactatcagtgggttgttgaagtgccccacttgtttgatttttgttttgctttttggggggcctagtagtattcatggtttctctatcctctggatccaacctactgctctgaactcattttccacctcttcattttacttccacaagtctatcttttttcccttctgcatggactactgtcatagccttacaaggtctcttcactgttactact

SEQ ID NO: 869537 - DNA, 633 bp, Homo sapiens
tgacccggcacattcccagatatgatagctacaagaacaggcccccttgcttgagaaaaacagagagaggagtaaagaggactttgtcttgaacttagcagctcaactacagtagagaagagcaccaagtgggcattggggtcccccgttccaggccttggctcttgtacagcatctctggacctaccttgggccagaggggagcccactgccctaaagagtgagtcccaggcctggcagcattcaccacaagctgaccaaagagcccttaggccttaagtgaacattggaggtaccctggcagtactccttatggacctgtggtggtggtggtgaacatgaggagagactcctctacatagggaargggaaggaaaggatggaaaaaacttcattttgtggcttgggtgccagctcagccacagtggaacagagcaacaggtatattactaaggtttctgactccagaccctggctcctggacagtatctctggacctgcctaaggcctggaagaatttgctgcccttaagggaaggacataagcctggttggttttaccacatgctaattgtagagccctagggccttgagtgaacatagccagtagtcagctagtggttccagttggtgc

SEQ ID NO: 869538 - DNA, 563 bp, Homo sapiens
ataacccacagatgactcatctccactgtacttcctaactttcctcagatgccatctttaataaccatcaaaacacaatccctttgaatgaacggaggctttggaacctgtgcagtgcatacaaaggaagtatgtttaccagaaatatatcttcccagctgatctatacttatcctctttcatctttatccacatttcatacaaagaaaataggcattgctgttaccacagaaaagcatgaatgctacaattytcaaagattctgtgctttcaaagatagctctaaaagaaccctgacaggatataaagggttaactctctattgggttgggcagaaaagaaggtttatccaagggggtaagctcagccatcctccctcccttccatagacacatccaaccacgactccctcactggattacgctgcccagttcacagccaggggcatttccacagctgttaaacctgcatcaggaaacaaacggccttatttttagctttcagtggtttgtgtaaaaccccataataattaggcctcattactctgtgcagctccatgccac

SEQ ID NO: 869539 - DNA, 565 bp, Homo sapiens
atttactcattgtttcattctttagcacttacagtcaccatgatagtttctgaggacaaagattagatcgctatgttggccggtgctgcaagtccccaaaatgggaccatgggagggagtggaattgtagggagtggaagtaggagggtaggacatgagttcttgggcgatggcattagttaccaataaaaaaggcagtatgattctttctcctaatgagaggaactgagaccaggcagctgagagaaccttgtcagtctctagatacgagaggaatagtttctttgaaaggaaaagttcaaaattgaattctgagaaccatgatcaggatggaaggcagaagtcagaagggagggtgcagtttcagaccgtggatctgggaagagatttcctcactgcaccgtgatctccttaamttaaggacagaaagttccaaagagccctaatataccttcaaggcctcatctgcctggatcagtctccttcttgctttctgcattccaagcacactgccttcttactacatctggaatgctccctgtttacccagggcataaatcccact

SEQ ID NO: 869540 - DNA, 593 bp, Homo sapiens
ttcctggttgggtgctatttctctagaccacatagtatatatctcatatcatgtttcctcacaaatatcagaatatcctggcacttaaaagagatttttgtaaattcttatagctgatagaatgtatagtatatgacattcagtaattcacttattcatcatcgcaataagcatataacttacaatgctgcaggccytgaagtggatagtgttgaaatatttgaggcattcacagaggtatcactaccgaataattcttattaaataaatctctaggagcattattggatataaatgcgtaaatttttctaagagacctataattcttcatttgaaagggttttcagaagtcacactatccatttcctacctccaagcagagctgcatccaactttgatgactgcaatcatgtgtagtatcactgatctaagattatatatatagagagtatagtatcactgatatatagtattgtatcactgatctaagattatatatatatatatatatatatagagagagagagagagagagagagagaaagagagagagagagatttaatccacaccataattctaacagatagatgtt

SEQ ID NO: 869541 - DNA, 682 bp, Homo sapiens
tcccaggcaaacagagtctgaagtggacctccagcaaattttaacagacctgcagctgagggacctgactgttagaagaaaaactaagaaacagaaaggaatagcaccaacatcaacaaaaaagacatccacaccaaaacccaatctgtaggtcacaaacattaaagaccaaaggtagataaaaccacaaaggtggggagaaaccagagctgaaaagctgaaaattctaaaaaccagagcacatcttctcttccaaaggagcacagctcctcrccagcaatggaacaaagctggatggagaatgattttgacgagttgaccgaagtaggcttcagaagatcggtaataacaaacttctccgagctaaagggggatgtccaaacccatcacaaggaagctaaaaatcttgaaaaaagattagactaatggctaactagaataaccagcacagagaagaccttaaatgacccgatggagctgaaaaccatggcatgagagctacgtaacacatgcacaagattcagcagccaattcaatcaagtggaagaaagggtattagtgattgaagatcaaatgaatgaaatgaaacaagaagagaagtttagagaaaaaagagtaaaaagaaatgaacaaagactccaagaaatagggaactatgtgaaaagaccaaatctaagtttga

SEQ ID NO: 869542 - DNA, 614 bp, Homo sapiens
tggtcaagtttggaataggtgtggtgtggtgctgaaaaaaatgtattttctgttgatttgaggtggagagttctgtagatgtctattaggtctgcttggtgcggagctgagttcaattcctgggtatccttgttaactttctgtctcgttgatctgtctaatgttgacagtggggtgttaaagtctcccattattattttgtgggtgtctaagtctctttgtatgtcactggggacttgctttatgaatctggatgctcccatattgggtgcatatatatttaggatatttagctcttcttgttgaattgatccctttaccattatgtaatggccttctttgtctcttttgaactttgttggtttaaagtctcttttatcagagactaggattgcaacccctgccttttttgttttccgtttggttggtagatcttcctccatccctttgttttcagcctatgtgtgtctctgcacrtgagatgggtttcctgaatacagcacactgatgcatcttgactctttatccaatttgccagtctgtgtcttttagttggagcagttagcccttttacatttaaagttaatattgttatgtgtgaatttggtcctctc

SEQ ID NO: 869543 - DNA, 649 bp, Homo sapiens
agatcagagaggactatcatccttggacatttgtcccgactgttcctagtaatattctatttccttttccaaagccttacgctccctttaagagcagatgttgattatgagagaggggatggggcagaagctacagkgataggttgatagcaaactcccaaaatcaaactgcagctggcattgagaaatctcatttctatttcatagattcttagaactttccatatggccattgacttaatttacaaatgaagaaactgagactcatttctctaggacacacaaagagctggtagcagagcctactattgtgtcacttatcaaaaaatcaatgtgacagtcagtatttcgttagcaagatgggaattttatttgcttcaccagagtgagttatagggattgattttgtcacagcttcaaagtgacattttgacaaaagaaatgtcattactgccctcgaaagaaagctctttaatggagccggtcttggaatggccagagccaggcaaagatctcaaatgtccagaggtgatctacagatccatggaggagaggtggaaggagagccatactgctgcactccagggggcatcaggaaggcaggctttgccctcaaggtgaataaactcagaagaggctactctttgat

SEQ ID NO: 869544 - DNA, 610 bp, Homo sapiens
actgtgccttctttctttgggggtggattcagcttctctatcttcatccttagagggctgcatagaggttttacacttttgcttttagttgaagattctgatagagatgaaaggcaagagaaaagaggaaatgggccactgtatgaccaaaagtggtgggcaccagyaataaagttactaacatgatttaattggaccaaataatttccttgcttctggtaaaattcatttttttctttgactgtggataagaagggcctgtctgtctgtttataaatgtagttaaggaaaacttccacatttctggaaaaaccccagctacaagtcaaaactaatcgaaggacatcaacatgagatttcctgtgacttggcacagtgatgtgtattccctagaggcctgttatgtttgaattaacttaatcatgctttataaaaataccatataattttcatatgtgataatctggcagcattaaaaatattaccgtatattttaagctaataaatctcttaggctgataataaaaatcagcctcttatacaatgattgataaaaccacaaatattatttcaataatcattaaaagacaaagtattaagatgattttcc

SEQ ID NO: 869545 - DNA, 610 bp, Homo sapiens
actgtgccttctttctttgggggtggattcagcttctctatcttcatccttagagggctgcatagaggttttacacttttgcttttagttgaagattctgatagagatgaaaggcaagagaaaagaggaaatgggccactgtatgaccaaaagtggtgggcaccagcaataaagttactaacatgatttaattggaccaaataatttccttgcttctggtaaaattcatttttttctttgactgtggmtaagaagggcctgtctgtctgtttataaatgtagttaaggaaaacttccacatttctggaaaaaccccagctacaagtcaaaactaatcgaaggacatcaacatgagatttcctgtgacttggcacagtgatgtgtattccctagaggcctgttatgtttgaattaacttaatcatgctttataaaaataccatataattttcatatgtgataatctggcagcattaaaaatattaccgtatattttaagctaataaatctcttaggctgataataaaaatcagcctcttatacaatgattgataaaaccacaaatattatttcaataatcattaaaagacaaagtattaagatgattttcc

SEQ ID NO: 869546 - DNA, 610 bp, Homo sapiens
actgtgccttctttctttgggggtggattcagcttctctatcttcatccttagagggctgcatagaggttttacacttttgcttttagttgaagattctgatagagatgaaaggcaagagaaaagaggaaatgggccactgtatgaccaaaagtggtgggcaccagcaataaagttactaacatgatttaattggaccaaataatttccttgcttctggtaaaattcatttttttctttgactgtggataagaagggcctgtctgtctgtttataaatgtagttaaggaaaacttccacatttctggaaaaaccccagctacaagtcaaaactaatcgaaggacatcaacatgagatttcctgtgacttggcacagtgatgtgtattccctagaggcctgttatgtttgaattaacttaatcatrctttataaaaataccatataattttcatatgtgataatctggcagcattaaaaatattaccgtatattttaagctaataaatctcttaggctgataataaaaatcagcctcttatacaatgattgataaaaccacaaatattatttcaataatcattaaaagacaaagtattaagatgattttcc

SEQ ID NO: 869547 - DNA, 577 bp, Homo sapiens
aggaaagttatttccatcatgaatattgattttactttatgccgtgcaactgaaaatagtttagaaaagcatgtttttcttaaaccttcatcattattgcatttttctaggcaggtagcacactaaggagtgtctacaggagacgagaatgaaaaatcaatggattgagagttctttccacattactgcgtagtaaatagcctggtaataagacttyaatagcttggtaataaggatttacacaaataaaaaacaaaatggtttaatttaaatgtgaaacattgtaagccttttaaaaaaacaaaacttcataagcatacttagtagaaaaaggaggggacaaagagtataccagacaatagaaatgatgatcttcaccagcggttttgactttggcttagaaagttattctcatccttgtttttttccttatggaatgacttcaagccatacagttcacaactattctgcggtggtggtgtctccattacctcaatataagtgggatgtattttgtatgtatacatcatgctatctttgaatacaaattaagtgttcaaacaattctaggagtaat

SEQ ID NO: 869548 - DNA, 577 bp, Homo sapiens
aggaaagttatttccatcatgaatattgattttactttatgccgtgcaactgaaaatagtttagaaaagcatgtttttcttaaaccttcatcattattgcatttttctaggcaggtagcacactaaggagtgtctacaggagacgagaatgaaaaatcaatggattgagagttctttccacattactgcgtagtaaatagcctggtaataagacttcaatagcttggtaataaggatttacacaaataaaaaacaaaatggtttaatttaaatgtgaaacattgtaagccttttaaaaaaacaaaacttcataagcatacttagtagaaaaaggaggggacaaagagtataccagacaatagaaatgatgatcttyaccagcggttttgactttggcttagaaagttattctcatccttgtttttttccttatggaatgacttcaagccatacagttcacaactattctgcggtggtggtgtctccattacctcaatataagtgggatgtattttgtatgtatacatcatgctatctttgaatacaaattaagtgttcaaacaattctaggagtaat

SEQ ID NO: 869549 - DNA, 455 bp, Homo sapiens
gctggtattcatgaaacattttctagtactccttttcctacttcagtatttgttgctttcagcacaaaaccatgtgcaacttttgtatactcattggacattttaaaatatgtcattttaatgttggctgtttggtcttagagacctcaatcatctctacctgatgagctttgcttcagtagctccacttgccttttgttacctacgaaaagagattttattttattttattaaagtastagagaggagatggggagtaaaagagagaatatgaagactattactacatttcgggagcagatacttaaacaaaagtttaagtgcgagttaattatccacgtaatagatatgtttggaatccagattcaggtccagactaaagtcatgttcttttttcattcagaatgcatgatttccaattcaatgttgcccattattagaatagcttcctgttt

SEQ ID NO: 869550 - DNA, 668 bp, Homo sapiens
accaccttgctgaaataaggcctgcagacaagactggaaaaataagaatgaaaaagaatgaacaaagcctacaagaaatatgagacttcataaaagaccgaaatctatgaatgaccggagtaccacaaggagccagggaggatggaaacaagctggaaaacacacttcaggatatcatccaggagaacttccccaacctagaaagacaggccaacatgcaaattcaggaaatacagagaacacgattaggatactccatgagaaatcaatatcaagacacgtagtcatcagattctccaaggttgaaatgaaggaaaagctgttaagggcagccagagagaaaggccagttcacctacaaagggaagctcatcagactaacagyggaactctcagcggaaactctacaagccagaagagattgggggtcaatattcaacattcattaaaaaaaagaatttccaacccagaatttcatatccagccaaactaagtttcataagcgaaggcgaaataaaatcttttccagacaagcaaatcctgagagattttgttaccaccaggcctgcccttcaagagctcctgaaagaagcattaaatatggaaagaaagaaatggtattcaaatagaaagaaaggaagtcaaatgtctctgtttgcagatgacatg

SEQ ID NO: 869551 - DNA, 557 bp, Homo sapiens
ataaatactccacaatataacttatccacaaatacaacaacaatatttttcaactaaggaactgctttaggaggcttgcaactgagtttgtaaagggagaaagtggcaccagccttgccaaggaaagtagccaaaccaatcctggcaatyggtgatggaacagctgtcacatgtacaaaaagagtcaagacggagcctagaaacattgataaaatgtagagcagaaaagtgagcagagaaaaatggcaaaggacattctaaaaaatattcaaatgctcacattaaaatataagcattttatttgtataagtacaacttaaagcaagaaaccatttttcaattatcagagtggcaaagatctttttaaaatgataatactcaggcttgtaggttttggtgtaacccatgtgcccttctggcaggagtgtactgtaaatgagtccaatctttttgcagggcaataggtaggcatcatagcctttaaaattatcaaatctttaacctgctattggagttttagaaatttaaccagaggaacaatcagcttttttttttaa

SEQ ID NO: 869552 - DNA, 611 bp, Homo sapiens
tcagagggtgcaagcttcaagccttggcagcttcagtgtgatattgagcctgtgggtgcacaggaggcaagagctgaggtttgggaacctccacctgacttcaaaggatgtatggagatgcctggatgtccaggcagaagcctgctgcaagtgcagagccctcgtgaaaatcctctactatggtagtctgaaggggaaatgtggcattggagtgcacaagcagagtccccactggggcactgcctagtggagctgtgagaaaagggccacyatcctccagaccccaaaatggtaaatccactgacagcttgttctgtgcacctgaaaatgctgtaggcactcaatgtcagcctgtgaacacagccataggggctctaccctgcagaacagaagggttagagcttccaaaggccttgggagcctatcttttgaatcagcatgtgctggatatgagatatggagtaaaaagggattattttggagtggtaagatttaaaaactgccctgctgagtgtcagacttgcatgaggcctgtagcccctttgtttcagctgatttctcccatttggaatgggagtatttacccaatgcatgtaaccccattgtatctt

SEQ ID NO: 869553 - DNA, 647 bp, Homo sapiens
accaaaaagtcaaagaacaagtattggtgaagatgcagaaaaaagggaaccctcttacactgttaatgagaatgtaaattagtaaagccattatggaaaacatcatggatgttcttcataaaattaaatatgaaacttaccatatgatttagctaacccactactaggtatatactcaaagcaaatgaaattttcaccttgtaaatacatcttcactcccacattcattgtagcattattcacaacagcccatctatggactcaccctaaatgttcattggtggatgagtaaagaaaatgcagtatgtatacacaatggaaaactattcagccttaaaaaagaaaatgaaactcttgtcatccgtaacaatttggataaacccagtgaacattatgttaagtgaaataaattaggcacagaaagacaatactgcgtgatcttamttacatgtgtaatctaagaatattggactcatagaaacagaaagtaaaatgatggtcaccagaggctggcggaaagaaggtgttaaggaggtgttgttggtcaaaggatacaaaattttagttagaaaaaatatattgaaaagttatattgtatatcatgatgactaccattaataatattataatggtatacttgaaaattg

SEQ ID NO: 869554 - DNA, 634 bp, Homo sapiens
acagatatgtacaatcatggcatttaaaaaatgcaatgacttttacctacatttaaataatttcacaaaccatgtgaccctgtgctatgattgtaaggagcacacattattgagtgtccaaggcaaagtggaattaaattcargaaagagagtctttttgttgaactgctatttctttggatggaatcttattcattctctgttaatatacttaagtgtttgcaaaggttggagggaaaaaagagtgcttatattggaaagaaatgtttgctggctgtttccactgtaaatttctttaaatgcatttatctaagtggatacaaagtggggtcaaagaatggaaagtcctgtttcatattgtagctgttaaaaacaacaacaaacaaacaaacaaaaacagtaaatttttcctggaagcagagggaaaatttgttatgtgccccccaaaaatggtttttagaatttgttttgaataatgaaagtctcccaagtagaagatcccttttgtttttctcttcttccatacagtttatgctcattgtgaattatctgaaccagactctgatagtataatcggctccataaaacaaagcacataggtgaaattcatctcagcattctctcacccatgaga

SEQ ID NO: 869555 - DNA, 663 bp, Homo sapiens
aacaaagcagttcacaacatattgactggataattgctagtgaaaagtagcaatgatgatcacattgaaaatcttttgttaggtggtggttttctcttgcataagcctcttcatttgttgaaaccatagattctaaatttgctctatcaaagtgatcattagaaaaatataatgtacttagtgtataaattttagaaaatgtccttttcaatcctgttaatttgattgaatatgtgcattttgaattatgaatgtaaatatgaatatgtatgacatatgaaatatgacttgacatcaaagagtaaccttagatcgtggcaacgtttttttctgaaagcacctgcagaaatgtatcttctttgtagtttccaaaacactcagaggccatgggggaagaggggactttggctgtgagatagtgcatgaggtacataaggatacagtaatttcatcataattcatattcataattcmcagtgaggaaacctgaaagttgctaccagttaccaataaatgaaaggtggggtggggtcgctggggggtgcggctttgtgagccagtgcctggactcccacgtcacaaatggaagggcaccgcgtggaaggaactcaaggtctgattggttcttcctaagcaggacacatcaggttgtcagggcaaccg

SEQ ID NO: 869556 - DNA, 648 bp, Homo sapiens
gtgggactgtaaatccaattacagttctttttctttacacctctttttcttctcagacttgggtatgtctttatcagcagtgtgaaaacagactaatacagtaaattgataccagtggagtagggtgctcctgaaaagatacccaaaaatgtgcaagtgactttgaaacttggtaacaggcagagattggaacagattggagggctcagaagaacactgkaaaatgtgggaaaatttggaacctcctagagacttgctgaatgactttgacaaaagtgctgatagtgtattgaacaataagttccaggccgaggtgttctcagatggagatgaggaacttcttgtgaactggaacaaaggtaactctcgttatgttttagcaaagagaatggcagcattttgcccctgtcctagagatttgtggaacttttaacttgagagtgataatttagggtatctgctggaagaaatttctaagcagtaaagcattcaagaggtgacttgggtgatgttaaaggccttcggttttataaaggaagcagagcatacagttttggaaaatttgcagcctgacaatgtgatagagaagaaaatcccattttctgaggataaattcaagctgtctgcagaaatttgcataagtaataa

SEQ ID NO: 869557 - DNA, 616 bp, Homo sapiens
gattaaatcaagctaattaacatatccatcactacaaatacttctttgtggtgagaatacttgacatttaccttcagcaattttgaaatatacagtacattattattaaccatgctatactctttatctcaaaaaatgtattccctttatctaactgaaacttcgtactctaaccaacatctccttgtttcccctaccaccccttccccctactctctgataaccatcattctactctgattctgtgagtttgttttagattctacattaggaatcatgtgactttgtctgtctgtgcctggcttattccattcagcataacgtcctccagggaagcactttcttgtccacccccttcccctttttaaatagcagtctgttccatttggtggatgcagtatcttattactctaagaatattkctaatgttttcttttgtttcttgaattgtctgtgttgaatttttaaggcttgtttctgttttgtgttggaagcttttcttaaacgtctagagatccttggccatccattcatatgtaagagtggggcactagaaagccaatagaaagttctgtgtacactggccagtgaggtggctcacacctgtaaccccagc

SEQ ID NO: 869558 - DNA, 616 bp, Homo sapiens
aattccatatttataatgttggccacaacattatgattattctttctctgtactttagtatttttcaccatttgtgaagaaacattaaaacaagttaaatggtaaaaaacaaacaaacaaaaaaaaacagatgctggtgaggttgtggagaaatgggaatgctttcacactgttggtgggagtgtaaattacttcagccattctggaagacaatgtggtgattcctcaaaaacctaggagcagaaatatcatttgacccagcaatcccattactgggtatatacccataggaatataartcattctattataaagacacatgcacatgtatgttcactgcagcattattcacaatagcaaagacatggaatcaacctaaatgcccatcaatgacagattaaataaagaaaatgtggtacatatacaccatggaatactatgcagccataaaaaagaactagatcatgtcctttgtgggaacatagatagagctggaggtcattattcttagcaaactaatgcagaaacagaaaaccaactaccacatgttctcatttataagtgggagctgaatgatgagaacacgtggacacaaagagggaacaatagacactgg

SEQ ID NO: 869559 - DNA, 680 bp, Homo sapiens
tttggttgataggctatttattactgactcaatttcagaactcattattggtctattcagggattcattgtcttcctggttcagtcttgggagggtggatgtgtccaggaatttatccatttcttctagatttcctagtttatgtacatacaggtgtttatagtattctctgatgattgtttgtatttctgtggggtcagtggtaatattccccttatttctgattctatttattcgactcttctctcttttcttttttattggtctagctagcagtctatctattttattaattttttattcagaaaacagctcctacattcattgatttttgaaggggtttatgtgtcyccatctctttcagttcagctctaatcttggttatttcttgtcttctgctagctttggagtttgtttgctcttggttctctagttctttttgttgcaacgttaggttgttaacttcagatctttctagctttttgatgtgggcatttagtggtataaatttccctcttaacactgctttagctgcatcctggagattctggcacattgtatctttgctctcattagtttcaaagaacttcttgatttgtgccttaatttcattatttacctaaaagtcattcaggagcaggttgttcaatttttatgtaattttgtgattttgagtgaat

SEQ ID NO: 869560 - DNA, 718 bp, Homo sapiens
ccatgtaataaatcttatcatccttcatctgtggacattagcagagggagagaaggcagaactgaaggaaggttggtgatggggtgtaggggatcctctgcctaatacatcattgtgttcagtgggactcttagtttagggaaaggaaagggacagatgagcccccgttccccacccttgtccccaaaagcaggaaagatggaagggaggttcccagttattggaagaggctcttatgcgttgggggcatgagagttaatgttatttattcatcttctgaaaattcatgtgctgatatttaaataattacrtcatttttactcttttcatgaaaacatagaaacttaagtgcctagggtgatttttaagcataaacattatttgaaaggcagcaaatgcaatattttggcattctattctgcgtttaattccaggggccttaacaaccatagctaaaaatttactgagcacccactatttactgcgttaacagcccggccctccactctcatcttgaattaggttctgttttcagcctctcttccacgtaggggaactgaggcacagagatctgaagaaacttttcgagatgatagagctggtgagcagctgagcccccctgcagtcaggccgcaccctccatgggcatgtcccctcacttgacacgtctgctcagaattcctcagggtctgcatgcctcatcctcactgctggtgtg

SEQ ID NO: 869561 - DNA, 572 bp, Homo sapiens
gtgagtctcttatagacagcatactctttgatctttttaaaatccatttagtcaatctatatattttaattagggttgtaatccatttacttagaaagtaattactgatagggaaggacttactgttgccattttgttaatttttttttctggatgtattataactttctgcccctcctttcctctcttgccgctcactttcttttgtgtttgatttttttttttttttttttgagatggaatctcgctctgtcgcccaggctggagtgcagtggcgcaatctcggctcactgcaagctccgcctcccgggttcacgccattctcctgcctgagcctcccgagtagctgggactacaggtgcccaccaccacacctggctaawttttttttgtatttttagtagagacggggtttcaccgtgttagccaggatggtctcgatctcctgacctcgtgatccacccgcctcagcctcccaaagtgctgggattacaggtgtgagccaccgcgcccggccgtgtttgatttttttgagtgacctgctttgattcccttttgattttcctttgtgt

SEQ ID NO: 869562 - DNA, 610 bp, Homo sapiens
ttatatagcagctctagtcatgatgaactctctcagctttcctttccttcccttttctttctttctttctttctttttttttttttttgagagaaagtctcactctgtcacctaggctggagtgcagtggctctatgacttcagctttactttatctgagaatgtcttacattcttattcatttttgaaggagagtttttaccatatgtaatattgttggttgattttttttcctttcagcattttgaatatattatccaacttcattctgtcctgcaaggtttctgctgagaaatgaggttataatctaatacaagctcccttgtacatgatragtcacttttctctttctgctttcaagattctcattgtctgtgacttttgacagttggattatgatgtgtctctttgtagatctctttatttttattctacttatggttcttttagcttcttgattatgtatgtccatttctttcctcagatttgggaagttttcagccattatttcttcaaatagtctctttccccctttcttccttttaaattcgcataatacatatgttattctgctcaacactctaccgtaagtcccttaggctctctctgc

SEQ ID NO: 869563 - DNA, 639 bp, Homo sapiens
ttctcccagtttatgggtgagaaaacaagctaagggaagttacatgatttttccaagttattctcatgttaaagtatgaagccaggccttgaatttggatctaattcactctaccactttagagaaataggccaagggtttaagagcacttcaagattttctggaatttcttgatgcctaaaagtggaaaaaggtcaagattgccaaggccatggggcagaccttgtacaagaactacctcctgagttctcgtcttctctactccagtctgtaggactgcttacagtcccagaaacatatattatatatcttctctgtgtccttctataatgcaccatccctgatcttcaactattgaggtctacttcaggttcaggtttagtgacacattcacaatgaagactttctacagtagatgtaataacccactctctcctcatcccaaacacataccytcatggcttaggttttgcttatacttccaggctggacctgattttctgtcctagtagggttatttctgtacataggccattttccctttcaggctgtgagggcatcatggcttccttcatacctaatgcacaccattgatcatattagggttcagtgaatgctgattggccatacttctaaacc

SEQ ID NO: 869564 - DNA, 610 bp, Homo sapiens
aaaaatcaatgaatccagtagctggttttttgaaaagatcaacaaaattgatagactgctagcaagactaataaagaataaaagaagaatcaaatagacacaataaaaaatgataaaggggatatcaccactgatcccacagaaatacaaactaccatcagagaatactataaagacctctacacaaataaactagaaaatctagaagaaatggataaattcctcaacacatacaccctcccaagactaaaccaggaagaagttgaatctctgaatagaccaataacaggctctgaaactgaggcaataattaaaagcttaccaaccaaaaaaagtccaggaccagatggattcacagccgaactctaccagaggcccaaggaggagctggtaccattccttctgaaactattccaatcaatagaaagagagggaatcctccctractcatttgatgaggccagcatcatcctgataccaaagccaggcagggacacaacaaaaaaagagaattttagaccaatatccctgatgaacatcgatgtaaaaatcctcaataaaatactggcaaactgaatccagcagcacatcaagaagcttatccaccata

SEQ ID NO: 869565 - DNA, 614 bp, Homo sapiens
acattgattcactccagaaaggtgggacaacttgaaacaggggagctcccatgtcataggtgcattcaaagattttctgattggcaattggttgaaagagttaagttattatccaaagacctggaatcaatatgaaagtgtgtctggattaagataaggagttttagagaccaagattcttatcatgtagatgaagccttcaggtagcakgcttcagagacaatcatagtaaatgtcccttaccagacttaagaaggtgctagactcttagtctttcctggatcaggaaaagacccggaaagggaagaggcttctctatagaatgtagattttccccacaagagacagctttgcagaaccatttcaaaatatgccaaagaaatctattttggggtaaaatactttgatttctttcaggacctgctatctgtcatgtgatgctatagtagagtcaggttggactttggtatctcattgctacaaagagtctgttttgttagtcttaagatctctgttttaacgtgaatgctggtcagttgtgcctggattccaaagaaaggggagtgtaatgaggcctgtctcacctccctttccatcatggtctgcgctagttt

SEQ ID NO: 869566 - DNA, 623 bp, Homo sapiens
aagtaagaagttacctctctccgtctgtctttaaagtgcacatgcattacttgtggatcttgttcacaattataattctggaagtctggggtggattctgagattctgcatttcttttctttttctttttatttgtttatttttttagagatggtgtcttgctctgtcatccaggcaagagtgcagtggcacgatcaaagcttactgtggcctcaaactcccaggctcaagcgatcmtcctactttcagcctcccaagtagctgagactacactaaaggcatgcatccccacacctggctaatttttaaaattattttttgtagagatgggatctcactatgttacccatactaatttctaactctaggcatcaagcgatcctcctgccttggcctcccaaagtgccgggatgacaggcatgagccactgcacctggccttaagatcctacattttaagaagctcccaggtaatgcaacaatgttggtttaagcacaactctgtgagtagcaaggtccttagctcctttgacctaagcgtcatattatgcttttgtatgagctgtggtgctgccccagttttgaggaaagggagcattcatttttagattcagatttcataca

SEQ ID NO: 869567 - DNA, 677 bp, Homo sapiens
tgaaaaacaaaaacaacaacaaaacacagcaccactgtccagaacttctttctctttctctttcacagaaatcggatctgcatgatggtctgagggctctcccgggctcttcctgtgcctacctacttttccctcacaagcgttttccctaataaattatcttgcgtatctaatcacatttgggttgcatctcattgagtaaaaactaacatacaaggcttgattctttgcacttagctttttttctctctctcccacatgtattcagtaactttgtcstagtgttttctgtgttacctctttttctttatatctgtttgtgtatttacatacactacctttttcatacacacacacacacacacacacacagagaaaataccgtttgcatctgtttcttcatttctgttgcaaccatttacttttagctcttaccagtcaactcaagctgatgattaatgctaatgttggctattgttagtgggcactttctgtgtgccacgcctagtgctaaatactttacctatatctcatttgattcataaaatcaccctaaaaaaatctggatgagttggtggaacacagaggatttttaaagcagtgaaattattctgtgtgatactataaaggtgaatacctgtcattatacagttatcaaaacccacagaatgtataac

SEQ ID NO: 869568 - DNA, 475 bp, Homo sapiens
cagcaaccctacaagccaaaagagagtgggggacaatattctacattcttaaagaaaactattttcaatccagaatttcatatccagccaaactaagcttcataagtgaaggagaaataaaatcctttacacacaagcaaatgctgagagattttgtcatcactaggcctccttacaagagctcctgaaggaagcactaaacatggaaaggaacaaccagtaccagccactgcaaaaaagcccagttrtaaagaccatcaatgctaggaagaaactgcatcaactaatgggtaaaataaccagctaacatcataatgacaggatcaaattcacacataacaatattaaccttaaatgtaaatgggctaaattctccaattaaaagacacagactgacaaattagataaagagtcaagacccatcagcgtgctgtattctggagacccatctcacatgcagagacacacataggct

SEQ ID NO: 869569 - DNA, 601 bp, Homo sapiens
caaatgctgagagattttatcaccacaaggcctgccttacaagagctcctgaaggaaacagtaaacatggaaaggaaaaaccggtaccagccactgcaaaaacataccaaattgtaaggaccactgacactatgaagaaactgcatcaactaatgggcagtataaccagctagcatcataatgacaggatcaaattcacacataacagtgttaaccttaaatgtaaatggactaaatgccccaattaaaagacmcagactggaaaattggataacgagtcaagactcatcagtgtgctgtattcaggagacccatctcacatgcaaggacacacatgggctgaaaataaagggatggaggaatatttaccaagcaaatggaagggaaaaaggcagggattgccatcctagtctctgataaaacagactttaaaccaacaaagatcaaaaaagataaagaagggcattacataatggtaaagggatcaatgcaacaagaagagctaactatactaaatatatatgcacccaatacaggagcacccagattcacaaagcaagttctctacaaaactctccaccccaaatcaacagaatataca

SEQ ID NO: 869570 - DNA, 669 bp, Homo sapiens
actagaaaatctagaggaaatggataaattactggacatatacaccctctccagactaaaccatgaagaagtcaaatctctgaatagaccaataacaagttatgaaattgaggcagtaactaatagcctaccaacaaaaaaagcccaggaccagacagattcacagccaaactctaccagagataaaaagaggagccagtaccattccttctgaaactattccaaacaatagaaaaagagggactcctccctrattcattttatgaggccagcatgatcctgataccacaacctggcagagacacaacaaaaaaagagaatttcaggccaatatccctgaagaacattgatgtgaaaatcctcaattaaatactggcaaactgaatccagcagcacatcaaaaaacttacccaccacgatcaagttggcttcattactaggatgcaaggctagttcaacatacacaaatcaataaatataattcaacacataaacagaaccaacaacaaaaaccacatgattatctcaatagatgcagaaaaggtcttcgataaaattcaacacaccttcatgctaaaaactctcagtaaactaggtattgatggaatgtatctcaaaataataagagctatttatgacaaacccacagccaatatcatactgaaaggg

SEQ ID NO: 869571 - DNA, 669 bp, Homo sapiens
actagaaaatctagaggaaatggataaattactggacatatacaccctctccagactaaaccatgaagaagtcaaatctctgaatagaccaataacaagttatgaaattgaggcagtaactaatagcctaccaacaaaaaaagcccaggaccagacagattcacagccaaactctaccagagataaaaagaggagccagtaccattccttctgaaactattccaaacaatagaaaaagagggactcctccctgattcattttatgaggccagcatgatcctgataccacaacctggcagagacacaacaaaaaaagagaatttcaggccaatatccctgaagaacattgatgtgaaaatcctcaattaaatactggcaaactgaatccagsagcacatcaaaaaacttacccaccacgatcaagttggcttcattactaggatgcaaggctagttcaacatacacaaatcaataaatataattcaacacataaacagaaccaacaacaaaaaccacatgattatctcaatagatgcagaaaaggtcttcgataaaattcaacacaccttcatgctaaaaactctcagtaaactaggtattgatggaatgtatctcaaaataataagagctatttatgacaaacccacagccaatatcatactgaaaggg

SEQ ID NO: 869572 - DNA, 525 bp, Homo sapiens
tctttgcataccaaaagtgacctttactccagttcccaacaagctcttcatctccatctgataccacctcagcctggactttattgtccatatccttattagcattttggtcaaagccattcaacaagtctctagaaagttccaaagtttcctacattttcctgtcttctgagccctccaagcctctaggaagttccaaactttcccaaatattcctatcttcttctgagccctccaaactgttctaacctctyctgaagtcacttccacattttcaggtatctttacagcagtgccccactctctgcagtaccagttttttgtattagtccattctcatgctgctatgaagaaatacccgagactgggtaatttatataggaaagaggtttaattgactcacagattcgcagggctggggaggcctcaggaaacttataatcatggtggaaggggaagcaaacacgtccttcacatggcagcagcaatgagaaatgcagagcagagagggggaaaagtccttta

SEQ ID NO: 869573 - DNA, 314 bp, Homo sapiens
tatcttcttctgagccctccaaactgttctaacctctcctgaagtcacttccacattttcaggtatctttacagcagtgccccactctctgcagtaccagttttttgtattagtccattctcatgctgctatgaagaaatacccgagactgggtaatttatataggaaagaggtttaattgactcacagattcgcagggctggggaggcctcaggaaacttataatcatggtggaaggggaagcaaacacgtccttcacatggcagcagcaatgagaaatgcagagcaragagggggaaaagtcctttataaaa

SEQ ID NO: 869574 - DNA, 663 bp, Homo sapiens
acacccagcactttgtaacttataattcattttcttttccatagaaactatgacaacagttaaatgaaagcaagtcttcccaggaatgatcacaagtgcctatttaactaatgttggtattaatagctaataggcattgacaacccacttggctctaggtgctatgctaatcgctttaatgtgatttctcatttactcatcacaaccactcargtgcgtacaattatcatttctatttttacagatgagataactgaaggtaagttatttgtctcaaattacaaggctaataagtgacaaactccaggcttcttaaatctccatatcctttaatactacactatacaatgattttgtatttgcaagaaaaattataatagaaaagtaagctgttatagtaataattaactaggaaaaaataagtgactattttgtctgcttccaaaaaatatgtgaaatgagataaaatagaaaaaaataggtttaaaaatgtcaccagtacaagctaaaccttaggaaaggtaagtgttgttaaagtaaaagaagctagatgagtatttttgtggtaatctaaaaagtacttaagattatttccaaaggcttgagagaggggatgaaatgtgtttatattgactattttcattttaacatttagttgtagga

SEQ ID NO: 869575 - DNA, 635 bp, Homo sapiens
ggtggtggggtcttgctctgttgcccaggctagggtgcaatggcgtgatcttggctcattgcaacttctgcctcctgggttcaagtgattctcctgcctcagcctcccaaacagctgggattacaggcgtgcaccatcacgcccagctaatttttgtattctcagtagagaaggggtttgccaggctggtcttgaactcctgacctcaggtgacccactcaccttggcctcccaaagtgctgggattacaggcataagccaccgcacccagccaacttttagacttctaaygtgtatttttttcctactgagtttaagtacacacacgcacacagacttatatgtacatagatgttgacaacagacatacagaaacatatgcatagattctgaagagtagtctgttggtggttttatataatacaaatatattttcctataatttgatttttaattttgttatggtgtttgtaatacagtttttaaatttcttgatttatccttcccctcatagtttgtggtttttatgccacacttgagattttttcctcaatcccaatgctataaatctatgctcgcatattttttcatttagaaaattttacactttaccatttcatatttaggtcatcaat

SEQ ID NO: 869576 - DNA, 635 bp, Homo sapiens
ggtggtggggtcttgctctgttgcccaggctagggtgcaatggcgtgatcttggctcattgcaacttctgcctcctgggttcaagtgattctcctgcctcagcctcccaaacagctgggattacaggcgtgcaccatcacgcccagctaatttttgtattctcagtagagaaggggtttgccaggctggtcttgaactcctgacctcaggtgacccactcaccttggcctcccaaagtgctgggattacaggcataagccaccgcacccagccaacttttagacttctaacgtgtatttttttcctactgagtttaagtacacacacgcacacagacttatatgtasatagatgttgacaacagacatacagaaacatatgcatagattctgaagagtagtctgttggtggttttatataatacaaatatattttcctataatttgatttttaattttgttatggtgtttgtaatacagtttttaaatttcttgatttatccttcccctcatagtttgtggtttttatgccacacttgagattttttcctcaatcccaatgctataaatctatgctcgcatattttttcatttagaaaattttacactttaccatttcatatttaggtcatcaat

SEQ ID NO: 869577 - DNA, 635 bp, Homo sapiens
ggtggtggggtcttgctctgttgcccaggctagggtgcaatggcgtgatcttggctcattgcaacttctgcctcctgggttcaagtgattctcctgcctcagcctcccaaacagctgggattacaggcgtgcaccatcacgcccagctaatttttgtattctcagtagagaaggggtttgccaggctggtcttgaactcctgacctcaggtgacccactcaccttggcctcccaaagtgctgggattacaggcataagccaccgcacccagccaacttttagacttctaacgtgtatttttttcctactgagtttaagtacacacacgcacacagacttatatgtacatagatgttgacaacagacatacagaaacatatgcatagattctgaasagtagtctgttggtggttttatataatacaaatatattttcctataatttgatttttaattttgttatggtgtttgtaatacagtttttaaatttcttgatttatccttcccctcatagtttgtggtttttatgccacacttgagattttttcctcaatcccaatgctataaatctatgctcgcatattttttcatttagaaaattttacactttaccatttcatatttaggtcatcaat

SEQ ID NO: 869578 - DNA, 631 bp, Homo sapiens
tgttgtgtattcagagcctagcacaaatgctagtgcaaatagtaataatgataactagaggacacgtgtctcattctaaatgccagttatccaagaaatatggccttcatttatttctgtgtgtcaacattatttttgactctgaattactctgatggactgctgggaaattcagtattcttagacttgarggctcccctctcacttcagtcatgccacaatcctggggccttttcagtaatctctcacgtgtcctcaggggttattgctgagggggcatattgcactagtacccccattgtcccagcagctttctgctgctccagagtcatgcatggaattgagcatcgtgggtgtggctaggtactttcaggcttctgggctgatttccctggacacatcatatttcatatgaaattccatttgaatttcattctcccttgacatacatattgcattccgtaaaggtaattgctgtcttcctggtgcagctggtgttaaaagagcagagtcctcactattttggaaccaaaacactctcctgcaccgttaccctttactttaaaagtctcttctaatcttggaaactcctccttatcgcctgcttttctggctacttatctgttttgta

SEQ ID NO: 869579 - DNA, 589 bp, Homo sapiens
ttttatctcccacactaatcggaaactattagacatcgcagagtgtaactactttatttttcagttagaaaagtgaggatcactgaagttaagtgactttctcatgatcattccactagttagtggaaggaaaggaaattatcaagtggtggatacttttatagaagattttctgaacacacttacacacatgtatatatatgacctatttttcgttattcaaaacatggttttattttctgcatttaatttttgarcaaataggtcttcagaaacattctgttgctgggtttgaaaaacacatctgattctaagatgaaaccctttttaccatcccacatacttgacaagagacagtctagattcaaatgcatgtcttttgattcccaattctgacagtattttaaatgtggacactgccttgatacattttacttctcaaataaacctacagaggtgatatatccctaaagaagcaatctggtcaatggaatatggatacatggtgtatttttacatttttgctactggcggaagtaaggactgagtttggtctcatgccttcaaaagctctagtcaaacaacagac

SEQ ID NO: 869580 - DNA, 665 bp, Homo sapiens
aaagctttcaatatacttctgttttaaaagtaataacatttatagtgatttttttgcatttttattcaaaaatatgtctatatattaaaatataccattgaaatgttcatataaacatatacttttcttaagttgatatgactgtgaaaatgaggctaaaaatacccaaagatatatttttgattgtgtttgtgtgtgtacatgtgcagtgtgtgtgtgcacaaataattatttttaatatctaactggtggacaaatgtttcaaccaaaggctgaaggaggaatgtcagaattacttcttttaaaatctgrcacatgctgaggtcattttagcaggttataaaatgccttctgggtggagattgctggcttcatcttggcctagaaaaagtaatagtttcagaattctgtttaaactggtaggagtctttggtaatggataggtttagtgttccctaggaagaatggaagaaaaaaactttattcttaaatatgctttgcaaaataacaacctgcaggctgagaaaagtcataaaatggaaaacactgccattcagctgagtaaaaatgacttccctcttctttaagaatgttatttttatttattctccatattaaaagaaaaaataaccgccaccctctgcaccaataatgcattttaagta

SEQ ID NO: 869581 - DNA, 602 bp, Homo sapiens
  misc_feature 429: n = A,T,C or G
ccttgtaaagaaggacaggcacataatagattgtaattgaaatgggaatgcttcattttatagacactcaaatatttgatttaacagtgttccaagatgtataattcaaaattggcctgagtgtgaagcttgaaattttggtacttctgtgaatgaagcctgctgttttgttttgttttaaccaatrctgttgtgtgttcttatgtatttccactaagggttaaaatttcaatttagtccctgtcagatgcatgcctctttttgttcacatacatggaaaagtgagcataatctatcacgatgtttcattgtttctcttttcctgtggtgcccttggtcatgtaaaagaacacatgactgcttattgtaaacctctgtgacaaagtcaatatatttcaccttaaaaatatctcaggtcttctaagcgcntattgggcaggatatttcttaaggttaatttgcaatcagtctttctccttcctaaggaaaaagggagagacagataaataagcaccattttaggcattcaaagagttgagttgttagtaaagaccctgagctagtggcatatcctgtttgcaactgtgtagataaactatggc

SEQ ID NO: 869582 - DNA, 649 bp, Homo sapiens
ttacaattttgaagtgtgcctttgcactatagatgtctgaggctacaatatacaattattttttaagggataaaacttctcacactttaacattgaattttgaaaatgaaaattgatatttttttaaaaaaatgagggttcattttaaaagaattatttgaggcatgcaatttaaaaaaaaaaaagttgtttccccttaaaatatggtctggtttgtcacagctcatctttagggacaagtatcgcagcccgaagctgaacggtgggctttgctgaaccaggtggwctttatttttacagactcacgtccagtttgctgtctgtcatcacaggacttaatgttgagaactgacaggtttcaaatattgatggggaaatgctggtggattcagaaacttggaacttgaccaaaatatccaaatctcacaagtctataacatcagcctggaaagcaggctgttttataaaatgtccttggtcgccctattttcacatggaataaaataaaatgccacaggagaaaactgcttctttgatattttaacacatgaattttttggagtttcagcacctggatttacagcctagtttaaaacaggtaatacatctctgcaagagagacagaatgagtttcttcaaatgtatttga

SEQ ID NO: 869583 - DNA, 643 bp, Homo sapiens
aaataagcataagcagtagtctccctctgcatagcaaatgccaggatattcagaatcatataaaactataaaagcatatctatcaaatgccttccagttgagaaggctacctactatctttaagaaccaagggggaaaaatcaggaatatgatattattccctttttataaagacaytcaatgattcattcatgcaaatatatactgaatccctaatatgtgccagacacagtgctaagaactgggggtatggtgttaaaccaaaagaacttgttttgtgtcatggacttaaggtctaataggagagatggattaaagtattaaataaatagctaagcctatgattacaaatattaaatgtgagaagaaaaagaacatggtattaggagaaaaaataagagaggaggacctaagttatagtagttctaggggaggagaaggcttctcagaggaagtgacagtgaagcaaagtctgaagggcaaggaggaggggacactccagacagagggagtagcatgtgcaaaggctctgaggcaagaagggactgggtgtgccaggaatttaaaccagaccagcggagtttgagcagtgtgtaaggcaaaggagggcatgaaatgaggtggtggtaggtgtaggcaggag

SEQ ID NO: 869584 - DNA, 585 bp, Homo sapiens
atgtctaatagtaagggaactgatcagtaaatcatcagtatttatttactgagctctttatgattatgaatacagagactaggggacaacacagaacatgataatgataaatgatctaatattttatgaaacaagtttatttaaactatttacatctatgtatatatattttaagttatacatttaaaaataagaatgtggccrggtgcgatggctcatgcctatattcccagcactttgggaggccaaggtgggtgaattacctgaggtcaggaattcgagaccaatctggccaacatgataaaaccttgtctctattaaaacacaaaaattagccaggagtggtggtgggagcacgtaatcccagctacttgggaggctgaggcaggagaatcacttgaacccgggtggcagaggttgcagtgagctgagatcataccactgcattccagccagggtgacagagccggacttcatctcaaaaaacaacaacaacaacaaaaaagaatgctaatagtagtgttgttaaagagcaggcagtatttctccatttttccaaactttttaaaaaattgagaagtaatt

SEQ ID NO: 869585 - DNA, 616 bp, Homo sapiens
gagtgaaatgtacattgacataggaaggcgatagcatttaatgctactgtatctatgacttctgacttcaggtttttccattctttgtttaaccatgttccagaatagtagaatattaaaagtggtgtttatgtgtaatcaatgattgagaatggtttctagcttaatgttatagccactcatggtttttctccccaccgccaaccatattctagaatggtaagaatattaaaggtggtgtttatgtgtagtcagtgattgtgaaaaagctttctcttactttttcttcacgtcttcaaaataatttatcaaacaaaaatgtgggaaaaagataaataatggaaaaactaacagatggagaaaaatytcaacagtactattcacaatggcatattttagttggcaccgatgatggttttataataatgctgtactctagtgaatcttaaatgaagaacaaatgaaaaacatgtgtattgaaagtagtctttttttttttttttttttttttttgctttaaataccctgttcaaactctctcttttaccctaggaaagcagaatttatgctgtagccaaatcaggtattcgaatgtctgaggccttcaatatggaga

SEQ ID NO: 869586 - DNA, 625 bp, Homo sapiens
gcccatctgaaaggataaactatggcctaagaggattgagtgaatccctctccagtcatgtagttaattggaaaatgtgtgcacgcactgcctcccacccatctccccaagtccctgtctataccaaaggactgcttatgtaaacacggatagtgacaaagtccacaaagaatatattacatggaggagaaaacayggaatagatcacacagaagagaacagagcacagttggtctctgctcactctgtataatccattgcattctttctcagaaagccaagttgccagtgactatactaaatgctgaagtaggtagacatcacatgcctttttccgcttatttgtttttaaagaagaaaggtcttaggttagacacttcagttctttgttcaattgcatttgagatatttcactgttgttgttgtttatcagcaacagtggctgcatcgtcattttcactattcctttgggatgaaatctcaaacccccatgcagtgaggctagttgtgtgacagtgatgacaagcacttgttccatcacctgaagtaccttcttggcaatccctcctatacctacctgtgatttaaagtaggaaagcccttaaacatacagtctgaaacagaa

SEQ ID NO: 869587 - DNA, 640 bp, Homo sapiens
gaacattcttcaagacagaccatatgacaggccacaaaacaagtctcaataaatttaagaaaatcaaaattgtatcaagtactctctcagaccacagtggaataaaactggaaatcaactccaaaaggaaccctcaaaaccatgcgaatacatggaaattaagtaacctgctcctgaatgcacactgggtcaacaatgaaatcaagakgaaagttaaaaatttctttgaattgaacgataatagtgacacaatctatcaaaatttctcggatacagcaaaagcggtgctagaagaaaagttcctaggactaaatgcctacaccaaaaaacctgaaagagcacaggtatacaatccaaggtcatacctcatggaactgcagaaacaagtacaatccaaacccaaacccagcacaagaaagaaagaacaaagatcagagcagaactgaatgaaattgaaacaaaacaaaaaaaatacaaaagataaatcaaacaaaaagctggttctttgaaaagataaataaaattgatagaccattagcgaggttaaccaagaaaggagaaagaagatccaaataagctcaattagaaatgaaatgagagctatcacaactgataccacaggaatacaaaagattattca

SEQ ID NO: 869588 - DNA, 510 bp, Homo sapiens
agttagttaagatgatatcaggctgggagtggtggctcacacctgtaatcccagcactttgggaggccgaggtggagtgatcacctgaggtcaggagtttgagaccagcctggccaacatggcaaaaccccatctctactaaaaaatacaaaaattagctgggcacagtggcaggcagctgtaatcccagctacttgggaggctgaggcatgagaatcgcttgaacccaggaggcggaggttgcagttagccaagattgcaccattgcactccagcctgggagacagagcaagactccrtctcaaaaaaaaaaaaaaaaaaaaaaaaaagatgagatcatactgaattagtgtatgactggtgtccttagaagaagaggagacaaaacacagacacagacgcagacacagagggaaaaagaccacataaagacagaggcagagatttgagctgtgctgctacaagccaagaacacctgaggctactaaaagctggaagaggaaaggaagc

SEQ ID NO: 869589 - DNA, 616 bp, Homo sapiens
tgatcattcatgtagaaaccacatcagtgcctttgcttttgtgcatttcttctagtctcagatgcagtcagtattcacaaatttaatctctgttcttcacatttactattatcaagacaagccccagcccttatggtctcatacttagtctactaatatacattttaatcatttttcctacatgtgagctcttgactttacttgtcaatctgtgtttggcaacaagagttgattgcttaaaacaaaacawacaaacaaacaaacacttgacattttgactggctttcttaaatacttggttatttttcctgtaaattaaaataaaaccccatatgtactgtacaaagctatgtaaggtctccaatttcaaccaatttttaaaaataatctctggcacacaatttaatctaaaattcatacttactggaatgctttctaaataccatgaccttttctcattctactcactgtgaattctttccgttagccacactctgcctagatcctgccaaagcttttgtcttaccctgtatgttatctgtcacaccagctttttctgattgctccatagagggataattatgttctctggttttctgatgaccctgcaccagaa

SEQ ID NO: 869590 - DNA, 693 bp, Homo sapiens
ctaaagaaaatgtagtacatatacaccatggaataccgtgtagccataaacaggaagaagatcatgtcattttcagggatatggatgcagctggaagcccttaccctcagcaaattaatgttggaacagaaaaccaaacaccacattttctcatttataaatgggagctgaaygatgagaagacacagacatatgacaaggaacaacacacactgggacctgaaggagaaacaggggaagggagagcatcagaaaaaatagctaatgaatgctaggcttaatacctaggtgatgggttgatctgtgcagcaaaccactatggtacatgtttccctgtgtaacaaacctgcacatcctgcacatgtaccctgtgttttaaattatctccagtaataatgctgttttctttgtttggttcgttggtttttaattttttttaattcttttctcttttcttctttattagtctagctagtggtgtatctattttattagctttttcaaaaaatgagctcctggattcattgaattttgaagtgatttttcacgtctgtatctccttcagttaagttctaatcttggttatttcttgtctttatctagctttggggtttgcttgcttttggttctctagttcttttagttgagatgttaggttattaacttgagatttttccagctttttgatgtggg

SEQ ID NO: 869591 - DNA, 614 bp, Homo sapiens
gatcattctccgttccccaatgcacagttaccctgatgaaagactggaggtctccttaaagacggatgggagaaaaattaacagtataagtttttggtcatatagtggggtccttcctcaaggaaacctggccctcacattattcaaggagttctgggtctataaacygcctcaagtctggaaatcgattgaagagccatgactctctatttttgtaattcaaattagtattttgtccactttatctggaaatttgctgcatttacaaattaagtaagaatgtagtaggcttcctatttatttcacttctaaaaacataaaaaataatttgccaatgccagaggtctacacgagtcagactattctgattgctgctttgcctgtgctattattgtaactatgcccacctcacttttgacaattgagtgctaccacttggcccctgccaccttgggattcaattattcccattgcatttaagttttccaattgagtgactgtggttcccactgtaagatctggcatacagagaagagcaattgcagaggtcttcaaggatgagtgtgctcctttcacaaatcttttttgcaaggtgttgatgaagcatatgtctt

SEQ ID NO: 869592 - DNA, 614 bp, Homo sapiens
gatcattctccgttccccaatgcacagttaccctgatgaaagactggaggtctccttaaagacggatgggagaaaaattaacagtataagtttttggtcatatagtggggtccttcctcaaggaaacctggccctcacattattcaaggagttctgggtctataaaccgcctcaagtctggaaatygattgaagagccatgactctctatttttgtaattcaaattagtattttgtccactttatctggaaatttgctgcatttacaaattaagtaagaatgtagtaggcttcctatttatttcacttctaaaaacataaaaaataatttgccaatgccagaggtctacacgagtcagactattctgattgctgctttgcctgtgctattattgtaactatgcccacctcacttttgacaattgagtgctaccacttggcccctgccaccttgggattcaattattcccattgcatttaagttttccaattgagtgactgtggttcccactgtaagatctggcatacagagaagagcaattgcagaggtcttcaaggatgagtgtgctcctttcacaaatcttttttgcaaggtgttgatgaagcatatgtctt

SEQ ID NO: 869593 - DNA, 614 bp, Homo sapiens
gatcattctccgttccccaatgcacagttaccctgatgaaagactggaggtctccttaaagacggatgggagaaaaattaacagtataagtttttggtcatatagtggggtccttcctcaaggaaacctggccctcacattattcaaggagttctgggtctataaaccgcctcaagtctggaaatcgattgaagagccatgactctctatttttgtaattcmaattagtattttgtccactttatctggaaatttgctgcatttacaaattaagtaagaatgtagtaggcttcctatttatttcacttctaaaaacataaaaaataatttgccaatgccagaggtctacacgagtcagactattctgattgctgctttgcctgtgctattattgtaactatgcccacctcacttttgacaattgagtgctaccacttggcccctgccaccttgggattcaattattcccattgcatttaagttttccaattgagtgactgtggttcccactgtaagatctggcatacagagaagagcaattgcagaggtcttcaaggatgagtgtgctcctttcacaaatcttttttgcaaggtgttgatgaagcatatgtctt

SEQ ID NO: 869594 - DNA, 614 bp, Homo sapiens
gatcattctccgttccccaatgcacagttaccctgatgaaagactggaggtctccttaaagacggatgggagaaaaattaacagtataagtttttggtcatatagtggggtccttcctcaaggaaacctggccctcacattattcaaggagttctgggtctataaaccgcctcaagtctggaaatcgattgaagagccatgactctctatttttgtaattcaaattagtattttgtccactttatctggaaatttgctgcatttacaaattaagtaagaatgtagtaggcttcctatttatttcacttctaaaaacataaaaaataatttgccaatgccagaggtctacacgagtcagactattctgattgctgctttgcctgtgctattatygtaactatgcccacctcacttttgacaattgagtgctaccacttggcccctgccaccttgggattcaattattcccattgcatttaagttttccaattgagtgactgtggttcccactgtaagatctggcatacagagaagagcaattgcagaggtcttcaaggatgagtgtgctcctttcacaaatcttttttgcaaggtgttgatgaagcatatgtctt

SEQ ID NO: 869595 - DNA, 539 bp, Homo sapiens
tgcctttaagctgggacattgttttccttctgctttcaggcttgcaccaaaacatcagatcttcctgggtcttgagatagctagttttcagactgcaactacaccatcatctctcctggttctcagaccttcagacttagactgaaacttacatmatcagctctcctggtctccagcttgctgacagcagactttaggacttgttagactccacagtggtaagaaccagtttcttattataagccttttcatttgtctatgtatctatgaatctatctgtatatctatttatctatctatctatctatctatctatctatctatctatctatcctatatatctatctatctacctacctacctacctatctctgtatctatatcgatacatccttttggttctctttctctgtaaaaccctgactctgatacaacctcttctccctagactgcttgagggtttacctcaagaatcatcactgcctcatttattgtatcagctcttgaaatatgaataaatgagccagggaaagtgggat

SEQ ID NO: 869596 - DNA, 600 bp, Homo sapiens
gatgggcatttgggttggttccaagtctttgctattgtgaatagtgctgcaataaacatatgtgtgcatgtgtctttatagtagaatgatttataatcctttgggtatatacccagtaatgggattgctgggtcaaatggtatttctgatcctagatccttgaggaatcgccaccctgtcttccacaatggttgcactaatttacactgccagcaacaytgtaaaagtgttcctattactccacatcttctctagcatctattgtttcctgactttttaatgatcaccattctaactggtgtgagatggtatctcattgtggttttgatttgcattctctaatgaccagtgatgattagctttttttatatgtttgttggctggataaatgtcttcttttgagaagtggctgttcatattcttcacctattttcaatgggattgattgtatttttatgtaaatttgtttaagttctttgtagattttggatattagccctttgtcagatggatagattgcaaacattttctcccttttctgtaggttgccagttcactccgatgatagtttcttttgctatgcagaagctcttcagttta

SEQ ID NO: 869597 - DNA, 625 bp, Homo sapiens
taaatctggtcactcttcatgtcagttgaattctagagagagggccctggtcagggtgaagggatttaaacgtgaatgctgaacttccgtggctcagtttgactggagctcaagggcagcaggaagaagggtgggagagctggctggtgtgaattcaaagagggctgtcaatatcaggccaaagaagatgggtttgagtctatatataatggggaggatagctccttgaatcaatctacgctttaacaagattagtatggtgatagagtataaattgagttgtctgtaatctcacttctggtctcacgtctataatgttgatgaattggtctctttatgggcatttccccctcctgcactttgagatgtgcaagaatttcttgggcactattgcttcgttcaataagagagggccctaagatccacggccgctttagtgaaaggacttatctagagggttacaaaataaattaagcrtataaatctcgggagaaagactgtgatccagttatatgttcactttatgattcaatggccatatgatgaactttcaaaaagcagtgaaagaaaaaaatcaagaggaagcagcactatagaaatgcatagtttccagtagcagaggtga

SEQ ID NO: 869598 - DNA, 597 bp, Homo sapiens
cagggctgccataataaagtgctacaaactgggtgacttaagacaacggaaatttattctctcacagttctggaggctggaagtctgaaatcaaggtgtcagcagggttgactctcttcaagggctctgtgagggcatcagtacmcatgcttctgtcctggtgatggctggcaatccttggcattcccttggcccatagatgcatcactccaactgctgtccccagcatcccatgacactgttcctgtgtttcaacacatcatcttcactctgcgtgtgtctctcttgtttatataaggaccccagtcatactggattcagggttcagcctaatcaaatatgacctcatcttaacttggttacgtctgcaaaaacctatttccaagtaaggtcatatccacaggtaccaaaggttagcacttcaaaacatgtttttggggacacaatttaacccatatcaggtaatatctttcctgtctacttgttcttaaggagagtagatgttaaaacacacaaacttgtaaactttgtgtatacgtgtatacactttgtgttttttaaaaaccttttgtcttctattttcctcaaaagtacggg

SEQ ID NO: 869599 - DNA, 641 bp, Homo sapiens
attctgtgaaaaataaaaaaagttggatgctaaagtgggtaaggacagatttgaatcagtaatgtgctattacaataagaagagtcacacatgaattgcactcaactttgatttgtgtagagacaactggtcattttaaaggaaagtgaggaaactgggagaggttgagtgaggctcagagttagctaagtgaaaagttccagatagtgggaaggggggattggtccatgtggaacccacctgggtgctctagctggtatttatcaaaattagtctcctaccttctcacagagactgaaagactgaaaggccctgttttcagctcttggttggaacaaacaataaattmttttgtcagcctcgagttttctcaagcaggcactttaagaagacatcttagggatgcaggttagagctgctagaaacaatgctagtgtttgttcaggtccttagaggccaaggttgaggcctagttgagtaaaggactcagaggatcatggctagagtttggtcaaaaagacagcctttgtccctgggaaattaatataaatcagaccctatcattccactttttatcaactttcctattacacttagaattaaatccactcctcttccagggctcacagagcctccaggtg

SEQ ID NO: 869600 - DNA, 466 bp, Homo sapiens
ttccacttttgcatctttcttatttttctcttgttgccaccatgtaagaagtgcattttacctcctgccgtgattctgaggcctccccagccatatggaactgtaagcccaattaaacctctttttccttccagtcttgggaatgtctttatcagcagcatgaaaacggactaatagagtaaattgttagtagtagagcggagcattgctgaaaagacacccaaaatgtggaagcgactttggaactgggtaacaggcagaggttggaacagtttggagggctcagtataagacagraaaatttgggaaagtttggaatctcctagagacttgtcgaatggctttggccaaaatgctcttagcaatatagacaataaggtccaggctgaggtggtctcagatagagatgaggaatttgttgggaactgaagcaaaggtgattcttgttatgttttggcaaagagac

SEQ ID NO: 869601 - DNA, 574 bp, Homo sapiens
accattctggggtctggaggacagttgccctctcctcacagctccactaggcagtgccccagtagggactctgtgggggctctggccccacatttccctttcacactgctccaatagagtttctccatgagcaccccacccctgcagaaaacttctgcctgggagtttccatgtatcttctgaaacctaggcagaggttctcaaaccctaattcttgacttatgtgtactcgcaggctcaacaccacgtggaagctgccaaggcttggggcttgcaccttctgaagccatggcccaagctctatgttggcccctttcagccatggctggaacagctgggacacagagcatcaagtccctaggctgcacacagcacrgggaccctgggcccagcccattaaaccattttctcctaagtctctgggcctgtgatgggaggggctgtcatgaagacctctgatatgccctggagacattttccctgttgttttggggattaacattctgttcctcattacttatgcaaatttctgctgccagcttgaatttcatgtcagaaaatgggtttttctttt

SEQ ID NO: 869602 - DNA, 505 bp, Homo sapiens
tgaacttgtacttctgtttctttgctggttgtcagccaggggccattctcaacattcagaggccacccaggcacctcactccatgatccctccacatgttttttgttttgttttgttttgttttgttttgttttgttttgagatagkctcactctgttgcccaggctggagtgcagtggctcaatctcggctcactgcaagctccgcctcccgggttcaggccattctcctgccccagcctctcgagtagctgggactacaggcacccgccaccatgcctggctaattttttgtatttttagtagagctggggtttcaccgtatcagccaggatggtcttgatctcctgacctcatgatctgcccgcctcccagagtgctgggattacaggcgtgagccaccgtactcggctgacccctctacatctttaaagccagctgtggagagtctccctcctgtcaaatccctctcatgcttcaaatccactttgccaaggagagcctag

SEQ ID NO: 869603 - DNA, 638 bp, Homo sapiens
tgggagaaattatggattccacattggtcacattcagtttgagatgctgttcagaagctgaagtggagatttccaacagggagttagatgttcaaaagccccagaggtaggtctgtgtggaagacatatttgaaagcctcagcttagtacccattcattgaaatcatgagcataggcaagaccaccagtgaggaaatgggaccagcaatgaacttcaggaaactaatatttaaggaatacatggaagaaagggagcyaacaacagcgaagctcgaaacaatggccagagagagacagagacagagagagagagaagagagagaaataaaataactgagttgttttactctttaattcctttctttcttgttagaggaccaaatgcaatatcacatttagttatctggggagaagaagggtccttttgagtttgtccaggtagggacaagggagaggtggaatatggggagtttgtgggggcaaggggagatgaggtaactgggcattatccctctagcccagggtggattgagggatgggggaagaaggctgtgccacaccatacactcctagaaaaagagagatgggacatttcacctggagaaagatatttgttgtttagtttatgacacaggtgg

SEQ ID NO: 869604 - DNA, 608 bp, Homo sapiens
ctgcaaataatggtacatgtgtctcattttatagctttcacttctgcattgtattttactgcattgttaaaaatcataaaaaaaattatcagtggtgatatagatcaggtaggccctatacttgatttaaactgtaatttttttagtgttttgacattgagaatgatgttggctattgtctttagaaagatgtyctttgtgtgttaaggaaataaaatgttattcttagttttataaaaataacatcaagaatgagtatctaactattttgttaaaagccatcacataaagatattttaacacctcaaacaccaactcttttgagtgtctaggcataatttaaactttatattataaattttgtctatatgcttatgttttgcctataatagagatataaaacattgtcacctcttaacagatttttaaagccccataaaaaactaatcaattaactaacaggagtattaataactagaactatatatatgttcaattttcagcataggagaaatgagagattttttgaagaattatctaatcaagataatagcagctaacgttttaatcacttgtaaacatttaggaaagaatgaggtaatcaccag

SEQ ID NO: 869605 - DNA, 596 bp, Homo sapiens
gttgctattgtaaatagtgctgtaataaacatacgtgtgcatgtgtctttacagtagaatgatttatattcctttgggtatatacccagtaatgggattgctgggtcaaatggtatttctggatctagatccttgaggaatcgccacgctgtcttccacaacggttgaactaatttacattcctgccaacagtgtaaatgtttctatttctccacggccagcatctatagtttcctgactttttaataattkccatttggactggagtaagatggcatctcattgtggttttgatttgcatttctctgatgatcagtggtggtatttcttttcctggtttatgttattagatttttccgagtaaaacctcagagagttgtttttaatgctggtgaatccagggatgaaaaaaaaaatggtttctagagtaagacatgctgtaatatatgaagcttcccacagacctataccaagacacctctgctattttattattaaactcagattttcactgatcatttaccaaataatactaaggcctaaacaaagttaaaagaagacaaagtaaattagagctgtagagaaacagttaagtc

SEQ ID NO: 869606 - DNA, 642 bp, Homo sapiens
tggtagctatttcagattatgttgtcaggagaggcctatctgcagactcaaggcttggataataagaaaaaaagcagctatgcaaaaagcctctgaaaaagcagttcattcaggaaacagtaagggccaaggctgagggaaaaatgagaaatacatgttcacagaagaggaagaagtttmatatgcaagaatgattcagaaagagtagaagcatagaaaatgaggtaacaaagatgtgacatacttcatgctgaccatgatataaatcttgaactttcataagtaattgagatgttttctgagttatgtttttaaatagatcattttgactgctctttagaaaatgatggggtgggaaataaaaacagaaagaccatttaagaagcctttacatttgttaaggtgaaagatgattatggttgggctgggttagtggcattatgaaaagaagtagaataattaaatatgtattctgataaatgatatgatgctaagaaaaataaaataatataagttaaaaaaattttttttgagacagggtctcactgttttgcatagtctggagtgcaggggtgtgatcagtgttcattgcagcctccacctcctgggctcaaaccatcctcccacctcagcctcccaagt

SEQ ID NO: 869607 - DNA, 584 bp, Homo sapiens
tagtcaggatactccagagaaacagaacaaatatatagatagatatatcatataaatacagatataatatagatataggtaccatatagatatacatgtagatatataaaaagagatttaatataagggattggcttacatggttaagggggctgaacagttctacaatcttccgtctgcaagctggatgaccaggaaagtagggcctgagaaccaggggaaacgatggtgtaagtcccaatctgagtctaaggacctgagaacmaggatcattggtgtccaagggcaggagaagatggaagtcccagctcaaccacagaaagggcaagggcaggagaagatggaagtcccacttaaccacagagagtgagttcacccccttcttctgcctttaagtattatttgggtcctcatgagattggatgatgcctgcccacattagtaaagagggatcgtctttactcagtctaccaattcaaatgctaatcacttccagaaacaccctcacagacacacttataaataatgttttctcagatacctgtggactcctaactcagtgaagttggcataaaattaaccat

SEQ ID NO: 869608 - DNA, 648 bp, Homo sapiens
ctattaatctattttttcatgtagaagttgtcttgattataatccagttcctaaaatgaaataaatttaatcaagtatggaggcatttttggtcttattttaatcaaggttgaattgctttaagtctttgtttgcctacaatttgmcaaaatatctaaagattcagaggacaggttttcataccatggccaagtaaaaagtggaggtatcccctagttaagcccagtatcccacaaagtaaacaagaaaaatggatcaataaaactttaaccaaacacaaaagcttatgattagtttctagtgatgtgactatttctcacgtggcacccaaaggcaaattttacatatttcaatgtgcagtctcacttccttgccatggtttaaaagtatgtctattcaaaggtagaccaacactataacactaaacagcatgctcatcatataagtgctacagtcaaatggtctaaatttgaaatccagcctcaccacagaagaagatgtctaacctcaggcaagtgttttagtagctttgtctcttggtttccttgttagtaaaattaggacaataatgtaacctatctcatagggttatagtgaggattaagtcatatataacatttagtgcagtgtaagttcttaataaatgct

SEQ ID NO: 869609 - DNA, 607 bp, Homo sapiens
aatgaaatgtttatgaagcacctcaacatcagtaagttagtataattaagaaaattgttgcctaggtgtggtggctcacacctgtaatcccagttactgaggaggctgaaggggggaggtcagcactgcaatgagctgtgattgtgccagtgcacgtcagcctgggtgagcgagtgagaccttgtctcaaaaaaaaaaaaaaaaaaaaaaaaaarggaaataaaactttaaacaactttcaataggctcagtgttcttttgaaaaatacaaaaaaggtgcaatgcagtctttgttatctaaaagtgttttaatatttaaagatcagtggtttcagtaatcaaaagatttaaagtcacttcactcacttgcagcttctacatcttcaattcctatttttcccttaatcacacatacacagacacagacttgggctcaatttagtcttataaatcacaagaagggtagctttatttttaaatttacattttttcttaaccttgatagaaagaaacaacagcatcctttgttttatcattgctatttatctttcttcatttaacttgaagactccaaaatatgccaatagtagaagtagtgattattaga

SEQ ID NO: 869610 - DNA, 582 bp, Homo sapiens
gagaggtggtgagtacacgttcataaagtcacaatatgtgtattgagaaacaagttattggtgggagtaagcatcctagaagaatgcatgtgcccccttaatctcttggcataatagtgaaaaggagacttatattaaacattgctgggtgtaccatgattgtgctccaaagaagrgtccttgccccgtctgttcatacttttagtacaagcatgagaacaaccttataagtagaaaaataaatatttagatctcagctatcaaagagtatgagtttagatcccagcaattttttttaacattatgaaagtgatctgtgcaagctttgacgagctgggggactgtggaatgttgcagtccctcgtgctggtgggagaaggtaagtggcattttggaaattggcctttgagtgccatctcttatgctggaagaagacacaacttcaattcctgtcagtgcattactaaccacatcagagaaagatcctgggggcatttgttatataaaatacatgtttataggatagcgacagtctaatttgcatgaagcatagcatatgagcaagaaactgacagaaaacta

SEQ ID NO: 869611 - DNA, 582 bp, Homo sapiens
gagaggtggtgagtacacgttcataaagtcacaatatgtgtattgagaaacaagttattggtgggagtaagcatcctagaagaatgcatgtgcccccttaatctcttggcataatagtgaaaaggagacttatattaaacattgctgggtgtaccatgattgtgctccaaagaagggtccttgccccstctgttcatacttttagtacaagcatgagaacaaccttataagtagaaaaataaatatttagatctcagctatcaaagagtatgagtttagatcccagcaattttttttaacattatgaaagtgatctgtgcaagctttgacgagctgggggactgtggaatgttgcagtccctcgtgctggtgggagaaggtaagtggcattttggaaattggcctttgagtgccatctcttatgctggaagaagacacaacttcaattcctgtcagtgcattactaaccacatcagagaaagatcctgggggcatttgttatataaaatacatgtttataggatagcgacagtctaatttgcatgaagcatagcatatgagcaagaaactgacagaaaacta

SEQ ID NO: 869612 - DNA, 592 bp, Homo sapiens
tgtttcacttagtaaaattctcgaagatgcttgagaaaatggagcagtacctagaagtaggatggtaccaaatccattatcctccactaaacatgaaacaggaatttaggacatattaaacacaaaatgaaatacacaactatcaggggaaccagcccccaataattcaacataggttcttttctattttccctaagtgtcagctggtctgagaaataaagggaaagagtacaaaagagagaaattttaaagctggctgtatgggggagacatcacatgtcggcaggttctgtgatgccccctgagccacaaaaccagcaagtytttattagcaattttcaaaggggagggagtgtgcgaatggggtgtgggtcacagagatcacatgcttcaagggcaataaaatatcacatggcaaatgggtagggcaaggtcacaaggccagggtgaaactagaattgctgatgaagtttcatgtcccactgtgcatgcgttgtcgttgataaacatcttaacagtgttcaagagcagagaacaaatctgactagcattcaccaggctggaatttcctaatcctagcaagccttggggt

SEQ ID NO: 869613 - DNA, 650 bp, Homo sapiens
aaataaattactagacttttaaacttttatttatatgatcagttctgtgtttagtagactttatctccaagtctctgatacttactccagaagatgagagacgaggtgagaaatgcattaaattaatgcttggtgtgatgtttsgggatacatggagaatcagaagaggcttgaggctcagggatgagtgaaggatcagagccggggtaaagagtgaggtgataatgggggatgaagtgtttatattttgaagcaggcattttgacttagttgagttaaaaaacagccgtttcagtatttctactatgccttaaagatggctgagtagaacaaagccacctagcccatatagggctttgcatcccttgaaacatgttctatccagctcataaaactctgaggcaaacagattggtgaacagcagagtcctggtcctgggaccaagagacatgctgtctaacttctcaaccctttgaacttgaaccacctctactaatcatgactgatttggtactctaaaggggccattactgatggctattctgattaatgctgtgtggcagtagttccaattccctgtgactttccatctgggtaaatagctgtcatcattaggtaatggctgctttgctgggctatcaaattactaa

SEQ ID NO: 869614 - DNA, 650 bp, Homo sapiens
aaataaattactagacttttaaacttttatttatatgatcagttctgtgtttagtagactttatctccaagtctctgatacttactccagaagatgagagacgaggtgagaaatgcattaaattaatgcttggtgtgatgtttggggatacatggagaatcagaagaggcttgaggctcagggatgagtgaaggatcagagccggggtaaasagtgaggtgataatgggggatgaagtgtttatattttgaagcaggcattttgacttagttgagttaaaaaacagccgtttcagtatttctactatgccttaaagatggctgagtagaacaaagccacctagcccatatagggctttgcatcccttgaaacatgttctatccagctcataaaactctgaggcaaacagattggtgaacagcagagtcctggtcctgggaccaagagacatgctgtctaacttctcaaccctttgaacttgaaccacctctactaatcatgactgatttggtactctaaaggggccattactgatggctattctgattaatgctgtgtggcagtagttccaattccctgtgactttccatctgggtaaatagctgtcatcattaggtaatggctgctttgctgggctatcaaattactaa

SEQ ID NO: 869615 - DNA, 627 bp, Homo sapiens
gacttctaaactgcacaagttaaaatctcactctccactattaatctagcctttgggcccatacatcaattattaaatttggagattgaattatttactcttgatttgttctgctccaaattcggtctgctaatttctttcatcacaccccttttttgaaggcatataaaagtgtaattcttgtgctccaccctagatgtaagaaataagagtgcattttgaacagatatctccagtaattcttgtgaacaataaatcttgaaaatgagtggctctgaatgacaagtgaggtagctctagctgaagggttgaaggaagacattggcacccttatstggttttccttgagatgtcattgttaatcgcctctggtgagcacttcacacacacacacacacacacactcatacacacaaacacacacacacctaattcaaagacaatattatctcacagatctacctaactttatcagattagagctttatgtcacaacaaaactctgtcttcttcactccttcgttttttcaccattgtcttacaggctatagtgtggggcgacccacctaagaaatgcgtaacaatgattcaatttttgggccacctataaattattgcctatataaa

SEQ ID NO: 869616 - DNA, 627 bp, Homo sapiens
gacttctaaactgcacaagttaaaatctcactctccactattaatctagcctttgggcccatacatcaattattaaatttggagattgaattatttactcttgatttgttctgctccaaattcggtctgctaatttctttcatcacaccccttttttgaaggcatataaaagtgtaattcttgtgctccaccctagatgtaagaaataagagtgcattttgaacagatatctccagtaattcttgtgaacaataaatcttgaaaatgagtggctctgaatgacaagtgaggtagctctagctgaagggttgaaggaagacattggcacccttatgtggttttccttgagatgtcattgttaatcgcctctggtgagcacttcacacacacacacacacacacactcatacacacaaacacacacacacctaattcaaagacaatattatctcacagatctacctaactttatcagattagagctttatrtcacaacaaaactctgtcttcttcactccttcgttttttcaccattgtcttacaggctatagtgtggggcgacccacctaagaaatgcgtaacaatgattcaatttttgggccacctataaattattgcctatataaa

SEQ ID NO: 869617 - DNA, 658 bp, Homo sapiens
agtggccatgaaacctatgagggaaaaaaaaactcagcaaaaaataataaattagaagaaagaaatggaagttataaaacataaaaataaaattattaaaattaaaattagaaaacttaatagatggttgctatagcacagtgaagaagacacaagatacaatcagtgaatttgaaaataggaaagaggatttatccaatatgaacaacagaaagaaaacacaataagaaacagagttttatggactttgggacaaagctaaagaattaacatttgcataatgaaagtccaaggaaacaaggaaasaagataattgaaaatgttccttcaaattatggctaaaatttttccaaaggagaaaaaaggtataaacctgtggattcaagaacctgactgaaccacaaatagcataaacccaacacattcaggccaagaagcatcacagttgaactttctaaagataaaaggcaacaaaatgacttaaaagtagccagagagaaacaccaattcaaatttcatacttgaaacagtggagaccagctggaagtgtcacaccattttgcagaagtaaacaaaagagaactgaagcgggtatgctaatatcagacaaaatggactttaaaacaaaaatgttactaaacaaggacattttataatg

SEQ ID NO: 869618 - DNA, 596 bp, Homo sapiens
aagtgcccatagattatttgaacaataattttctcttttctttcttaacaacttcaacattgagaagcctggaaattcagaaaacagactgttttaaaacaatgaatttttctgtggtaatttagataagtcgattttattttgaatatctgctgtttaaataaaactcatcaaggttcaagtcaagtccacaatgaatcgtgtctccacatcatctataaaaagccatgcaattgaaggccagcactgtgatctgttgttttcaaggtctactttgccagcttgtttgaatccccgctacccatgggtgcctcaaagatcaactctatccctttttattccactgagactccktagaaaatttattttgcctccacagcttcagtgatatacccggaactaactatgtaaatcactaaaccaggcctatcatgagatctctgcttgaatacacaagtctatctaacatctcacttgaatttttaacaaatatcacagtccattaggtttaaagtggaacttttcagtaaatcttcattcttgaacttgataaatctccatctaacagaaagacctagaaatatgagaaatccatt

SEQ ID NO: 869619 - DNA, 518 bp, Homo sapiens
tattacttctcagttctcatactacatgtaagaattaaacctcaaaagattaactaacttgccaaagggcgtaagaccagaaactggtagagccgaaatttgacccaggtctgatttcagggcctggtctctcaaccaccacactgcattgactgcagcctcctggatctacacttcattgctctccaggacttcagacaggcttgtaacactcctaagaaacactttaaaagcctcagttgttttgaaatagtaatgatacaattaactttgtctttatagcacccagaaaggagttaggaagtrgctgtatcattactacactgagcactgattgtctcagctcttagtacactggcttccctaaatgcaattaaaaatcctttccagagtagtttcctcttggaaatcctctaatctttggaaatagaaccttctctaataatctttgagggtgccatgtttctcctctcattcccttactctaagctcttgagataacacagattcacatgcag

SEQ ID NO: 869620 - DNA, 643 bp, Homo sapiens
tgtaccatcatcttctgtcaatctaaaaaataaataaataaattacccacccaacttctctgtattttaccttatctctctctactactgccttgtaaaataaatgtcagacatttcaggatgaaaggcagctacaattgaaagaatatatctcttatttcaaacaaaaaaactaacacaagtcaaagattgtgctgcgtattccttgatctcaccacaaagtcatcattttgtactcaaaaatctgactaacaagtgtgggattttctccaagtaatttgtccctggtgtcctctccatatttgagtcagtccatgtgaaaacagagraagcaggagggtccctgagatttccattaaacagcactgtgaatagtttgcctatgcagtcagccagtggggaagtcaaactgattctctgttttctctgaaatcaatgcaaattaacaccatatttaagggaactctgggggtaaacctacccttccaatattttcccctaagaaaccattcaagcttccagtgagattaatccacaattgaagctgatggtagaaacatatatggctatatttatgtactagttttatcttgcactgtgctaatctatttcagtatataaattaataagacacagtgggata

SEQ ID NO: 869621 - DNA, 643 bp, Homo sapiens
tgtaccatcatcttctgtcaatctaaaaaataaataaataaattacccacccaacttctctgtattttaccttatctctctctactactgccttgtaaaataaatgtcagacatttcaggatgaaaggcagctacaattgaaagaatatatctcttatttcaaacaaaaaaactaacacaagtcaaagattgtgctgcgtattccttgatctcaccacaaagtcatcattttgtactcaaaaatctgactaacaagtgtgggattttctccaagtaatttgtccctggtgtcctctccatatttgagtcagtccatgtgaaaacagagaaagcaggagggtccctgagatttccattaaacagcactgtgaatagtttgcctatgcagtcagccagtggggaagtcaaactgattctctgttttctctgaaatcaatgcaaattaacaccatatttaagggaactctkggggtaaacctacccttccaatattttcccctaagaaaccattcaagcttccagtgagattaatccacaattgaagctgatggtagaaacatatatggctatatttatgtactagttttatcttgcactgtgctaatctatttcagtatataaattaataagacacagtgggata

SEQ ID NO: 869622 - DNA, 490 bp, Homo sapiens
aataaattggtaagcttcctgtcaaatgataagaaaatgagaaatgagtatttttctctaataagttgaaaattttttcttccaaataattttctttgaaggacaaaatcaaccagtgagggcaaacacactgtctttgagtaattctagaaggkcacagagtcctggaaggaaacattagcccagtgaatgcctatagacatccaggctataatatgagtgtattttatttctgaagtgttttgagactgtctattatgaaagttcttatatacacgcaaagtattacttttaaattttcttggatgtctaaagacaagtcatatggtttttattaatataaggtttattttgaccttgtagtagagagttataatcaacttgaaaaatatatcagtataatgttacgggggttaagattaatatggaatcttacaaaagaagacctgctttcttactttctataaacaacattgtgtgatgtcttcct

SEQ ID NO: 869623 - DNA, 577 bp, Homo sapiens
tttcctagaggccatacagaagcagcagcttactgacctgactatcttggggcatccggttcacaccgggcacccttaagccaactgagcccagtgtgagaacgcagtcccaggggaggagaccgatggcaggcgtccactctccttgtggtaagggacttcggtatctgggaaactatttgctctgtttattttggactagaaaattgcatcttgtttgtctgkggttgtttagtgacagagaaaaattaggaagtctaaatttaaacaaatgctaaatatataattgttccaatgaaaactacgatagttattttcccacctggtataaacgtgtaggaaataatgcccctaggatcccacagacaaaaagaatgacttttttttaaaaaatctttggagttatttctgggaagagcatgacatttcctacattaattgaatatggtcagttatcccatctatttgaagggcatgacacttggtccctaaaagttgaaaagacgaggcagagtgcccttagttggtgttctcagcacacaccaagtggggctggccgatagtgctatgagaaaga

SEQ ID NO: 869624 - DNA, 567 bp, Homo sapiens
aatttaagtcttaatatgtctacatggagaacaggatgaggacagaaatttcaactgtgtgagtgacagcaatcctttgagaagaaataatattcagagtagaaactgaaaacagagttgaatgacataaccaatacgttgacaactggcacctgcattccycttggggagaaatttgtctctgtttagggggaaagggcttaatcaactcagatttagaaggaagaactcagataatatattctggggtaaaagatacctgaaagagggtgccgcatggtattaaactctgattaatttaggaccgaccgtgagacaatagaaaatgtttacttaaaagctgaatattccagttcaaagattttaatatttgtaaattttacaagtatcatatattacctttgtaattaaaaaaataattattaagaagtttcgggccgggcgcggtggctcacgcctgtaatcccagcactttgggaggcagaggcgggcggatgatgaggtcaggagatcgagaccatcctggctaacacagtgaaaccccgcctctactaaaaatacaaaaaa

SEQ ID NO: 869625 - DNA, 567 bp, Homo sapiens
aatttaagtcttaatatgtctacatggagaacaggatgaggacagaaatttcaactgtgtgagtgacagcaatcctttgagaagaaataatattcagagtagaaactgaaaacagagttgaatgacataaccaatacgttgacaactggcacctgcattcctcttggggagaaatttgtctctgtttagggggaaagggcttaatcaactcagatttagaaggaagaactcagataatatattctggggtaaaagatacctgaaagagggtgccgcatggtattaaactctgattaatttaggaccgaccgtgagacmatagaaaatgtttacttaaaagctgaatattccagttcaaagattttaatatttgtaaattttacaagtatcatatattacctttgtaattaaaaaaataattattaagaagtttcgggccgggcgcggtggctcacgcctgtaatcccagcactttgggaggcagaggcgggcggatgatgaggtcaggagatcgagaccatcctggctaacacagtgaaaccccgcctctactaaaaatacaaaaaa

SEQ ID NO: 869626 - DNA, 567 bp, Homo sapiens
aatttaagtcttaatatgtctacatggagaacaggatgaggacagaaatttcaactgtgtgagtgacagcaatcctttgagaagaaataatattcagagtagaaactgaaaacagagttgaatgacataaccaatacgttgacaactggcacctgcattcctcttggggagaaatttgtctctgtttagggggaaagggcttaatcaactcagatttagaaggaagaactcagataatatattctggggtaaaagatacctgaaagagggtgccgcatggtattaaactctgattaatttaggaccgaccgtgagacartagaaaatgtttacttaaaagctgaatattccagttcaaagattttaatatttgtaaattttacaagtatcatatattacctttgtaattaaaaaaataattattaagaagtttcgggccgggcgcggtggctcacgcctgtaatcccagcactttgggaggcagaggcgggcggatgatgaggtcaggagatcgagaccatcctggctaacacagtgaaaccccgcctctactaaaaatacaaaaaa

SEQ ID NO: 869627 - DNA, 654 bp, Homo sapiens
tgaattttaaatcatatatatttaccattggaaaataagctaatggaaagaaaaaattaatttgaaagtaaatacatatacaaacacatacaaataaatatgtaaaacatcctcaatattcacagaaatgcaaattaagacaaagattagatgttatatttgacatactaatttgtcagagattttaaaaataatagtaatactcgacaaaggcagaaaaacaggaaattaccttccttcaataaatgcagaatcacttctgtaaaataatttagtaaagtttaacaaacaaaaggttttgattttttgataacttatggttcagcrtcccacttttggtcatttttcttgagtaaattatattaatcatgaggcaagaatacatcacattgtcatagagtagaactttggaaatatcttggtctcccacaaattagagatcaagtttaataggtaagtgtgtaagtatttctatagcacaaaattatatccatacattgttatattttaaacaaatatgctaaaatatggaaaatattattggtagatattatcttttaaaagaaaatagggtaagaaaaaaatgttaaaatatttagactataaacaaaatattctggtaggatatatacctatcagacttatgctaggtct

SEQ ID NO: 869628 - DNA, 660 bp, Homo sapiens
taacagggtccagcaatagctttattcttagaagagtgagagttttatcgtatcacttccacatttaaaatgacaatccatggcttctgtgtaacaaagtgtcttagagctgagtcatagaattctccaaattatgcttttgaattcatattctaaaatcataccttacaaatctgagtagataatacattttgattagtagaaatcctgtctttattctaggagaaagaaatcttattcaaattacctgaacaatataaatgtaagtttcagcttctattttcttgtttcttgtatcaaccaacaattcaacagtaagttagattcaaagggtttgatggcctattatctgtaagtgaataaagatccagtgaagttttacagtagatatttaacataggctagatattattcttttacatttctcaaaaacaaaacacagaaaactctattcatgtttttgtttacttattgtacrttttgaagaattaaaacatactagcagttgcataaatttgtatgatattatttctgtggtgatcttaatttttcttttatagctgttgctgtgacattttgaatccagatctggcatgattaatggagagactggccatgctgcctcaagacagagtagctgcagccagtgatggagaatgt

SEQ ID NO: 869629 - DNA, 602 bp, Homo sapiens
ttgcttttgttgcaactgcttttggtgtctttgtcatgtaatctttgccagttcctatgtccagaatggtattgcctaggttgtcttccagggtttttatagttttgggttttacatttaagtgcttaatccatcttgagttgatttttgtagatggtagaaggaaggggtccaatttcaatcttctgcatatggctagccagttatcccagcaccatttattgaataggaagtccttccctattgcttgtttttgtcagttttgttaaagatcagatgactstagatatgcagccttatttctgagctctctattctattccattggtctatgtgtctatttctgtactagtaccatgttttggttattgtagccctatagtatagtttgaagttggatagtgtgatgctttctgctttgttctttttgcttaggattgtgtgggctatttgtgctatttttttattccacatgaattttaaaatagttttttctagtactgtaaagaatgtcacttgtagtttgataggaataacactgaatctataaattgctttgggcagtatggcaattttaacaatattgattctttctatccatg

SEQ ID NO: 869630 - DNA, 622 bp, Homo sapiens
ttctaataagcatacattatagatttgaggacagtttaaagtgttactggcacaaaagaatgtataaatcttattactaatacttcagtcatatatttagtaactataatataaaaatataactagatatagttaataatgtttaaaaaacaatgcttttaaaaagcggccagtggaacttttttacattgtgtgtatttaaatataaataattttattatatagtaatgcattttctgtgcagaatatttagaaaagatagattaaacaaaaatgaagaaaattccctgtaattgcactgcccagtgaattaatagtaatatatagcttacttaaaaaagatactgctgctcaaaagtcttgaaataattagagtgattatgtatatgcatatacttmtaatttatctcccatatatgatttcatcatggtagataaattagaactatttcactaataagaatagtaatatattttcctcattaaaaatatctttttaaattattgctattgctattttaaatcttagacataatattttgtgatttaataagtttttggcatttctgtattttctaggtaataaagatgattactatttctgatgctctattttctagcc

SEQ ID NO: 869631 - DNA, 516 bp, Homo sapiens
tcccctctgaaatactctgctgattcacaaagctgtctgagaaattcatgatgtcgctgcaatatcagcctgaatgaggataaagtatccatttggagatcagaaaatttactttattggctaaaggggtactcccctttggtataaagaaaggcattagaaaatctattaaggctgagttatgttctgcagtcaccatcttttcttgttacaattagtatttcattttaattgcgctgctatataatttcttacgaaaagatactcagtgtgaactctgaacaagactcttttttttttttttttttttttttttactacartagaccatttttccatggacacttttctactcttccttaggttatgaagtgaggtacagggatttttttttttttttactttatgtgttataaagggcatattttaattgtttctgctcatatccacctctttggtcgtttttcttgttgctacaccaggaaaatgacatatgcatccttttcaatcaagctg

SEQ ID NO: 869632 - DNA, 611 bp, Homo sapiens
gcacaggacagaagatatttaagccccactgtctttgccatagcagtcctttttaaacagtaagttaaagctttgtgtgtgtgcacatgtgcatgcatacatgcatgtgtgtgtgttctacaatcctggtgaagtaaaaattatcaagtattaaagtaattacagtcagatgtcacttaacaatggggatacaatctgagaaatgagtcattaggcaattccatcattgtgtttacatcatagagtgtacttacagaaaccaagatggtagtttaccacacacccagtctatattggctacaaacctatacagcgtgttaccatgctgtataatatactgtaggtaactgtaacactatggtaagcatttgtatatctaaacrtgggaaaggtacagttaaaataagataaaaaaggtatacctgtatagggcacttacaattaatagagcttgcaggattggaagttgctctgggtgagtcagtgagtgagtggtgagtgaacgtgaaggcctaggacattactgtaccctactgtagactttataaacactgtacacttaggctaagctaaatttatcaaattgactttctttcttcaaagaaatatcc

SEQ ID NO: 869633 - DNA, 568 bp, Homo sapiens
aagatcaacttaatgaaataaagcatgaagacaaaattagagaaaaaagaatgaaaaggaacaatcaaagcctccaagaaatatgggactaggtgaaaagaccaaacctacgtttgactggtgtacctgaaagtgacagggagaatagaatcaattggaaaacactcttcaggatattatccaggagaactcccccaacctagcaagacaggccarcattcaaattcagaaaatacatagaataccacaaagatactccttgagaagagtaaccccaagacacataatcatcagattcaccaaggctgaaatgaaggaaaaaaatgttaagggcagccagagagaaaggtcagattacccacaaagggaagcccatcagactaacagcagatctgtctgcaaaaccctacaagccagaagagagtgggggctgatattcaacactcttaaataaaagatttttcaagcttgataagtgaaggagaaataaaatcatttacaaacgagcaagtgctgagagatttttgtcaccaccaggcctgccttacaagagctcctgaaggaagca

SEQ ID NO: 869634 - DNA, 610 bp, Homo sapiens
atctattttgcccaaattcaaaaccagtaacctgtatcatgttctagaagttaattatgatgggttggtttagttaaattctctaaacttccctccagagcaaaaagtgtgctcaaaatctactgatggaaggattctgacagcagcataacttaaggatattttaagtaatattgtgtgtgtgagtgtgtgtgtgtgtgtgtgtgtatgaaagagaaagagagagagggagagtgtgtgtgtgtgtgtgcgtgtgtgtgtgtgtgtgtgtgtgtgtgtgtctcctgtccactgtatttgcatggacaacaaaagtaagaaggaaggtagagggagcatgcctgcattcccrtagagattattagctggcttggtgatgataaaatgttttcccaagaggggcaggactaggacaagaaaggatctgggttggtaggaagatgaattatcagatgatgtactctttactaaatttgaaagtaggggtggtctgtgaagctcatctgtcttggagtaactcttagatgtttactcatagttagatacagtcaggatattagaagttatttccagaagactccaccaatcctcttcatccaaggtatgcatt

SEQ ID NO: 869635 - DNA, 630 bp, Homo sapiens
aaaatctagaagaaatggataaattccaggacatatacactctcccaagactaaactaggaagaaatcaaatccccgaatagagcaataacaagttctgaaattgaggcagtaattaataccctaccaaccaaaaagcccakgaccagatggattcacagccaaattctaccagaggtacaaagaggagctggtacctttccttctaaaactattccaaacatagaaaaagagggactcctccctaactcattttatgaggctagcatcatcatgatactgaaacctggcagagacacaacaaaaaaagaaaatttcaggccaatatacctgatgaacatcgatgtgaaaaccctcaataaaatactgccaaaccgaatccagcagcacagcaaaaagcttatctactgtgattgagttggcttcatccctaggatgcaaggctggttcaacatacacaaatcaataaacatcatccatcacataaacagaaccaatgacaaaaagcacacaattatctcaatagatgcagaaaaaggcctttgataaaattcaacactccttcatgctaaaaacactcaacaaactatgtattgatggaacttatctcaaaataataagagctatttat

SEQ ID NO: 869636 - DNA, 586 bp, Homo sapiens
ttgcttctttctccaaaattgaagtttcaatgaagagttttctcaagatttctatactttaccctgtcttatcttcttcattaaaacaaaacaaaacaaaactggccaggcgcggtggctcacgcctgtaataccaacactttgggaggctggagcagacggatcacaaggtcaggagttcgagaccaacctggccaatatggtgaaaccctgtctctactaaaaatacaaaaattagctgggcatggtggcaggtgcctgtagtcccatctactcsggaggctgaggcaggagaatcgcttgaacccaggaggcggaggttgcagtgagccgataccatgctactgcactccagcctgggcgacagagtgagactcctctcaagaaaaaaagaaaaacaaaaacaaagcaaaactatagaaatttttttggtttcagagaaatgcaaaaaacaaacaacaacaacaaaaaggtgctgttaggtcaatggatttcataccttattaatggctgtcagagcactttacaatggtaggaaggcatttaaaaacaattactagttctcttacagactttcagagaagaa

SEQ ID NO: 869637 - DNA, 600 bp, Homo sapiens
ccaagccccagctgggtgcagtggctcacatctataatcccagcactgtgggaggccgaggcgggcagatcacctcaagtcgggagtttgagaccagcctggccaacatggtgaaaccccatctttactaaaaataccaaaaattagccaggcatagtggcagccacctgtaatcctagctactcaggaggctgagacaggagaatcgcttgaaccagggaggtggaggttgcagtgagccgagatcgcgccattccactccagcctgggyaacaagagcaaaattctgtctaaaaaaaaaaaaaaaaaaaaaagccaagccccttactaaggagcttcaagaagcatgaccagcaatatcttgcacaaaaggcaaagatggatgagcacttccatttcttccacaaggaaagtttaagtactgaagaagcaagaatgtgaggatagatacaagaagtaaatgggtggcaataatcagattaactcatgtacatgtagtgttttctgtgagtcaagcactgtgcttcattctctacatgaattatcttatgtgtaattctcacagcaaccctctgaggtagtgatttttataactcttgc

SEQ ID NO: 869638 - DNA, 600 bp, Homo sapiens
ccaagccccagctgggtgcagtggctcacatctataatcccagcactgtgggaggccgaggcgggcagatcacctcaagtcgggagtttgagaccagcctggccaacatggtgaaaccccatctttactaaaaataccaaaaattagccaggcatagtggcagccacctgtaatcctagctactcaggaggctgagacaggagaatcgcttgaaccagggaggtggaggttgcagtgagccgagatcgcgccattccactccagcctgggtaacaagagcaaaattctgtctaaaaaaaaaaaaaaaaaaaaaagccaagccccttactaaggagcttcaagaagcatgaccagcaatatctygcacaaaaggcaaagatggatgagcacttccatttcttccacaaggaaagtttaagtactgaagaagcaagaatgtgaggatagatacaagaagtaaatgggtggcaataatcagattaactcatgtacatgtagtgttttctgtgagtcaagcactgtgcttcattctctacatgaattatcttatgtgtaattctcacagcaaccctctgaggtagtgatttttataactcttgc

SEQ ID NO: 869639 - DNA, 655 bp, Homo sapiens
tcaaatatccagacaaaatccaaagattctctttgtttagaccagattaggtcacacccctaaccctcccggtctgtgttcaaggggatagaatacactggatggcttagcttccacggtgtaatatactgcaggagctggaggcagatgcaggacccttggaaatacatgaatctacaagcagtgttcgggggcttttaggaaagggagaatgaatgctgggtggaaagaaagtctactacgacaacccctgagaattcacagacattttgcaaatccatgcaagaggcacaataaaagagtttttagttcgttttaactaaatctcaaaggataggttgacctggtggttgatgacctggtagttattttgagtattaagagaaaatgttcatgaatactgattacagcrcatgaaataacagtagatccatacacatcataattcccttcttcttctactttccttcttctttttctctccagaatataatatatataatttgaagtttaaacaatagtgccgaattttgaagcacgatgttcttaaattagaaagaagattataaattataaaacaacatttaaaaatgggtggccatcttggtagagacatggctatgtagttgtgcgtacttcagcatatacaaatttg

SEQ ID NO: 869640 - DNA, 529 bp, Homo sapiens
catatcttgtatgatgtcagtcttttaatgtattcagacttgtttcatagtccagcatatagtctaccttgttacacattccatgtacacttgaaagtaatatgcacagttgacctttgaataattcagaggttagggacatagatccctcacacagttgaaaatctgtgtataacttttgactttccaaaaacttaactactaatagtcaactgttgaccagaagccttatcaataaaatagtcagcttacacrtattttgtatgttatgtgtattatacactgtattcttacaataaagcatgctagcggaaagaaaatgctattaagacaatcataaagaagagaaaatgtatttactattcattaagtggaagtggatcattgtaaaggtctttatcctcattgacttcatgttgagtaagctgaggaggaagaagaagaggagggattgctgtttcagaggtgaaaggggagacagaagaggcaggcacactcagtgtaactcttcttgaaaaaaatccgtgta

SEQ ID NO: 869641 - DNA, 589 bp, Homo sapiens
tgacatatgtgagaggcatatgtacatgaggttttaaaattaaaaaccactttgtatcattctattacactctgttagtaaatatattctagatttggatactctatcaatggaatcagtcagtctccaatacttaagaagtagccgtgtactcataaatttaagggatcaggggactctttagtgagtattctgtttcctctttttaaaaattctgtgtatgctattttcctctccacattttgactaagaaaagtccttaaatgaaagttaaccaccagtaaaagttcttaaatggccctaaagtcacttaccacttaccctctctagttctatgctaaagtttgttttscctttcccttagcaaaacaaatgatgtggaatatttctcacaggaagatgtatcagtagtccaggacatgaaaaataacatagaattttactttgcactcctgaagattgagtgctagctaactaatttcaccatttatttcaggatgaactttcaaggtgaagatagcaaaatctggcgctctgaatctcacccatttcctctaggggagagatataaaagaatgacccgatctta

SEQ ID NO: 869642 - DNA, 651 bp, Homo sapiens
aaatctatcatatctctttttatgtgcatatataatcagaaagtccttctccatactaagattaattaattgcatttacctgtacagcattgcatttaattttttaatgttaaaaatttcatttaactccacttgtaatgtattgtattttgttgtactagataagagataaagatctttgttctccattttccaaatagttaacatactcaacatggactttaatgttataccatataaaaaattaactcaacaggaatgaaaggcataaacatagagctaaaacaaggaaactatccgataaaaacataggagaaaagcttcatgacatcagatttggcaatgatttcttggatacaataccagaagcatagacaagcaaagaaaatagaatagataaattgaactgcatcaaaatttaaaacttattcatgcatcaaaggatacaatcaacagagtcaaaagacaactcayggaatgggagaaaatatttgcaaatcatctatctgatgagggattaatatccagaatatacaaagaactacaactcaacaacaaaaaataacagctaatcaaatttaaaaatagacagatgacttgaatagacacttctccaaggaagatatacgaatggctaatgaccacatgaga

SEQ ID NO: 869643 - DNA, 606 bp, Homo sapiens
ttgtccgctgcagcattagtcacaatatccaagacatagaaataaaccaaatgttcatcgatggatgaatgcataaagaatatgtggtatatatacataatggaatactattcagccataaaaagaaggaaatcctatcatttgtaacaacagagatgaatctgaaggacattttgctagtgaaataggccaaasaaagaaagacagacactacatgagtccacttttaccaggaatctaaaatagtcaaactcatagaagcagaaagttgaacaggggttgtcaagggcttgggggagtgggaaatgaaaagttgttgttcaataggtatgaagtttcagttacacagatgaataagtcctacagttctgctgaacagtattgtgtctatagctaacaatactgtattgtgcacttataaatgtgataagtggctaagtctcatgttaactgttcttaccacaatttcaaaaaacaaacatttaaaaataataaataattttgcaataaaaattatcataatgtataccttccagcttctgctgaattatttctcttgctagcttcctaggacatatctaccatgtggcatgatttaaatatttc

SEQ ID NO: 869644 - DNA, 619 bp, Homo sapiens
ctttcaaaatataattaagaagtttttcaacttttatctctgatcctaaaattatgttccaattagaggtcctcagtctagagataatgggccattaattgccctgaaattcatttttataaatatttacattgttaaggtaactttgcaattatgctctaataaattatatgtttgattagagttcaggctgcacagagccaactttctccttcactcacaaggttttaaagggacctcattatttcttcccatgtgacaatggccacagcggctctcaagagtcctacygggttatgctgtccatgtgcttgagctctttagggatacttctgaatcttaatgtgtacattgcttttgctatagtggaaaaatcccaactgttctatcaatatctacaggacaaagcagggagatatatggattgacagatcaccaaatgggcagagctgatcacctgccctcaggaggagtaaggtccactgatctctgtagtaccaaagaaatggtgtatttcctggaacatgcaagaaatttgcttaaatgtaaatgagatagtgagatactggaggtaaacattttaacttgaactacaacatgacattgaagggttaccaag

SEQ ID NO: 869645 - DNA, 659 bp, Homo sapiens
tatccaagcaccatttattgaatagggagtcctctccccattgctcattattattttgactttgtcaaagatcagttggttgtaggtgtttggctttattcctgggttctctattctgttccactggtctagtgtctgtttttttgtgcaagtaccatgttgttttagttactgcagccttgtagtataatttgaagtcaggtagtgtgatgcttacggctttgttctttttgcttaagatttctttggctatttggtctctttttgagttctatatgaattttggaatagtctttttctagttctgtgaaaaatggcattgctagtttgatagggataacaytgaatctgtacattgctttgggcaatatggccattttaacaatattgattctgcctacatatgagactggaatgtttttctatttgtttgtgtcttctctgatttccttgagcagtgttttgtaattctcagagagatttctcacctctctggttagctgtatccccacatgcacagtttctccaccaggttccttttcctcacctgtggtgctgctgtctctctctaatccttggggctcatcaggggtcagtcctgagtgtccatctaatctcaccctccctcctgtgtcctctcacaattcttagctatcatc

SEQ ID NO: 869646 - DNA, 613 bp, Homo sapiens
aggcccaacgcccagttcctggggtccagcccattttctttgtgcttgatcacaagaggtcaggtgtccgttccacactgggtgatatgagtggggataagggtctccaggaagccctgcacaattgggaacagcctccagaccactgccctccggtgtcatactgcccctgttgtagctgaagaggggactgaatgatggaggagtgtgtgcagccagttaaatggtacactaaatgtcacacagaaagacattctgtcctcttctcatccacacagggtcatgcctcttgygctcttctctgcccacaggacaatcttccctgctgtgccagttgccagggacttgggttgcaggtgtttctatatagccctgctttcagagtgacatttgctcagagcaaagggtgactgttttttgttttcatcccccaatcctgcaacctgaagatcccagaagagtcataaacatgcatcccagctttaataaacttgttgcataatgacttacatccaaaggtctcaaaacatttttttccaaatgcacagttgtcttacaaatatatgtaatcatattgcactagtttattatttgtgatctaaataggattcat

SEQ ID NO: 869647 - DNA, 613 bp, Homo sapiens
aggcccaacgcccagttcctggggtccagcccattttctttgtgcttgatcacaagaggtcaggtgtccgttccacactgggtgatatgagtggggataagggtctccaggaagccctgcacaattgggaacagcctccagaccactgccctccggtgtcatactgcccctgttgtagctgaagaggggactgaatgatggaggagtgtgtgcagccagttaaatggtacactaaatgtcacacagaaagacattctgtcctcttctcatccacacagggtcatgcctcttgcgctcttctctgcccacaggacaatcttccctgctgtgccagttgccagggacttgggttgcaggtgtttctatatagccctgctttcagagtgacatttgctcagagcaaagggtgactgttttttgttttcaycccccaatcctgcaacctgaagatcccagaagagtcataaacatgcatcccagctttaataaacttgttgcataatgacttacatccaaaggtctcaaaacatttttttccaaatgcacagttgtcttacaaatatatgtaatcatattgcactagtttattatttgtgatctaaataggattcat

SEQ ID NO: 869648 - DNA, 636 bp, Homo sapiens
gtgtgatgttgaaaatgaggagacagattagtggggtggaggaacagtagaagtgataagactttatgatttaggtggtgtgactggtgaggacgtggtcaaagatgagaaaaaagttagtacattctattttgaatgagttggcttatgaaaatacaaattattatgctcaaagtaatcatacatactccttatatagttaaaactgctttttaccccactacacttgcagactagtgtgtgggggtrgggatgcacacagcacatatgaaataacagggtggggctgggtgcagtggctcacacctgtaatcccagcactttgggaggccaaggcaggtggatcacgaggtcaagagttcgaggccagcctggccaacatggtgaaaccctgtctctactaaaaatacaaaaattagctgggtgtggtggcaggtgcctgtaatcccagctactcgggagactgaggcaggagaatcacttgaacccaggaggcggaggctgcagtgagccgagatcatgccactgtactccagcctgggcgagaagagcaacattccatctcaaaaaaaaaaaaaaaaaagaaagaaagaaagaacagggtggacacactgttccaagtttagattccattta

SEQ ID NO: 869649 - DNA, 636 bp, Homo sapiens
gtgtgatgttgaaaatgaggagacagattagtggggtggaggaacagtagaagtgataagactttatgatttaggtggtgtgactggtgaggacgtggtcaaagatgagaaaaaagttagtacattctattttgaatgagttggcttatgaaaatacaaattattatgctcaaagtaatcatacatactccttatatagttaaaactgctttttaccccactacacttgcagactagtgtgtgggggtagggatgcacacagcacatatgaaataacagggtggggctgggtgcagtggctcacacctgtaatcccagcactttgggaggccaaggcaggtggatcaygaggtcaagagttcgaggccagcctggccaacatggtgaaaccctgtctctactaaaaatacaaaaattagctgggtgtggtggcaggtgcctgtaatcccagctactcgggagactgaggcaggagaatcacttgaacccaggaggcggaggctgcagtgagccgagatcatgccactgtactccagcctgggcgagaagagcaacattccatctcaaaaaaaaaaaaaaaaaagaaagaaagaaagaacagggtggacacactgttccaagtttagattccattta

SEQ ID NO: 869650 - DNA, 620 bp, Homo sapiens
actgtaaaatgaaataaaaaagcaaactcatcgtctggacttatcaacagaatggaaaggacaacagaaaagggaatcaatgatccggaagatagagccatagaaattagcaactctgagcaagagagaaaaaatagtctaaaaaaatggacagatactcagrgttctatagtattctagcaaaatatctaaatatcctgtcattgaagtcctggaaagagaagaaagggaaaattggattaaaagtgctcaaagaaataatggctaaaaacttatcaattttgcgaaatatataaacatgcagattaaagaagcaaagtaaatctcttaacaggaaaaactcaaaaaaatctacatcaagacacattatagtcaaacttctgataactaaaaacgaataaaatttattgaaaagagtgagagaaaggacaccttatttgtagtaagaaaatatttaagtgataaagaatttctcatcagaaaccatggaggcctgaagaaagcagcacatttttcaagtattaaaagtaaagaaacaaaaagaaaaaaatgtactaaatcctatgtccagcaagtatccttcaaggataaaggggaaatcaagatgttagaagaaggaa

SEQ ID NO: 869651 - DNA, 610 bp, Homo sapiens
ttgattctgctccaaatcagataattggtccccctctgaacataggagcacctggtttttggtgcacatcactttttatgttgtcaaacttctgttttgctgactcattcttcttccctctctcctcccctcagcagcacacgctgttattgggagtttcaactcattttatgtgagtggtttacagacatttccattaaggaagtggaaggaagagtccaagagaaagaaagcacagaaagggaaggaatgaaagtgctaaaaaaaaaaagrgaagagagtctaggtgatgtttgcaggttacagaaggacaagggagaaagaatcatccctttaagatcatattagaggatgtctgcaaagtgtctgctgtgtagattcaggtctcaacaaatggtggccattattaattctattctattgaatgtagcaaggtcaaagatgtggttttggtcacagccaatccagagatcttcaaaacagagtcaccttgcccaatgtctggtaaaataatatgtaaatgagtcagtttgttacttttcaaaaaaaggcttatgtcctcttcctccccaaaagtggaatatctattgttggatctaggaaattttaa

SEQ ID NO: 869652 - DNA, 636 bp, Homo sapiens
atttatcctgtggcactcaaagtaccccaggttgagacgatatgaggaagattcaagctgtcaagttcagtttcccaagatctattccacagaagatgagcaaatctcacttcagaggccactgactgaagggcagtctggtcccagaaccgtggagaactcagaaaaaaatgttaaagtctctctggaaagtagaagcctgggaaaaaaccaaaccaaacccattctcccattgccacccagagatactgtgaacattttgagctcacaggggaagtgtaggcttttcccactgtcaatgtctatgttaagggagtaaggcagcctgaaacctcttgctcctaggtcccatagtctccactccccttccagctggaaatttgtgctgcaaccagaggaaccagaaatggggtgagaaaacttaggggactgggttgtaagatcaaaggcyggtcttgcagcagtaatgacagttcctaggggcactgtgacatcattgcattccactcctcccaggggaggggaccacatcagcgcgatgcccgagtcgctgctccacgatgggggagggaaacacacggtttcgacccaggtcctcagagacgccagcccaagaagcctagggaggtcgagctt

SEQ ID NO: 869653 - DNA, 562 bp, Homo sapiens
cactgattggctaaaagaaaagttaaacaaaagccattttcagagatgactgaaaagggagaaaacaaatttaaggtattaaagagatcatgctgccagtttcagggagacagtgaatccacaggcttggagttctcagattaatctttaatactgtgcttccttggctacgttgtggaaacatggagttagggacatcaacaacctagaaggaatgttagcaacaatccagcccaaactcttcaatatacaaataaaaaagtcaagtctgtagatcaaaatcacttgcccaaagacwcagaaaagaattacattaaaaccttggtccctctaagtatcttctgaagcaatgtatggagctctgtgttttaatcaaatcaaatcaagcatagggaaagacgaatcttctgcttatttgcatgtattcacagtcattttaagcataataattagtcattactgtatagtagtttgcagaggtggctctgattactataaatttcacaaagccaaaccagaatttctgtgttttcacgtactttattggttctgtggcacgtgc

SEQ ID NO: 869654 - DNA, 562 bp, Homo sapiens
cactgattggctaaaagaaaagttaaacaaaagccattttcagagatgactgaaaagggagaaaacaaatttaaggtattaaagagatcatgctgccagtttcagggagacagtgaatccacaggcttggagttctcagattaatctttaatactgtgcttccttggctacgttgtggaaacatggagttagggacatcaacaacctagaaggaatgttagcaacaatccagcccaaactcttcaatatacaaataaaaaagtcaagtctgtagatcaaaatcacttgcccaaagacacagaaaagaattacattaaaaccttsgtccctctaagtatcttctgaagcaatgtatggagctctgtgttttaatcaaatcaaatcaagcatagggaaagacgaatcttctgcttatttgcatgtattcacagtcattttaagcataataattagtcattactgtatagtagtttgcagaggtggctctgattactataaatttcacaaagccaaaccagaatttctgtgttttcacgtactttattggttctgtggcacgtgc

SEQ ID NO: 869655 - DNA, 534 bp, Homo sapiens
accaaatagaacaaattacttacatatataacaacatggatgaaatatcaaaagattgaatactactggaatccatttatatgaagttcagggaactttctggggtgataataattttctagatcttgatctggctggtgatgacattgctgtatacataggtaaaaattcaccaagttgtacatgtaagattattgtactttatataagttattccccaatagaaaataaaataacataaaaaaataacaaagaaagagcagkatgtgttcatggcttggagattactgtaggaagctcaaaaatgtaacaattttccccccctcttcgttcccttctttggcttttgttgctcacttctgtagctcctatgtagctggtgtgttaagggaatgagcctctttcttggaaaaagcattccctttgtttagaagttccaacaggactattctggggcaggaaaatggaagactaaagcaggtttgtcaatcagcttctcaaagtacaaaagtagcccaaactaagtaataagta

SEQ ID NO: 869656 - DNA, 534 bp, Homo sapiens
accaaatagaacaaattacttacatatataacaacatggatgaaatatcaaaagattgaatactactggaatccatttatatgaagttcagggaactttctggggtgataataattttctagatcttgatctggctggtgatgacattgctgtatacataggtaaaaattcaccaagttgtacatgtaagattattgtactttatataagttattccccaatagaaaataaaataacataaaaaaataacaaagaaagagcaggatgtgttcatggcttggagattactgtaggaagctcaaaaatgtaacaattttccccccctcttmgttcccttctttggcttttgttgctcacttctgtagctcctatgtagctggtgtgttaagggaatgagcctctttcttggaaaaagcattccctttgtttagaagttccaacaggactattctggggcaggaaaatggaagactaaagcaggtttgtcaatcagcttctcaaagtacaaaagtagcccaaactaagtaataagta

SEQ ID NO: 869657 - DNA, 648 bp, Homo sapiens
ctgtagtcccagctactcaggaggctgaagcaggagaatggcatgaacccggaagtcagagcttgcaatgagctgagattgtgccactgcactccaacctgggcgacagagcgagacaccctctcaaaaaaaaaaataaataaaaagatgtataaatattttatttctggaattatccacttatatcacaatgtttacatcactcatttcactctatctcatcacataggcattttgtaatctcatatcatcacaagaagaaggatgtgaacagtactataagtttctttgagagcaagggaatcacattcacataacttttattagagtacattcttatggctgtyctattttgttattagttattgtaattatcttactgtaactaatttataaattaaatcttatcataaacatgtatatataggaaaaaatatagtgtatacagagtttagtactatccatggtttcaagagttcactggggggtcttggaaggtatcccccatgaataaaggggacttattctgtaacgctgtatcagctgtctaggtttcccttaatccagtcaagttgacatctaaaattaacctcacatcttccatctcattggccaggacatagtcatgtggtcatacctagctgcaag

SEQ ID NO: 869658 - DNA, 612 bp, Homo sapiens
gaaatgaatggaaatattttaaaagtctcagcaaagaaacactagatataaagaagaaccaaaggaaatattagaacttaaaaatacagtaatcaaaatttaaaacactgagtaggtttaaataggatcaataccagaatggagatgatggaataaagaattagtgaacctcaagataaattaatggaaattatccagtataaatggcacagaggaaaaagcaaaaaaagcttcccaggaaggtgttggaaaataccaaaaggtcgacttttgtgtcattggagtttcagaaagagaggagaaagaagacaatgcagaaaatcacttaaagaaataataacagaaaatttctccaatttgtcaaaagacataaattcaaagactccagaagctgacttcacttcaaacaggataaaccctgtgtgsacatgcacatacacacacacacacacacacacaaataatgcccagacatatcataatcaaatcaatgtaaacaaaaaacttcaaaacagccaaagaaaaatgatatattacttataacaaagtttgaaaaactgtgctttcttctattcacaatagcaaagacttggaaccaacccaaatgtccat

SEQ ID NO: 869659 - DNA, 623 bp, Homo sapiens
gaaaacgaattcagtcagtgtgaaaaaatacataccatatcattttatattcttgctaaaatcaggagatgtaacatggctccaagaattataaaacccaacgaaagagaggagtatgatcagttacatcattcagagtgtctttagaacagtgcaaagcagccactcaggagagcctcagcttgtcctcatgctaaggctgggaacacatttcccccagagtcatcagaaagaggataaacagtagtgtaacaaggaatgcccctatagcagtgctacaatgaacaatgtgattcatcttggtggggctgttcttgtactttctcctaatatgggaatacaccaccattctataaaaactactaagtggagagccagttcatgcagtccaggaacatggctctctagcaaactgcctttaaccaagagaagattttgcagagtttgcaaacagactcccctcgagctagaatttggcytgaagtatattttgtttggccacaatagtggggagtttaaattaagcaaacataaaaattggacaattgcacataaaaatccagatacttcagcattccttaaacaattgtaagacctggcaacagcggattcacatggctgct

SEQ ID NO: 869660 - DNA, 580 bp, Homo sapiens
ccttgatgaacttccctgagtttcttcatatcttcaaattcatgctgatctgccttccaatctgcttttcagagattaccatccactcactaaactttttaaaacctagtactcatatttatcccctcactgagactttgaggtcagagggcattatttcatttgtggttagtctagaaatctctaaagttcttcttgattgccaaaatggtttcattttttccttatctatgcttagagtaaaatttctgtagatgtaattctgaaacattccaagcgaaaaaatatactttttaaaactgaactgtacagtgcttgcttgggaaactttaaaaaattatgtcatagttttataaaatgcataacagcaagccaagcttcagcctttgagaagccttagctttttaaagaatactcacgttcattctgccaagtagytttgaactttcattgcaaattattttcaattgtttatttttaataacaagtgcctttgaatgcagtacctatattgtgctgattctctggaaaaattctacttaagagttaccatctgtccagtaaatgaaagttgtccggt

SEQ ID NO: 869661 - DNA, 702 bp, Homo sapiens
aagaaaatgtagtatatgtataaaatggaataccatttagcctttcaaaagaaggaaatcttgtcatttgtgccaatatggatgaacctggagggcattaagttaagtaaaaaagccaggcacagtaagacaaatgctgcatgatcttaatttatatgtagygttaaaaagttgggctgggcacagtggttcgcacccgtaatctcagtgttttggaaggctgaagcaggaggatcacttgaggccaggagttcaagaccagactagccaacctggcaagtctccatctccacaaaaataaaaaaattagccagtcattgtggtacacccttgtagtcctaaccactcaggaggctaaggcatgaagatggcttgaggttacagtaaactgagattgcaccactgcactccagcctggaccatgtctctaaaagaaaaaaaaggaaagaaaaagaaagaaaaaaaaagaaaacaagaaaaacaaaaaagtcaaactcacagaaacagagagcaaaatggtggttaccagacactgaggaataggaggaatggggagatgctagtccaaggatacaaaatttcagttagataggaggagtaagttcagaaatctattgtacatcacggtgactgcttaacctacttatacttgaaaattgctaacagtggatttcaaaggttctcaccacaaaaatataagta

SEQ ID NO: 869662 - DNA, 663 bp, Homo sapiens
atttctgtgggatcagtggtgatcgccccattatcattttttattgtgtctattcgattctcttctcttttcttcttgatttgtctggcaagtggtctgttttgttaatcttttcaaaaaaccagttcctgaattcattgattttttgaagggttttttgtgtctctatctccttcmgttctgctctggtctttgttatttcttgtcttctgctagcttttgaatttgttcttgcttctctagttcttttaaatgtgatgttaggttgtcgattttagatcttttctactttctcttgtgggcatttaatgctataaatttccctctaaacactgctttagctgtgtcccagagattctggtatgttgtctccttgttctcattggtttcaaagaacttatttatttctgccttaatttcgttatttacccagtagtcattcaggagcaggctgttcagtttccatgtagttgtgcagtattgagtgagtttcttaatcctgagttctaatttgcttgcactgtggtctgagtgatggtttattatgatttctgttcttttgcatttactgaggagtgttttacttccaattatgtggtcaattttagaataagtgcaatgtggtgctgagaagaatgtatattctattgatttggggtggag

SEQ ID NO: 869663 - DNA, 663 bp, Homo sapiens
atttctgtgggatcagtggtgatcgccccattatcattttttattgtgtctattcgattctcttctcttttcttcttgatttgtctggcaagtggtctgttttgttaatcttttcaaaaaaccagttcctgaattcattgattttttgaagggttttttgtgtctctatctccttccgttctgctctggtctttgttatttcttgtcttctgctagcttttgaatttgytcttgcttctctagttcttttaaatgtgatgttaggttgtcgattttagatcttttctactttctcttgtgggcatttaatgctataaatttccctctaaacactgctttagctgtgtcccagagattctggtatgttgtctccttgttctcattggtttcaaagaacttatttatttctgccttaatttcgttatttacccagtagtcattcaggagcaggctgttcagtttccatgtagttgtgcagtattgagtgagtttcttaatcctgagttctaatttgcttgcactgtggtctgagtgatggtttattatgatttctgttcttttgcatttactgaggagtgttttacttccaattatgtggtcaattttagaataagtgcaatgtggtgctgagaagaatgtatattctattgatttggggtggag

SEQ ID NO: 869664 - DNA, 663 bp, Homo sapiens
atttctgtgggatcagtggtgatcgccccattatcattttttattgtgtctattcgattctcttctcttttcttcttgatttgtctggcaagtggtctgttttgttaatcttttcaaaaaaccagttcctgaattcattgattttttgaagggttttttgtgtctctatctccttccgttctgctctggtctttgttatttcttgtcttctgctagcttttgaatttgttcttgcttctctagttmttttaaatgtgatgttaggttgtcgattttagatcttttctactttctcttgtgggcatttaatgctataaatttccctctaaacactgctttagctgtgtcccagagattctggtatgttgtctccttgttctcattggtttcaaagaacttatttatttctgccttaatttcgttatttacccagtagtcattcaggagcaggctgttcagtttccatgtagttgtgcagtattgagtgagtttcttaatcctgagttctaatttgcttgcactgtggtctgagtgatggtttattatgatttctgttcttttgcatttactgaggagtgttttacttccaattatgtggtcaattttagaataagtgcaatgtggtgctgagaagaatgtatattctattgatttggggtggag

SEQ ID NO: 869665 - DNA, 663 bp, Homo sapiens
atttctgtgggatcagtggtgatcgccccattatcattttttattgtgtctattcgattctcttctcttttcttcttgatttgtctggcaagtggtctgttttgttaatcttttcaaaaaaccagttcctgaattcattgattttttgaagggttttttgtgtctctatctccttccgttctgctctggtctttgttatttcttgtcttctgctagcttttgaatttgttcttgcttctctagttcttttaaatgtgatgttaggttgtcrattttagatcttttctactttctcttgtgggcatttaatgctataaatttccctctaaacactgctttagctgtgtcccagagattctggtatgttgtctccttgttctcattggtttcaaagaacttatttatttctgccttaatttcgttatttacccagtagtcattcaggagcaggctgttcagtttccatgtagttgtgcagtattgagtgagtttcttaatcctgagttctaatttgcttgcactgtggtctgagtgatggtttattatgatttctgttcttttgcatttactgaggagtgttttacttccaattatgtggtcaattttagaataagtgcaatgtggtgctgagaagaatgtatattctattgatttggggtggag

SEQ ID NO: 869666 - DNA, 680 bp, Homo sapiens
tagcatcaaataaactgcctaacagtcaacttcggcaataaaaaaggacaagaaataaaatctttaaatatgtccttttttccctctttcctgtaagaggtctggtggcttggtgatgacatgagatatgaggatggggacaattccagtcctgaaatttctttgcaacggttacaaagagttgccgaattatacacaaagaygttgcctcgataaaaaatcccccttaaaaagtaagatgaggtaaagaaatactcttagggacatagactgagacagaaccagatcaaaatgtacctaactggacaatgaggtaggctaggtggtaatgtaccttgtcaagtactagaatatgcattcaacgtttttatctagtagtcatttcttaatgtctttggaataaaatatttaaaaggaaggacactgggtcattgctcactcatagacaccatgtcgtgtgtgtgtgtgtgtgtgtgtgcgcgtgcgcgcgtgtgtgtgtccacctcttcatcggtctagctcataagaggagtttttagactttatacttgaaataactttagacttgcagaaaagttgtacagaggttttctttacaccctgacaccaaattccaccaatgtgaccatcttcataaccgtcagacaagagcaaaaccaggcgactaacattagtatgga

SEQ ID NO: 869667 - DNA, 680 bp, Homo sapiens
tagcatcaaataaactgcctaacagtcaacttcggcaataaaaaaggacaagaaataaaatctttaaatatgtccttttttccctctttcctgtaagaggtctggtggcttggtgatgacatgagatatgaggatggggacaattccagtcctgaaatttctttgcaacggttacaaagagttgccgaattatacacaaagatgttgcctcgataaaaaatcccccttaaaaagtaagatgaggtaaagaaatactcttagggacatagactgagacagaaccagatcaaaatgtacctaactggacaatgaggtaggctaggtggtaatgtaccttgtcaagtactagaatatgcattcaacgtttttatctagtagtcatttcttaatgtctttggaataaaatatttaaaaggaaggacactgggtcattgctcactcatagacaccatgtcgtgtgtgtgtgtgtgtgtgtgtgcgcgygcgcgcgtgtgtgtgtccacctcttcatcggtctagctcataagaggagtttttagactttatacttgaaataactttagacttgcagaaaagttgtacagaggttttctttacaccctgacaccaaattccaccaatgtgaccatcttcataaccgtcagacaagagcaaaaccaggcgactaacattagtatgga

SEQ ID NO: 869668 - DNA, 680 bp, Homo sapiens
tagcatcaaataaactgcctaacagtcaacttcggcaataaaaaaggacaagaaataaaatctttaaatatgtccttttttccctctttcctgtaagaggtctggtggcttggtgatgacatgagatatgaggatggggacaattccagtcctgaaatttctttgcaacggttacaaagagttgccgaattatacacaaagatgttgcctcgataaaaaatcccccttaaaaagtaagatgaggtaaagaaatactcttagggacatagactgagacagaaccagatcaaaatgtacctaactggacaatgaggtaggctaggtggtaatgtaccttgtcaagtactagaatatgcattcaacgtttttatctagtagtcatttcttaatgtctttggaataaaatatttaaaaggaaggacactgggtcattgctcactcatagacaccatgtcgtgtgtgtgtgtgtgtgtgtgtgcgcgtgygcgcgtgtgtgtgtccacctcttcatcggtctagctcataagaggagtttttagactttatacttgaaataactttagacttgcagaaaagttgtacagaggttttctttacaccctgacaccaaattccaccaatgtgaccatcttcataaccgtcagacaagagcaaaaccaggcgactaacattagtatgga

SEQ ID NO: 869669 - DNA, 571 bp, Homo sapiens
ggaatgaggcatagaatgaggtttcgaagggtctgaaaagcaaagcttccattttgttccccatggagtcaggatacccttccagcatattgatgtatgacagtgcatagagacttgctaaccaggggactcacctgaggtttgtccagagtttttgttggagtatcatcacataggcaagattgattgaatcactgtccatgtgattaaaccaaatctctgacccctttatgctccccagatattgagctaatatcaaagtcccaatcctctcatcacatggttggtctttctggtgttgccagtacctgtcccgagtcatctcattagtataaaacatgtagagtccaccatgagttacctcactagtataaacaaggtytaccatgaataccataaacactcctgtcactcaggaaattccaaggattttgaggctacttctcataaactggggatggagaccagccaaattctttattatactacagagatcaaacgcataggcactgaaatatagacacctgaatatgcatgttttgcatgaataaatacttctagtcaggagtgg

SEQ ID NO: 869670 - DNA, 533 bp, Homo sapiens
ctatactgacacatatttatcacgcaatgtccatattttacatgaggttccatttgtggtgttgtacattctatggattttgacaaatatataagacatgtattcatcattataatatcatagagagtagtttcattgccctaaagaatacatttgtactttgcttattcatctgtctttctctcctaccccctggcaaccacaaatccttttattatattcatagttttgtctgttccagaataccatgtagttggaatttagagtayacagccttttcaagtttgatttttcatttagtaataagcatttaacgtttctctatttttttcttggtgtgatagctttttttcttttcttagccctgaataatagttcattttctggatataccaatttgttcatccatttatccaaacatttactgaaggacttctgggttacttctgagtttttgcaatttgttttgtattgttttgtttttcccaactttattagagtataagtgaaaaattaaaatcgtataaatttgt

SEQ ID NO: 869671 - DNA, 460 bp, Homo sapiens
ggcacacctctctactccagtgacttcttgctgcaaatacctgtaactctgcctactcgctttcctctgccagtgagggcatacttgactgccccagtgcaagctgaaagtgctagagtcttaacgctttcaggagaagccctcagatgatgagagatggggatttggtgaatagatcatatcttatttgcctctaagatagggtaatactaaagcatgttctatactccctcctagagytccccaggagggctgagcttcagctgcacagtagtaacccatttgactcattatcctttattggcttccttcacttttctgttttacttctcaactcccatgctgatgtttcctgggatcacctcccaaataaactacttacagtttaattcttgcctagaggtctatttctggaggaattcaaacaaaggcagatcttttgtgttttggggggttcaga

SEQ ID NO: 869672 - DNA, 623 bp, Homo sapiens
taaactgacttaagcaaaaggaagattggttggtgagattctggggtagctccataaaatcaaagaaagagtttgtcacccaacccttgagcaggacagggagggcagcactgaagattttaggggaaatgcgaacttgtgcatcctctgggtgctctctgccccaccttcattctgttcttcctggggtgttcctcattctatgtggacatggtaccatgaccacaaacttagcttaaaaactcacagggaagagctcatgggccatctctggaccccatcactgtgtccgggaaactaggaaagtgtaaaaggacgatagtcctcatttagaycctatgaataggattgagggagaatagcagtttcccccaatagaaggggcaagaaggaaaagacagaacttggctcagatatgaccagtaggggaaatcactgtggtcggccgcctgaattggaatacagggtacagtgagcaccatgaacggacttttgaggaaaagaggggcaagagatttccaaaaggattcccacactagatctcactgtgccagactaccattccaagaggcacaggaagcctgatgttagccaaaccacatccttctcctactcaactccag

SEQ ID NO: 869673 - DNA, 632 bp, Homo sapiens
ccagattggtcaggacttgactatgtcactcagtaaaactagagatgagtcttacttctccagtaagatcagagctgcaggctggtggtctggggtccatccaacctgagtcacacatttttcctaggacttcctattggactcagcagagactcactaaattttgaggtgtgacagagaaaggagccttcccttctaaggttctcctctgtttccccctagtctaacctctcacacggacaccaagatgtctggcctgatattaaggaagtcagctcacacaacccttcaaaattcagaagaaaatatatgggggttgctgcagaatgagctgccctgtctttcaactccatttcaggccttytgaagagccatctgaccttgcagcctctgccagttcttttcctcctccttccttcactcttacaggtgccttctgccctgaactggaaaaaaaaaaaaaaaaaaaaactgctctctcaaacatcacctgtaacttccggttcccagaaccagctgcttgttccctggatgcacctggtgctttcccacccaagcctctgctcacatacttccctccctctagaacaggcttcccaccatcctaccttcaaatcatatgcttgtttaca

SEQ ID NO: 869674 - DNA, 632 bp, Homo sapiens
ccagattggtcaggacttgactatgtcactcagtaaaactagagatgagtcttacttctccagtaagatcagagctgcaggctggtggtctggggtccatccaacctgagtcacacatttttcctaggacttcctattggactcagcagagactcactaaattttgaggtgtgacagagaaaggagccttcccttctaaggttctcctctgtttccccctagtctaacctctcacacggacaccaagatgtctggcctgatattaaggaagtcagctcacacaacccttcaaaattcagaagaaaatatatgggggttgctgcagaatgagctgccctgtctttcaactccatttcaggccttctgaagagccatctgaccttgcagcctctgccagttcttttcctcctccttccttcactcttacaggtgccttytgccctgaactggaaaaaaaaaaaaaaaaaaaaactgctctctcaaacatcacctgtaacttccggttcccagaaccagctgcttgttccctggatgcacctggtgctttcccacccaagcctctgctcacatacttccctccctctagaacaggcttcccaccatcctaccttcaaatcatatgcttgtttaca

SEQ ID NO: 869675 - DNA, 599 bp, Homo sapiens
agtcattaacactttagcatgaattagctaatgaccccacagggaaaccactgacctttgtgaggtgaaatattttggccggaggccttcccctccccctcaaatctcaggctgctcctcctgggtccaagctggctaatgagcatgtgtgggcagaagagttcaataaagattgactgatttattgatctatgggagcaaagctgagcttaatcttcccttgcagctgctcctttccttgcacatctctggagacttgtgtttggccctgcccaacatcaccatgcatagcstaccctactcctttgaaccaagtcttactgggagtttgatacgaagttaaccagtggcagagaaacatctagagaccctaaagagggtctcaaatctgtagctccaggagtttccatatcacatacagggaaagctagccaatggtttcccactgtcagaggggcacagaaggaacaacactaatcccccagagaaagaacaagtcaaagcatctccaggcccctgcctctatgtacaaagccatgaagaggctgggagtggctcacagactgtggcatgtgggaggaaaggtggtactggagctc

SEQ ID NO: 869676 - DNA, 563 bp, Homo sapiens
actcatgtgagcaacacatggctgagccaggatcccaacctaggcccgtagactcatcccaagctctcaactgccctgtgcagggctggggcagtgtgtgctcgtcctcattcttgcatatctcctttctctaccccacatcagcacacaagcattgcccagtccacagacatgctgggcttgccgaagktgcagaggctctgggctgggggataggagggtttatcaccttgtcctttgctcttgttgcaatctgtcctgccatcattggatagtcaaaattcgtctgcctgcacaatgtatgattattcgttttctagatctgttgctatgcattgtttctgtgtgtgccttgttggagatagtgcaaaaatctcctatttacaaagatcttagagcacaggtgaatgaggaccactcatcttccccagatgtggttttcacaaatgaccacatcatcccatttcagacaggcacaatcacacttgtgtgtctattttttgaagcttcctggaaattctctcaacatcttaatcagtataggatataattctcctactgta

SEQ ID NO: 869677 - DNA, 563 bp, Homo sapiens
actcatgtgagcaacacatggctgagccaggatcccaacctaggcccgtagactcatcccaagctctcaactgccctgtgcagggctggggcagtgtgtgctcgtcctcattcttgcatatctcctttctctaccccacatcagcacacaagcattgcccagtccacagacatgctgggcttgccgaaggtgcagaggctctgggctgggggataggagggtttatcaccttgtcctttgctcttgttgcaatctgtcctgccatcaytggatagtcaaaattcgtctgcctgcacaatgtatgattattcgttttctagatctgttgctatgcattgtttctgtgtgtgccttgttggagatagtgcaaaaatctcctatttacaaagatcttagagcacaggtgaatgaggaccactcatcttccccagatgtggttttcacaaatgaccacatcatcccatttcagacaggcacaatcacacttgtgtgtctattttttgaagcttcctggaaattctctcaacatcttaatcagtataggatataattctcctactgta

SEQ ID NO: 869678 - DNA, 613 bp, Homo sapiens
aaaataagttcatagctaagatgaagactaatgtgaggaagataaaataaatgttctcagaggataagggtgggcacatgcagggactgaggaaagggaactctttctgagccaggtgccaaggcagatactacacctgaaaagattgccagattccaccccatagaaacacaaaacaagaatacaagttaccataaacaagatggaaagataaarctattttcaaattttaagatatctcagcatatggtattagtattttccattgagttgtgatgggtggggttttttaagactggctaagcctattagacattaatgtcacatcctgtgagtatcattggtatttggtaggagtaatttttgcctctgcttgtgagagttgataaaaatctattttcattgtggaaaaaaataaaaagataattcacctcagcatggggaatgtatacagtatttaattctgcttaagaaatctcagacagtgaattacctcagagcatatctcttgaattaaaatattcatatttgactgtataacatatgttttaccttgaagtcctagttgcagagctgattcagaggcatctaggtcaaatacatgatcttctga

SEQ ID NO: 869679 - DNA, 655 bp, Homo sapiens
agaattgcctctatatttcctacaattcagattcctaggtttcattttagactcactgactctgaatctgccaatagtgagggccaggaatctgccgttttagtaggcaacctaggtaatttgagacttacacttttcaaaaattgcttagaattttatcaaaagaaaagggtaaaatcttaccacaatraagcttggtcttctcatttcacaaactaactcaccattaaaattatctttgaaatgcagttactgtaataatttgaaccttttatgtaacttttcccttcattactctttaatggcattcaagctgagagtcagacttggacagtgctgttatgttttcagtaaaccaatgaggcacaaaatggtttcctggagaaaacattgatagtttgggacattagctatgtgggaaaactcaacattaactgtctccctagacagggaaatgaaaagtccctatttcaaaacattctccataagacctgtaaaactctgataatttctgtggcattttacatgatagaagaataggacaggttacagagatgtgaaaatgcaattcagtaaacaaatacttactgagcatctataacgtaaagccaggccctgggctggctttcagaggacacacagagatgagtaaaac

SEQ ID NO: 869680 - DNA, 646 bp, Homo sapiens
acatttcatctaatatctagctttttatttcatgttatcagttgtcttgtttattctacttcttctttcttacttattgcattcttttgcactgatctttaactctatttttcccatttgttagtttaaaatttgtatactctgtattctyttagtggtaagcctagaaatttcgcatgcatacttaatgtctgcatcaaatgttgcaaatttaatcctttccttggtcctcctcctggataatcaggggatcttaggacactttcactccactcacccctgtcccaacttgttattataattttgatttcatttcttttactattttatcactgtttaaaaatattaattattattttataagtcaatttaatatttgtaactgatattaaaatagtctatcttaaatatttaactgtgaagtgtttccatttacccatatgtttaccacattctttgctcttcatttcatcttgcattttagatcttcaatctgggatcacattttttgcttaaagacatactttaaaattcctttatggtggtctgctggtggtctgctttcagtgttacctcatctgaaaatgtctttatttcatccgtattcttgaaagaccatctcattaggtatagaattctactttag

SEQ ID NO: 869681 - DNA, 618 bp, Homo sapiens
tgctgggataactggctagccatatgctgaaaattgaaactggactccttccttacacaaaaattaactcaagatggattaaagacttaactgtaaaaacctaaactataaaaaccttgaagaaaacctaggcaatatcattcaggacatgggcacgggcaaagatttcatgatgaagacaccaaaagcaattgcgacaaaagcaaaaattgacaaatggsatctaattaaactaaagagcttctgcacagcaaaaagaaactatcaatggagtaaacagacaacctacagaaaaggagaacatttctgcaaactaagcatctcacaaaggtctaatatccaacatctataaggaacttaaacaaatttgcaagaaaaaaaccaaaccaccccattaaaaagtgggcaaagaacatgaacacatacttttcaaaagaaggcatatatgtggccagtaatcatgcaaaaaactcaacatcactgataattagagaaatgcaactcaaaaccatgatgagataactatctcatacccatcagaatgactattactaaaaaggcaaaaaattactgatgctggctattcttaaaaaggcaaaaaaaatatggattatggtt

SEQ ID NO: 869682 - DNA, 567 bp, Homo sapiens
gagaactgacactggaccgtttctccttattacatccatttggctgaaaagacttaactagaaagttgtgttctactgccctttacaaatttcagaattatatgtgacagttaaggtagctgcaacacgagcacattgtaccagagaacgctgaatcaagaacatttatcgccaggtcttagttctagcttctgtcaattatacaaagagtcagctattaaatattaatggcatgccatttgcgctgcagctctcgcaaagagcctcctgctaccaatttttgtgatgaaagaaaacctgtcattttctagataaaccccaggccacgagaatccctcaratgagcgatcgaattctgtccttcccaggggaagctgtcagggccacccccatataccggggaggaggaggaggaacctgagggagggcgggtccccgcaggtcctgggtcaagggtctcgtgttccccttctctcccagccatccgcgacaggtcgggaggcgaggcggggcggggctgggccggctgtccgcacaaagagagccagcgagctagcccgcggacca

SEQ ID NO: 869683 - DNA, 588 bp, Homo sapiens
ggttcaatatgatgaaaattgtacggattctgtcaccaaatctcttagctctctaaaattcatcacaattagatactgtggtggtctgactgttaagcaatgtcctctctagctgtagtaagtctttgagtaataatgctgatggcctcatgrttagtgcacaggctctggatttagactgccttacctttcaaattcattctttgctatttactaactgtgtgacttctggcaagttatctgaccttttctgagctcacttacctggtctgtaaaattgagataattataacatctccagaggggtgtagaaaggagtaaggggctgaagaaaaaaggctagatgaacctacacagctaataaaagagtgtctggtgcattttaaatgtgagcattagttataaacctaaccaaagctttgtatttccctgcattctcagctttctgctcctacttttacacttgagtgtgctgtgttaaatcaaggaatgtagtctaaagtactaaaatataacatagtggaatagggcagaataaatgtcatggtataaataaattttaaatttgcacgaaaacacagtgttaag

SEQ ID NO: 869684 - DNA, 444 bp, Homo sapiens
gaaaaagaagcaaatatcccgaagccatgaaaatgagcaggacagctgatgtgtggaatgcatatatcaaaaaacgtttcaacagacgtgtgatgtttaacagggattcccatattctaaaataccaactgtaaaatacgggtgtcctgaagaaggcctagtaaacctagttgatgagaacagcaatatsaagcaatctaaatatgttaataatctctccatacacaacgctgatcatatcacacttaagctgctgtagagagaggaagttaccatattttaaaatatcaacacattaaaatctttctaaaagtcattcgcataatataagaaatggttgaatctaggctacatggtaggttaatatatctttctttctttttttaaacttaaactcttagaactgttccaaactgttttctatttactacaagttaagcattt

SEQ ID NO: 869685 - DNA, 570 bp, Homo sapiens
gccttccctcatcctctaccacagcccatcccacaccactttccagccactctctatcacagatgccaggcaacattttctgtagagagccaggtagtgaatacctgagactttgcaggcctgaccctcaatgtccactgtcacaaggaagtggctgtagatgatatgtgaatgagtgggtgtagccgtgttcccagaaaaccttatttaaggattctgacatttaaatttttatatcatttcccctgtcatgaaatcttctcatttttttcycccttcaagcacttaaaaatatcaaaaccattcttagctcacccacaaaaaattggcagctgggccaaatttggtccatagccaacccctgccctaacccattactccaattattttcttcctagtccttatcgctgcctaaaattatatcatttattcatgtgtttatctcctcactttacttgcccttggaatttaagctccaaaagagaggggccccatctgttgggttcactatcctgtgcccactgcccatcacaacacccgatgctgcggaagacgtgaaggaccaagcca

SEQ ID NO: 869686 - DNA, 653 bp, Homo sapiens
tggaaacatttgttattttctaatcaaatgcagggtttttctcaggagctagagtaggaggtgaggagtccacatctttctactatttcttgaacatggaaacaaaaaaaaattactagactcacacttaactgaaggtcctaatttcaactcttactggtgacctagwgccatgggtatgtcagattatgtctctaagcttcaggctgatcatctgtaaacaagaaaagcagtgcctgtccctttcttgaatttcctaggaagatttaaggataaaatggttataacgtgctatgcaaatgtgtgatcaaacactacacacatatatacacatacttaatgcagtcagagttgtcagcaagtacacttggaaaatacaaagagctatttgccttggagaggttagggggtaaagaactagggcacagttgctactctcagggagattacagtcaaatagagaagatgtcacattttgtagatctgagacattgtttattttacattataacatctctcaaattgaggtatatctcatagctaatggcatatcttagaatgaagactttttctttcttagtggcgcatgagttaatggtgcctctttttcatacccagttgtgtcttagattccatgaaatttaataatatag

SEQ ID NO: 869687 - DNA, 666 bp, Homo sapiens
tttacagaaaaggtttgctgatcccttgctctggggtcttgaaattgatagactctcctgggttctctgttttttttccagcagatcggctatagtttctaaataagtgaaaaaagaagaacccgaaacaacctttattgatctgctggtggtcatttggtaccatatacagaatgccaaaaaattttaaattggttgttttgtcatcacaaaatggaataatcgatttgaatactaagcaagccctggaataacagaatcatggttttgtaaaaagactgggcaccagaagcagacacacctttgttagaatcccacttctgccaccattagctgtgaggccttagactaagtacttgactgttctgagctgcagttgtatcatctgtaaaatggtaacattattaaatgaataataatacctaccttacaggcttggaggtgaggctcagaggtaataaatgtcaagcatctagtacttagaagcttaataaagatggagcccrtcttaagggtggcagtagtaacagtatcatgtagattcaaattttcctccccaatacactttcttagaccttctttgataagaaaaatgagtctagggctcttgatatttcaaaggaagtttcaggagaaacaatgaaaagtccttcctttaagacccag

SEQ ID NO: 869688 - DNA, 547 bp, Homo sapiens
tcacctaaggaccaaaggaaactcactccccagttttctttcttctgaggtctcaatgtttccactcttttcttctctcagtacacaggcaggactgttttgtcctgccctttgggtaggtatatgaaacaacagctttggggcaagtcactcatacagtaagtgattctccaggtacaaatctctctccatcatattttgtactacaatttaaaaaaaccaattgttccttccagagctgtgactcaraaaacaaaatggctttgacttaataggcaaaaactgttctctgctttaggcccgtccagaaggtcttgtacctcaccctacccctataatcctttcagtctccctacagtgccccttagacgtgtagagcacggaatgtcccttcccttcttttggtaacatcatcagccattcctttgggaaagcacccttctcctttttcaggagttgagatggatcctaacgctccatctacccaaactcagatacaggcacacatctagggttggctgaactgagctctttcttcccctggtgg

SEQ ID NO: 869689 - DNA, 671 bp, Homo sapiens
ggccacattactgcttactggcccacagaacgctaccagaaattttataagaatgtatatttgatttgcatttctctaatgatcagtgatgttgagtttttttcatgcttgtttgctgcatgaatgtcttcttttgagaagtatctgttcatgtcctttgcccatttttaatgaggtttttttttcttktaaatttgtttgagttccttgtagattgtgggtattagaccaaatgcccatcaacaatagactggataaagaaaatgtggtacatataaaccatggaatattatgcagccataaaatgaatgatataatgtcctttgcagggacgtggataaagctggaagacattatcctcagcaaactaatgcagaaacagaaaaccaaacaccacatgttctcacttataaatgggagctgaacaatgagaacacatggacacagggaggggaacaacacacactggagactgttggggggtggagtgagggaagggagagcattaggaaacatagaaaatgcatgctgggcttaatacctatgtaatgggttgatagtgcagcaaaccaccatggcacacatttacccatgtaacaaacctgcacatcctgcacatgtaccccagaactaaaaataaaaattaaaagaaaaaaagaatgtgtatttga

SEQ ID NO: 869690 - DNA, 671 bp, Homo sapiens
ggccacattactgcttactggcccacagaacgctaccagaaattttataagaatgtatatttgatttgcatttctctaatgatcagtgatgttgagtttttttcatgcttgtttgctgcatgaatgtcttcttttgagaagtatctgttcatgtcctttgcccatttttaatgaggtttttttttcttgwaaatttgtttgagttccttgtagattgtgggtattagaccaaatgcccatcaacaatagactggataaagaaaatgtggtacatataaaccatggaatattatgcagccataaaatgaatgatataatgtcctttgcagggacgtggataaagctggaagacattatcctcagcaaactaatgcagaaacagaaaaccaaacaccacatgttctcacttataaatgggagctgaacaatgagaacacatggacacagggaggggaacaacacacactggagactgttggggggtggagtgagggaagggagagcattaggaaacatagaaaatgcatgctgggcttaatacctatgtaatgggttgatagtgcagcaaaccaccatggcacacatttacccatgtaacaaacctgcacatcctgcacatgtaccccagaactaaaaataaaaattaaaagaaaaaaagaatgtgtatttga

SEQ ID NO: 869691 - DNA, 671 bp, Homo sapiens
ggccacattactgcttactggcccacagaacgctaccagaaattttataagaatgtatatttgatttgcatttctctaatgatcagtgatgttgagtttttttcatgcttgtttgctgcatgaatgtcttcttttgagaagtatctgttcatgtcctttgcccatttttaatgaggtttttttttcttgtaaatttgtttgagttccttgtagattgtgggtattagaccaaatgcccatcaacaatagactggataaagaaaatgtggtacatataaaccatggaatattatgcagccataaaatgaatgatataatgtcctttgcagggacgtggataaagctggaagacattatcctcagcaaactaatgcagaaacagaaaaccaaacaccrcatgttctcacttataaatgggagctgaacaatgagaacacatggacacagggaggggaacaacacacactggagactgttggggggtggagtgagggaagggagagcattaggaaacatagaaaatgcatgctgggcttaatacctatgtaatgggttgatagtgcagcaaaccaccatggcacacatttacccatgtaacaaacctgcacatcctgcacatgtaccccagaactaaaaataaaaattaaaagaaaaaaagaatgtgtatttga

SEQ ID NO: 869692 - DNA, 541 bp, Homo sapiens
agtggtacaatcatggctcactatagcctagacactccttggctctagcagtcctccagcctcagtctcccgaccacaggtatgcaccatcatacttggctattttgtaaatttttggtaaagacaagatctcactatgttgcctagcctggtctcaaactgctggtctccaactcctaggctcaagtgatcctcccgcctcagcctcccaaagtgatgggattgcaggcatgcaccaacatgcccaaaaataaattttttttaatgttggctttactacaatgagccaaagcaagaggttttttttttttgtttttktttttaattgacggcaaataaacataggcttttggtcatactctcagttctaggatacaactttttacataaaataataatttctattttctgtcatccttgacatcactatccaaaatatgctgaagtgaaaagttttcctcccagggctctcattccttcttctccatttctgtctaccctaaagctgaagacctgcgtgtggtctctcagacctttttag

SEQ ID NO: 869693 - DNA, 611 bp, Homo sapiens
ctcttactaggtgcctataaataccataattgtttaattccccacagtaactgtcccttattttacttaactattctatctcaaattactcccagattgtcactgtgtttgtgtatatgaactttcatttaggttgaattatytccaaaaattacatttcagagttaagattattgtgagtaccagggcataaatagtcctattgcccctggtataaattgccaaactttatccccaaaggcttatgtaaaatttaaatgtcattaattatacaagaaagtgtccatttcattgcacctttgccagcacaaggtgtgatattttaatgtcattttgttgtttgactattttttaataaaagaactcatcattcctttgtttttattatttgtcaaaatttaacaactttccttattttagcttattagctctatttttcttttctttctgtgtccccccatttatttataaaattaatgtctcttttgccaatttgttgacctatttatttaacctcttactaaattataagaatcgttaatgcttacttttaaataaagaagtacaacttcccttcactcgttaagcccgtaattttatttcaagaaata

SEQ ID NO: 869694 - DNA, 576 bp, Homo sapiens
ttgtaagtatctcacagctcccacatcattctgagtacatattatcagaggcaatgctgaaaatatttaacaactctctgacctgggcattgattaaacagagtagtcagtaattattaaccatcattatagctatactggtgtgtgcaggctgaatataagcaagcaactccttcagaacattcccaaaacacaggactcccctggttccctcctaatcccactccgtatctgcaggtttaccacatcgtgggatggttcaggatcgtgcataactctatgaaggcagattcagatggagagaggctcytgaatggttgataacagagaaaggatagttgcttctgagcaatagcattgattatggtcagggggagcccacagaggccactcttaggcattctccttgcagtttcagggtatcaggtgtgtactgctattgagaggacataggtctccttgcccatgacaccatcagacccacctggagtccacacctcaattctgctccctcagctgcccagcagcaagcacgggaactcccacctcccccttatataagagccaaatgtcggg

SEQ ID NO: 869695 - DNA, 622 bp, Homo sapiens
atgtggtgtttggttttctgttcctgtgttggtttgctgaggataatggcttccatcttcatccctgtgcctgcaaaggacataatctcattcctttttatggattcgtagtattccatggtgtatatgtagcacattttcttgatccagtagatcattgacgggcatttaggttgattccatgtctttgctattgtgaatagtgctgcratgaacacacgtgtgcatgtctcattataatgaagtgatttatattgctttgggcatatacccagtaatgggattgctgggtcaaatggtatttctggttctaggtctttgagaaatcgccacactgtcttccacaatggttgaactaatttacattcccaccaacagtgtaaaagcattcctatttctctacaaccttgccagcatctactgtttcttgactttttaataattgccatctgactggcatgagatggttttgtggttttgatttgcatttctgtaatgatcagtgatgttgagccttttttcatatgtttgttggatgcatgaatgtctttttttgatgtcctttgccactttttaatggcgttgtttttttcttgtaaatttgtttaagttcttcgtcgat

SEQ ID NO: 869696 - DNA, 638 bp, Homo sapiens
ttcctctctgtgtccatgtgttctcaatgttcaactctcacttatgagtgagaacatgtggtgtttggttttctgctcctgtgttagtttgctgaggatgatggcttccagcttcatccatgtccttgcaaaggacatgatctcatccctttttatggctgcatagtattccatggtgtgtatgtgccacattttctttatccagtctatgattgattaccatttgggttggtcccatgactttgctattgtaaatagtgctgcaataagcatatgygtgcatgtgtctttacactagaatgatttataatcctttgggtatatacccagtaatgggattgctgggtcaaatggtatttcttgttctaaatccttgaagaatcaccatactgtcttccacaatggtcgaactaatttacattcccatcaacagtgtaaaagagttcctaattatctacagcctcgcgggcatctattgtttcctgacatttcaatatttgccattctgactggtgcaagatgggatttcattgtggttttgatttgcatttctctgatgatctcattgttgttttaatttgtatttccccaatgagacaacatgtggagcaccttttcatatgcttacttgccatttg

SEQ ID NO: 869697 - DNA, 648 bp, Homo sapiens
agctccactacttgctattgatcttggacaactttctcacttagtgcctcagttgtaccatctataataagatggtgataataatagtgcctatcttataaggtggctgggaggatgaaatgagttaattaacacaaggaaggctcttacttagcagaataagtcttcaatatgcaaccactgatattgttgttattatgaccagagcttagctgaaggtagaacaagggaaatcataacaaaagcctgaatccaagtcatcctgatggaacaaagtcatgggacttggtgacaggctatgtcctggtaactgagaaggaagaagawccagcatggattctctcattgttgatgaacagaatggaaactgcaataagccctgaattaggacaccgaaagacctgtcttgctttctggctctgacatttggtagcagggtaacattggaaaatcacttgagactctttgcctcagttttcacatctataaaatggagaaaacattggctgctctgccaaccatacagggtcatacctcaaagcaagcaaaaaagtgagtgtgatggccttttagtcacattgcgaagtgctactaccatcatgggaattattattatcctaaaggttgtagcttgggaaaacaaaagta

SEQ ID NO: 869698 - DNA, 648 bp, Homo sapiens
agctccactacttgctattgatcttggacaactttctcacttagtgcctcagttgtaccatctataataagatggtgataataatagtgcctatcttataaggtggctgggaggatgaaatgagttaattaacacaaggaaggctcttacttagcagaataagtcttcaatatgcaaccactgatattgttgttattatgaccagagcttagctgaaggtagaacaagggaaatcataacaaaagcctgaatccaagtcatcctgatggaacaaagtcatgggacttggtgacaggctatgtcctggtaactgagaaggaagaagaaccagcatggattctctcattgttgatgaacagaatggaaactgcaataagccctgaattaggacaccgaaagacctgtcttgctttctggctctgacatttggtagcagggtaacattggaaaatcacttgagactctttgcctcagttttcacatctrtaaaatggagaaaacattggctgctctgccaaccatacagggtcatacctcaaagcaagcaaaaaagtgagtgtgatggccttttagtcacattgcgaagtgctactaccatcatgggaattattattatcctaaaggttgtagcttgggaaaacaaaagta

SEQ ID NO: 869699 - DNA, 616 bp, Homo sapiens
aaggctttacatactgttttgcatttcttgtgctatatctgccccatacaccaagctgtgagctcctggaaggcgtggtccaatttcagtgctcccgggccaggtgaggtggctcatgcctgtaatcccagcactttgggatgccaaggtgggtggatcacctgaggtcaggagttcartgctcccagcggactataggggctatgaaagcaagtatctcttctgtctcattcacctgtgtccccttcacatagtgctgtgcctgacaactatagtaggtgctcaataaatacttgctggtgaatggatggatgaaaagctatattggtatctacccagaaatctggtatccccaggacctagcacagtgcctgacacatagaagaatctcagtaaatatttgttgaatcaataaatgacagtcctgttacttgaagatgaagcagaactaagactttgaaattctagtttctagaattcaaaagaatatgacttttaaatgggacctccttctgttaaaaataaataaacaagctaaaggaaggaaggtaaaggaagaagttactcaagatcaatttagataaacttaaatttttaaaagctttggatgtgaaat

SEQ ID NO: 869700 - DNA, 582 bp, Homo sapiens
atatgagatttgggtagggacacagccaaaccatatcagtgggttttcactgcagaattctttaattttgtctctatattgcagcagttcataataaaatttttgaaaaattaacctgagctgtgtgtatatatatatgtgtgtgtatgtrtatatatatatgtaaaccatccatatatgtgtgagtatatatatgtgtgtgtgtgtgtatgtatgtgtgtttgtgtgttatataaacaatccaactctgtctggttccataagcttcctttgatactcatgtgaattccagtcagtttagaagataattacgcagggagaaaaagttgctttcttactataggaaacttaaagttggtctcttttgatgccataaaattgcttgtttgattaaaagaaatcatctattattttcaaacttctccttcttctaagtaagttgaagagaaaatcaaacaatccagaaccactaaatctgaaagtcttagaatcggaagtaattggaaaaattatctagttcatctctcctcccaaagttgaaattttctttagaactctaagatatttatcctgaacttcctt

SEQ ID NO: 869701 - DNA, 611 bp, Homo sapiens
agtttgaaagagaaatgtttctttaatgaaaaattattgcagagaatattcacttcaccagttatccatctcacaaatgaataaaacaaataataattagcgtactgctgatttctcagttgtgataattttcatttatttgtgagtctatagaggcccctatgtgtcctgtgtttgtaatgaaattgtttatacacagatgttagagtaatctcatgaaaataattgaagaattataaaatggacatataaattttaatcaccataccttttaactcagctcattttatttttcttctgaacgtatgagtttctgtaatgatttcacttcactaatacttcatagacctttaraagatcacttaataactacaatgtctatttaggatttcaaagttctacgtatagatatacatagacagatgaggacatctttacattagtcaaaaatcagttattttctccgagttcccgcagttagtgtttctcctctgctctacctgctgccattggcttgaaatagatgtcattagtacacatcctgtcttctgttgaggaacaaggaatacacattttactgagaattaacaatgatctgtgtttttcagaat

SEQ ID NO: 869702 - DNA, 591 bp, Homo sapiens
tctgttctgcagtgtgggggatgggttggcagaagaaaggtgtgggagatggggaaactgagtcctacaggcgatcacttactggctttcattcacacaagttccaaacggcagtactggtcaggtacttacattacattcctataaacatggagcagggcgccctctgctgttccaagtaattcttaatccacattgatggcaaatctaggaaatgaagaaagaaaactccccgacgcttaattatggaatatacaggaatcctccaatcacatttccaaaattcataccaaaattttgaggtgaagagaagggggcytgaggaagctcccaaataacaggttgactgttcttaggaaagctgggttgaagatgaaatcgactggcctttttatttttaagagtaattaatcacttgaattactcttactgttttctaaagaattatacatgctcattacaaaaaaatcagacactacaccaacacaaaagcaacacattactccatattttaccatgtgggagtaacaagtacttttgatgaatattactttagacatctctctgtgcctgtatatgtacacatcctgt

SEQ ID NO: 869703 - DNA, 571 bp, Homo sapiens
gttgaatttatagggactaaaactaatgctagaaaatgaaaagaatcctactttttaaaacagcatttagaaagctgtccaatttccataaacattctaaaagcagcatctttcatggatgttaaatgaatggtaaggttgtaaattttaaagtcatcatttayaaatgcaaaattattctaacctttatttctgcctccatacaaatttggtcagaattaaatctgttggtccctttatggagttgcaaagatggtgttatcacagcaccccttatggttctgtgatctgcagtatggagtagtagttaaagtggagccatttctgaaaccagatcatctaaacgtaaattttagctctaccatttactagctttgtaacttgggtaagttaacctctcagtatcttaacttcctcactggcaaaatggaataataagagtacccaccccaaaaggttataaaatgggttcttaggacagtccaaaagaagtgctgagtttttgtgagttattattattatcaagatggccttattatcgtccatgcatgagaatgacaatactgggtat

SEQ ID NO: 869704 - DNA, 592 bp, Homo sapiens
attttttgtcacttctttcatcaggatcttgttcatgggcctctctgtacttggtctccagggacctttccccaatcccaacgcagccaactcctgcttgtccccagaagtcagcttagcagctcttcctccaagaaggcttgcccacccacagctctggaccaggagttcccccacccccatggccacctgtactgcccctcgcatgacaggtatcccatactccagtgaaagttcctgttgattagayagggagctctctggacttgtaccatttcatgatcacttcccaaacatctagtgcagtgcctggcatgctacttatgtcaaatgaataaacaaatgaacaataatatctggagaacccttcctgttcttaaattctagggaccaacaagacagcaggagtccgctgggtagctctgcccaactcattcagctttcttttataacctaagaataaaaataatccctgaaaagggaggcatacgttttgaaaatagctccatcatgctgcaaattgcctaagaagatactaaattttatttattctagatttaaggaatgaaagtaattacccaattgacaaaaa

SEQ ID NO: 869705 - DNA, 576 bp, Homo sapiens
catttcttctagattttctagtttatttgcgtagaggtgtttatagcattctctgacggtagtttgtatttctgtgggattggtggtgatatcccctttatcattttttattgcgtctatttgattcttctctcttttcttctttattagtcttgctagcggtctatcaattttgttgatcttttcaaaaaaccagctcctggattcaytgattttttgaagggttttttgtttttctatttccttcagttctgctctgatcttagttatttcttgtcttctgctagcttttgaatgtgtttgctcttgcttctctagttcttttcattgtgttgttagggtgtcaattttagatctttcctgctttcccttgtgggcatttagtgctataaatttccctctacacattgctttgaatgtgtcccagagattctggtaagttgtgtctttgttctctttggtttcaaagaacatctttatttctgccttcatttctttaggcatgggcaaggacttcatgtctaaaacaccaaaagcaatggcaacaaaagccaaaattgacaaatgggatctaat

SEQ ID NO: 869706 - DNA, 749 bp, Homo sapiens
agtgaggaagaagtcctccccctaacaatagtcttcaaggtcccttccaattcttattttttaagacatactatgtgccacacctgtgttagagtctgggaacccatagacaagagaagatacaatcctgtactcaaggactttaagactaagtgaataggcagacaagtaattatgcaattacaatgtgatgtcayaatatttcatgattctctgaagacaattctatgggaaattgaagtctaagatgtcaaacaattgatgcacaaacttaatcaaggtataccaagacctctggcttcttcccagaaagctgctaaatatcagcaaggacatggctagagatcttgattctcgctttttttgatgtttctatgaaagaaccaagagagatttcttcagcagacagtgtttccaatgaggtaagaaaattacatttgtatatcagccttggcctatgatttctttcttgggaaaagctaaaaaaaacaagtcagtacccctcaccctcaaacttaccttctgcaattcataaacacacacacacacacacacacacacacacacacacaccatcctatacagacattagccaactcaggtctacaaaagctgggcaggcagtaaagactgggcaccaacccttgtccatgagccgaaccaattcaggattctagaaccatttagagaatcgaagaatttttccttcaggcagaagcctagaacagttaacatcaggatattccttg

SEQ ID NO: 869707 - DNA, 607 bp, Homo sapiens
actttatatgtagtaggttctgcgtaaatatttgttaaataagtgaataactaaatgaatatgtgaagtgagattggcttgagcagaagggcatctgtacgaatctttcagaagcagaaaaagttttgaaattaatgtgaaacaaatcttattcttaatacacatctctcacaaaatcctttttaaaagacatcgatgaagcccgcaaagagaaaattgttatcagaggaaaggtgcacctgggcagaactctgtaacagaaactctgaggacaaacctgtagaagacttgatttctgttgtacggtagatgggaccattttagagggcaatttgtgtgccaaatgatcctcacatgtttttctcatttttgcttgcccatygctaggtggaagcacccaaatctccatttagctgatgagaaacagaatgtcagcgagggaaacgacttcaccacgacacagttaacacgtgatgaggaagggccttgttcaaaactacaatgctccttcaccctccaaaaatatagctctccctgtaatacaaaatatagacttgtgaaaaagattataaatatttaaaggatctagactacgtaaatagatatt

SEQ ID NO: 869708 - DNA, 607 bp, Homo sapiens
actttatatgtagtaggttctgcgtaaatatttgttaaataagtgaataactaaatgaatatgtgaagtgagattggcttgagcagaagggcatctgtacgaatctttcagaagcagaaaaagttttgaaattaatgtgaaacaaatcttattcttaatacacatctctcacaaaatcctttttaaaagacatcgatgaagcccgcaaagagaaaattgttatcagaggaaaggtgcacctgggcagaactctgtaacagaaactctgaggacaaacctgtagaagacttgatttctgttgtacggtagatgggaccattttagagggcaatttgtgtgccaaatgatcctcacatgtttttctcatttttgcttgcccatcgctaggtggaagcacccaaatctccatttagctgatgagaaacagaatgtcagcgagggaaaygacttcaccacgacacagttaacacgtgatgaggaagggccttgttcaaaactacaatgctccttcaccctccaaaaatatagctctccctgtaatacaaaatatagacttgtgaaaaagattataaatatttaaaggatctagactacgtaaatagatatt

SEQ ID NO: 869709 - DNA, 597 bp, Homo sapiens
tctcaggaacatagtgccttctgtggtcttgagaggctgaaggcaaaatttggagagggaggggttcagtgctccctcccaggacatggttggggtcagcctctccccaccatagcaaagaacagacttaggggctatctgttactcattaccctgcagccagccctctggacctacctgcctataccctgggagcaggagctaaggcagctttccccgccctgctcccaccccaytcctggagagaacgttcatggttagacctttccctctcttagatcactctccatctggcttgacctagtggaatttgaggaaacccaaaactcggatcttaaaagctggtgttgcttgggagctgctgtcctgccttaccgccctcccccacattcctaaaacacattttcaggtggtgtaagcttttcagggcttatctgcaagggccatccctgggtgtttatgaccgttaggtattttgtagcactgcagacttcaaaggcaatgtgtctagagaccagaacttcaaattcctttcatacttccttccctgaaaaatccaaggggcttacttttctgtaacaggtgaactgggctgct

SEQ ID NO: 869710 - DNA, 653 bp, Homo sapiens
taagagcatatgtgtttgtgctaagtatccctttctgatagtcatatcaaaagaagtattactacctattatgacacttgcccagtcagaccatgagcatcaaagatatcccaagtcaggttaggacaggtaaaaatgtctatagggcaggaggtgaagattagagaggttggaagggcaaggagatagtaaacatcctttcatgtatataatttcacacaggctaaatgtgagtctgggttttaatacatagttactatttatgtatacttaaggaagttaaaaatctgtggggggagaaaggcagtgatcctttaaaatgaaacttgagcacaatggaaatcaatattacaacttttcataagagctttaattacacaaaaaaatgaagattttgatgaaaggagaaaagtttaaaattaattaataaaaactccatgaaacctctttytactttaagaaagaccatcagagggaagtctcaaacaaaagtcccgtgaccataacctttcccttgcaataagattgtagtctggctaccactaaccataaattccaaaagtaatttaaagatgaaaaaaggaaaaaaaaaaaaaaaaaagcactccatctgagttcaacggaagaattaaggcattatgttttctgagtta

SEQ ID NO: 869711 - DNA, 682 bp, Homo sapiens
taccatatctcccttggagcctcacacatgaaagctgggagtccttcagtatcattttcttttgcatttccccatcaccaattaccacactttcagtgctttatctttgccgtatttttctgattcttctctcctttcactctggcttaagccattactgcttgctgaatgatcaagattttctcgggccctgttctctttactttggtgatgcattcactaccaatgtcagtttaatgtaaatttcatcatcttgtgatctgtttaaaarcctaaaactatttgcttttgaatcaaggccagactcttcactttgacatcaactcacccacctttcctctccatcattttctctagaaacggccaaatggagactccacttcattctgagtcttttctttatttatttgccccataaatcatgttcatttaagtcctcacagttgagcttattttattcttctcacccagatccttatgtccttttgaataatcaagtttacactttctccaaagttctccataaagtctaccattgtgtacgcatgcgtgtgtgtaaggaaagggaggggaggaggggagaccaagtttccagacaaactttgggtcagacaggcctgagttagagtcctgtctttttcctgacaagccatgtgaccttacacaagttgcttagattcag

SEQ ID NO: 869712 - DNA, 561 bp, Homo sapiens
gctaatttagtcagtgtcctgaggccagggtgtaataaggaagaggacctcactgctataagaagcactggggctccttgtctgaatttctccagaacagctgctccctggagacaagttcccttgcacatctccagcatctgcatctggcttgatatcacaatccattcaggtttccacagtagattagaacactcgtgggtgctgatttcctgcctctttttcatatcctgtcattaacccagcaatgccggaaagcccaacagacataaaggaaagccaagcttattaagttaaagatgaatcatgtttttaaagttttcwttttttatttataatgcatttctttaacttgttgccatgctgattgctggggtttcttttggtacctatcagaggcccacacactcttcttccccaggcggctctcttactatgtcccttccttactcctttttatattattatattccttctttttatttatatcctttttattatatcccttccccaaggaaggggtatcaaatgcagcattttaaagtaaaatttagtttccag

SEQ ID NO: 869713 - DNA, 635 bp, Homo sapiens
ttaggcttgtaaaaagtaaagtagaggttcctcttcaaagactttcctccctgtctaattagaaataaatagtaacttctcttaaaaagcaaaatttatccttcgcccactttttgatggggttgtttgttttttttcttgtamatttgtttgagttcattgtagattctggatattagccctttgtcagatgagtaggttgcaaaaattttctcccactctgtaggttgcctgtacactctgatggtggtttcttttgctgtgcagaagctctttagtttgttgtggggtgggggaaggggggagggatagcattaggagatatacctgatgctaaatgacgagttaatgggtgcagcacaccaacatggcacatgtatacatatgtaacaaacctgcacgttgtgcacatgtaccctaaaacttaaagtataataataataataaatttattcaaaaacctgtgctaacattcttaaatatctgctagccgtaataaaaaaatcaatgtactttatgttcttagttcccacatttagcctaaatatttgccctggcatgcttatactggtccaagcaagcattaggtcattgcctgttcctcttccttatttaaaggtatttttacctttctc

SEQ ID NO: 869714 - DNA, 605 bp, Homo sapiens
tgatataaaaagagagccaaggaaagaattctaggaactccaataaacttacaggatgattggagggtaagaaggtcactaatgttgcataattagacctgggcttcaggaagtcagcactgggagcgatattatggaatagttggaattagaaagaaagaggagacatgtcccatctcctagctctgaagcaccctgtgtgtccattcctgacttcaggcacctccctccctgccattggcagtcactgctcttaagtttttattaaccaatctcttgcttttctttatagtttaagcacatatatatctctaactactatgttgttcaattttttctacttttaaatgttacatacatggaatcttgctttatgagttcttctacaatctggttatttactcaaaattaggtgttttggaaggatttgttttgtyacgtgtggctatagatttttcatttttagtgctgtatggtattgcattgtaggcacatacaccaatttattattattattattattattattgaaagtaatggcaaatactataattacttttgcacaaacccagtatttgtccactgtattattcatggacatttgg

SEQ ID NO: 869715 - DNA, 597 bp, Homo sapiens
cctttgaatggtaaacccccaattctgaacactcttgtatcctgctgaaattgtgaaagcaagctctgtatttagaaaatgcaatccctggaggtatcagtcaaccaaactctgagtaacttgccttccattagtttgatagctctgtaggaatcaagtgtttaaaatgtgtgggaattgtgtacataactcactataaccacctttcatccaggtgcctcagactacttcaccatagtcataaatcctgtcacatcccagkgatgcagttcatgagtctcttaatctagcctggtaagtaaaaaaattacagaggtcacatgaataatgactggaataggaaatggaccaagatagcaaggccttatcttgatcccctccctgttttaacaactttacatctgactgagtcaagaaaacctaaggccagaaacagattacaaagaagtcaaaatgaacgtaacactaaattctaactttatttatttattattcttggataaatggcagaatcctgaaaatgtgattctaaaaggaagtatggttgctggatttgcgtggtttttgtttgtttgtttgtttgttttttgagacgga

SEQ ID NO: 869716 - DNA, 629 bp, Homo sapiens
gtactgctgaagtgctgtctggtgtttgtaattgcaagaaggctgtgatgtgctttacagagaaaatacatgttttagataagcttcattcaggcatgagttatagtgtcttgtccatgactgcaatgctaacgagtcaacatataaattaaataggtgtttttaagcacaaacacacatcaaacaaggttatgcattgattggctgatgaaaatgttgtgaccagagactcacaggaacctaatcctgtgttttccctggaagcaaagattcagtatttaccaattcagtgtttgcaatgactttatagaatttaattgccgccaacaacatgaccatgtggattgtgctagcttctctctaggcaggttcagtgtgcaaatgagtggacagatatgaatattagccatgttaacaataaacagatgctccatttcccatttaggtgaattagggtccattttaaaccrtgattaaaattaaataggcaatccctttggctcattctaagtgaacaaaaactttctgggttgttttctttagaaattctactcaggaggtagaagtgctgatccctcatcagaagttcccaatgcacagaagcatacacttccaaagatcttctccat

SEQ ID NO: 869717 - DNA, 647 bp, Homo sapiens
tcactgccaaagagtatttttcctaaagaatgtttccagggcccaagagtcctttaagctaaagtacttatttgttgattcattgttttttatgctgaaaggtacatcagatacatggtacaaaatgcagaagaaaggaaatgatctagagtgaagaataagtgtcccctcctctgctgcctcccagcaacccagctcctctttctagaggcaattcttgtctccagttccacatgagtcctcgcaggccagtgcttaaagaagcatatagaggacttcagggcttcatctgtagaaagcttccctgtttccagagcatgtccacatgcattttctcatctgaacttctcagcaaacaccccaaatgcatgaaagaaatttgttgataaactccatgcttgtcmccttcatgtgattcatccagggtcctaagatgaggactggcatttaacctctggaaagtacgtggagcccctattttcattctcaattgcattgtttaacaaggtctgacctttctcttgcaagttgctgcaatctcttcacccttttgcaaaaatctgatcacaaaatgccccatgggcattaagtcataaaatccaaataaaatgggtaagacttgacgatgtcggcttaaaaaaaaaaaa

SEQ ID NO: 869718 - DNA, 647 bp, Homo sapiens
tcactgccaaagagtatttttcctaaagaatgtttccagggcccaagagtcctttaagctaaagtacttatttgttgattcattgttttttatgctgaaaggtacatcagatacatggtacaaaatgcagaagaaaggaaatgatctagagtgaagaataagtgtcccctcctctgctgcctcccagcaacccagctcctctttctagaggcaattcttgtctccagttccacatgagtcctcgcaggccagtgcttaaagaagcatatagaggacttcagggcttcatctgtagaaagcttccctgtttccagagcatgtccacatgcattttctcatctgaacttctcagcaaacaccccaaatgcatgaaagaaatttgttgataaactccatgcttgtccccttcatgtgattcatccagggtcctaagatgaggactggcatttaacctctggaaagtacrtggagcccctattttcattctcaattgcattgtttaacaaggtctgacctttctcttgcaagttgctgcaatctcttcacccttttgcaaaaatctgatcacaaaatgccccatgggcattaagtcataaaatccaaataaaatgggtaagacttgacgatgtcggcttaaaaaaaaaaaa

SEQ ID NO: 869719 - DNA, 594 bp, Homo sapiens
acttagtttacttttcttttgacttttgcagcaacatcattataagggtcatgagtacaaaaacattcaagggcttcatcaattttcctagcagccttgattaatattttaataccaaaatcattttctcttaagacacacccttatcaatttttcttcaagcaaaattttattttttggttattatttgaatttctctaacatktattaagtatgttatcaggccctgttatacgtaatttacaggcagtatcttatttcatcctcacaaaatcactatttaataagagctgtcatcttctcattgtacagatcaaaaattaaaggcaagagagaataagtttgctacccaatatccagagttagtacatgataaagcaagaattccaactgaagcagcctccaaaattcatacacttaggtgtcaatgcccaaaataagattgtctcataaacattaagattttgtttgggacatgtccatctttaacacgtttgtggaatcacttaggatacttttccattgtttttacacctgcagtattatttttcatggactcatacattatgtgagaagatatgtttgagtggatac

SEQ ID NO: 869720 - DNA, 685 bp, Homo sapiens
atttagtgcccgaatattttattttcctttactatccctagaaaaggtagtacccagtcttacctatctgtagacttcaagccatatctagccaaaggtacatgacataacagatctggaaattttgccaactatctgatgatagatgcacactgaactaatccattggcatgaattctgacaggggtatcaaagcatttcacagagtagaaaaaattagttcagaayaatttaaaattcgagataaatgagtattgggttgaacaatacaatactgccaatatttgaccatttttaacctatgaaggcaatttcagatacttcaaatgaacttatggcatgcatcctgccactttctctttctcacccagacaaacatactgatatggcattctacatgttaagtcaagaattcttaactctatgttcaagctatccaatatcaatcaaataataatcactatcagaagggcaggtgaatcttgttgaaaatcccagatctagatttctttgctaacatactgcacctgcaagatttatttattaatttattcactattcatccagtaattactttttaaatatttgctcaatgaattgcattgagtaaggagctgggtgaatacagaagtgtctatacatggagatttataagctattttctgtgcagaatatacacataaaa

SEQ ID NO: 869721 - DNA, 620 bp, Homo sapiens
cttcagatactgaaatcagcatatgaaatattataaacatgtatgtatgaaatgtttaaagaaacaaaaataaaatatcaaaaaataagcccaggctggtgtgatggcttattcctttaatcccagtgctttgggcagccaaggcaggagaatcacttgagcccaggagttcaagaccagcttgggcaagagcaaaacaytgtctctacaacaataaaatttaaaaaaataaatctggcatagtgaagcatgcctgtagtcctaactactggggagactgaggtgggaggatcactttagcctgggagtttgaggttacagtgaactatgattgtgtcactatactccggctgtgatgacagaggaagactgtctcaaaaaagtaagtaaataaataaataaaaataagcaccagaaatattttggaaaaataatgaaaatataattgtgaaataaaaatttagaggattttcacagcagattagaaacagttgatgaaaaaactgaaataaataaattgcttagcctgaaatacagagagaaaaaaatggaaattacagagaagaggttaaaggaagaataataaggtctaaaatcaccagccccgttgatggttttag

SEQ ID NO: 869722 - DNA, 659 bp, Homo sapiens
gtatctaaagagtgtgctcagaattgctctctttctgcataagtgcttagaacaaaacaaagagagccccaggcacatcaacccaaataacttctcactccaggggccttcaaatcccaaagctactttctcaagcatctgggtatttgtcccaaatcctgacctatttctaacttgygtaattatattgtcttcctaattgctcttgggtattccactgtgtgaaactggcacagccagttctcagccactaggcaatgttgctaggcagccattaaacagctgtttctatccaccagaagaagtagatacatatctaaagggaatgaaaatattctttcagagtttcaccacttaaacaacagaaaattgcctgggatttcttttgggggcataggttccaaactttgaagacgtgcactcttaaaggattaacccagtgatcaaaccgtagccttagagaagcattactgaattattacattttttaaagcaaataattcctctggaggtgagataatcatcctttctccctttccaggctatttccactattttcaaaacttatctttttatcaaagctattctaccaacggaaagatgaagtgaactgctcaaggcagaacacagtcaagcagagaatagacatccatcattta

SEQ ID NO: 869723 - DNA, 659 bp, Homo sapiens
gtatctaaagagtgtgctcagaattgctctctttctgcataagtgcttagaacaaaacaaagagagccccaggcacatcaacccaaataacttctcactccaggggccttcaaatcccaaagctactttctcaagcatctgggtatttgtcccaaatcctgacctatttctaacttgtgtaattatattgtcttcctaattgctcttgggtattccactgtgtgaaactggcacagccagttctcagccactaggcaatgttgctaggcagccattawacagctgtttctatccaccagaagaagtagatacatatctaaagggaatgaaaatattctttcagagtttcaccacttaaacaacagaaaattgcctgggatttcttttgggggcataggttccaaactttgaagacgtgcactcttaaaggattaacccagtgatcaaaccgtagccttagagaagcattactgaattattacattttttaaagcaaataattcctctggaggtgagataatcatcctttctccctttccaggctatttccactattttcaaaacttatctttttatcaaagctattctaccaacggaaagatgaagtgaactgctcaaggcagaacacagtcaagcagagaatagacatccatcattta

SEQ ID NO: 869724 - DNA, 625 bp, Homo sapiens
cttagggcactgtgcttgcaattcacaggggtgtgcatagaacttgcaccacctactggcagacactccacatgtaggtgcagcttttgtactttgtaagcccttgagggagaaatcgtttggcccagctttcatctttctagcacaattgccttgcctcaagaccccatggccactcacccagtcctgagctgatggtgagagagagacagatttgctctagccatccctgagatattgagaaataccatatcctgatcatttcatcagaaaacttgccttcaaattctggcactgctacttaatagctgtgtaacttcaggaaaatgtcttaggttctctgtgtctgtttcctcacttataaatagggataacaataatgcctacttcatagaattatagttcaaggtaaaaatcacgtyaaactcttagcaagtctttagcacataggaagcactcaatatcacctattagtcatacagatcttaaatagggaaagtacttgccaagatgtaaaataatatttaggtaaatatctattccaggatagcctccctacctaattattttcccagagagtaactagctcactgaatttctaccacatgctaaatgctatgctgaa

SEQ ID NO: 869725 - DNA, 692 bp, Homo sapiens
atgagattggtctgtggctcaagtgagatgacagatgtaagggactttgcactacataaatgtcatgatttatttgatatttccccaatccatcctacagttgtgtagttgctataaaatgaaaagacttgaaagaatttcgaaaaataaaaaactctgggcaaatgatagcattatataaatacttagtcattatgtcactgctagagtcttgaactgcctactctctatcagtgatcataaacttctagtctgtacctgggctgatagggctgtaaatgtartgtatcattactaccttcattagaggctgttgacacattacaatggtatttattgaaccttgaaaagggataaattatgcaagactaattcctaactccaatgcaattttaatatactttttaatgtgctaagtgcaactaatgaagaaagttaaattttaaaaaaggtacacaaattaaaagctgtagttcagtaacttgtgtgttgatgaagggtatacactaaccccctaatagtcattcccatagacatacaaatgacagagtgattaaaagacttaagcacacatgcacttaattttgaccaagaaattccatttctaggaatctactctgacaatatacctctaatagtacaaaattacttccgtatatacaagtttatttattggagcactgattgtaatt

SEQ ID NO: 869726 - DNA, 667 bp, Homo sapiens
caattagtcagtaataaaaataatgtgtgacatatattcaactacccaaaccatccaacatcccttatcagagttgatgagttgaatcctgaagtttgacgcagggagatcgcaactgtgctgtatctgagtaaactcttaatttagactaattctaagaattaaaaatggttttaaaaaatctaagtgcttcaaaagaagaaaaagaagagcctagaataaaatgttttcaattcacagctataaaatgtaccacaagttgaaactrtttggttttcatttgttttccctttgcatttggaaggaagtaagaagtagaataagaatttttaaacattgggtacttgtatatagtattttaattcagcaaacaattatgcaatataagtattttagttacataaatatgactccattgtcacacccttttattgcatgttttgacaaagctcaactaattttatacatatctttcatgtgattattaaaaatatataaataatgtcatagtaaactttataatatgaaatgaacttttcaaaacttgctttaataatcagtgagaacctaagtgaataagacatgttggttctttaaagtaagttccaagatgccagttctctttgcaagaatgatttaggcaaaaaatcagttaaactttttttca

SEQ ID NO: 869727 - DNA, 625 bp, Homo sapiens
ttcctaaccaagaggatatgtggtttcataccatgatatgtttgaatctgaattctattgggtgaacatagtactggaggtttggtcaatgcaatcacattgaagtaaataaaatttggaagagaaaatttgccattgtttgtaggttacataataatttacttaaaaacagaagcaaatcaacaaactattaaaagtaatatgagagttcaagtcagcaaggtagagaaataaaatatcatcaaccaaagagaaataacattttttacactagcactaaccacttagaaaatacaatagaaaataaagcactatttacaataacacaaagctatgaacttcytaggaaataacctaatgaaaatctttacaggggaagttttaagattcaactgaaaaaagatagatttgaataaatggaaagttacaccatataaatggatgtgattgttttacaatgtaaagatgtagacttctgcaaattgatctacaaattcaatgcacttcaataaaaattccagcagaatatttgcagggaactggataaactgattctaattaatatggaactataaattaattaattaatatagaacaactaagacaattttgaaaaagaaggcaa

SEQ ID NO: 869728 - DNA, 625 bp, Homo sapiens
ttcctaaccaagaggatatgtggtttcataccatgatatgtttgaatctgaattctattgggtgaacatagtactggaggtttggtcaatgcaatcacattgaagtaaataaaatttggaagagaaaatttgccattgtttgtaggttacataataatttacttaaaaacagaagcaaatcaacaaactattaaaagtaatatgagagttcaagtcagcaaggtagagaaataaaatatcatcaaccaaagagaaataacattttttacactagcactaaccacttagaaaatacaatagaaaataaagcactatttacaataacacaaagctatgaacttcctaggaaataacytaatgaaaatctttacaggggaagttttaagattcaactgaaaaaagatagatttgaataaatggaaagttacaccatataaatggatgtgattgttttacaatgtaaagatgtagacttctgcaaattgatctacaaattcaatgcacttcaataaaaattccagcagaatatttgcagggaactggataaactgattctaattaatatggaactataaattaattaattaatatagaacaactaagacaattttgaaaaagaaggcaa

SEQ ID NO: 869729 - DNA, 632 bp, Homo sapiens
acagttctactagtttttgcctcacatagcttgatactctttttaggtccatatacattaaggattgttatgtcatcttgaaatctgtacctgtttatcttttttaatgcctctattcttgataccattgtttgttgtgaagtctgctctgtctgaaactaatataattactgctgctttcttttgatcattgttagcctgatatattctcctgcatcatttatttttaatccrtatttatctttatatttaaagtgggtttcttatgaacaacatatagttgggtcatgatttttaatccgttctgacaatctctctcttttaattgctgtatttggaccattgatgtttgaaatgattattgatatattaaattaatgtctgtcatatttgatatactttctgtttgttgtcctcatttgtttctttttaatttaacttaatttgaagttcacaggatgtgcaggtttgttacatagataaatgtgtgccatggtggtttgccacacccatcaacccaacacttaggtgtttagccccgcatgcattagctatttatcctgatggtctcactccctctgctcccctgacaggtcccagtgtgtgttgtttctctccctgtgtccatgtgt

SEQ ID NO: 869730 - DNA, 632 bp, Homo sapiens
acagttctactagtttttgcctcacatagcttgatactctttttaggtccatatacattaaggattgttatgtcatcttgaaatctgtacctgtttatcttttttaatgcctctattcttgataccattgtttgttgtgaagtctgctctgtctgaaactaatataattactgctgctttcttttgatcattgttagcctgatatattctcctgcatcatttatttttaatccatatttatctttatatttaaagtgggtttcttatgaacaacatatagttgggtcatgatttttaatccgttctgacaatctctctcttttaattgctgtatttggaccattgatgtttgaaatgattattgatatattaaattaatgtctrtcatatttgatatactttctgtttgttgtcctcatttgtttctttttaatttaacttaatttgaagttcacaggatgtgcaggtttgttacatagataaatgtgtgccatggtggtttgccacacccatcaacccaacacttaggtgtttagccccgcatgcattagctatttatcctgatggtctcactccctctgctcccctgacaggtcccagtgtgtgttgtttctctccctgtgtccatgtgt

SEQ ID NO: 869731 - DNA, 668 bp, Homo sapiens
tggattgaaagtatagagtccaactcaaggagaaacgttgagctcaaaaccttacaggacaggtgggaccaataagatggccgtttctggcccttgcattcctttgtgagaagtctgtgatttcgcttaatctagaagacccatgggtcaacttgttcctctgctggtagtggtctgagcctcacacttggctcagtcttcatttgacagtgcctgattcgctcgtcagccatagcacatttcctgtacacatcatgcttgatagaccatttctctagtcttccagggtctggggaagagtccagggtagtctggccacacagagcttcaggacacttccttctctccttgcccccaaacaaggcaaacaagataaaaaatcttcaagctgtagtctcaacatggactccagaaacatggagatgagaagaaaaatttctaggggattgggatgaggagtgagrtgaggaaatgagctgtttggaggatatttaagccttatctgacgaaagagaaaggagaaagactggaaagaaagacaattgaggaagaaaaagagtgaaagaattttgaaattgttgctggaagacatcctaggtaaacattatcctaggcttggctttccttaaatgttatgtatagagtgaccatataatttaccatccaaa

SEQ ID NO: 869732 - DNA, 592 bp, Homo sapiens
taatatgtactctccaagcagttctttgtagttcaaaataaagaaattgagagctcctcataagatttataaagactcaaatagagcagttttcttccattagaggtgggttggggacccctggtctaagggatcagactgtaggcgctcagagaagtttagggtgtctcatgctccagatactcttttatctcttctccctcccatccctattacaagtgaactactcttagtcttgtactctttgtagtaaggggaagaagagaagagccatttgtgagagaccttttacatttaagagaggcctcaaatttagacttttaaatcatcatctttaaataaygttacacatatggtcacagaaacattcacataagattagagaataaaaagatgtcacaattttaaaaccaggttttgcattttttttaatatatcagaaaaaaggaaagtgacttgactattatttggaccttttagagaccctgattgaactaggttatgtgacaattgctagcaatgggtaagacagatgtagtttggtcatattttactctcttaagtaatattataacttaggttaaaatgcagg

SEQ ID NO: 869733 - DNA, 619 bp, Homo sapiens; identical to SEQ ID NO: 867209

SEQ ID NO: 869734 - DNA, 583 bp, Homo sapiens
agtaatttccaagtacagacagcttcatcagtgatttttttccaaagactgtgggcaaaaaatagcactaattttatataaactctctcagggaattgaaaaagtggaaacgctttttagctcattatatcaggccagtataatcttgatgccaatgtttgacgatgaacgaaaaagctttccatacactgaaaaataacaagatcctttctaggacatagatagaaaaattctctcaaaacttagcaaatcaaatcaagagctatacatattttattaatttgtatgaatactttttaaatgatttagttgtttacaacaatgttccagwttttggcttttgaatatttcatcatttttataatacctttcccaatctgagattttcttttcatgtctagcatgttttctttcattgctttttctttttaatcttttcagttacttattttttgcaaaaggagttatataggccttatattaatttcctagggccataacaaagtactacaactggtctgaaggacttaaaacagcataaatgtattctctcacagttctgaaggtgagttctaaatctagt

SEQ ID NO: 869735 - DNA, 630 bp, Homo sapiens
aatggtttcctgggccaggtccagggctcccctgctgtgtgcaacttgagtcccagctgctccagccatggctaaaatgtgccaaggtacagctcaggatattgtttcaaaaggtgtaagcccccattcttggcagcttccacatagtgttgggcctgtgattgtatagaagacaagaattgagtttggtgaacttctgcctagatttcagaggatgtatggaaacacctggatgtccaggcagaagtctgctgcaggggcagagccctcatggagaagctctactagggcagtgcagaagggaaatgtggggttggagcccccacacggagtccctactggggtactgactagtagaactgtgagaagagggccactgtcctccagaacccagaatggtagatccactgacagcttgcattatgtggctggaaaagctgcagacactcaacagcagccatgaaagcagccaggaggggsactgtaccctacaaagccacaggggcagtgctgtccaagccatgggagcccacctcttgcatcagcatgccctggatgtgagacatgtagtctaaggagatagttttggaactttaaggtttaatgactgccctattggattacttgcat

SEQ ID NO: 869736 - DNA, 548 bp, Homo sapiens
gtttgaaagtctggcaagtaccattttagttttttcaatgtttttgactacagttcaaaataagacatgtacttatatcacaacctagcacacatgcatatatgtatatctattacataattaaagtttacaaaacttggccagttgcggtggctcacgcctgtaatcccaggactttgggaggccaaggcaggtggatcacttgaggtcaggggttcaagacctgcctggccaacatggtgaaaccccgtctctactaaaagtacaaaaaaatttagccgggcatggtggcacscatctgtaatcccagctactcgggagggtgaggtgggagaattgcttgaacccaggaggcggaggttgcagtgagctgagatcatgccactgcactccagcctgggtgacagagtgagactctgtctcaaaaaaaaaaaagttttatataacttgtgcaagactcacaatgtgggcagtgcagcctctaatctcttctgtttttgcttttgtttttaaatgctggtctaaatccacttaattgatttcaaggc

SEQ ID NO: 869737 - DNA, 548 bp, Homo sapiens
gtttgaaagtctggcaagtaccattttagttttttcaatgtttttgactacagttcaaaataagacatgtacttatatcacaacctagcacacatgcatatatgtatatctattacataattaaagtttacaaaacttggccagttgcggtggctcacgcctgtaatcccaggactttgggaggccaaggcaggtggatcacttgaggtcaggggttcaagacctgcctggccaacatggtgaaaccccgtctctactaaaagtacaaaaaaatttagccgggcatggtggcacgcatctgtaatcccagctactcgggagggtgaggtgggagaattgcttgaacccaggaggcggaggttgcagtgagctgagatcatgccaytgcactccagcctgggtgacagagtgagactctgtctcaaaaaaaaaaaagttttatataacttgtgcaagactcacaatgtgggcagtgcagcctctaatctcttctgtttttgcttttgtttttaaatgctggtctaaatccacttaattgatttcaaggc

SEQ ID NO: 869738 - DNA, 428 bp, Homo sapiens
aaaaaaagctgtagtgccctggcccttctctgtggcattcttctttgtctttcaggccctggccagcctgggttaggcttagagcagcactctgggctgggaagggctctgtgttcaggggtcattgcttcctctttgttctsgtctctgactcaccaacatgcagctctgggtgactgtcccttgaggactgtggcttcctggcgggttaagccagttctggaagtgggtgtgcagcttatggcagccaggagtggtttctgaaattaattactgctctagatgatgatgtaaggagtgagactcctggggagaaactgcccatgtggagaaacccagcacctgtaacccatcaccttcgtatcaaaacacgctgtccacctaagaagggcgaatgtgccatggctaatcaaggaaaataatttctg

SEQ ID NO: 869739 - DNA, 627 bp, Homo sapiens
actgtctttttctcattgagtactcttggcactcttgttgaaaattgactatatacataaaggtttatttctgggctattctatcctatggtatcctgttggtttatatgcattcttgtaccagtcccatgcagctttaattactgtagcagtataataagttttgaaatcaggaagcatgagtcctccgacattgttctttgtcaagtttgttttggctmttctgggccgcctttaatttccagatgaattatatcatcagctggtcattttctgcaaagaagccagctagggattttgagatggactgcattaattctatagatcaacttgggaaatattgccatcttaatacttagttttctggttcataaacatgggatttcttttcattaaatcttctttcaacatgttttgtaattttcagagtataaaagtttgtccttttgttaaatgtattactaagtattttattttttttttgacactgcattaggccacttttgcattgctataaaggaatacctgactggtattcctattggtctattgtgcatccttataccagtcccatgctgctttaatttataaagaaaagaggttttattttggcacacggttctgcag

SEQ ID NO: 869740 - DNA, 612 bp, Homo sapiens
catgtgaaaaagtgaaattagatccttaaactacaaacaaaaatcaactcaaaatggattaaagacttaaatgtaagacctgagatcataaaacttctagaacaggggaaaagctctttgatattaattttgacaaattttttttttaaagagttgacaccaaaagcacaggcaagaaaggcaaaaataagtgaaactacatcaaactaaaaagtttctgcacagcaaaggaaataatgaacaaaatgaaaaagcaaccttatggaatgggagaaagaatctgcacaatatttaaaatatttacgaaatacatacagttcgatagaaaaaaatggaataaaaaatgggtaaaggatctaaatagacakttttccaaagaagaaataaaaatggccagtaggtatatgaaaaagtgcccaacatcacattattagggacgtaccaatcaaaaccatagttggctgctacctcacacttgttataatagatattatcaaaaagtcaaaggataacaagtgttggatgtggagaaagggaacccttatacatcgttgttagaagtgaaaattggtacagccattatggaaagcagtagtggaggtgcctcaaaat

SEQ ID NO: 869741 - DNA, 575 bp, Homo sapiens
ctgaggtgggaggatcacttaattccaggagttcaaggctgcagtgagcaatgattgtgccactacaatccaacctgggcaatagagcaagaccctgtctaaaaacaaacaaaaattccgacccccaaaacatgtccttgtgataaaacactagagacgttttcatcaaattaaaagcaaactaaagatgcaaagatgcyccatcaccccaattcttaaatattgttatggaagttctaactaatgcaattagcaaagaaaattaaataagaactataaatattggaaataagaaaactttatccttttttttctaatggtatgtttgtatttagagaattccattaaatcttaaaacccagaaagtcgaaatttaaataacatttgcagtggattgtatcaagatggaaaactggacacattcaccctccttctctgccacctcaaatccctggaaatggcataaaagatgtttttttcacatagaataattccctaatggcactaaataaacaagaagcaggtcatcggcatgccaggaatgttgagatattcctgaggatggaaagtaaatg

SEQ ID NO: 869742 - DNA, 628 bp, Homo sapiens
cttcaggggcagaaatgtgtatctttgtcctgaagcagcacccagtttatccaggcataggttaccatctcctagtgtttcgcatcgaaaggtccacttgcaaaagtttatctgtttctcagctacagacaagaaaggaacgccctcaaaaatcaggtggaaactatgggacttctgtatgatgaaaatcacgcacatgctatatacatcttcagcttttaatttcactgcgtggakgtcatagggttctccagggactaccagttagtagccctggaacacctcttcctccccttcatctccacctgggcacaggatttttctaggtttcccttaagtcggagcctcacccaggtcaaggcccctcaactggagatggagcagggagctgagaagcttgctaacatcagtaagtagcacttgtgatacatattatgaagagatgctcccccaccccaggaatcactaggtgtggcttttggacaaatatacacacatgcagaggtttgttttggaggcgtaaacacacagtctctaaaataggcaatgttgagtctctggcacaaaatgagggtatgaagccgacactgtttataatctgctggaaccctcaaacttgcaagccctt

SEQ ID NO: 869743 - DNA, 754 bp, Homo sapiens
cgggggacagacgggcatccctcaaagaaatcggcccaggccacaactgacttcaatcagatgtgaccagagattatcctttgccaagaatcattttggcttgtagggttcccagcaacctgcccattccctgtcatggaccctccctggaacccagagctcagtctgttggtggagccattcctagtctttcaggtttctgattctcttcctttttttctggttctgggcaataaattagcagtgcagtctcctaggtctcagccctcccagatgtaagcatttttgtgagcatgtcaagcacagaatctctgacaatgggaaacgcagtgggattccaaaacgctggtgccattttccagttggcgttgaatacccacctccctcttcctcattactcacccttgccccatyttccttcatttcaaaaaaaaaaaaaaatcaaatcatatatttaaacagaaaagtcttccttaatagcaaatcctgaaggaagcctccaacaaaatagcaatgttctctccgctttaggagtttggcacacaagaaatggttgttgactgaataaatgaatgtgtgaaggcatgcaagaatattttcatggataaatgaataagtggagttcctaaaaagaatgaaacatagaaaggcatatcttccttttacaaataaataaaaatcctttccagtcatttttaagccaaattcagctgctaaccatttttctaaactttggtcagcctcattccccatt

SEQ ID NO: 869744 - DNA, 681 bp, Homo sapiens
actagtagcatcaggaccccgggagggcagcagaggggctgcttaagtggacagagagcttctctggatgagttttgtcctaggtttggttaaggttggttctcagcagagtcttgagaggttacaacatggattgtggttgatgggatttctcccattgcagtgatgctcaaaggattcggaattaagcaagttaacatacaagtaattacaaactgcagttggtaacacatgctagaaagaaacagagaaaagaaccccaggagaaggccatagtgagaaggcattcaagacggcagatgtgcaatgggggaggaagtcctgaaacctgctgcacaatttttctagcacaaatagaaggaaagggtcttgcttgaggtcgcctattattgcggacttatctatttatacctccatttcctccaaacagagtctgaggtggggctcacctgtcatstgcaagaaaattaaagtcatttcttaaaaggggcaaaagcaaattgaagtaatgaggaggagggagagaggaggttaaaagagagagagagaaagggagagagacaaacacacacattcacacacacacacacacacacacacagccatatgtatttgagttcctttctaaaatccaaatcttacatagagcacaattttccttttgcccatttctcaaggaac

SEQ ID NO: 869745 - DNA, 594 bp, Homo sapiens
cacttcttgaaatctcagttttcttttttataaaatgagaatcacaatagaacaagaacaactcctttagcttgccctgggtatccaataagcttgtgtgtataaaccactgggtactcaacaggtggtggtagttgttactggaagatctgctgagaaacagtagtggcaattgactaagtgcttcccaagtacaggttggatcattacatcatwtaatctccatatagaacctaggggtaggtcccactagccccattttaaagagaaagaaactgaggctcaagatgaaatttctgggccaaggaaaaaggacttgaccccaggtctgcctagtcccagagctatagtgccacccattcctcacaacaaaccttggaagggacttctactaacacctttatgaggaaaatgaggcccagagacgggaagctatttgtccaagctcacagaaacaggatgttgtggggctgggggtttggatctgtgcctgcccaactcttgttctaagaaatattctagttagctgggcctgggaaccatccattggtctcctggcagctgattccaggcccggcatgaggaaagtgcttg

SEQ ID NO: 869746 - DNA, 668 bp, Homo sapiens
gcagtcatggcctacgaccgctatgtggccatttgccacccactgaggtacacagtcctcatgaatgtccatttctggggcttgctgattcttctctccatgttcatgagcactatggatgccctggttcagagtctgatggtattgcagctgtccttctgcaaaaacgttgaaatccctttgttcttctgtgaagtcgttcaggtcatcaagctcgcctgttctgacaccctcatcaacaacatcctcatatattttgcaagtagtgtatttggtgcaattcctctctctggaataattttctcttattctcaaatagtcacctctgttctgagaatgccatcagcaagaggaaagtataaagcgttttccacctgtggctgtcacctctctgttttttccttgttctrtgggacagcttttggggtgtacattagttctgctgttgctgagtcttcccgaattactgctgtggcttcagtgatgtacactgtggtccctcaaatgatgaaccccttcatctacagcctgagaaataaggagatgaagaaagctttgaggaaacttattggtaggctgtttcctttttagcgatctttgtcctctgctttgaattggagcttctaaaataaatcatcataacaggattccttggtaagccagagtgc

SEQ ID NO: 869747 - DNA, 669 bp, Homo sapiens
ttctggttctccctggttcatattctactgatgaagaggttgaccttctccacaggcactgagattccgcatttcttctgtgaaccggctcaggtcctcaaggtggcctgctctaacaccctcctcaataacattgtcttgtatgtggccacggcactgctgggtgtgtttcctgtagctgggatcctcttctcctactctcagattgtctcctccttaatgggaatgtcctccaccaagggcaagtacaaagccttttccacctgtggatctcacctctgtgtggtctccttgttctatggaacaggacttggggtctatctgagttctgctgtgacccattcttcccagagcagctccaccgcctcagtgatgtacgccatggtcacccccatgctgaaccccttcatctacagcctgaggaacaaggatgtgaagggggccctggaaagactcctcagcagggccgactcttgtccatgacaaatcagggcctcagaamtaagaggacacactgcgtacccctaaggcaaatgttgtgggtttaaatatccggctctttttctcttttaaaaaatgtgcttgatgtgggatttttggttgttgttattgggttgtttgttgttgttattgttattgtttttgagacagagtctggctctgtcgccc

SEQ ID NO: 869748 - DNA, 641 bp, Homo sapiens
aattctgggttcaaaattcttttctttaagaatgttgaatattggcctccattgtcatctggtttgtaggatttctgctgagaggtccactgttagtctgatggacttattttgtaggtgacctggcctttctgtctgactacscttaacatttttttgtcatttcaaccttggagaatctgatgattatgtttcttggggttgatcttcttgtggaatatcttagtggtgttcttggtatttcctgaatttgaatgttagcttgtcttgctaaactggggaagttctcctggatgatatcctgaagtgtgttttccagcttgtttccattctccccctttccttcaggtattccagtcaattgtaggtttggcctttttatgtagtcccatatttctcggaggctttgttcattcttgttcattcttgttcagtctttttttctctaatcttgtctgcatgccttatttcagcaaggtggtctgcaaactctgatattttttcttctactttgtcaatttggctgttgatacttgtgtatgcttcatgaagttctcatgctgtgtttcttagctccgtcaggtcatttatgttcctctctaaactggttattctagttagtggctcctctcgctaacttt

SEQ ID NO: 869749 - DNA, 608 bp, Homo sapiens
aaaatctctgtgatagttacatccgggcaaagtgaatcacaaggaaaaggaaactggatattggggttgggggagggaagatgcagggaaagaaagggagggggagggaatcctcacactagtgcaaaacccatggaaaggcagctttaaagggaaaaccaaatatgcttcaagttgtmcttaaaatataaaaatcaagagacaggcattctctagcatgaaggacacaggcaacacagaacccatgatgcttgaaaagaaagaaaaaccatttcacaataaaatagagcctcaacatagaggaaaaagccttggaatggaaaagtcatgaaaaaaatgatgagaactgaatgcaacaaaatgtagaattaaaagaaactctgcagaagagaatccaaacattataaatatagacaaggtaaaaagactagtgaacaaaaattagtaggggaccttcaggaaaaaaaaaaacaaaaaactcctaatttcctcacctttcaacagcacagagcccgttgaaattgtctagaatggaaacatcctttaaataaaatgactcccagcttattttttccataaccttttttccctcaatcttcagaactctt

SEQ ID NO: 869750 - DNA, 617 bp, Homo sapiens
acccgtgggactccagttgtgtctaaataaacttgaaagtcaaaagacacataaggggcttctcttattttacagtgttgtggtttttctttttctagtcgatgaaatgccagagtgaaagggatagccaactggacaacagtgcaagtgccgttccagttacttggcagagtgtccagtaagggtccaccacaataccaccatatatttgctcaaagatgaacaagggmagactgactggtaagatcttggaaaggcttaagctcactgtatcccattaagtctccaagaaatgccaagttttccccttgtcgtgagagacacgaggtaaaattgacgctaggagatggaggctggatggctcttggggcctgacccacagggtgttggactttaagaaatagcagagagagagctcagcaggatttattaccctaggctgtggggtcttggaaaagagctactatacagtttatgcctggtcaactagaagaccatctgagtgggaaagggacaatttgggcctctggctggccgcgtgcacaagcataacaattgcttttgcttaatgtgtgcacagaatatttgatccattttaaccaggcatttgtatcttg

SEQ ID NO: 869751 - DNA, 617 bp, Homo sapiens
acccgtgggactccagttgtgtctaaataaacttgaaagtcaaaagacacataaggggcttctcttattttacagtgttgtggtttttctttttctagtcgatgaaatgccagagtgaaagggatagccaactggacaacagtgcaagtgccgttccagttacttggcagagtgtccagtaagggtccaccacaataccaccatatatttgctcaaagatgaacaagggaagactgactggtaagatcttggaaaggcttaagctcactgtatsccattaagtctccaagaaatgccaagttttccccttgtcgtgagagacacgaggtaaaattgacgctaggagatggaggctggatggctcttggggcctgacccacagggtgttggactttaagaaatagcagagagagagctcagcaggatttattaccctaggctgtggggtcttggaaaagagctactatacagtttatgcctggtcaactagaagaccatctgagtgggaaagggacaatttgggcctctggctggccgcgtgcacaagcataacaattgcttttgcttaatgtgtgcacagaatatttgatccattttaaccaggcatttgtatcttg

SEQ ID NO: 869752 - DNA, 617 bp, Homo sapiens
acccgtgggactccagttgtgtctaaataaacttgaaagtcaaaagacacataaggggcttctcttattttacagtgttgtggtttttctttttctagtcgatgaaatgccagagtgaaagggatagccaactggacaacagtgcaagtgccgttccagttacttggcagagtgtccagtaagggtccaccacaataccaccatatatttgctcaaagatgaacaagggaagactgactggtaagatcttggaaaggcttaagctcactgtatcccattargtctccaagaaatgccaagttttccccttgtcgtgagagacacgaggtaaaattgacgctaggagatggaggctggatggctcttggggcctgacccacagggtgttggactttaagaaatagcagagagagagctcagcaggatttattaccctaggctgtggggtcttggaaaagagctactatacagtttatgcctggtcaactagaagaccatctgagtgggaaagggacaatttgggcctctggctggccgcgtgcacaagcataacaattgcttttgcttaatgtgtgcacagaatatttgatccattttaaccaggcatttgtatcttg

SEQ ID NO: 869753 - DNA, 617 bp, Homo sapiens
acccgtgggactccagttgtgtctaaataaacttgaaagtcaaaagacacataaggggcttctcttattttacagtgttgtggtttttctttttctagtcgatgaaatgccagagtgaaagggatagccaactggacaacagtgcaagtgccgttccagttacttggcagagtgtccagtaagggtccaccacaataccaccatatatttgctcaaagatgaacaagggaagactgactggtaagatcttggaaaggcttaagctcactgtatcccattaagtctccaagaaatgccaagttttccccttgtcgtgagagacacgaggtaaaattgacgctaggagatggaggctggatggctcttggggcctgacccacagggtgttggactttaagaaatagcagagagagagctcagcaggatttattaccctaggcygtggggtcttggaaaagagctactatacagtttatgcctggtcaactagaagaccatctgagtgggaaagggacaatttgggcctctggctggccgcgtgcacaagcataacaattgcttttgcttaatgtgtgcacagaatatttgatccattttaaccaggcatttgtatcttg

SEQ ID NO: 869754 - DNA, 568 bp, Homo sapiens
gaagaactttcctgcaacaagaccctcaaaccccctggttgaaatgggccccaagtgtcctccaagtgtactttgcaacaaccaatatacagaaataaaagatttccaatatacaatttgtaaaattaaggagctgaagattacttaggaaagggcgatttgcaatgcaaacgaactttctgatttatagagtcaccacggggttccttacatgagtcaatctaaaataggattcagctcacaatgcatctaaaataggattcggttcccaaaatccaacacccacgccatatcagcaatggcccccatcaacacagccattgcagagggaggwggtcccgcaaactttgctgtgcttttttctcaaaaggttttcctgcaagtgcatggccaatctcattaaataggctttcctttggctcgtactattatccttggctttgcaatcagagtcgcttttccatccacaaccaacccctcaaacaccttcaaggacttgccccactctactgccatcctctaggtctcctcatcttgggacaggcattacatcccggccaagagaagc

SEQ ID NO: 869755 - DNA, 613 bp, Homo sapiens
ttattgttttccttccaaagatggcccattatataggtgatggtagctcagaatcaagaatacatggcatgatcataaaagtgttactacctaggaagccatcactgcatgtgttaagggctttcccaacactgttagatcattctgggctcgggctcagattcccaggggagctagcagttgatgaggtaagggcagcaccctgaggctcaaggcaggctctagattccagaaacaggcacaggtcctcacagtgggaatggagacagatgctaaaagctttcatagatgaccctgtgtgggaaacctggtgggtctggaaagacaggagggaacaggaggggtcaacttggagggccaagcaaccaggggtcacatgggcatayggctgagcctggacccatccacctgactactatgctattatagggctcccaaggcatacccacaccccagagtgccacacaccccacaatacgccagacaagtcctggacctctttgagtcatttatgaaggagaggcagagaagtcacacaaagcagtcatgaccacacagccagaatcactccgaagcccatttccaataaaggacaccacttctctaacccatg

SEQ ID NO: 869756 - DNA, 591 bp, Homo sapiens
aaaataagacaggaacacgttgactgaaattataccctgtccaatgagttgacacccctttagacagctcaccccgatgtctccagagccaccactgcaacacatggggatgacatttagactctgcacagtggcccaggagagaggccgtctcagaggagggagggtgcccacagacccctggatggcaggaggaaaagccaggaatcaccggaacctgcaggacttccattccccatctgggtgaatgtcaccaccaggcagttccactgtcccttccaggacccagcttgctttatttgatcttgacccaaagaaggttagtttttttgtcattgttttgtatttgtgtgtgtgtgtgtgtgtgtgtgttttaaaaatgtttgagtgaacgtttagcagtaatgatgtttcacatgaagacccakaacctttattttaaaaacaggttgctgtggcaacaccggcccagctttcccttatggcagcaccacaggaagagagcagaggctgccccttgaggccaggcatttgctctccagttttccacagtccccaccactccctattgtaccttaagagtctggctga

SEQ ID NO: 869757 - DNA, 647 bp, Homo sapiens
gacaactatgcttatacctgaacttagggtcaaagatataatcatgggtctatactagcagaaaggtctcagagcagactgtgacttttatgcacactctacaaagtcctcaggtggtgcagaaagagttccaacagagcccagcacacaggtgagactgtgccactcatatgcacacccagtcaacagtaaagattgtcattctgtctcatgaaaacagccaatgattgagcttctgaatctcagacttggaggcagtcaaaagttagaaaattgactatcatacctggatctcattcacaggtgggttggtgactctcarattcaacacaactctgaggctgtgacttcattaaggagatacagtccacacgaggaattaagggtctcatggacagattagtctaccatctagattgtgactctttacgtaggcccaacatacatgagctattgaatcttacacctcgaacctagatacatatgggattgttaatctcatacctggacattcctgcaggtgtgattgtgacatagattctgcctgtcatgtgactgatttaactctactccctgggcccagcccagagctgaaattataaaatttcattgaaagcagcaattaggtgatgtagctgcatgctcct

SEQ ID NO: 869758 - DNA, 604 bp, Homo sapiens
gttttgatttccattgctatgatgacaagtgatgaggagcattttttcatgtgcttgctggctgcataaatgtcttcttttgagaagtgtctgtcatatcctttgcccactttttgatggggttgtttgtttttttcttgtaaatttgtttgatttctttgtagattctagatattagccctttgtcagatgggtagatttcaaaatttttctctcattctttaggttgccttttcactctgatggtattttcttttgctgtgcagaagctctttagtttagttagatcttatttgtcrattttggcttttgttgccattgcttttagtgttttagtcatgaagtccttgcccatgcctatgtcctgagtggtattgtctaggttttcttctagggtttttatggttttaggtctaacatttaaatctttaaatcatcttgaattaatttttgtataaggtgtaaggaagggatccagtttcagctttctacatatggctagccagttttcccagcaccatttattaaatagggaatcctttcttcatttcttgtttttgtcaggtctgtcaaatatcagatgattgtagatgtgtggtgttat

SEQ ID NO: 869759 - DNA, 571 bp, Homo sapiens
gggtggattattcatgcctcgcctttttagaccatagagggtaaatttctggcgttgccgtggcatctgtaaactgtcatggtgctgatgggagtgtagcagtgaggaagaccagaggtcactcttgtcgccatcttggttttggtgggttttagccggcttctttactgcaagctgttttatcagcaaggtctttatgacctgtaccttgtgccgacctgctatctcgtcctgtgacttagaatgcctaactgtctgggaatgcagcccagtaggtctcagccttattttacccagtccctatccaagatggagttgtcctggttcaaacgcctctgacagaagtcagcgttgacccgccccatcctattcctcgtccctctggacggcgtctgaccggctggtgccccgccmctcctggaaacactggcctttccttctacctctctgggtccctcttctgtccctctctctgtccattgctggtcaagggctgggttctcaggcctctttgctcctctatccacacccttccaggtcggcctcattaactctcggggctctaaaccca

SEQ ID NO: 869760 - DNA, 575 bp, Homo sapiens
atcactgggctagtatcctaggtaatgttactcttctgttgccttggccctgcatacattatgtattgtgacacatcactggggccagcacctacgtgaagtgaccctcccgcatgggcttagcccacaagggtatgatgacatatcttttcatttttcactcaggtgatgtgactctccatttatgcctgggccttgacaaaatagggattgtgacatatctctggacccagcacctaggtaatgtgacttacctctattgccagggcatggcatattgtgagtattgtgatatatctctgggcccaacacctaggggatgagaggcttctgcctgtgccttgcccacaggaggyttgatggcatgtctctgtcttcattacctagaaaggtgtgactctcctcttttatctgcattcttcccacagagaagattgtgacatatcactgggcccagcaattagaaggtgtttctctcccacctgagcctttctctcaggaaaattctgacatatccttggactcagcacccaggtgatgggtctttgccacctatggcctgcctacatagacca

SEQ ID NO: 869761 - DNA, 588 bp, Homo sapiens
aaagatgtttaatgacatattgagtggactttccgggaagggcgtgtgcactaattagacctgttgaaggaggggacatgcctgtaagctggcaagctgagcattgcaggataatttgtttagccagcctctgggtaagttgaaattgtttagataagtttttctaattttggtggaagaattgatgtgatttgctggcttggttaagcagtgatgttataacaggaaggtctgcttgataattgccataagttaatgggcaaggcagtgagctgtgrgatcgaatgtgtgcccataaaaataggatgtgtacattgatctagcaattgctgaagtcagagaaaaagagcacacagggcagactttagagtggacttaattaaggttgtctcaagattctgcaataagtaaacagagtaagcagagtcactcacaatattgatgagctgagtggaaaaagtttccaaggccaatatcagggccccaatatcagctctctgagtgaaagtaaacccagattgagtgagtgaattttatggtctccaccacactgccacttttccatgtttacctgaaccgtcagtaaac

SEQ ID NO: 869762 - DNA, 588 bp, Homo sapiens
aaagatgtttaatgacatattgagtggactttccgggaagggcgtgtgcactaattagacctgttgaaggaggggacatgcctgtaagctggcaagctgagcattgcaggataatttgtttagccagcctctgggtaagttgaaattgtttagataagtttttctaattttggtggaagaattgatgtgatttgctggcttggttaagcagtgatgttataacaggaaggtctgcttgataattgccataagttaatgggcaaggcagtgagctgtgggatcgaatgtgtgcccataaaaataggatgtgtacattgatctagcaattgctgaagtcagagaaaaagagcacacagggcagactttagagtggacttaattamggttgtctcaagattctgcaataagtaaacagagtaagcagagtcactcacaatattgatgagctgagtggaaaaagtttccaaggccaatatcagggccccaatatcagctctctgagtgaaagtaaacccagattgagtgagtgaattttatggtctccaccacactgccacttttccatgtttacctgaaccgtcagtaaac

SEQ ID NO: 869763 - DNA, 612 bp, Homo sapiens
attatattctgatggcatagtatattttccttcccaaatcttgatcttattaagagctgttaatagtttccacaaatccttatgtttagctcccagagtgagccatatcatttgaggttgaggtgccactatactgccatgtttccagataataggaactcttgccgcacttcttaccatttctaccatctgaccattttgttcagaccagctgaacatagtgtggccatggcacacagactgagaggtgcaattcaagctaaacrtccccttagaggactaatcaataatgattccataggaatcgttgcgcatcacctctgcctgttctgcaatgcaatcttcccaaacaagtatgttcatttcttctggtcaggtttaattctgtttacaaataggtttttgagggtggtatgcctcagttataggagcagatttattatggtaaatgctgagaccagaaagcacgtgtaaatgcatcatagagtgattacatccaggcattattgccagccaagattgataaatatgcccaataagtataactgttctctgtgttagcccttgctgaaggaatactcatggcaatggtgatcactgctatcatagcta

SEQ ID NO: 869764 - DNA, 671 bp, Homo sapiens
acatgggtagtgaggatgaaagtgagaactcccactaatgagtgaggttctcaaagtgggggaataagggaggagaccacccctcatattgtcttatgcccaatttctgcctccaaagaaagaagaagtaaaaactaaaaagcagaaatgaaacccaaaggcaggcagcccagcaccatgccctrtgcctggtagttaaagatcgacccctgacctaaccaattatgttatctatagattccagacattgtatggaaaaacattgtgaaaatccctgtcctgttctgttctgttctaataaccggtacatgcagcccacagtcaggtaccccctgctggctcagtcgatcacgaccctctcacgtggacccctttagagttgtaagcccttaaaaggaacagtaattgctcgctcggggagctcagtttttggagacgtgagtctgctgatgctaccagctcaataaagccctttccttccacaacttggtgtctgaggggttcttgtctgcggctcatcctgctacagtttctgctaatttttttgacttttatttttcttgtccatctctgatgcttgctttgctactccactttgaggattttgggcagcttcaccctcagccattccaacagtccatccatttgcctcaagctctaggcagtttctc

SEQ ID NO: 869765 - DNA, 671 bp, Homo sapiens
acatgggtagtgaggatgaaagtgagaactcccactaatgagtgaggttctcaaagtgggggaataagggaggagaccacccctcatattgtcttatgcccaatttctgcctccaaagaaagaagaagtaaaaactaaaaagcagaaatgaaacccaaaggcaggcagcccagcaccatgccctgtgcctggtagttaaagatcgacccctgacctaaccaattatgttatctatagattccagacattgtatggaaaaacattgtgaaaatccctgtcctgttctgttctgttctaataaccggtacatgcagcccacagtcaggtaccccctgctggctcagtcgatcacgaccctctcacgtggacccctttagagttgtaagcccttaaaaggaacagtaattgctcrctcggggagctcagtttttggagacgtgagtctgctgatgctaccagctcaataaagccctttccttccacaacttggtgtctgaggggttcttgtctgcggctcatcctgctacagtttctgctaatttttttgacttttatttttcttgtccatctctgatgcttgctttgctactccactttgaggattttgggcagcttcaccctcagccattccaacagtccatccatttgcctcaagctctaggcagtttctc

SEQ ID NO: 869766 - DNA, 582 bp, Homo sapiens
ttgggaagccgagccgggtgggtcatttgaggtcaggagatcgaaaccagcctggccaacacagtaaaactccatctctactaaaaacacaaaaattacctgggcatggtggtaggcacctgtaatcccagctattcaggaggctgaggcaggagaatagcttgaacccaggaggcagaggttgtggtgagctaagactgtgccattgcactccatcctgggtgacagagtgagactcggactcaaaaaaaaaaaaaaaaagaaaaagaaaaaraaaaaaaaagtccgagataacacaaataaatggaaaactattctatgctcataggtagaaaagatcaaaatgattaaaatggccataatgcccaaaaaaagaaatgatttaatgctattcttatcaaactaccaaaaacattcttaacagaactatagaaaactatgttaaaattcatatggaaggaaaaaagagcccgagtagccaaggcaatcctaagcaaaaagaacaaagctggaggcgttacattacctgacttcaaactatacaatagggctactgtaaccaaagccgcataatactggtac

SEQ ID NO: 869767 - DNA, 613 bp, Homo sapiens
aagcaagtccttagagacctacaaagagacttagactcccacacaataatgggagtctttaacacccccctgttgacattagacagatcaatgagacagaaagttaacaaggatatccaggaattgaactcagctctccaccaagcatacctaatagacatctacagaactctccgccccaaatcaacggaatatacattcttctcaacactacgtcrcacttattccaaaactgaccacatagttggaagtaaagcactcctcagcaaatgtaaaagaatagaaattataacaaactgtctctcagaccacagtgcaatcaaactagaactcaggattaagaaactcacttaaaactgctcaactacatggaaactgaacaacctgctcctgaatgactgctgggtacataacaaaatttaggcagaaataaagatgttctttgaaacaaacgagaacaaagacacagcagaccagaatctctgggtcacatttaaagcagtgtgtagagggaaatttatagaactaaatgcccacaagagaaagcaggaaagatctaaaattgacaccctaatgtcacaattaaaagaactagagaagcggccgggcgcag

SEQ ID NO: 869768 - DNA, 426 bp, Homo sapiens
agtgagccaagattgcgccactgcactccagcccgggcgacagtgccagactcagtctcagaaaaaaaaaaagcaaaacaaacaaagaaacatgaaaaaaagctataaaacccaacttttttcttttttttttgagacggagtctcactctgtcgcccagggtggagtgcagtggtgcggtctcggctcactgcaacctccgcctcctgggttcaagcaattctctgcttcagcctcccaagtagctgggattacaggcaccygccaccacgcccgactaattttttgtatttttagttgagacggggtttcatcatcttggccaggctggtcttgaagtcctgacctcgtgatccacccgccttggcctcccaaagtgctggaattacaggcgtgagccaccgcgcccggccaaaacccaacttt

SEQ ID NO: 869769 - DNA, 541 bp, Homo sapiens
aagaattgaaatttcctgtaagaccttagtgctgatataagctcatgatcttacccattgccctaagcctgagagtcaacatatcttctgttgtctgggtccaggtatgagagtcatccctgtgactgtgagctgggttcaaaaatgtgtcaacacctaacttgtggccagatccacatatgacattcataattccaactgtggaccgtgtttccactttagattctagacctcaccagtaggctctgttcctgtttgagggtgacaatcctaactgctggctgggtgtgtttaagagagccacaatctcacctgtgtgctgggtcctgctgtgacactctctgtgccacccaaggcctttatattataagcatgtgtagtaatcytctgtgaccttcgtacaagtaggggaaccaggaccttaccatttgccctaagcctagctatgtgaattaatatatctttttttttttttgctgattccagatacaagattcatcatcatgcctgtgagctgggtccaataatgaatcaccatcct

SEQ ID NO: 869770 - DNA, 594 bp, Homo sapiens
tttatacagtatttgagggcgtggtaattctctatgaccttggcaaaacgaaaagactaaggatcgtgtttgttttcctaagcctaactaggagagagtgcaactcttttattgcctggttcaaggtgtgagaatcaacatagcaattgcaagctggggcaagatatatgtcacaattatgctgctgagtaggaagtgagcagaagagtcacgtcatctggggctggtctaaaggcatgtcacaatcttttctgagggcaagaaccagagagtagagtcatatcacatcacctaggtgcttggccagggatgcattagaatttattcctgtaagatggccacaggcagactgggtgcattggcttatacccagacaagagggaaggctcttgcattgggagatcaagacaagtggttcacatgacatcaggagtttgaggccagcctggccaaygtggtgacaccccacctctactaaaaatacaaaaattagcccagtgtggcaatgcatacctgtaatcccagctacatgggaggctaaggcaggagaacagcttgaacccaggaggcagaggttgcagtgagccaagatca

SEQ ID NO: 869771 - DNA, 578 bp, Homo sapiens
ccattttataggtgttgggcctggtaatatgttatactatgcaaaatactcagggcttaggcaaaaaaaaaaaaaaaaaatggagtcatgtaacctaagtgcagaatttaggaatatatcacaatgcaccctgtgggcagtgacaaagcaagaaaagactcacattacctgggtggaaggcccagccatatgtcaccrtgacacctgtgggcaacaccaagcctggaaaagcgagtcacttctttgaggtgcagagtccagagatatgtcacagtctcatctgagggctgagccaaggcaggagagtcaaatcactaaaatgcttaccaggcacaatcacacctgcaggaaagtccaggaatgagattagatattccatacaggtccatgttctagatatgagagtcaacacctcctgtatgatgggtctaagttcatgagtaacaatctcaatagctgacagaatttttgcaaaagagctaccatttcttctgcagactgtgttctgttagtgcagtcacagcctcatatgtgtgctgaattcttggtctgaagttcaccagcccacctgtggccca

SEQ ID NO: 869772 - DNA, 652 bp, Homo sapiens
agtcaagacccatgcaagagagacacatcacctggtagctgggcctagtgataattcgtaatttttcttgtgagcagagtaaaggcaataacagaaagtcacagctcctaggtgattgatgcagagatatgtcacaaggccctctgttgaaaggcccaggcagaagcctcccattttataggtgttgggcctggtaatatgttatactatgcaaaatactcagggcttaggcaaaaaaaaaaaaaaaaaatggagtcatgtaacctaagtgcagaatttaggaatatatcacaatgcaccctgtgggcagtgacaaagcaagaaaagactcacattacctgggtggaaggcccagccatatgtcaccatgacacctgtgggcaacaccaagcctggaaaagcgagtcacttctttgaggtgcagagtccagagatatgtcacagtctcatctgagggctgagccaaggcaggagagtcaaatcamtaaaatgcttaccaggcacaatcacacctgcaggaaagtccaggaatgagattagatattccatacaggtccatgttctagatatgagagtcaacacctcctgtatgatgggtctaagttcatgagtaacaatctcaatagctgacagaatttttgcaaaagagcta

SEQ ID NO: 869773 - DNA, 642 bp, Homo sapiens
cagaagtttctgttgccttttcttcagctatgacctgcccccagaggtggaatctacaaaggcaggcaggcctccttgagctgctgtgagctccacccatttcgagcttcctggccactttgtttacctactcaagcctcagcaatggtagacgccccttccccagccttgctgctgccttgcagttcgatcttagactgctgtgctagcagtgagtgaggctccacgggcatgggaccctctgaaccatgcatgggatataatctcstggtgtgctgtttgctaagaccattggaaaagcacagtattagggtgggagtgtcccaattttccaggtaccattggtcacagcttcccttggctagcaaagggaattccctgaccccttgcacttcccaggtgaggtggtgtcccgccctgctttggcttgtgcttcatgggctgcacccactgtctgacaagccccagtgagatgaaccctgtacctcagttggaaatgcggaaatcacccatcttctgcatcgctcatgctgggagccgtagacgggagctgttcctattcagccatcttggaacctccctccataatttttttaaaggcaacttcagagtgggaagtgctgttaacctcctccccagcag

SEQ ID NO: 869774 - DNA, 671 bp, Homo sapiens
atgtgtatgtaccatttttatttgtaaatttataaagttaataataataatgacaaaaagaaaataatgccttctctaagaatgcgtgaccaaccaccatccttccctcatgggaatgtggagtttcccttgtcttggatgcctaacagacctgtcaatcaccacacatcccagacctaccacatctttccccacctcacgtaaaggtggctccagcccccttgatgtgcaatccacaagatttgtggggttatccttgattcctgcatttccctcacatgacacactcagtctctcaacaaatcctataccttaattaatgtgtttattgacatgaatttcacgtgacataaaattaactgttttatctgtacagtttagcrgcatttggtgcatttacactgctgtgcagcagctcctctagctggttcctgtgcctgcatgtccagagtccaagttctgacatttgtacatactcatgaagtcattgccgtcatcaagaagctgaacatccccaccatcctccaacgcttccccaggctcttcatcatctgtccctcccacagctccatccctggacaaccactggtgttctctgtgtcattacagatcacggacagaattttcttttttctttctttttttcttttctttttttttgagacagtgtc

SEQ ID NO: 869775 - DNA, 671 bp, Homo sapiens
atgtgtatgtaccatttttatttgtaaatttataaagttaataataataatgacaaaaagaaaataatgccttctctaagaatgcgtgaccaaccaccatccttccctcatgggaatgtggagtttcccttgtcttggatgcctaacagacctgtcaatcaccacacatcccagacctaccacatctttccccacctcacgtaaaggtggctccagcccccttgatgtgcaatccacaagatttgtggggttatccttgattcctgcatttccctcacatgacacactcagtctctcaacaaatcctataccttaattaatgtgtttattgacatgaatttcacgtgacataaaattaactgttttatctgtacagtttagcagcatttggtgcatttacactgctgtgcagcagctcctctagcwggttcctgtgcctgcatgtccagagtccaagttctgacatttgtacatactcatgaagtcattgccgtcatcaagaagctgaacatccccaccatcctccaacgcttccccaggctcttcatcatctgtccctcccacagctccatccctggacaaccactggtgttctctgtgtcattacagatcacggacagaattttcttttttctttctttttttcttttctttttttttgagacagtgtc

SEQ ID NO: 869776 - DNA, 598 bp, Homo sapiens
ataatgcatgataataacatgtaataacaataattataatagtattatgcttctatgagccatataaatattatatgctatacatattgctaagtgttttacaaccttcacctcatttatttccccctaaaagtctatgattttatgtaagaggaaaatgaagctccaagaaaaactttttttttttttttgagatggaatctcgttctgtcacccatgctggagtgcaatggcrtgatcttggctcactgcaacagcactatcttggctcactgcaacctccgcctcccaggttcaagcaactctcctgcctcagcctcctgagtagctgggattgcaggcacccgccacctcacccagcttaattttttgtatttttagtagagatggggtttcaccatgttggccaggctggtctcgaactcctgacctcaagtgatccacctgcctcaacctgccagtgttgggattacaggcatgagccagcacacccagcccaagaaagactttttggacactatctcagggtaagggagtagcaggattgggatttacacctggatctgactctcaagctcatgctcattccactacagaa

SEQ ID NO: 869777 - DNA, 540 bp, Homo sapiens
aaaacattcaatgaggaaagagtagtcttttcaagaaatggcactggggtaactaccatttgaggcatttgaacttgtcccatttctgtccccctgccccagttctgtagtagtctaggaaaacatcaacctcctaaccataataggtgtgaaaaccaacagtgtcacagccactcaaggagcaatgaggaaccacatgcagaaaaacgaagttggactcctacctcamaccatatacaacacatagtcagaagtattcagaaatgtaagagttaaaattataaaactgttagaagaaaatataacagtaaatcatcatgactctagattaggcaatgatttcttgattatgaaaccaaaagcacaagcagcagaggaaaaaaatagataaattgaacttcatcttacttaaaaattttaaacaacactatcaagaaactgaaaatacagcccacagaatgggaaaacaaagcatttgcaaatcatgtaccttgtaagggtcttgtatccagactaggtaagtagccttaaacttaatga

SEQ ID NO: 869778 - DNA, 584 bp, Homo sapiens
aaagaagtcttaggagggtaatactttcctcactgtatatttgctatatagagctagcgctacccagtgggacagtggcaaacccttttggttgcctaaccaacagctcttccccacttctttcctgttggcagggactatgtttatttgggtacccaggtctccagcatgatttttaattgggtgaaattatcccagctgcagaggaaaaccccaggtgatatgaayaaatagttctcaaaatgtaatctgtagaataccagggatctcagggccctttcggggagcccttgatgtcaaaactattttcatgataatactaagaaatcatttgctttttttcatgttgacatttgctctgaaggtaaaaaagcaatggcgagtaaaatttctggtgccttggcaccgatcaaggcaggggcaccaaactatactaacagacatttcattcttaactgccatactcacagttaaaaagtttcagttttatttgagaatatctttgatgaaatagcaaaaactataattattattaaatcttgcctcttgagtacacgtcatttaattattctaagtgaagaatg

SEQ ID NO: 869779 - DNA, 663 bp, Homo sapiens
tagccatcacccaaatagtatacatggtacccattaagtaatttctcattcctcacccctcttccaccctcctaccttctgagtatccaatgtctaccatttaatggagtaaatactgatagacataatttacataaacaaaagcttgataatatctggtcagggccaatcattgtggttctatttattaacggtgattgctttgggcataggcctgaaatgagacgtagtaaggagttctgctaggcggaaagtttacttttatagtgacacacgagaaagagatggtctcttttcgtccactagccatcactgggttggcatgtgacagctagaattgtggcagtcttcttatatgaccacaagctgacacaaagaaggtagtgaagtgaaagaatgaaagtaacgtgggacttggtcaacattgytgcactgcaggattaaccagccctggagccatcttgtccctagaagttttgttacttgtgataacagggttcccctattgcttaagctgttcgcgtacagtttcccttaatagccaagagcattctgatataggaatttgttcctaaactttaaacttataaagtaactcacaactagaataaagagtctttttttttcctttgacttttttcagtatggagctcacattcatat

SEQ ID NO: 869780 - DNA, 652 bp, Homo sapiens
aaataccttcttacagaaaaagtaaatctcttactccacatcaaagaattcataatacagagaaatcctatgtttgtaaggaatgtgggaaggcttgcagtcatggctcaaaacttgttcaacatgagagaactcatacagctgaaaaacactttgaatgtaaagaatgtgggaagaattatttaagtgcctatcaactcaatgtgcatcagagatttcatactggtgagaaaccctatgagtgtaaggaatgtgggaagacctttagctggggatcaagccttgttaaacatgagagaattcacactggtgagaaaccctatgaatgtaaagaatgtgggaaggcctttagtcgtggctatcaccttacccaacatcagaaaattcataytggtgtgaaatcttataaatgtaaggaatgtgggaaggcctttttttggggctcaagccttgctaaacatgagataattcatacaggtgagaaaccttataaatgtaaagaatgtgggaaggccttcagtcgtggctatcagcttactcagcatcagaaaatccatactggtaagaaaccttatgaatgtaaaatatgtggaaaggctttttgttggggctatcaacttactcgacatcagatatttcatactggtgagaa

SEQ ID NO: 869781 - DNA, 538 bp, Homo sapiens
ttacttgtggctcaaaacttgttcatgagagaactcatagtaatgataaaccctacaaatataacgaatgtggggaagcctttctgtggacaacttactcaaatgagaaaattgatactgatgaaaccttatgattgaaagttgtaaaagaatattttgtgtgtgtgtatagacaacttatcataataagaactcttactcttgagaaaccttgtgaatgtaagggttgtgcaaaagccattcatttctgtttatgggcaattatcttgctatccagcaattcatactagtgagaaatattttgaatataaytaatatgaaaaggcctttagacttctgtacagtcttattggatatcaatttatactgatgtaaaatcatttaaatgtaaggaatgtgtgaagatcttcattcatgacataaggtctgattaacatcaaataattggtatttgttaaaaagagtttaaataggaggaatgtgggaaggacctaaacttaattcagttcttgctgcacatcagagaattcatactgct

SEQ ID NO: 869782 - DNA, 692 bp, Homo sapiens
tgtaaacgatgaataacagcatggtgcccatacaaagcactgcttgtgatattcgaagtgctcccaggaagccgtgaaaagttattacattacaagaaaaagttgaattgcttgtcacgtaccatagactgaggtctgtggctgcagttgcctgccatttcagacagatgattcatcttataaacagattaygtaaatatgttattgataaatacagtatggtactgtaaatgtattttctctttatgattttctttaaaatatttttctttctcggccagcactttgggaggccgaggcaggcagatcacctgaggtcaggagttcaagaccagcctggctaacatggcaaaaccccgtctctactaaaaatacaaaaaattagctgggcgtggtggtgtctgcctgtagtcccagctactagggaggctgaggcacaaaaatcgcttaaactccagaggcagaggtttcagtgagctgagatcacgccattgcactccagcctgggtgacagagcgagactctttctcaaaaaaaatttttttttctttctctagcttcattttacgaatacagtgtgtaatacatatagcatacaaaattgtgttaattgactgtttatgttattggtaatgctcaatagtaggttattagtagaagttactaattggtggagtcaaaagttacctctc

SEQ ID NO: 869783 - DNA, 584 bp, Homo sapiens
actcccaaatatccctttgaatattctacaaaaagagattttccaaactgctcaatcaaagtaaagttttaactctttgagatgaatgcgcacatcacaaggcagataatcagaaagcttctttctagtttttatgygaatatatttcctttttgactgtagacctcattgcattccgaaaaatccctacacagattctacaaaaacagtgtttccaaactgctcaatcaaaagaagggtgctgctctgtgagatgaatgtacacgtcacaaagcagtgccttagaaggcatctttctggtttttatctgaggatatttcttttagcatcataggccccagtatgctcccaattatcctttcacagtttctacaaaaacagtgtttccaaactgcttcatcaaaagaatgtttacactctgtgagacgaatgcagacatcacaaagcagtttctcagaaagcttctttctagtttttatgtgaagatatttcctttctcaccatagacatcaaagtgctcccacatatcccttcacagattgtacaaaaaaagtgtttccaagatgctcaatcaacagaaagga

SEQ ID NO: 869784 - DNA, 564 bp, Homo sapiens
caagatgaatgcacacatcagaaagcagtttctcagaaagcttctttctaatttttatgtgaaaatacctcctttttcaacataggccttgaggaactcccaaatatccctttgcagattgcacaaaaaacagtgtttccaaaatgctaaataaaaagaaaggtttaactctgtgagatgaaagtacacgtcacaaatctgtttctcagaacacttctttgtagtatttatctgaagatatttcctttttcaccataggcctcaatgtgctcccaaatatccctttgcatattctagaaaaacagagtttccaaactacttaatcaaaggaaaagattaactctgtgacgtraaagcacacaccatgaagctgtttcttagaaatctttctagtttttattgacgatatttcctttttcaccataggcctcaatgtgttcccaaatatccctttgcaggttctacaaaaacagtgcttccaaactgctcaatcagaagaaaggtttaactctgagagatgaatgcacacatcacaaagcagtttctcagaaagcttctttctag

SEQ ID NO: 869785 - DNA, 672 bp, Homo sapiens
tgttttcccaccagttcaactttgcagatacactcaactcaaaaaccatcttcccacaggccagacaagtgctcagctcctcccacacccagacaatcactctccatcctgaaagctggcttagccctactggactctctcttcttgcacttatctgctgccttatattgaagaccttcctgtgtctctcctgcctccacccactacccttmgaggttgcagcctccttggcagcacagactggtgcactgtttccatatccctcatgctatccagctcagcactcagcaaccattagctaaccgcacgaatgcgtcctcaggtttctaaatcaaaccagggcttcagagcaggtctactgacaactgggctgaccgattccttgtagtgagggctgttctgtgcattgtgagatgttcagcagcatccacatgccctctctccactacatgccaatagcagccttccccctccctcaagcaccctcttccttcatgaaagcaaaaaatatttctagatattgccaaatgtctccttgagggaaaccacccctagtcgacaaccattgctttataccaatagttctccacctggcccacacatttacacttatctaggcatttaccctcagcctggaagtcaggggggcctagatccaaatcctggttctgt

SEQ ID NO: 869786 - DNA, 614 bp, Homo sapiens
tttatccagtaagcagtcattgagcacctgctgtgtgcctggccccatgctagcttctccaggcaggtacatgagttcctggccctctctccaggtcaaacaggaataagctgggaggtcaggaagtccatagaggctttacacctggcatatgtgtgggtccatttagaaagatactctcaacacatgcaatgttgcaagcctgtcacccaacgtctaccagacccttcttatagatgcgtcatttgcaaaaacaaaaacagtctgttttctttcacttaacactgcagggtggacctcttaacctctttccatatcgagacggatttttttcacccatttcagtggctttcagtgttcgttgtaaagatgcaccattagtttatttagccagctcctttctggttcatatttaaactgtttgtagttttatggctattcctgaattatttctgtttcctcygatgtcatctttttctgtttgcttcttttgatgtctcttgtggtggaggctgtcctcagatgcttgatgagccctagttacccattcatagttgagagtggagcaataaacatgtgattgattttgttttgtttttgagacagggtctcac

SEQ ID NO: 869787 - DNA, 614 bp, Homo sapiens
cagctctgcatcccagcatgcttctggttgccttgacaactcaacaggttaaacttcttttctgggcatcagtgtctgctcaggcaggaggtgacagaacccctggaggtgtgcagatcttcagcaggcagatgactcagagctcaggctgaccttcaccttgctgggctagctggccttgggttgtccctggctgcctgcatgagcttacgatcatgtccaaccagctgcctctgcctcctatccctcctattcatccatccattcatccatctgtttatccagtaagcagtcattgagcacctgctgtgtgcctggccycatgctagcttctccaggcaggtacatgagttcctggccctctctccaggtcaaacaggaataagctgggaggtcaggaagtccatagaggctttacacctggcatatgtgtgggtccatttagaaagatactctcaacacatgcaatgttgcaagcctgtcacccaacgtctaccagacccttcttatagatgcgtcatttgcaaaaacaaaaacagtctgttttctttcacttaacactgcagggtggacctcttaacctctttccatatcgagacggatttttttcaccc

SEQ ID NO: 869788 - DNA, 616 bp, Homo sapiens
ggtgatgagcagagtggagattgaagaaattctttaaagtccccggttgactttttgataactcccttagccaccaccagcagagaagaggaggactcagtgatttggggaaaagaatcttacatgagagaagtacgtaaaaggcgacataaatcgtactgaaaacaactttmgtttataaacaaaagaaaatgttatatatttataaaccaatggcagaccaattggctagacctgtaaaactcaaaaataattaccctttggaacaaacctacaaagcaaaagattcttcagctattaaactattttcggtaagtcattattttatgaagctattatttgctctaccatctctactgatttagttacagatattttaagtctgtgtctgactgtgacaaaactcggtcagggtgaccacccagttatctgggctcatggacatggtattcttttaaccagttaaggttacatttacttaattagatctgagaagtgttctctttggctgtgggagtatgtgcaggtgtgagcttggcacattgtccacaatctttccaattaggacttcctttttttaaataataaaaataacaataattgtggccagcacaca

SEQ ID NO: 869789 - DNA, 628 bp, Homo sapiens
tttatacagttttatatacgaaagtgcatttacatttgtgtgttgtggaggtggtggtagtgcatgttcaaaactgagaggctggctgggtgcggtggctcacacctgtaatcccagcacgttgggaagctgaggggggcagatcaattgaggtcaagagttygagaccatcctggcccacatggcaaaaccccatctgtactaaaaacacaaaaattaaccgggcgtgatggtgggtacttttaatcccagctactcgggaggctgaggcaagagaatcacttgaacctgggaggtggaggctgcagtgagccaagattacaccactgcactccagcctgggtgacacagcaatactccatctcaaaaaaaaaaaaaaaaaaaaaaaaaggagaagctgatgaaaataaggaattattcaattcaatcaaatttggcctactgcctttgtagcatagcaaactgtaacctagcaatacatgaaccaattgtgtgtatctgtgtgtgctggtgtatttgtgctggtgtgttggtggatctcctagcccctctctttggaagcctgcagatgctgagtctatctccagtgtcccctccttcatccgcccttctgtgacagccacaggtg

SEQ ID NO: 869790 - DNA, 656 bp, Homo sapiens
tctggactcagcttttggttcaggaacatgaaagagaggcacatcacctggtttctgggtgcagtgatgtgtcacaatctgttgccctcagagaagaagatgaacagaaaaggagtcacatcagctaggtgctgggttagtcacaggtcacaatcacccctgtaagcaggaaccaggccgaagtgagtcccaaawatgtcccctgtgggcagcgccaaggcaggataataaagccacatcacctaggtgctgggtcgagcgataactcacaatcctgtatttgggctgggccccggctacaaagtcaaatcactcagttgctggccagagggatatatcacatttacacctgttggaatgtcagagaatgatatctacaatccagcacatatcctgtttctgagtatgtgagttaacacctcatgtatgttgggtcttagtacatgagttcatctcaacaataaactggatcagtgcataagaggcacaatccttccagtgcactgttttatctgagtgagttacagcctcaaaggtgtgccgaatattggtcttagagtcatcaacctacctgtggacaagattcacctatgagaatcaattttccaacatttgactgcttttggttgtgaaatccagagccttaacaatgggct

SEQ ID NO: 869791 - DNA, 656 bp, Homo sapiens
tctggactcagcttttggttcaggaacatgaaagagaggcacatcacctggtttctgggtgcagtgatgtgtcacaatctgttgccctcagagaagaagatgaacagaaaaggagtcacatcagctaggtgctgggttagtcacaggtcacaatcacccctgtaagcaggaaccaggccgaagtgagtcccaaaaatgtcccctgtgggcagcgccaaggcaggataataaagccacatcacctaggtgctgggtcgagcgataactcacaatcctgtatttgggctgggccccggctacaaagtcaaatcactcagttgytggccagagggatatatcacatttacacctgttggaatgtcagagaatgatatctacaatccagcacatatcctgtttctgagtatgtgagttaacacctcatgtatgttgggtcttagtacatgagttcatctcaacaataaactggatcagtgcataagaggcacaatccttccagtgcactgttttatctgagtgagttacagcctcaaaggtgtgccgaatattggtcttagagtcatcaacctacctgtggacaagattcacctatgagaatcaattttccaacatttgactgcttttggttgtgaaatccagagccttaacaatgggct

SEQ ID NO: 869792 - DNA, 632 bp, Homo sapiens
agaaatcaacatgcagtagtcagtgagcaccaaccatgcaattgtgctaggtacaagagatggaaaaaatattcctgaggtgggagaaacatgttaacagataaattacagaagacagacttgacacatgggagtaaaagtcattagaaacagaaggcctaattatttctagaaaaggtagtatttgagatgggtctcaggagaaaagtaaatgttctttgctgggagaagaagatggagacacaacgaaaagaacccatgcaacagcagaggcagtaaataattattcagtgtggcagtgatgtggaagatagagacaagagccaagactagcagtttggtttggaagcagatgagagtctttgtaaaacaagttaaggggtttggattttcctttttgtagacaacatggtgccaagagatgtcattaggcaggcaagcaatgagagcagctttaggytttgaggataatgcctctggcagcaaggtggaaggttaacagcagtagggagaaactggtggcagaaaattaagaggtgtttatgactcagtgaggtcctcaggtcaggagtgattaaacagcccatgtcagtgattgaagcatggttttgaggagagcctggtgactgatg

SEQ ID NO: 869793 - DNA, 563 bp, Homo sapiens
ccttgactccagtgaccctgatgtgagctcctgtgagtcccactgggtcttttgcagacccaatcaatggtgcttctttgtgatgggggcttctttgtcatccacaaggacccagggaagactgaggctgaggactgccggagctacactgggaagggtctcaggcacgctcttcaccttcttagaggcctcttctcctaacaatgtctcccctctggactgtcttaagtcagctcagagtgccgtaagacaataccacagactgggtggcttaaacaacagaattctgttttctcacagttctggaggctgcaaatgtgagatcagggtgccagcatgttcaggttctgaggagggctstcttcttggtttgcagacagccaccttctcactatgtcctcacatggtcagggagacagctttctcttctctttttaaaaaaaatattttttatttttttagaagtggggtctcactctgttgcccaggctggtctcgaactcctgggctcaagtgatcctccagcctcagcctgccaaagtgctggggttacaggcatgaac

SEQ ID NO: 869794 - DNA, 614 bp, Homo sapiens
aagctcatatgagacatcttggtgagcaaataaatatcacttaatgtaccttaatgcctctcagacagactcttagtacttaaattattcttcactgaatttgttaataattttattttcaaaatggaaccatagagctttactttttcagtaggattcactcaattctgaaggatcaaacagacttaaaagaataaaatcatgcctttaggtaaatatgyatgtaacactaatggaacagtgcagtgtatatcctgcccgatagtattgtactgtacaagtgtgtctgtttaagtggacacaagtcacaatgtaaggctcattacccttagacttagtaagtaatttaactcaagtcctgaacattctctgctgtaaaacctgcaaatgcatagggatttgcaaagggaacgggaatggaatgtgagacaaatgaaacttaattgaccaataacaagttctgaaattgaggcaataattaatagcctaccaaccaaaaaaagtccaggaccagatggatttacagccaaattctaccagaggtacaaggaggagctgggaccattccttctgaaactattctaaacaacagaaaaagagggaatccaaagtaa

SEQ ID NO: 869795 - DNA, 645 bp, Homo sapiens
acaaatgggatctaattaaacaaacagcttctgcacagcaaaagaaactaccatcagagtgaacaggcaacctacagaatgggagaaaatttttgcaatttactcatctgacaaagggttaatatccagaatctacaaagaactcaaacaaattgagaagaaaaaagcaaacaatcccatcaaaaagtgggtgaaggatatgaacagacacttctcaaaagaaggcatttatgcaggcaacagacacatgaaaaaatgctcaccatcactggccatcagagaaatgcaaatcgaaaccacaatgagataccatctcacaccagttagaattcgatcattaaaaagtcagtaaacaacaggtgctggagaggatgtggagaaataagaacaattttactctgtttgtggtactgtaaactarttcaaccattgtggaagacagtgtggcaattcctcaaggatctagaactagaaataccatttgacccagctatcccattactgggtatatactcaaaggattataaatcatgctgctataaagacacatccacatgtatgtttattgtggcactattcacaatagcaaagacttagaaccaacccaaatgcccatcaatgatagactggattaagaaaatgtgg

SEQ ID NO: 869796 - DNA, 665 bp, Homo sapiens
cagtgggacttggatagttcttgtaaccagttcttgtagccaaagtaccctccgctgagagtaactcaatgatgtaggactttctgttcagaggaaaaactatgttgtggtcacagagttgttacaacctccactcatgagttaaaaaaagaatcattcacaagcattgtaaactcagattttaaaaaatacgagggaaataagatccttaatgttttctaaaattgcttgtttttcctcttttagtcttatttttatactctctcttaatctaatcttacttctgatgtaatactgtcttatctctctttcctcctgccagattggatgaactgtttcatagtggttaaggtgggaggatacagactgctttgtttttgttttrtttcttaatttcttgtctatgctagtccatgttagatgatattagacaagacatttaattttcctaagctcagcttccttatctgtaaaatgaagacagtaataacagtaccaattttataagaacgttgtgaagattaaataagatagtggatataaagtactgagcacagtgtccagaccatatccaagtgctctcaatgttagttcttctttctaaatgtgagttcttttttctgtgctcagaaattgtgctactttttgccttgtttagttgaatt

SEQ ID NO: 869797 - DNA, 617 bp, Homo sapiens
gccccacttaagatttctgctctctgcagttgtcaaatacaaggctgcctttttgttacctctaattgactttatccattaaaatgataactcacattttcagttcagaaataaatctaaatctttgggctgttgaaatcttcaactctatgtcacgcgtgtccatgttaagagaccaccaaacaggctttgtgtgagcrataaagctttttagtcacctgggtgcaggcgggctgagtcggaaaagacagtcagcaaagagagttaggggtggggcagttttataggatttgagtaggtagtagaaaattacagtcaaagggggttgttttctggcgggcaagggtgagggtcacaaggtgctcagtgggggagcttctgagccaggagaaggaatttcacagggtaacgtcataaattaaggcaggaaccagccattttcacttcttttgtgatccttcacttgcttcaggccatctggatgtattcctgcaggtcacaggggatatgatggctcagcttggcctcagaggcctgacactctagttttcaaggtttttttgttattattagtttattctaccatatggaatttattcaaagtgcaatacacttga

SEQ ID NO: 869798 - DNA, 617 bp, Homo sapiens
gccccacttaagatttctgctctctgcagttgtcaaatacaaggctgcctttttgttacctctaattgactttatccattaaaatgataactcacattttcagttcagaaataaatctaaatctttgggctgttgaaatcttcaactctatgtcacgcgtgtccatgttaagagaccaccaaacaggctttgtgtgagcaataaagctttttagtcacctgggtgcaggcgggctgagtcggaaaagacagtcagcaaagagagttaggggtggggcagttttataggatttgagtaggtagtagaaaattacagtcaaagggggttgttttctggcgggcaagggtgagggtcacaaggtgctcagtgggggagcttctgagccaggagaaggaatttcacagggtaacgtcataaattaaggcaggaaccagccattttcacttcttttgtgatccttcacttgcttcargccatctggatgtattcctgcaggtcacaggggatatgatggctcagcttggcctcagaggcctgacactctagttttcaaggtttttttgttattattagtttattctaccatatggaatttattcaaagtgcaatacacttga

SEQ ID NO: 869799 - DNA, 617 bp, Homo sapiens
taaaccagaatactatgattgtgagtgactggtagaagagggttgggggactatttcatatgtagcagccagggaaatccttttagaggagataatgtgtgagcaaagacctgaatgatccaaagatccagatctgcaaaaatctctggggtagaatattcccagtagagcacatagcgagtgcaaaggcctagagcagatgtgagcttggcccacatgaagaacagtaacccatccttaaaagcaaagtgatatccatggaccaggaattttgaagaatgtctaggatagaaaaaacaaagggagttggattgccagggaggcaaatgcaaattttcctaagacaaatctgaactaaggtaattcccaagtggtactgtctgtagtgggatgctagacaaaggtcacaggacaaacaaagggcccgtgtggaaagattatcagccaaggaagcacagagtttcctagtatagstcaattcacatctttcaagtgcctcaccttttaagtccccttgaagaaatggcatattttatacattaaggccctttccatctctccctctcaaaaaaaagggagcactgtcatgagatcattccagacaaactctaacattc

SEQ ID NO: 869800 - DNA, 664 bp, Homo sapiens
tgtgcccaacataccaaaattccagactcccagagggaaacagatgttcaaaatataccacattgtttgcacacagtatagatacagtgaaaaactcttatcagctggggtcatgagaaccctgtagaaatccaagttcccatatgcyagctaagggccaaccttgcaagtaggccattttggagataagcattcacaggtgctctaaattaactatattctgaacagtatattttacaatttttattaactattcattttttactggcatatattaatacaatggacttttatacattgatactatatccagtgaacttgttaaattcacttataatagtgtacatgcagattcttttagattttctaagtatacatcatgtagccattgactttctttcaatataaatttgtgaactctttccccatattgaaacagaagaatgtaatgatttcattaagctacaattttctatccattatcatgtaaacatggtgtgaaatatagtttaaaaaaaaagagttgaatatttccttcctcttccaaacttacaaaaccaaaaagatagagagcttcagacattcacaaattttaaaaaagcaaaaaggtctacttatagtctttggaatacacaccatttagctttatgaatcagagacatta

SEQ ID NO: 869801 - DNA, 664 bp, Homo sapiens
tgtgcccaacataccaaaattccagactcccagagggaaacagatgttcaaaatataccacattgtttgcacacagtatagatacagtgaaaaactcttatcagctggggtcatgagaaccctgtagaaatccaagttcccatatgccagctaagggccaaccttgcaagtaggccattttggagataagcattcacaggtgctctaaattaactatattctgaacagtatattttacaatttttattaactattcattttttactggcatatattaatacaatggayttttatacattgatactatatccagtgaacttgttaaattcacttataatagtgtacatgcagattcttttagattttctaagtatacatcatgtagccattgactttctttcaatataaatttgtgaactctttccccatattgaaacagaagaatgtaatgatttcattaagctacaattttctatccattatcatgtaaacatggtgtgaaatatagtttaaaaaaaaagagttgaatatttccttcctcttccaaacttacaaaaccaaaaagatagagagcttcagacattcacaaattttaaaaaagcaaaaaggtctacttatagtctttggaatacacaccatttagctttatgaatcagagacatta

SEQ ID NO: 869802 - DNA, 609 bp, Homo sapiens
tccctactgggcgccgctccgccctggccaggccgggctccctgtgccctccacttaccttcccaggaggcggcggcggcacgggctgcagcagaggtcgaaggagtgggactcaatgcgcaagcgcggtccggctcttattcgcgccgcagcacccggatgaagaaggcggggtttcgggtgcaccaaggaagacactcaaggtcactttgtaacaactttattggcaactagccgggaaggacaacgacaaccacctggtgatggggcaagagggagacaaaaagaaaaactgtagattcaccccggcagagaggactaaacagaytgacttttgatatgagttggctgcaggatagtgggcctttttcttcacgttggcaccttgtaagatttggccttttatcagttgctgcttctctgtagtagaagttgacttgctggtcattctcttcctctgtgaaataggactgtggctggcgggaggaaagaagggtcattcactacttaacaggaaactagggtccccagcaaagagaagatatttatttcaaggaacctggaaaatggttccagaagtatggctaatccttcaggtgaaagagggcc

SEQ ID NO: 869803 - DNA, 599 bp, Homo sapiens
attgaagatactgtcatttccccaattgatgttcttggcacctttgttgaaaatcagttcactgaaggtgtatgaatttgtttctgggttctctattctgttttattggtccatgtgtctgtttttctgccagtatcatgytgctttggtttctatagctctgtggtataatttgaagtcagggaatgtgattctttcagtctttttctttttgctctggagagctttggctgttctggatcttttatggttccatatacattttatgattttatttctatttctgtgaagaatgttattggtattttgaaatggattgaattgaatatatgaattactttgggtagtataaacattttaacaatattaatccatccaatccatgaacatgagagagctttcaatttttctgtggtctgttaaatttcttcctaaatttgacttatacttttcattgcagagatccttcacttctttggttaatttcaaagtattttattttattaatagctattgtaaatgggattacttttctcatttcttttgcagattacttgctgttgtgcatatagaaatgcttctgttattttcatgttgat

SEQ ID NO: 869804 - DNA, 599 bp, Homo sapiens
attgaagatactgtcatttccccaattgatgttcttggcacctttgttgaaaatcagttcactgaaggtgtatgaatttgtttctgggttctctattctgttttattggtccatgtgtctgtttttctgccagtatcatgctgctttggtttctatagctctgtggtataatttgaagtcagggaatgtgattctttcagtctttttctttttgctctggagagctttggctgttctggatcttttatggttccatatacattttatgattttatttctatttctgtgaagaatgttattggtattttgaaatggattgaattgaatatatgaattactttgggtagtataaacattttaacaatattaatccatccaatccatgaacatgagagagctttcaatttttctgtggtctgttaaatttcttcctaaatttgwcttatacttttcattgcagagatccttcacttctttggttaatttcaaagtattttattttattaatagctattgtaaatgggattacttttctcatttcttttgcagattacttgctgttgtgcatatagaaatgcttctgttattttcatgttgat

SEQ ID NO: 869805 - DNA, 588 bp, Homo sapiens
ccataatagaaaattcaaaaataaattcacacatttcagcaactgatttcaacaaagatgccaagaacacacggtatggaaagagagtctcttcagtaaatgtcacaggaaaaattatacacccactttaaaatgatgaaactatactaatctctcaccacttacaaaaatcaattcaaaataatttaaacccttaaatataagaccccaaactatgaaaatactacaggaacacacagggaaaaattcttcatgagattgatttgggcagggatttttttaaacaagacctcaaaagcatgggaaacaaaagtaaaaacaaataaatgagattatttcaaaagcttctgcacagaaaaaaaaaaaaaggyaacccacagaatgggataacatatttccaaactatgtatctgacaagaggctaatatttaaaatataccaagaactgaaacaactcaaaagcaaaaaatgaaaaataaaataaaaataaagaatctcattaaaaagtgggcaaaagatttgaataaaaatatcagaatctcaaaagaagacatacaaatggccaagtacatgggaaaattctcaata

SEQ ID NO: 869806 - DNA, 588 bp, Homo sapiens
ccataatagaaaattcaaaaataaattcacacatttcagcaactgatttcaacaaagatgccaagaacacacggtatggaaagagagtctcttcagtaaatgtcacaggaaaaattatacacccactttaaaatgatgaaactatactaatctctcaccacttacaaaaatcaattcaaaataatttaaacccttaaatataagaccccaaactatgaaaatactacaggaacacacagggaaaaattcttcatgagattgatttgggcagggatttttttaaacaagacctcaaaagcatgggaaacaaaagtaaaaacaaataaatgagattatttcaaaagcttctgcacagaaaaaaaaaaaaaggcaacccacagaatgggataacatatttccaaactrtgtatctgacaagaggctaatatttaaaatataccaagaactgaaacaactcaaaagcaaaaaatgaaaaataaaataaaaataaagaatctcattaaaaagtgggcaaaagatttgaataaaaatatcagaatctcaaaagaagacatacaaatggccaagtacatgggaaaattctcaata

SEQ ID NO: 869807 - DNA, 475 bp, Homo sapiens
tcccagatctatcctttgagagacatttccttttagataagaaatgtactatatttgcaatcatgcagctttgttagctcccttcctgcctaaagaaatttggagcccagaccatcattctcagcaaactatcgcagggacaaaaaaccaaacaccgcatgttctcactcataggtrgaaattgaacaatgagaacacatggacacaggaaggggaacatcacacaccagggcctattttggggtggggggaggtgggagggataccattaggagatatacctaatgttaaatgacaagttaacgggtgcagcacaccaacatggcatatgtatacatacgtaacaaacctgcacgttgtgcacatgtaccctaaaacttcttctgtctccattaggtttggttgagactggattgatacaaagccattaatgttcctgtaagtcttctaaggaggacctagcaccctacgtatt

SEQ ID NO: 869808 - DNA, 475 bp, Homo sapiens
tcccagatctatcctttgagagacatttccttttagataagaaatgtactatatttgcaatcatgcagctttgttagctcccttcctgcctaaagaaatttggagcccagaccatcattctcagcaaactatcgcagggacaaaaaaccaaacaccgcatgttctcactcataggtagaaattgaacaatgagaacacatggacacaggaaggggaacatcacacaccagggcctattttggggtggggggaggtgggagggataccattaggagatayacctaatgttaaatgacaagttaacgggtgcagcacaccaacatggcatatgtatacatacgtaacaaacctgcacgttgtgcacatgtaccctaaaacttcttctgtctccattaggtttggttgagactggattgatacaaagccattaatgttcctgtaagtcttctaaggaggacctagcaccctacgtatt

SEQ ID NO: 869809 - DNA, 622 bp, Homo sapiens
tttataattttattttatttattttattgcttaactaccctggctagcaccttcaatacaaggttgagtagaagttgtgggaggggacatccttgtcttgtttctaactctcaggaaaaactgtcagtttttcaccagtaagtatgatgttaattatgagtttttaataaatgacctttatcagaatgaggaagttctcttttattactagttygttgagtgtgtttattatgcaagggtattggatttttaaaaatgccttgtcttattatattgagattatcatgtttttaaaaaattccttattttgttaatgtggcatatgatattgatttctatatgttgagtcaaccttgaattcctaggctaaatccaacttggtcatggggtataattctttttacatggtgttaaactttatttatattattttgttaagaatttttatgtctatattcatgaaatatatgtttgtagttttcttgtgatgtatttgtctagttttgaaatcaaaataatactagcctcatagaataagttgggaagtgttcccttctctactaatttttgaaagagtttatgaggattggtggtaattgctctttaaatatttggtagaatt

SEQ ID NO: 869810 - DNA, 636 bp, Homo sapiens
attagtatttcattgtgtggatgtacggggtttgtgtatccagtcatctgaggtgtataggttcgaattgtctctggcttttgattattacaattaaagctgccatgaacattcacatagtggacatcgtgtagacatgccttttatttcccccttctctctctcttttctaggaatgaaagtgcttgttatctttaaagtgtatggttgattttctagcaaactgccaaactgctttctaaagccaatttacattttacattccatcagcagtgtgtgagagttcctgtccttcatatattcaccaaaagttgctatggttagggtttttaatttaagctattctaatgtgtgtgtaatggttcctgatgtggtgtggatctgtgtccccatcaaatatcatgtcaaattgtaatccctagtttattactcagggttctctaaaggaacagaactaatggaatggatatatatatamacatatatatatatatatacacacacacatacatatatatatacatatatatatacacacatacatatatatatatatatatacacacacatacatatatatatatataaagggggtttaataagtattaactcacacgatcacaagtcacaggttcc

SEQ ID NO: 869811 - DNA, 666 bp, Homo sapiens
gttttttaaattattctaagaaagtcagtggtagcttgatgggcatagcgttgaatctataaattactttgggcagtatggtcattttcacgatgttgattcttcctatcaatgagcatggaattttttttttatttgtttgtgtcctctcttatttccttgagcagtggcttgtagttctccttgaagaggtccttcacatcctttgtaagttgtattcctaggtattttattctgtttgtagcaattgtgaatgggagttcacttatgatttgactctctgtttgtctattattggtgtataggaatgcttgcgacttttgcacattgattttgtatgctgatactttgctgaagttccttatcagcttaaggayattttgggctgagacgatagggttttctaaatacgcactcatgtcatctgcaaacagagacaatttgacttcctctcttcctgtttgaatatcctttatttctttctcttgcctaattgccttggccagaacttccaatactattttgaatagaagtggtgagagagggcatccttgtcttgtgctggttttacaaagggaatgcttccagcttttgtccattcagtatgaatattcctgtgggtttgtcataaaaagttcttattatttgagatacgttccatcaatg

SEQ ID NO: 869812 - DNA, 666 bp, Homo sapiens
gttttttaaattattctaagaaagtcagtggtagcttgatgggcatagcgttgaatctataaattactttgggcagtatggtcattttcacgatgttgattcttcctatcaatgagcatggaattttttttttatttgtttgtgtcctctcttatttccttgagcagtggcttgtagttctccttgaagaggtccttcacatcctttgtaagttgtattcctaggtattttattctgtttgtagcaattgtgaatgggagttcacttatgatttgactctctgtttgtctattattggtgtataggaatgcttgcgacttttgcacattgattttgtatgctgatactttgctgaagttccttatcagcttaaggatattttgggctgagaygatagggttttctaaatacgcactcatgtcatctgcaaacagagacaatttgacttcctctcttcctgtttgaatatcctttatttctttctcttgcctaattgccttggccagaacttccaatactattttgaatagaagtggtgagagagggcatccttgtcttgtgctggttttacaaagggaatgcttccagcttttgtccattcagtatgaatattcctgtgggtttgtcataaaaagttcttattatttgagatacgttccatcaatg

SEQ ID NO: 869813 - DNA, 592 bp, Homo sapiens
ataaaaagatcagtggttgccaggggctgaggggagagaggagtgaatgggtggagcatagaggatttttagagcagtcaaaaatttctgtatgaggccgggcacagtggctcacacctgtaatcccaacactctgagaggccaaggtgggtggatcatttgaggtgagcagttcaagaccagtctggccaacgtggtgaaaccctgtctctactaaaaataaatacaaaaattagatgggcatggtggcaggtgcctgtaatcccagctacttgggaaactgagacatgagaattgcttgaacccaggaggtggaggttgcagtgagctgagattgtaccactgcactccagcytgagtgacacagcgagactgtctcaaaaaaaaaataaataaaattctgtatgatagtataatgaatacatgttctcatacacttgtccaaacccatagaatgtacaacactgagagtgaagcctaatgtatagactttgggtgataatggtgtgtcaatgtaggcttatcaattgtaacaacagtaattgtaacttatcaattgtaggcttatcaattttaacaacaacaattgata

SEQ ID NO: 869814 - DNA, 673 bp, Homo sapiens
gttccttgagaaatgggcaaaaggaaaattgtgctctatgtaagatttggattttagaaaggaactcaaatacatatggctgtgtgtgtgtgtgtgtgtgtgtgtgaatgtgtgtgtttgtctctctccctttctctctctctcttttaacctcctctctccctcctcctcattacttcaatttgcttttgccccttttaagaaatgactttaattttcttgcasatgacaggtgagccccacctcagactctgtttggaggaaatggaggtataaatagataagtccgcaataataggcgacctcaagcaagaccctttccttctatttgtgctagaaaaattgtgcagcaggtttcaggacttcctcccccattgcacatctgccgtcttgaatgccttctcactatggccttctcctggggttcttttctctgtttctttctagcatgtgttaccaactgcagtttgtaattacttgtatgttaacttgcttaattccgaatcctttgagcatcactgcaatgggagaaatcccatcaaccacaatccatgttgtaacctctcaagactctgctgagaaccaaccttaaccaaacctaggacaaaactcatccagagaagctctctgtccacttaagcagcccctctgctgccctcccggggtcctgatg

SEQ ID NO: 869815 - DNA, 620 bp, Homo sapiens
ttctagcatcctctgtgggcctacgtatttagtgagcatctattttgtgcccaagattgtgccaagtgtagggagagaaatgaaggaagcatgggatatgttcctctctctcatatagacagggatgacttaaacatgtgaacaactaaattaaaaaatatacacacataacaaaggctagcctgggaagcacagcctattacagtttctttactttccagaaatataaaccaattctggatagctttaacaaaaaggcagggtgtttattcactgtcaggattctgggcttgttttcatgttaaatcacagacggggcagggaatctggagtctgagactcaatactctcaggactttctgtctttacctccctgactcacttccctcagcattcgcttctctacaaggctgacacctcatcccaggtcttctgagcttgccttgccagaggaaagaagcttttcccaccarctccagtcagaagttccttaggaataactctgactggctcagctgattccttggaccaatcactgtggtctccagaaggactctgattgattggctcagctgacctacttggaccaatcaatatggccttccaaaggactaactgtg

SEQ ID NO: 869816 - DNA, 575 bp, Homo sapiens
aacaaaacattttcgtggaccccacgatgttttgtgggctacagggactgcacatgctctgcatgggtaagttggccttacataaaggataatttagtaaccatgatccaagctaattggttagtatgtaaatcaaaagactttgatagatctaaattaaaataaaggtttgattataatttactggatcattaatacattatttaaatgaaattcttacatttcagatgtttctttcaatttttgattgctatatamataaagacttatgaaaaagttctattttaaacatagaatttgagaaagaaaatttcaagcttactttgcatattataaggataagtgagaattgtcacttctgtctagaagaatggggtattttgattagttgatcaaagcatgttggccttggagatatagtcactaaaaggctgagattgtttgtgcctttcagtatggacttggaatcatataagaacctgggtttgggcatttgccatatctggtgtcaaatctccatccttgcttagtagacaatatgcccagtggctgaacatgcatcctttaaaatgtca

SEQ ID NO: 869817 - DNA, 569 bp, Homo sapiens
ctatgtttcctttcagaaaagaggaggtggaatgtagctactaggaagagggatgaagggatgagtaaggccggcatcttcagctggcagagctaaaaataccacagagttaacataatacatgaaaacaccacagtccttgagtcacaatgaggaaaggtgtgaggacctgacagctgggcctaaagttgataacaggaaaaagcaacacttgggtgcatcagtggcaggtgctctgaagtaaaacaagaataagcattttctattttttaaaaattttattctaatgaacaagggtgagactttgtgattgcttccctaacatgagttcagaactgtgggatgaagattatataggttccctattcttagatgatgacttggtctgtcactctgcaggatgtttagggttaactgtggattaaatcagaatttcactgtagttcaaatctgaaaacsctggtgactggaatacctaagtttgtggtgatcctgctcctggcccatggtggcagtggtcatgaactggagaaaatggagtctctctctctctttttttttttcctgac

SEQ ID NO: 869818 - DNA, 640 bp, Homo sapiens
ccactcttcttatctttcaaataccaacatcttggttttatttagtatgacaattgcccatctaataaaatccagtgtcctattctccatgccagtacagaggcataatgtggcactcttccagccaatgagttacaagggaaacaccattgaatatttcttccagaaattttgctttccttgtaataagggtcacctctytctctctgcagtattgctttagagtctagatgaagtataatcaccttatgactgagaatgataggaatgaatacatcaaaatttctgcattaaggataagaagtaaaaataagcaaagagccttggtcactgatgacattgtttagttgctgtattgtatcaatttaaggcttgcctgtggtctccctgtacttgtgaaataaatactacatacttaagtcattatagtaggatttttagttgctggttgccaaatgaaatcttgcttactagcctacatgagagcaagaaccttctctatcttgtttacccctttgcttctgaagcccaggacagaggagaacatacattaggtacttaattaatgttggttaaaattctctagagatgttcacttttgatctatatttaaatgataagtcaaaattaactagtttaa

SEQ ID NO: 869819 - DNA, 617 bp, Homo sapiens
tgagtcccttgattgtattttttttatttcattcattgaattatttagctctaagatttctgtttagttttttttttatggcaagtctttaatttctcattcaaattatgaattgttttcctgatttcatggaattgtttatcggtattctcttatatctcattgagtttctttaagattatcatcttaaattatttttctggcatttcatatactgctttatgattgaggtctgttactagagaattagtgttttcctttgaaggtgtcatgtttccttgatttttcatgttaagggtgtcctacattaatttctatgcatctgttggaaaaatcccctcttccaattttatggagagratttcatagggaaagacttactcatctaaataggtcttggggtgtctatttggtgggatgcattggctttgcttccaggtggatgcagtagtgtagtctatctctctctctgtgtatgtgtgtgtgtgtgtttgtgtgtgtgtttaaatctgtaatacacattagtggcatttgagagtttctcagtggaatagagtgacagagtttgtggcagtagtggtatggccttgctgggggtaggctcactgggttatttc

SEQ ID NO: 869820 - DNA, 587 bp, Homo sapiens
caacattgcataagtctgactttccactcagcatcagacatcattagactcatctacatcattagatcactcctactcacattccactggccagaatccagtcacagggccacactacaactgcaaaggaggctgggaaatgtaatctttctccaggtcccagaactgggcactkgcacggccctcacagagactcctacattgatgctacttctgcctccacagtgttcttcacactctaggagactcacagagggatttccctttgctctttggcactacatggctgatagctgtagtctgggggaagatggtggcgttcacagggcagatggtggcattcacgagggttaggctgctgaccaggcctagagtaggatgggttcaggagaagccagacattgtactaaggtcccaaagtcttgatatgagcccctcacatggacactgggtggcacagccctatagagtatctctctgctcaccttttgagaagacaatgtggagagaaaatttactttataatttttctaggaaggtagcattttgtgggttgttcttcctcaaaaccagatgttgactaggac

SEQ ID NO: 869821 - DNA, 680 bp, Homo sapiens
cgagagtttgagtttgcgtgtgttaggtttggaaggcctgggaaatggtcaagtggagatgtcaggtgggcacattggtatgagtctggatcctagaatcactgagtcctgttggttttatctctaaagcatttctttcctatccccttttcctactcacgaacatcaccctaatttggggtctcagtaacctggacaatgaaaaaatctcacaaaaaagaactctcaatctctcggagcctcagtttttacattggtaaatggagataatgatagcactcactccatactctaataagatgaagtataatgaaataacacaggtattgcacccaccacagtggctggcacatagtagatgctcaattgatgatggtcatgttatttgggtctttkttcaggcttctcacttttaggtaaagacaaaggtttagcataggacttgacacatagtaagcactatgtaaaaattgttctactgctaccaagactcggtattgtattgtggtctgagaccatttgtgttcaaattccattttacaattttaccaccaattagctgtttggcaagttacttcatctctacgtacctcagcctcctcattgataaaacaggagtaataacaatccccactttcagggtgtggtaggcagaataacagccacccaagaaggtccat

SEQ ID NO: 869822 - DNA, 587 bp, Homo sapiens
caacattgcataagtctgactttccactcagcatcagacatcattagactcatctacatcattagatcactcctactcacattccactggccagaatccagtcacagggccacactacaactgcaaaggaggctgggaaatgtaatctttctccaggtcccagaactgggcacttgcacggccctcacagagactcctacattgatgctacttctgcctccacagtgttcttcacactctaggagactcacagagggatttccctttgctctttggcactacatggctgatagctgtagtctgggggaagatggtggcgttcacagggcagatggtggcattcacgagggttaggctgctgaccaggcctagagtaggatgggttcaggagaagccagacattgtactaaggtccyaaagtcttgatatgagcccctcacatggacactgggtggcacagccctatagagtatctctctgctcaccttttgagaagacaatgtggagagaaaatttactttataatttttctaggaaggtagcattttgtgggttgttcttcctcaaaaccagatgttgactaggac

SEQ ID NO: 869823 - DNA, 650 bp, Homo sapiens
attggtatgtattttcttgtgggtaattgagtgtagatattagacaaaatgcaatatataccattatttttagcagtatactttttaaggttagaggtctcaagtaggcatattttgtttagccttcacagtgttttttaaacatttaaattcattgccgatatttaaatattaggatatttattataaaaattcagactttagaccatttaaaattggaagaactaccaacattgagacccggttcctgcaaggcaacaatcacagctgaraagtcaccacttgtttagattggtgatacactgtcatttcctctgcccatctacctttccactctgacacttatttacattattcttttggctcttgtaggcatttgagtttgtagcctctccttaaagtttagattaattctcatttgtgtattcttcatttttgggaattcagcatgttatctctaagacagctactgttagctacacattgaaaaggggttgggtgggtatcttagactttctcatgtgtttctctgactggagagaagatagctcttgttcttcaaatatttaactaaaggatttgctgtgggtgtctgctgttggagccgtgggtgttaagagacttttgattatgcaggtttgaatcctggc

SEQ ID NO: 869824 - DNA, 567 bp, Homo sapiens
gccttaccccatttaccctgatgtgattattaggcattgcatgcctatatcaaaatatctcatgtgacccacaaatatatacacctactgtgtacccacaaaaattaaaaattaaataaacaaagtggctttaatgttaaagtctgatggagccaccaagacccagtgctgcccacccattgttcagaygaggcagctgaggctcacagaagcagggagcacttccccagatcatgtggggacacatccaagaactggttatctggcttcctttccccagctccttctgcactgctaaaacctaagacccgtcgtggtttgaggtgtcaggaggctctgttttcttgtggtctttagatgaataaaaattagacgcagctgttatggtgccattagttgacaaacggactcacctgctgaggatgcatgggaaagaccctgagggaagggctgcaataaagaaccactgcagctaggccacagtgtcccccgcaaggagaaatgaaacccagcacgggtacaggtggctctgccagggctctgaggagcctggcacatgatgggtgc

SEQ ID NO: 869825 - DNA, 567 bp, Homo sapiens
gccttaccccatttaccctgatgtgattattaggcattgcatgcctatatcaaaatatctcatgtgacccacaaatatatacacctactgtgtacccacaaaaattaaaaattaaataaacaaagtggctttaatgttaaagtctgatggagccaccaagacccagtgctgcccacccattgttcagatgaggcagctgaggctcacagaagcagggagcacttccccagatcatgtggggacacatccaagaactggttatctggcttcctttccccagctccttctgcactgctaaaacctaagacccgtcgtggtttgaggtgtcaggaggctctgttttcttgtggtctttagatgaataaaaattagacgcagctgttatggtgccattagttgacaaayggactcacctgctgaggatgcatgggaaagaccctgagggaagggctgcaataaagaaccactgcagctaggccacagtgtcccccgcaaggagaaatgaaacccagcacgggtacaggtggctctgccagggctctgaggagcctggcacatgatgggtgc

SEQ ID NO: 869826 - DNA, 511 bp, Homo sapiens
gatgtaatttttaactagcctttagtttttttattttgctaaatgtatttatattcattgtgaatctttaaaatgttatttcattaatcatttatttatgttacattatgttataaatcctttgcagtaaaaaaggataatgtaacttgtacctactaccagatagtaccattgaatttctccccaaaatatacctacaaatgacttaattgttatataaataattaattaaattttaaatcattgatcttttaattttttatattatacggaaaatagaattttacatatttatttgagttgttctaataatatctggaaaagttttaggggatttttatagcctcccattatttatatataaaygcaaaggtaacggaaagatttggtttgtcagagtcaaggaagagtggaacacaaaggttttctaaaatatatttctcatgtaagtttaaaaccatatttccactgaaaattgtgttagtctacataactctttagctttcctcac

SEQ ID NO: 869827 - DNA, 602 bp, Homo sapiens
ggtaagtcccttccacctatgagcctattaaattttaaaaagttagttacttctggccaggcgcggtggctcatgcctgtaatcccagcactttgggaggccaaggtgggtggatcacgaggtcaggagattgagaccatcctggttaacacggtgaaacctcatctttactaaaaataccaaaaaattagccaggcattgtagtgggtgcctgtagtcccagctacttgggaggctgaggcaggagaatggcatgaacccaggaggtggagcttgcagtgggccgagatcacaccactacactscagcctgggcaacagagcgagactctgtctaaaaaaaaaaaaaattagttacttccaagatacaatgggggtacaggcatttggtaaatactcttattccaaatgggagaaattggccaaaacaaaggggttacaagccccatgcaagttcagaacccaacagggcagtcattaaatcttaaagctccaaaatgatctcctttgactccatgtcacacatctagggcacaatgatgcaagagatttgtgcccaaggctttgggcagctccactcctgtggctctgcaggtacagtcc

SEQ ID NO: 869828 - DNA, 598 bp, Homo sapiens
tatgatttttaatagattttattttttagaatagtttcagaatcacagtaaaattgaggagaaagcacagagatttcccatatcttgcctgctcccgcatacatgcatagccttccccattatcaacatctcccatcaggatggtacatttgttacaattgacaaaccagattgacacatstttatcactcaggatccacagtttacatcaggtttcacatttagtgttgaactttctgtgggtttggatgaatgtaaaatgatacataaccaccactccactatcataaaaagtagtcttgctgccctaaaaatcttctgtgctctgcctgttcattcatcctttcccagtaatccctggatccctagaaaccaatagtctctttactacttccacaattttgtctgcttcagatcatatagttggaattatacattttgtagccttttcagagtagcttctttaactcagtaatatgcatttaagtttcctgtacttgtttgtattgcttgatgggttatttctttttagcactgaacaataattgattgtctcaatacaccatagtttatacatttgcctactgaaggacatctt

SEQ ID NO: 869829 - DNA, 598 bp, Homo sapiens
tatgatttttaatagattttattttttagaatagtttcagaatcacagtaaaattgaggagaaagcacagagatttcccatatcttgcctgctcccgcatacatgcatagccttccccattatcaacatctcccatcaggatggtacatttgttacaattgacaaaccagattgacacatctttatcactcaggatccacagtttacatcaggtttcacatttagtgttgaactttctgtgggtttggatgaatgtaaaatgatacataaccaccactccactatcmtaaaaagtagtcttgctgccctaaaaatcttctgtgctctgcctgttcattcatcctttcccagtaatccctggatccctagaaaccaatagtctctttactacttccacaattttgtctgcttcagatcatatagttggaattatacattttgtagccttttcagagtagcttctttaactcagtaatatgcatttaagtttcctgtacttgtttgtattgcttgatgggttatttctttttagcactgaacaataattgattgtctcaatacaccatagtttatacatttgcctactgaaggacatctt

SEQ ID NO: 869830 - DNA, 659 bp, Homo sapiens
ttggctcctgtgaacagggatgtgataaacatctaggtgcagacatatttttatttagtgattttatttcctttggataaattctcaatagtgtgattgctagattgtaaggtatttccattgtagtttattgaggaacccctttactcttccctttgtggccatactagtttacattaccaccaactgtctgtaagaattctctgtagtctgcatccttgcaagcatttatagtttgtctttttttatgatagccattctaactggggtgagaggatacctcattgtggtttttatttgcatatctcttttaattagtgatgttgacaattttttttcatatatttgttagccaattgtatgtcttcttttgagcaatgtctgttcagactatttgcccattcttttaaaaattaaattgctgatctttttgctgttgaactgtttgagttccttgtatactctgaatattaatctkctgttgaatgagtagcttggaaatattttctcacattctgtatactggctcttcaccctgttgattatttctattgccatacagagcattttagttggttattatctcatttattcatttttgcttttgttgcctgtttttttaaggtcttactcataaaatctttttgcagaccaatgtc

SEQ ID NO: 869831 - DNA, 644 bp, Homo sapiens
gtcaaagaccaaaggtagataaatccatgaagttgctgaaaaatcagtgcaaaatggctgaaaattccaaaagccagaatgcctcttctcctccaaagaatcacaactcctcgccagcaagtgaacaaaactggacaaagaataagtttgacaaattgacagaagtaggcttcagaagttgggtaataacaaactcctccgagctaaaggagcatgttctaatctgtggcaaagaaggtaagaccttgaaaaaaggttagaggaattgctaactagaatagccagtttacagaacataaatggccaratggagctgaaaaacacaacatgagaactttgtgaagcatacacaagtatcaatagctgaatcaatcaagtggcagaaaggatatcagagattgaagatcaacaatgaaataaagcatgaagacaagattagagataatagaataaacaagaattaacaaatcctccaagaaatgtgggactatgtgaaaagaccaaacctacatttgattggtgcacctgaaagtgattgggagaatggaaccaagttggaaaacactcttcaggatattatccaggagaacttccccaatctagcaagagaggccaacattcaaattcgggaaatacagagaaca

SEQ ID NO: 869832 - DNA, 644 bp, Homo sapiens
gtcaaagaccaaaggtagataaatccatgaagttgctgaaaaatcagtgcaaaatggctgaaaattccaaaagccagaatgcctcttctcctccaaagaatcacaactcctcgccagcaagtgaacaaaactggacaaagaataagtttgacaaattgacagaagtaggcttcagaagttgggtaataacaaactcctccgagctaaaggagcatgttctaatctgtggcaaagaaggtaagaccttgaaaaaaggttagaggaattgctaactagaatagccagtttacagaacataaatggccaaatggagctgaaaaacacarcatgagaactttgtgaagcatacacaagtatcaatagctgaatcaatcaagtggcagaaaggatatcagagattgaagatcaacaatgaaataaagcatgaagacaagattagagataatagaataaacaagaattaacaaatcctccaagaaatgtgggactatgtgaaaagaccaaacctacatttgattggtgcacctgaaagtgattgggagaatggaaccaagttggaaaacactcttcaggatattatccaggagaacttccccaatctagcaagagaggccaacattcaaattcgggaaatacagagaaca

SEQ ID NO: 869833 - DNA, 644 bp, Homo sapiens
gtcaaagaccaaaggtagataaatccatgaagttgctgaaaaatcagtgcaaaatggctgaaaattccaaaagccagaatgcctcttctcctccaaagaatcacaactcctcgccagcaagtgaacaaaactggacaaagaataagtttgacaaattgacagaagtaggcttcagaagttgggtaataacaaactcctccgagctaaaggagcatgttctaatctgtggcaaagaaggtaagaccttgaaaaaaggttagaggaattgctaactagaatagccagtttacagaacataaatggccaaatggagctgaaaaacacaacatgagaactttgtgaagcatacacaagtatcaatagctgaatcaatyaagtggcagaaaggatatcagagattgaagatcaacaatgaaataaagcatgaagacaagattagagataatagaataaacaagaattaacaaatcctccaagaaatgtgggactatgtgaaaagaccaaacctacatttgattggtgcacctgaaagtgattgggagaatggaaccaagttggaaaacactcttcaggatattatccaggagaacttccccaatctagcaagagaggccaacattcaaattcgggaaatacagagaaca

SEQ ID NO: 869834 - DNA, 587 bp, Homo sapiens
agagagaaaaaaaacaacaaagaaataacaaaatggagaacaatcttggtaaactgatataggcaatattactctgaagtctattgtcagtaggcaattagaaggtgatttatgtctataaatagggtcttgttattgtcttctgaagtttaagttgtctagtttgcatccacagggctttaatagaaatcacagcttaatatttagtaatttcaaattggaaacatgagagaaaaaagaaaaataaagagggaaaacaattaaaaacattattttggagacttgtagcaagaaataattttaaaatttagtccaaattgtagaaaataataaaaatggataaacctcagggaagaatagaatagaacaacaggcatactatagtttataaamaaataatttttctctcttcaattctccagttttattaaagacaaaattatagtaggaccaatttatttgtaaaataacttttagtactattacacttggtttgattatttgcataaagtgcaacaagaataatcatttggcatataggctgtctctctttttttgtaaaattggctttgctggaatctttttca

SEQ ID NO: 869835 - DNA, 583 bp, Homo sapiens
agttaggaagatagcagtgtatgtaaggcacattacctgcagtccaataaagaagccaggccgggcgcggtggctcacacctgtaatcccagcactttgggaggccgaggctggcagatcacgaggttaggagttcgagaccagcctggccagtatgatgaaaccctgtctctactaaaaatacacaaattatccgggcgtggtggcacgcgcctgtagttccagctacttaggaggctgaggcagaagagtcacttgtgccygggaggcagaggttgaagtgagccgagatcccaccactccactccaggctgggtgacagagcgagacgccatatcaaaaaaaaaaaaaaaaaaaaaagccaggggaaaatgtttgaataaggttaacatcatcgaaaccattgctaaattgattaatcatatctacaagtgatgtttaaaggaatcttttcactaagttaaattgttaacattgaaagaatattaacctcaacaatcgcattacaacaattttgtaaagacttgtgtgtctgcagttgaatttagttgcatttctgtgcctactttgtattcatgaggaa

SEQ ID NO: 869836 - DNA, 583 bp, Homo sapiens
agttaggaagatagcagtgtatgtaaggcacattacctgcagtccaataaagaagccaggccgggcgcggtggctcacacctgtaatcccagcactttgggaggccgaggctggcagatcacgaggttaggagttcgagaccagcctggccagtatgatgaaaccctgtctctactaaaaatacacaaattatccgggcgtggtggcacgcgcctgtagttccagctacttaggaggctgaggcagaagagtcacttgtgcctgggaggcagaggttgaagtgagccgagatcccaccactccactccaggctgggtgacagagcgagacgccatwtcaaaaaaaaaaaaaaaaaaaaaagccaggggaaaatgtttgaataaggttaacatcatcgaaaccattgctaaattgattaatcatatctacaagtgatgtttaaaggaatcttttcactaagttaaattgttaacattgaaagaatattaacctcaacaatcgcattacaacaattttgtaaagacttgtgtgtctgcagttgaatttagttgcatttctgtgcctactttgtattcatgaggaa

SEQ ID NO: 869837 - DNA, 589 bp, Homo sapiens
tgggcgtggctgctcccaaggtctctgatgtgccctggagtcattttccgcattgtcttggcaattaacatttgtctcctcattacttactcaaatttctgctgcctgcttgaatatccccccagaaaatgggtttttctttcctactgcattgccaggctgcaaatctttcacacttttatgytctgcttcctcttgtacactttgctgcttagaaatatcttccaccagataccctaaatcatctctctcaagttcaaagttccacagatctctagggcagaggcaaaattctgccagtctctttgctacagaataacaagaatcacatttgctctagttcccaaaaagtttctcatctttatctgataccacttcagcctggactttattgtccatatcagtatcagtgttttgataaaagccattcaacaagtctcttggaagtaccaaactttcccacatcttcctgtcttctgagccctccaattctctaggaagttcaaactttcccacattttcttgtcttcttctgagtcctccaaactgttccaacttctgcccattacccagttccaaagctgcttcc

SEQ ID NO: 869838 - DNA, 553 bp, Homo sapiens
ctctttgctacagaataacaagaatcacatttgctctagttcccaaaaagtttctcatctttatctgataccacttcagcctggactttattgtccatatcagtatcagtgttttgataaaagccattcaacaagtctcttggaagtaccaaactttcccacatcttcctgtcttctgagccctccaattctctaggaagttcaaactttcccacattttcttgtcttcttctgagtcctccaaactgttccaacttctgcccattacccagttccaaagctgcttccccattatcaggtatcctgtagcaatgcccctcagtaccaatttactgtattattccattctcctgctgctaggaagaaacactgaagactgggtaatttataaagaaaaagaagtttaatggastcacaatttcaaatggcaagggaggcctcacaatcatggtgaaacgcagaggagcaaaggtacatcttacatggcagcaggcagaagagtgtgtacaggagaactgcactttataaaataatcagatcttgtgagacttat

SEQ ID NO: 869839 - DNA, 698 bp, Homo sapiens
ttatgatgtatttctgtaaagccacactgtgtgtacctgtctttcctgtagaaattatgatgtgtttctgtaaagccacactgtgtgtacctgcctttcctgtctttctttttacctcctccactgcctctgcctctactaccctagagaaagcaagaacagtgcctccccttcctcctcctctacctrttcaatgtgaagagatgaggatgatgaaaagcgttatgatgacccacttccacttaatgaatagtaaacacatttccttgtgattttctaaatgtcattttctcctgcttattttatagaaagaatacagtttataatacatacagcatgcaaaatatatgttgactgtttatgctattggtaagaattctggccaactattagtgctaaaaaagcacttgataaaattcaacatcccttcataataaaagccctcaaaaatctggggatagaaggaacatacctacccaaatatatctacagattcaagttaagtttttggggaaccaaaagttacagacagattgtcaactgtttggggggtcagccaccctaaatcccatgttattcaaaggtcaactgtacaatacagtattattaactacaggcacaatgttgtacagcggatctctagagcttactcatcttgtataaatgaaactttttatacccattgactgggaactccc

SEQ ID NO: 869840 - DNA, 559 bp, Homo sapiens
aaatgaatgtactgaagcattggaacaggcttctggatgatctccctgttgaactgacagatttaaacttaaaagattcagttttgactcccaataacctggcttgaattttttgttagaggaatcttcacctttaataacacttacgggactgtgaaatggaaaaaatgtaacagggatcagtcatttttaatcctgtatgtagacakttttatcatatcatggtagatatgtcttttatgaataataaagagatattaattcaagaatttaattctaaagcctgggcaaaattggagtgagttattgaggattgaaacattttgagaaatgtataaaggattttttagatggtaggatagaaatctcagagaaagaaagattttgtttttgttgttgattgccagaaaaaaagaaagctcctcatagaaataacctttttagacacgtaaatattcttagccactgcctttttcttgtgaggaagccaagccctcataattggccaaaataaattatttttgtctctcatgtgggtatacttgtcccttacctccac

SEQ ID NO: 869841 - DNA, 571 bp, Homo sapiens
tgctaccgaaatctgactccagtcagctcaggcatctacagaggataatgtgagtgcagggccaggcagacttcagtcccttccacagaataaaacagtggctgaaaccagccagaagagggctaaacatctacaatttttgatatctaaaaaattgattgcaaaatcacagtatgggagagactgagaaagattgaaattgaccacaagttcaatatgagctaggaggctactgaaaagccaacactctggggccatattaactaaggcctaatgcccacaataaagaaggggatggtcttcctatacagttttcagaactggactatgcctcagcagatggaaagaaacagagcatgtctagaggagagggctggaggacccacagtgaatgagctggagctgytcagcctggagaaggtagtttctgggatccctagtcactactccacagggtctgcaggcctgacccaggacagagtgagcaggaaggactgtgtcccagagcacagagctgggaccccagttgttggcaggagtcagagagcagtagattcctgctcagtcagag

SEQ ID NO: 869842 - DNA, 744 bp, Homo sapiens
gttttattctctcttggtgactgcttcttgcatagccaggactaacagagatggcctcatacaaggggaagacttctccaattaaatgacttaataatatattaattttttggctctctagtaaattctatatagatctactgtattttttaaaaattgacctacargattcagttttatgaatctattacagctgacttatctattcccttattgatgggtatttatcttgttttgattttcttgctattatgcaatatgcttcaatgaacacactcgtgcatgtcatattgtgcacatgagcaagagtaattctagttacaaacctagaatttaaattattggatcagaaagtataatacatgatcaattttcctatgtacaactgtatttcttaatataagaaaaatagatagaactaatttatatttccactggtagagtgtgaattattcttcctctctattcttgccaacacctaatattgtgagattgtttaatttcctgaggctctcatttaacgctttagtatacatttctcttattctaatgaactgaacatcttttcatatgtttactgaaatttctcagttcctatgatgtcccatgcactatgttatttatgaagacattttaaaatcagaatttataaacttaaattgtaatatgattcagtgtattgtacagaatgaaattaattttgcataaccacaggggaaccatcagccaccatctatttaaata

SEQ ID NO: 869843 - DNA, 648 bp, Homo sapiens
gtacagttgtgtgtctcatttcctctggaaaggctttttctttggcttgactactgcagctcacacttttgatttgactctgtctttcttttcaagattgaatgcaagaaacacatttttggaaagatatcttggaacctcttaccatgtaacaaagatgcctgtcctttctaatttttactttgcacttatctgaccttacaactagactgtgaactcttggaatcacggcactattttatacaattttgtatctcttacgtctaaaccaatgtttagataatcttagacattaaatacactttgaatgaatgaaaaacagtgtaaggtatgcaaaatattttttaaaacatggggcttagttttcacaaccagctggctactctcttctttaaaataaatcattttrgaagacatcatcatacaggcatttatcacttactggctctgtttaccaagcaggacactgattgcctgaaagaatgaacctaagacccagagttgccagtggaagtcttctaggcactaggagaacccaagttagctttgttattaataacaacagcaactatgggaatgagcataaaggaaattatataatactgtccattattttatattgttaaaaataagcagaagacaaaatcc

SEQ ID NO: 869844 - DNA, 613 bp, Homo sapiens
tgacagcatcttctttcttgatgtactttggacatgtatttataatatgaattacatataatatgaatatatgtctcataaatgattatgtcaaatttataaagatttgaaaaataaaattgttagagcataaggagaaagcataatttgtaagtgtctgcatctagttgtggtttttactaatttctcatattatctaatattacaccaatgacaatcagaagtcatctgacctaaatttttaatatctgatacttataatctaccttagaatatgtggaggtcacttctggatagtcatatctacycactgagttaaattgaggaatcctttgtttttctgcttacataacgaattatcttagcaattctagagaaaagtttatgtacttgaaattaggaagtggtcaagcccttattatagaatttttattacttataatattttacaaatgttaaaaatcggcacagtggttcatgcctgtaatcctagcagtttggaaggcagaggtgggaggatcgcttgagagcagcagtttgagaccagcctgggcaacaaagtgagactccatttctaccaaaaacaattaaaaattcactgagcatggtggtg

SEQ ID NO: 869845 - DNA, 613 bp, Homo sapiens
tgacagcatcttctttcttgatgtactttggacatgtatttataatatgaattacatataatatgaatatatgtctcataaatgattatgtcaaatttataaagatttgaaaaataaaattgttagagcataaggagaaagcataatttgtaagtgtctgcatctagttgtggtttttactaatttctcatattatctaatattacaccaatgacaatcagaagtcatctgacctaaatttttaatatctgatacttataatctaccttagaatatgtggaggtcacttctggatagtcatatctactcactgagttaaattgaggaatcctttgtttttctgcttacataacgaattatcttagcaattctagagaaaagtttatgtayttgaaattaggaagtggtcaagcccttattatagaatttttattacttataatattttacaaatgttaaaaatcggcacagtggttcatgcctgtaatcctagcagtttggaaggcagaggtgggaggatcgcttgagagcagcagtttgagaccagcctgggcaacaaagtgagactccatttctaccaaaaacaattaaaaattcactgagcatggtggtg

SEQ ID NO: 869846 - DNA, 593 bp, Homo sapiens
aaaatttgggtggggacagagagctaagccacatccctgataaaagttttctattatttacctgttatactttaggaaaattttcgcatacttttggaattagagcttcaagggctgaggtttgggaatgcaaactttcaaaaatttcgccaattgattctaacaaggagccaagcttaggagccattgttttaaggatcagatttatatcaagcttattttttaatatttaaaaaagtcttctggatacatagaagttttatatacttacggggtacatgagatgttttaatgcaagcrtgcaatgtgtaataatcacatcatggagaatgaggaattcatcccctgaagcattttcaaacatatttttcagttcagagctaagtggtaagcaatgagtgagtgtgtgcttgcgtgtggcaggcaggagggggcagtataggaaagaaacaatcgaattcttgtggaaaaaggactgctttatttctttgcaatcgttttgcatgtgggtttttattattacggagaccaacttcaaaggggaataaaaaatagatatagactagtccaggagaataagaaagaaaaaggaa

SEQ ID NO: 869847 - DNA, 661 bp, Homo sapiens
ctcccacctcagcctcccaagtagctgagattacaagtgcatgccacaacacctggataatttttgtatttttggtggagattgggtttcaccatgatgccctggctggtctcaaactcctgacctcaagtgatccgcccacctcagccttccaaagtgctggcattacaggtgtaagctaccatgtccagcttggaaaatttaaatttagttatgtggcttgcattatagttccattggacaacgctgacccataatgacaaagtctatatgataaaggcctgaarggacatacccgtagtgcaacaaagtggggcttcttaacttgctgtccactggaggaactatgggggtgctcgccaagcagaggaagagacacagttacagtaggggtctgtggaagagcaaaatttaagagaaacttaaatgatgtagtattttggtagaatcaagcaaaggagggagggctgtttatagaggaattaaacttaggcccaggctaagaagcagacatttattgtagctttgaaaactacaaagtaaagataaatatggcatgtatttaaaaaccctttatttgaaattcttaattaagttgaaaattgagactgtatttgtgggccaaagtgactcagtccagtcaaaggtggaatgctccact

SEQ ID NO: 869848 - DNA, 591 bp, Homo sapiens
ggttgaactaatttacattcccaccaacagtgtaaaagtgttcctttttctctgcagcctcaccagcatctgttgtttcttgactttttaataattgccattctgactggcatgagatggtatctcattgtggttttcatttgcatctctctgatgatcggtcatgttgagctttttttcatatgtttgttggccatgtaaatgtcttcttttgagaagtgtctgttcatatcctttgcccatgtttgatggggttgtttgtttcttataaatatgtttaagttccttttaaattawgaatattagacctttgtcagatgggtagttgtaaaaattttctgtcattctgtaggttgcctgttcgctctgatgatagtttcttttgctgtgcagaagtgctttagtttgattagatcccatttgtaaattctggcttttgtttcaattgcttttgccattttcatcatgaagtctttgcccatgcctatgtactgaatggtactgcctaggttttcttctagggtttttaatggttttgggttttatatttaagtctttaattcatcttgaattaatttttgtttaatgtgt

SEQ ID NO: 869849 - DNA, 660 bp, Homo sapiens
tttaaattaagaatattagacctttgtcagatgggtagttgtaaaaattttctgtcattctgtaggttgcctgttcgctctgatgatagtttcttttgctgtgcagaagtgctttagtttgattagatcccatttgtaaattctggcttttgtttcaattgcttttgccattttcatcatgaagtctttgcccatgcctatgtactgaatggtactgcctaggttttcttctagggtttttaatggttttgggttttatatttaagtctttaattcatcttgaattaatttttgtttaatgtgtaaggaaggggtttactttcagttgtttgcacatggctagccagttttcccagcaccatttgttgaataggagatcctttccccagcrcttcgatttgtcagttttgtcaaagatcagatgattatagatgtgtggtgttatttttgaggtctctgttctgctccatttgtctatatgtctgttttcataccagtaccatgctgttttggttactgtcgccttgtagtgtagtttgaagtcaggtagcgtgatgcctccagctttgttctttttgcttaggattgttttgtctatatggggtcttctttgattccatatgaaatttaaagtagttttttttctaattctgtgtagaa

SEQ ID NO: 869850 - DNA, 654 bp, Homo sapiens
aaacccaattttcagagtaaataccattagaaataagatttctttttactgttgctttattttcaaagtaccagaaattttcattttctttagtactcaaaaatttgtgatcatttacttacttaattttccagtttctgtcacaacatttaacaatgccaaatctccctgttctgatataaactgccttcctactctttttgagaactccaggttaagacggtatcaaagttgctataatgaaaattcattgttatcaataatgataaaaatccaacacagttgcagaaaagaaagcagagctcatgatctctttttctataaccataagacctaatgtttattgctttaatataataattatacacatgattgaagtaataatatctttttcactgatttatttagttataaaacatttatgtgtgaggcactgtgggcaatgcaaagcttaataaaatatgacccctattcttggagatgaatcaggcatataarcaaatatgtactggacaaacagaaatgattcatttgagatacatcatgtttcccagacttgggtatacctaatccccatccaaggaacttgtttgcaaatgcagattcctgggcccaccttcctcagtaagccagaaatagggcctaggaattttc

SEQ ID NO: 869851 - DNA, 616 bp, Homo sapiens
ctataaatttccctcctaacactgctttagctgtgtcccaaatattctggtacattgcctctttgttctcattggtttcaaagaacttatttatttctgccttaatttcattatttacccaggagtcattatttaccaaggttgttcaatttccatgtagctgtgtggttttgagtgggtttcttaatcctgagttctaatttgattgcaccgtggtctcagagacagtttgttatgatttccattcttttgcatttgctgaggagtgttttayttccaattatgtggtcgattttagaataagtgccatgtggcactgagaagaatgtatattctgttgatctggggggagagttctttagatgtctattaggtccacttgatccagagttgagttcaagtcctgaatctccttgttgattttctgtcttgttgatctgtctaatattgacagcggagtgttaaagtctcctactattattgtgtgcgagtcaaagtctctttgtaggtctctaagaacttgctttatgaatctggctgctcctgtattgggtgtatatatatttaggagagttatgtcttcttgttgcattgatcctgttaccactatgtaatg

SEQ ID NO: 869852 - DNA, 616 bp, Homo sapiens
ctataaatttccctcctaacactgctttagctgtgtcccaaatattctggtacattgcctctttgttctcattggtttcaaagaacttatttatttctgccttaatttcattatttacccaggagtcattatttaccaaggttgttcaatttccatgtagctgtgtggttttgagtgggtttcttaatcctgagttctaatttgattgcaccgtggtctcagagacagtttgttatgatttccattcttttgcatttgctgaggagtgttttacttccaattatgtggtcgattttagaataagtgccatgtggcactgagaagaatgtatattctgttgatytggggggagagttctttagatgtctattaggtccacttgatccagagttgagttcaagtcctgaatctccttgttgattttctgtcttgttgatctgtctaatattgacagcggagtgttaaagtctcctactattattgtgtgcgagtcaaagtctctttgtaggtctctaagaacttgctttatgaatctggctgctcctgtattgggtgtatatatatttaggagagttatgtcttcttgttgcattgatcctgttaccactatgtaatg

SEQ ID NO: 869853 - DNA, 616 bp, Homo sapiens
ctataaatttccctcctaacactgctttagctgtgtcccaaatattctggtacattgcctctttgttctcattggtttcaaagaacttatttatttctgccttaatttcattatttacccaggagtcattatttaccaaggttgttcaatttccatgtagctgtgtggttttgagtgggtttcttaatcctgagttctaatttgattgcaccgtggtctcagagacagtttgttatgatttccattcttttgcatttgctgaggagtgttttacttccaattatgtggtcgattttagaataagtgccatgtggcactgagaagaatgtatattctgttgatctggggggagagttctttagaygtctattaggtccacttgatccagagttgagttcaagtcctgaatctccttgttgattttctgtcttgttgatctgtctaatattgacagcggagtgttaaagtctcctactattattgtgtgcgagtcaaagtctctttgtaggtctctaagaacttgctttatgaatctggctgctcctgtattgggtgtatatatatttaggagagttatgtcttcttgttgcattgatcctgttaccactatgtaatg

SEQ ID NO: 869854 - DNA, 636 bp, Homo sapiens
tacaggtgtgagccactgagcctggcctaaagtgttcccttttcaccacatccatgccaacatctattatttttttgatttttaaattatggccattctttcaggagtaaggtggtattgcactgtggttttgatttgcatttctctaataattagtgatgctgagcattttttcacatatttgttagccatttgtatgtcttgttttagagaatttattcacgtcctttacccagttttagatgaaattatttgttttgttcttgctgatttgtttgtgttccttgtaggttctggatattagtcctttgtcagatgcagagtttacagatattttctcccattctgtgggttgtctgttcactctgctgattatttctttggctgtgcagaagcttttcagytaattaggttccagcaatttgtttttgtttttgttgcatttgcttttgggctcttggtcatgaactcttcctaacccaacatctagaagagtttttctgatgttatcttctagaacttttattgtttcaggttgtagatttaggtatttgatccatattgagttgatttttgtataaaatgagagatgacaatccagtttcattattctacatgtggcttgccaattatctc

SEQ ID NO: 869855 - DNA, 636 bp, Homo sapiens
tgctgcacctatcaacccattatctaggtttaagccccacacgcattaggtatatgtcctaatgccctccctcccctcgacccccagctcccgactggcctggtgtgtgttgttcccctccctgtgtccatgtgttctcattgttcaactcccacttatgagtgagaacatgtggtgtttggtttcctgttcccgtgttagtttgctgaggatgatggcttccagcttcatccatgtccctgaaaaagaacrtgatgttattctgtttcatgattgcatagcataatatggtatatatgtaccacattttctctatccagtctcattgatgggcattttggttgattccatgtctttgctattgtaaatagtgctgcaatgaacatacatgttcatgtgtctttagagtagaatgatttatattcctttgggtatatacccagtaacgggattgctgggtcaaatggtatttctggttctagatccttgaggaatcaccacacagtcttccacaatggttgaactaatttacattcccaccagtgtaaaagtgtctctatttctccatagcctcaccagcatctattgtttcttgactttttaataatcactatcctgactggcatgaaatggtat

SEQ ID NO: 869856 - DNA, 597 bp, Homo sapiens
cccgtgttagtttgctgaggatgatggcttccagcttcatccatgtccctgaaaaagaacatgatgttattctgtttcatgattgcatagcataatatggtatatatgtaccacattttctctatccagtctcattgatgggcattttggttgattccatgtctttgctattgtaartagtgctgcaatgaacatacatgttcatgtgtctttagagtagaatgatttatattcctttgggtatatacccagtaacgggattgctgggtcaaatggtatttctggttctagatccttgaggaatcaccacacagtcttccacaatggttgaactaatttacattcccaccagtgtaaaagtgtctctatttctccatagcctcaccagcatctattgtttcttgactttttaataatcactatcctgactggcatgaaatggtatctaattgtggttttgatttgcagttctctaatgatcagtgatgtcgagcttttcttcatgttttttggccacataaatgtctttttttgagaagtgtctagtctgatcatatcctttgactactttttgatgcggttgtttttttcttgtaa

SEQ ID NO: 869857 - DNA, 597 bp, Homo sapiens
cccgtgttagtttgctgaggatgatggcttccagcttcatccatgtccctgaaaaagaacatgatgttattctgtttcatgattgcatagcataatatggtatatatgtaccacattttctctatccagtctcattgatgggcattttggttgattccatgtctttgctattgtaaatagtgctgcaatgaacatacatgttcatgtgtctttagagtagaatgatttatattcctttgggtatatacccagtaacgggattgctgggtcaaatggtatttctggttctagatccttraggaatcaccacacagtcttccacaatggttgaactaatttacattcccaccagtgtaaaagtgtctctatttctccatagcctcaccagcatctattgtttcttgactttttaataatcactatcctgactggcatgaaatggtatctaattgtggttttgatttgcagttctctaatgatcagtgatgtcgagcttttcttcatgttttttggccacataaatgtctttttttgagaagtgtctagtctgatcatatcctttgactactttttgatgcggttgtttttttcttgtaa

SEQ ID NO: 869858 - DNA, 597 bp, Homo sapiens
cccgtgttagtttgctgaggatgatggcttccagcttcatccatgtccctgaaaaagaacatgatgttattctgtttcatgattgcatagcataatatggtatatatgtaccacattttctctatccagtctcattgatgggcattttggttgattccatgtctttgctattgtaaatagtgctgcaatgaacatacatgttcatgtgtctttagagtagaatgatttatattcctttgggtatatacccagtaacgggattgctgggtcaaatggtatttctggttctagatccttgaggaatcaccacacagtcttccacaatggttgaactaatttacattcccaccagtgtaaaagtgtctctatttctccatagcctcaccagcatctattgtttcttgactttttaataatcactatcctgactggcatgaaatggtatctaattgtggttttgatttgcagttctctaatgatcagtgatgtcgagcttttyttcatgttttttggccacataaatgtctttttttgagaagtgtctagtctgatcatatcctttgactactttttgatgcggttgtttttttcttgtaa

SEQ ID NO: 869859 - DNA, 599 bp, Homo sapiens
aaagtaggaaatccattgataagcagagtgttaaataataaaatacaggcaaaaattctagactcttaacacattacggctggttactttggcaaacattagaaccgccaaagcacacacaactgcacaaagttggttggcaaacttttctgttaaatcgacactccaaagatcgtcattaatctcagtaagttattaactccaagaaatcatctgaacaatggtgaactataataatctgtacataccatatgtgcattaagcattaacacttcattcttgcctatttcctaatgtcaagaaagctcaaatgtacccagcacattgatctctcctgcagaaaaacatgttacatctcatccacaattacaacaactacctagcttgctatgttattgtcatcccaactactgggaaaggaaatgttataatccatggttctaacacacatgargtcaggtcattcggttgctctgggaactctatagagttgtgctccctaaatcttctgggctgtgccagccaacactagttgggaactcccctccaataaccagactacattatgctcctggcagggccccaggggctccagtgtc

SEQ ID NO: 869860 - DNA, 599 bp, Homo sapiens
aaagtaggaaatccattgataagcagagtgttaaataataaaatacaggcaaaaattctagactcttaacacattacggctggttactttggcaaacattagaaccgccaaagcacacacaactgcacaaagttggttggcaaacttttctgttaaatcgacactccaaagatcgtcattaatctcagtaagttattaactccaagaaatcatctgaacaatggtgaactataataatctgtacataccatatgtgcattaagcattaacacttcattcttgcctatttcctaatgtcaagaaagctcaaatgtacccagcacattgatctctcctgcagaaaaacatgttacatctcatccacaattacaacaactacctagcttgctatgttattgtcatcccaactactgggaaaggaaatgttataatccatggttctaacacacatgaggtcargtcattcggttgctctgggaactctatagagttgtgctccctaaatcttctgggctgtgccagccaacactagttgggaactcccctccaataaccagactacattatgctcctggcagggccccaggggctccagtgtc

SEQ ID NO: 869861 - DNA, 625 bp, Homo sapiens
aaactgaatgcctctaacagcaaccaagtcacctctcgaatgctttgctgcttagaaatttcttctgccagataccctaaatcatctctctcaaattcaaagttccacaaattacttgcaaactgccaccagtctctttgctaaaatataacaagagtcacctttgctccagttcccaacaggttccacatctccatctgagaccacctccacctggaccttattgtccatatcactatcaggctttgggtcaaagccattcaacaagtctctaggaagttccaaactttcctacatttccctgtcttcttctgagccttccaaactgttccaacctctgcctttacccagttccaaagtcacttccacattttcaggtatcttttcagcaacacaccactctgctggtaccratttactggattagtctgttttcatgtttctgataaagacatacctgagactgggcaatttacaaaagaaagagaggtttattggacttagagttccacatggctggggaggcctcacaatcatggcagaagatgaaagacatgtctcagatggcgacagcaagagagagaatgagagccaagcaaaaagagtttccccttatcaaaccatg

SEQ ID NO: 869862 - DNA, 605 bp, Homo sapiens
ggggccagatcccttatgaattactaatccctcatgaattagtaattacattctccattcaccttcaagtatcctgaggcaccttttgtcacctgctctctatacttggaatatctggctgtaatccaaacttctgcaatgtccaaacatctttcgggatatagttcaagtgttcctgtcttttgcatgatgctttcttcgaggttctcaaccagaagtaatccatatcctttttccaaacaattttaatttcatgcatttgattcatacttttttttccctctcaagtttgtgagcaaatatcactagaaagaagaytcttgaataggaactcttttctttctagtgatattttttttcatctctgtattccccatcaggcttacaacaatgcttttagaaaagcagagagatgaaaattatgcaatataaaaatggtgctttttctttgtgtaactaataactataattctgtaggaaattgtaattcatagtgatttttgcaattattgtcctaatacaatcttaacaacaaacctggaggaaggaattaatagcatggacatttggtagatgaagaaattggaggtcagagaggctggttg

SEQ ID NO: 869863 - DNA, 607 bp, Homo sapiens
ctccccagaaaaacaaagttggtaaaaaacaatgaaaaaaatccaataaattaaagtctctgtaaagtgtcctaagggaataaagcaaataaatatttactagagaaaatctactaaaacctattaagaacagccagtcagtagcatttgatccacaatcctccctctcgagaccatccccagctcagtttagaggagctccattatggatggatgaagctaaggaagaagtccctctcccttcatcttccaatcaatgcttacagtatctcaataggaggacaaggttctagcacttttcatctctttcaacyccaaattaaaaaaataatattcctgttgagtacagggaaaggctgaggatccctttcccccaccaagctcatcttcatagtacagagactccatcccaggcaggcaggccaagattacagggacctccagctgtccttgcttcgggtcatacattgggcagagattctacaatgaaagaggcatgcagagacaaccagaggcttattgcctaaattagtgactagagaggttgcctaaggggaaaaacagtgaataggaaaagagaggtctgtagctctacccaaatgaactg

SEQ ID NO: 869864 - DNA, 599 bp, Homo sapiens
tctcttgcagcttatattactaggtaaatgtatattaaactaataaatgatcaaacaagagaattacagtttgtgattgtttctataaaggatatgaactgtgtactgtcgtagaaagtaactgaaatatgtgtgcatatttggaagctgttttaaagagttgaagtttcgaaaataaaaataagctgtcargaagagttgggaaaagaaccaagcataaggcagagcaggtgcaaaggctctgagtaggaaaatacttggggtgttcaagaaggtgacagaaaatgatcattgctcatgaagctcagtgggtagcaaaacatgaagttggaaaggaaggcagaatttgggttatgtaggttcatgtagtctggtgaggaattttaacttatttacaagagcaattaagccactgaggttttaagtaagatgttattaaattaaaaattaatttaaaaaactgattctcttgtgtctacaacatattggaaaataagtaagaataaaactaggaaaaaacaaatcagatactggcaaagaaatctaggcaagaaatgatggtggcttggaaattctgtggtagtagtggagacaagtgg

SEQ ID NO: 869865 - DNA, 567 bp, Homo sapiens
attttaatgatggttgtaatagaagcagagttctcagaaataatgataatatgctatgctcaagtcccgtgttatctagtgaatgcatgtgaagagctttctggcccttccacattcttttgttaataaaaatatctagggaactwaatgaaactaataagtcttatatttattgttttttgtctttaaaaaaacagaattaattagaagaaactgagggataagacttaaggaaaacatatgaagataacaaagtaggaataaagaatccatgctagcaggtgaaagcgctcaaggagttaaaaataattacaagtgacaaatcttaaaggtgtggcctttcacccagggtttgagcctaattatattttgtaatctattttaataatgactaatccatgttttcaaaaatatcacaagtttttcctaaacatgcaaacctagttctagtgtggtttctaattcatctactaattaacagaaaatattgatataataaaacccaaaagctcatatcattcttagttataattgcctatcatatgaatacagttcaaatgtaatgga

SEQ ID NO: 869866 - DNA, 567 bp, Homo sapiens
attttaatgatggttgtaatagaagcagagttctcagaaataatgataatatgctatgctcaagtcccgtgttatctagtgaatgcatgtgaagagctttctggcccttccacattcttttgttaataaaaatatctagggaacttaatgaaactaataagtcttatatttattgttttttgtctttaaaaaaacagaattaattagaagaaactgagggataagacttaaggaaaacatatgaagataacaaagtaggaataaagaatccatgctagcaggtgaaagcgctcaaggagttaaaaataattacaagtgacaaatcttaaaggtgtggcctttcacccrgggtttgagcctaattatattttgtaatctattttaataatgactaatccatgttttcaaaaatatcacaagtttttcctaaacatgcaaacctagttctagtgtggtttctaattcatctactaattaacagaaaatattgatataataaaacccaaaagctcatatcattcttagttataattgcctatcatatgaatacagttcaaatgtaatgga

SEQ ID NO: 869867 - DNA, 625 bp, Homo sapiens
ttcttagttaactagtacttcatacctctcatttattagctctaggttgtagtttttgattatatgattaaagttttctttcccgcaagatcctcagctgcatcaggcagtaatcttgtttggttttgatccttattttatcccagttttcagtacataataaatatgaattaataaacgcttactctacttgacaatgaagatgaagggcatatgctcaaactgattcaccccaggtgcaggaatatgccttgatgaatagacttattctccccatcagcacacaatayctgtggagcacccaagtgcaaagctttgtgtaatacaaatttgtgctatagaaaacatcgctcatggggaagatattcagagacactatgccacacaactagaagtaacaaagaaatgagctctgttataaatgagattgatgtcgatcttttattatttcagataatagtaactaaactgtctgcaaggtttcattcaaatacctataaataaactaatattattacatttaacacagatttgagcttgctttctgtttaggaccacagagctagcgaggcacatgtcgacaacaaaactgccaataagaatccgcatgagatttgggtaatga

SEQ ID NO: 869868 - DNA, 607 bp, Homo sapiens
ccgcagccaacattacactgaacaggcaaaagctgaaagcatttcccatgataactggcacaagatcaggatgccctctctcatcactcccattcaacctagtattggaagttctggccagagtaatcaggcaagagaaaaaaaataaagggcattcaaatagaaagagaggaagtcaaactaccctgttcacagatgacatttcctatatctagaaaaccccatagtctcagctcaaaagcttcttaagctgataagcaccttcagcaaagttttgggatataaaatcaatatgcaaaaattactagcattcctatacaccaacaaccrtcaagtcaagagccaaatcacaaacgaactcccattcataattgtcacaaaaagaaaaaatacctatggatataattaacaaggtaagtgaaagatctgtacaatgagaactacaaaccactactcaaagaaatccactacacaaacaaatggaaaaatatttcatgcttatggataggaagaatcaatatcatgtaaatggccatactgtccatagcaatttagcgtttcaatgttattcccattaaactaccattgacattctccacagaattag

SEQ ID NO: 869869 - DNA, 607 bp, Homo sapiens
ccgcagccaacattacactgaacaggcaaaagctgaaagcatttcccatgataactggcacaagatcaggatgccctctctcatcactcccattcaacctagtattggaagttctggccagagtaatcaggcaagagaaaaaaaataaagggcattcaaatagaaagagaggaagtcaaactaccctgttcacagatgacatttcctatatctagaaaaccccatagtctcagctcaaaagcttcttaagctgataagcaccttcagcaaagttttgggatataaaatcaatatgcaaaaattactagcattcctatacaccaacaaccgtcaagtcaagagccaaatcacaaacgaactcccattcataattgtcacaaaaagaaaaaatacctrtggatataattaacaaggtaagtgaaagatctgtacaatgagaactacaaaccactactcaaagaaatccactacacaaacaaatggaaaaatatttcatgcttatggataggaagaatcaatatcatgtaaatggccatactgtccatagcaatttagcgtttcaatgttattcccattaaactaccattgacattctccacagaattag

SEQ ID NO: 869870 - DNA, 633 bp, Homo sapiens
cccttgttagctgtattcctcagtattttatcctttttgtagcaattgtgaatgagaattcattcatgatttgactctctgcttgcctgtttttagtgcataggaatgctagcaatttttgcatgtttattttgtatcctgagactttgctgaagttgcttattagcttaagaagcttttgggtggagataatggagttttctagatataggatcatgatatccgcaaaaataatttgatttcctctcttcttatttaaataccctttatttctttctcttgcctgattgccctggccagaacatccaatactgtgttgaataggagtggtaagagaggacacccttttctggtgctrgttttcaaggggaatgctttcagcttttgcctattcagtgtgatattggctgtgggttggttatatatggctcttattattttaaggtatgttccttcagttcctagcttattgagagtttttaacatgacaggatgttgaattttattgaaggccttgtctgcatctaatgagataatcatgtggtttttgtctttagttctgtttatttgatcaatgacattcagtgtaaattgtaccagctcttgtttgtacctctggtagaattcagctgt

SEQ ID NO: 869871 - DNA, 633 bp, Homo sapiens
cccttgttagctgtattcctcagtattttatcctttttgtagcaattgtgaatgagaattcattcatgatttgactctctgcttgcctgtttttagtgcataggaatgctagcaatttttgcatgtttattttgtatcctgagactttgctgaagttgcttattagcttaagaagcttttgggtggagataatggagttttctagatataggatcatgatatccgcaaaaataatttgatttcctctcttcttatttaaataccctttatttctttctcttgcctgattgccctggccagaacatccaatactgtgttgaataggagtggtaagagaggacacccttttctggtgctggttttcaaggggaatgctttcagcttttgcctattcagtgtgatattggctgtgggttggttatatatggctyttattattttaaggtatgttccttcagttcctagcttattgagagtttttaacatgacaggatgttgaattttattgaaggccttgtctgcatctaatgagataatcatgtggtttttgtctttagttctgtttatttgatcaatgacattcagtgtaaattgtaccagctcttgtttgtacctctggtagaattcagctgt

SEQ ID NO: 869872 - DNA, 655 bp, Homo sapiens
aaaattgataccctaacatcacaattgaaagaactagagaatcaagagcaaacacattcaaaagctagcagaaggcaagaaataactaagatcagagcagaactgaaggagatagagacacaaaaaacccttcaaaaaaatcaatgaatccaggagctggttttttgaaaagatcaacaaattgatagaccactagcaagactaatagagaataatcaaatagatgcaataaaaaatgataaagsggatatcaccaccgatcccacagaaatacaaactaccatcagagaatactataaacatctctatgcaaataaacttgaaaatctagaagaaatggataaattccttgacacatacaccctcccaagactaaaccaggaagaagttgaatctctgaatagaccaataacaggcactgaaattgagtcaataattaatagcttaccaaccaaaaaaagtccaggaccagatggattcacagctgaattctactagaggtacaaggaggagcgggtaccattccttctgaaactattccaattaatagaaaaagagggaattctccctaactcattttgtgaggacagcatcatcacgataccaaagcctggcagagacacaacaaaaaaagagaattttagaccaatatccc

SEQ ID NO: 869873 - DNA, 619 bp, Homo sapiens
gcctgttcactctgacggtaatttcttttgctgtgcagaagctctttagtttaattagatcccatttgtcaattttggcttttgttgccattgcttttggtgttttagacatgaagtccttgcccatgcctatgtcctgaatggtattgcctaggttttcttctagggtttttatggttttaggtctaacatttaagtccttaatccatcttgattaatttttgtataaggtgtaaggaagggatccagtttcagctttctacatatggctagccagttttcccagcaccatttattaaatagggaatcgtttccccatttcttctttttgtcaggtttgtcaaagatcagatagttgtagatgtgtggtattatttctgagggttctattctgttccattgttctatatctctgttttggtaccaggaccatgctgctttggttactgtagccttgtagtatagtttgaagttasgtagcatgatgcctccagctttgttcttttggcttaggattgacttgacaatgtgggctctttttttgttccatatgaactttaaagtagttttttccaattctgtgaagaaagtcattggtagcttgatggggatggcattg

SEQ ID NO: 869874 - DNA, 605 bp, Homo sapiens
tgctacacatctttgtcaattcttagcattatcaggctttacactttttagcaattctatggctatggaatctgaaatttcatcatggcctatatttgcaaatctttcctgacaagtgagggtgaatgttttttatatattaattggtcattttggtttacgcttctaaactgtttatttctttggccaatattttaattgaattatttctgttgaacttattttaggrataattttgaacaatttgcacactaattctttgttatctaaatgcaatacaactgacatatttgcaggttttatataattttttttactattttcattatctgaagttttaatttcttcctaataatactgattaaatttttcccttatggtttatgaaaattttgattaaaagctgcctgtctagatcttctttttgaagttaaagtttggctgttcactttgaggtcaatatttcatctgcaactagttttctttatagcatagaagtagagtgttttccctatagagataattgccacaacattgccaattacaagcgtgtgatttcttttgcaatatctgtcatgtatcaattttctatagatattttacat

SEQ ID NO: 869875 - DNA, 604 bp, Homo sapiens
aatcagctgggcatggtggggcacacctgtaattccagcgaaaattttctcctattttgtaggttgcctgttcactctgatggtagtatcttttgctgtgcagaagctatttagtttaattagaccccatttgtcaattttggctttggttacaattgcttttggtgttttagtcctgaagtctttgcttgtgcctatattgctgaatgataytgcctaggttttcttctagggcttttataatttttggttttaaatttaagtctttaatccatcttgagttaatttttgtataagatgtaaggaaggagtccagtttctattttctgcatatggctcaccagttttcccagcaccatttattaaatacggaatcctttccccattgcttgtttttgtcaggtttgtcaaatatcagatggttgcagatatgtggtattatttctgaggtctctgttcttttccattggcctatataactcttttggttaatgtagccttgtagtatagtttgaattcaggtagtgtgatgcctccagcacaaagctaccttttaaagataatcaaaacaagacaacaattgtctgtgggtggcaaacatctt

SEQ ID NO: 869876 - DNA, 691 bp, Homo sapiens
taaaacatgtactgccaaatagacattcctgaatgaatccatgccaaaatattgggaacatagaacagcaaaagacccaagcatgagagattgccaggacatcacaatggctcatattcctttgtcttcactcacaacaactcactttccagaaaccttcagttcattctttcatcaccttgtcctgccagtggtgttgaacctctgtggaagaagggcaaagtataaaagaaaacttttcccacctgttatgaagaaggtcagaatggcagattccactgcaaaaacattgctgactctcttattcttccccacacccaaaaaagtttttttttttgtattagtatgagctgagactgcagaagcctccayaaaaatgtccccaatatactcatgtgtgcaaaaagacagaatatgaagacaagggtattatctgtaatgtgtgaaaaactcatgtactccttagaaagactgcgccaacactgaggccaaccccaaataagaacgagagaatgggtttattacagccatactcccctcagtgccttagcaaagcctcccacctcttgtttaaactctgaaacagagcaaatcttttaggcactgaaacacttttccaaccgctgtttcaataaagtaaatggctccttaaaggacacaaaaagctagtggaactttagagcgaagaagc

SEQ ID NO: 869877 - DNA, 552 bp, Homo sapiens
gcatgggcaaaatgccaccagtctctttgctaaagcatagcaagagatgatttcccaagaagttcctcatctccatctgagaccacctggacttcattgcccatatcactatcagcattttggtcaaaaccattcaacaagtctccaggaagttccaaacttccccacatcttcctgtcttctaagccctccaagtctctaggaagtttcaaactttcccacattttcctgtctccttctgagccctccaaactcttccagcctctgcccattacccagttccaaagttgctrccacattttcagatatctttaatagcagcaccccactacctcagtaccaacttactgtattagttcatttttacaccactatgaagaaatacccaagactcggtaatttataaagcaaggaggtttagttgactcacagttctgcatggccagggaggcctcaggaaacttacaatcatggcagaaggtgaagtaaacaccttcttcttcacttggcagcaggagagagaagtgccagcagggaaaatgccagacactt

SEQ ID NO: 869878 - DNA, 589 bp, Homo sapiens
aatagtgttgaatttgacttatgtttttattttggcaaccaaaaagatagagaatgccagaccctcttggaagggctttgatcttatcctggtgtatcttataaaatagtctcatagaggctttggggaaagtctgaaaagcagaaaaggaaacattgtcattctttcaactagctcaaatccccatgtttaaaaatatctacagctgctaggagggttgcaaagttctttaattggtaattaatatagttactaacacagtgtaagagtactgcacaagacttaaaggcagaagttgaatcagtttccaaagtaaaaagtgaaaagataaagcttgtgacaatatatatgcaaaagacagcactgcattgcagtgagaagtgaagagacttgattcctttttcggttttgccacaagcagatctcttgggctctctgggctccaaattgtktgttgtctctctctctgttgattggtgccatctactatttgtaattcttaatttaagttggttcctgtgttccttttttgtgatgaaatattctaaattaacaacaaggacatatcataaaaacaactataagccca

SEQ ID NO: 869879 - DNA, 631 bp, Homo sapiens
gcacatggctagccagctatcctagtaccatttattgaatagagagttctttccccattgcttatttttgtcaactttgttaaagatcagataattgtagatgtgtgactttatttctgggtcctctattctgttccattcatccagtgatagactggataaagaaaatgtggcatatatacatcatggaatattatgcagccataaaaaaggatgagttcatgtcctttgcagggatgtggatgaagttggaaaccatcattctcagcaaacttacacaagaacagaaaaccaagcrccacatgttctcactcataagttggagttgaacaatgagaacatatggacacaggaaagggaacgtcacacaccggggcctgttggtgcctatgtgtctatatttatactagtaccattctgttttaggtactggagccttatagtatagtttgaagttgagtaatgtgatgcctgcatctttattttgtttttctttcttttttttaactatggattgattttgccatttgggctcttttttggttccatataaattttagaatacttttttctaattaggtaaaaaaacaacattggtagtttgataggaatagtgttgaatctgtaaatt

SEQ ID NO: 869880 - DNA, 631 bp, Homo sapiens
gcacatggctagccagctatcctagtaccatttattgaatagagagttctttccccattgcttatttttgtcaactttgttaaagatcagataattgtagatgtgtgactttatttctgggtcctctattctgttccattcatccagtgatagactggataaagaaaatgtggcatatatacatcatggaatattatgcagccataaaaaaggatgagttcatgtcctttgcagggatgtggatgaagttggaaaccatcattctcagcaaacttacacaagaacagaaaaccaagcgccacatgttctcactcataagtkggagttgaacaatgagaacatatggacacaggaaagggaacgtcacacaccggggcctgttggtgcctatgtgtctatatttatactagtaccattctgttttaggtactggagccttatagtatagtttgaagttgagtaatgtgatgcctgcatctttattttgtttttctttcttttttttaactatggattgattttgccatttgggctcttttttggttccatataaattttagaatacttttttctaattaggtaaaaaaacaacattggtagtttgataggaatagtgttgaatctgtaaatt

SEQ ID NO: 869881 - DNA, 573 bp, Homo sapiens
acatcatccaatgtcttgagggcctgaatagaacaaaaaggtggaggaagggtgaatttgctctctcttcttgagctggtgcatccatcttctcctgtcttcagacaatggtggtcctggtttttgggcctttggattcctactgggactacatcagtggctcccctgggtctcargccttcatgtgtagattggaactgggaatatgggatttctcagcctccacaactatatgagctaataataataaacctctttctatacatctatgtatatcttactgtttctctggagaaccccactaatacaaagtcctttgaccatttttttgttgtttgttgttgtagtggtagaggagttctttatatattttggatatttatcccttatcagatatatgacttaccaatattttcttctattctctgagttcccttctcactctgttgatagtatgtgttagtgaacagaagctgttaattttgatgaagttcaatttatctgttttttttttattttgttgcctgtgcttttgatgttacatcccagaaatcattgccaaatccaatgtca

SEQ ID NO: 869882 - DNA, 554 bp, Homo sapiens
agcagcccacctttggtgggtcaattggccagctctgggcctcacacattcagaaagttgcaaacaggatcagtttagacatcacactctgtgaggaatggctgaaggaatagtctagataaaagaggcggaggctggaggaagtggggtaggtgggagtttagtctctgcttttacatttctgcagggcttttccagggaagaaatggccttgttccaaaggtggtgagaagagtgggtggctactgtcctggataccaggaagcaagttctgatgcagggcaccaagaagacctgtttagtrtgcaacctctgaattttaaaaaagggaaaaaggccaaaaatatagacttctatttgcagaaaagaaaccctggaaaggatacacaaaaaaaacaaaaagtgggttatctattggaaaggggataaggggattgttgggaatggtgggggggaagaaagtggaacttaatactttgtaattacatagcactttatgttgtttacttttaagccaagtgagcatattacacattcaagatattaaattaaaa

SEQ ID NO: 869883 - DNA, 554 bp, Homo sapiens
agcagcccacctttggtgggtcaattggccagctctgggcctcacacattcagaaagttgcaaacaggatcagtttagacatcacactctgtgaggaatggctgaaggaatagtctagataaaagaggcggaggctggaggaagtggggtaggtgggagtttagtctctgcttttacatttctgcagggcttttccagggaagaaatggccttgttccaaaggtggtgagaagagtgggtggctactgtcctggataccaggaagcaagttctgatgcagggcaccaagaagacctgtttagtatgcaacctctgaattttaaaaaagggaaaaaggccaaaaatatagacttctatttgcagaaaagaaaccctggaraggatacacaaaaaaaacaaaaagtgggttatctattggaaaggggataaggggattgttgggaatggtgggggggaagaaagtggaacttaatactttgtaattacatagcactttatgttgtttacttttaagccaagtgagcatattacacattcaagatattaaattaaaa

SEQ ID NO: 869884 - DNA, 615 bp, Homo sapiens
tgcgcctccatgcccagctaatttttgtatttttagtagagagggggttttgccatgttggccaggctggtctcgaactcctgacctcaagtgatctgccctcatctgcctcccaaagtgctgagattacaggcaggagccaccccacctggccaaaagcattcttttctgaataacaagtatttccatctttttgcatactgtattctacagaggagttatagaatcrtgtttggaaaaacacagagctaacccagtcccctcatttgactgtggagaaaaaccacagaccagagaggtgattcaacttatccagagacacacagcaggagctcacacacatcctgattccccaaccggggctctttcttcgacctgggagaaatttccactgcgtgattgttgccaagctattaatgaaaatgagacctaaattagcttcagaaaatgaggttttagcattggaaagtttttgactattgaaattgtgaatgcaaatgagtctatgtgctagaaatctgttagcaagtaagaaagaagctccacaaattccagcctttggaacccgtggggccttttggagcctcagtttacccttttgtgaggtgaggtggg

SEQ ID NO: 869885 - DNA, 615 bp, Homo sapiens
  misc_feature 222: n = A,T,C or G
ggcagaagcagctgcttgggaagacagggcttggcattgctatccaagattggatatccagccgagaggacaggggaggagcttagaagcagtgagggatgtaggggacagcagaggtaatggggaagaaggggcccatcaggttttctaggactccctaaaggtgcttcagagccccctgtgcccaaacctgtactgggctgtgtcttttggattctgctncatgcttggtatcacctgcctttccctcgcttctawatattgagcaaacagaggtaagaccagggccaggattagagcatgcctcatgcacaaaacttacaaggaaccagaaaaatttagtgatcaagaaaaataaaatttaagtgaaaaattttaaaaacatcacaattaatgcaaacaaaatatcaaaatttcaaataaagacagggatcagaagaaaccaagatgtccttcagtaggtggaaggatgaataaactgtggtacatccagacaatggaatataattcagccataaaaaatgagctcccaagccacagaaagacctggaggaacctgaaatacacattgctaagtgagagaagccaatccaaaaagtctacagactgtatgat

SEQ ID NO: 869886 - DNA, 609 bp, Homo sapiens
ggtagaagttgttttcctcaaagggtatctttgtcttatctggctaaatataaagaaatggcttgtaataatttataaatgtctgattactcaacaaacaccttgcaaatattccactgttgggaactggatttgctcatcatatgcttaaattaatattttaacataatttaatgtaaatggtaatctgataaatatgaatccaagccaaacattaaataatttatgcgacttgacttgctgaaaagaagaaatggcttgtgattgcttagtacatatgaaatatttatgtatcatgctacctggagaaattaaagcattctgtgcttctggcctgtcccttcaacgaaagatgtgctaataacattgtatatgttgaagagactasagaagagatatgtcaaataatctatcttgtactccctgccacttggccacagatgcccccccaacctagccaatatgagccctaacttcaaatcacatcagcaaccactccttcatatttgctgcagacactaggttgtcttgttgcaggaaatcagaatagctagggctttcttatgatcgtaacataccaaggagaaaacaaagaggactcttgtacct

SEQ ID NO: 869887 - DNA, 636 bp, Homo sapiens
cgaatttaggtatggcatcaaaatccattttaatttcctttctagtatttgttgtctttcagccgtaggccaaagttagcaatggatgaaatttacatctagagagtagcattcctatttacaagacacactgataaaaatgggggctgtgccatattttatgcaaatatttcctgagtacattatccttaaaaaattatttcaggttttgttgttttttttttattgtactttaagttctagggtacatgtgcacaacgtgcaggtttgttacatatgtgtacatgtgccatgttggtgtgctgcacccattaactcgtcatttacattaggtatatctcctaatgctatcgctcccccctccccccaccccatgacaggccccggtgtgtgatgttccccaccctgtgtccaagtgttctcattgttcarttcccacctatgagtgagaacatgcggtgtttggttttctggccttgcgatagtttgctcagaatgttggtttccagcttcatccatgtctctacaaaggacatgcactcatccttttttatggctgcatagtattccatggtgtatatgtgccacattttcttaatccagtctatcactgatggacatttgggttggttccaa

SEQ ID NO: 869888 - DNA, 599 bp, Homo sapiens
ttcagaacttgttattggtctattcagggatttgacttcttcctggtttagtcttgggagggtgtatatgttcagaaatttatctatttcttctagattttctagtttatttgcatcaaggtgtttatagtattctctgatggtagtttgtatttctgtgggatcagtagtgatatcccctttatcattttttattgtgtctatttaattcytatctctttcttagtctggctaatggtctatctattttgtttttcttttcgaaaaaccagctcctggatttattgattttttgaagggtttttcgtgtctctatctccttcagttctgctctgatcttagttatttcttgtcttctgctagcttttgaatttgtttgctcttgcttctctagttcttttaactgtgatgttagggtgtcaattttagatcttttctgctttctcttgtgggcatttagtgctataaatttccctctacacactgctttaaatgtgtcccagagattctggtatgttgtatctttgttctcattcgtttcctagaacttatttatttttgccttaattttgttatttacccagtagtcaatcaggagc

SEQ ID NO: 869889 - DNA, 599 bp, Homo sapiens
ttcagaacttgttattggtctattcagggatttgacttcttcctggtttagtcttgggagggtgtatatgttcagaaatttatctatttcttctagattttctagtttatttgcatcaaggtgtttatagtattctctgatggtagtttgtatttctgtgggatcagtagtgatatcccctttatcattttttattgtgtctatttaattcttatctctttcttagtctggctaatggtctatctattttgtttttcttttcgaaaaaccagctcctggatttattgattttttgaagggtttttcgtgtctctatctccttcagttctgctctgatcttagttatttcttgtcttctgctagcttttgaatttgtttgctcttgcttctctagttcttttaaytgtgatgttagggtgtcaattttagatcttttctgctttctcttgtgggcatttagtgctataaatttccctctacacactgctttaaatgtgtcccagagattctggtatgttgtatctttgttctcattcgtttcctagaacttatttatttttgccttaattttgttatttacccagtagtcaatcaggagc

SEQ ID NO: 869890 - DNA, 647 bp, Homo sapiens
tggacatctttttcttgttccagttcttagggggaatgttttcaacttttccccattaagtacaatgttggctgtgggtttgtcgtatatgactcttattattttgaggcattttttgatgcctgttttgttgaaggtttccatcatcaaaggatgttggattttatcaaatgccttttctgcatctgctgacatgatcatayggtttctgtttttagttctgtttatatggtgaattgcatttattgatttgtgaatgttgaaccatccttgaatccctgggataaaacccacttgagcatgatgaattatctttttggtgtgttgttgaattcagtttgctagtattttcttgaggatttctgcatctatgttctccaggggtattgatctatggttttatttttgttgttgttgtttccttgcctgactttggtgtcaggctgatactggtttcacagaatgtgttagggaggaatccatcctcctgaatttttttgaataatttcagtaagattggtaccaacacttctttgtatatctggtaaaatttggctgtgaatacatctagtcctggtcttttttgttaggagacttctttaatattaattcaattttattactcattactggtctgcttaggattt

SEQ ID NO: 869891 - DNA, 576 bp, Homo sapiens
tgtttgtgtttcagaaaagccacacacagaatgtattggcaggatttgagattagcaacagagattgttggcagcatgttagcaggttgttaaaatagcccaacaaaaaaactgtgactaaaatggtcatggtaggacattaaagctcagactagaaacttgtagggagagggatggagtttgcaagagaaatatacaaagaacagatttgttttgaggatatttcagtattttgctatctaaatctaattcatttcactttgaaaaatacacaaacactaagctcccattaacacatgataaatgttgtttgtctctaaaaatacctctagatatttttatttgyaaagtaaaataacaatttccctgaggtaataatttctccatttcccaaggttcctaaaaaaaaaatcatatctaaaaagtctaaataaagttaaagctcttccataaagtaccttaagctcttaagtgagatttaaaaagtcttcccaaacagtatgcccttagacacatctacatttaagtcagtggttttcaaagttaaactattttctgatcctatttcatcaaaat

SEQ ID NO: 869892 - DNA, 661 bp, Homo sapiens
atgtgtacacatttgtggtatatgtctctgtatatgtacatagctaatatactagcatcttagctcacctggctactttaaagaattccttctaggtaaaagagtttacaaatatctttttctatcacctaacaaaatgctaacaatcatgcctcctcactttactcaattgattaaaaattacaaatctaattagcattttgagtaatttgactgcttttggcttaaacagttgctggaggagataacttctggttgggaaaagatgggaatgatgtgggcaaaatgtggagaaatctgatagcaaagcaacatattctctattctgctctattaaaagaatatactggcagtaaatamgatatcaataacaaacttatcaattattatgaaagttggttgattcaagatatagaaaaaacccagaatcttaaatatgcagcaagtttctttttcattcaaatgacaggttaaaaaaccccactaacgtcaattcataatcacttttctgaaggtaggtttcgtctctaagctcacatgaaggattatacagtattctacaaaatatcatacttcatattgactgttaccattatggaaagaggactacagttgctgtcaggcaatctaggtcctatcagctctgttagtgctcttgggg

SEQ ID NO: 869893 - DNA, 702 bp, Homo sapiens
agagattcaagtatatatggctccctaaaggtaagattaaaatgaacatctgaaaattaaaaagaaataaaacagcaggaacccaaagaaattttaaatgattaacaaaattttaaaaaagtaatagcctagaatgacaaaaaagaactttaagaaaaagaaagacagacagaaaaggggcatagtgggccaatttaggagcttcaacatttttctacagaaagttaaaaaaaaaaaaaaaaaagagaggagataatgggttgaagttatcaaattatgtcatagaattttccagaatttaaaagttttcatgtgctagaatatactagttacacagcacaaggcacaaaaaaatcaaaaaggaaaattgcagttagacacacctttgggaaactgcaaacaacaaaagataaataggtgatgtggttaggctttgtgttcccacccaaatctcatcagaattataatccccataatacccataatccccacttgtcaagggaaagrccaggtggaggtaactgaatcatgggggcggtttccccaatgctcttcttgtgatagtgagtgagatctcacaagatctgagtgttttataagggttttttcccccttggctcagcacttcttcctgccaccttgtgaagaaggtgccttgcttccccttcgccttccaccatgattgtgtttcctgaggcctcc

SEQ ID NO: 869894 - DNA, 612 bp, Homo sapiens
gtatgagggtgaagtttggcagttactcaagggactttcctcccacccctctctgcgcctgagctgtcttatctgtgttttactgtctgctctttctggctgcttgttttttagaagagaagtgatttcctcgaaatacatgaggctagaaagggagctggaatttaaagtggtggtgtttgtctgagatgatggtgctcctgctctgttagatctctttgcagatgaagtgcctgcatcctcgtccytgtctcaggagctatttcttgggaagtctatgtaggacagttacgtgacagggagaaatcaaatgaacagctctgcgtggatcacacaggcagcacacactttggaggaggtaggagagcccggtttaaggaagtgtggaagacagaagagccttccattgtgtggtcagttaccatggaacctctaggacctcttctcctgagcatgtagaatgatttatggtaaaactgcagcctctgaaaagggaagggggtagggagtgtgagagtgggtccttctgaattctaaggactagtataaatgacttgctcttttcaatgtctgggaagagttcatgcaaattccttttagtgaacatggctt

SEQ ID NO: 869895 - DNA, 612 bp, Homo sapiens
gtatgagggtgaagtttggcagttactcaagggactttcctcccacccctctctgcgcctgagctgtcttatctgtgttttactgtctgctctttctggctgcttgttttttagaagagaagtgatttcctcgaaatacatgaggctagaaagggagctggaatttaaagtggtggtgtttgtctgagatgatggtgctcctgctctgttagatctctttgcagatgaagtgcctgcatcctcgtccttgtctcaggagctatttcttgggaagtctatgtaggacagttacgtgacagggagaaatcaaatgaacagctctgcgtggatcacacaggcagcacacactttggaggaggtaggagagcccggtttaaggaagygtggaagacagaagagccttccattgtgtggtcagttaccatggaacctctaggacctcttctcctgagcatgtagaatgatttatggtaaaactgcagcctctgaaaagggaagggggtagggagtgtgagagtgggtccttctgaattctaaggactagtataaatgacttgctcttttcaatgtctgggaagagttcatgcaaattccttttagtgaacatggctt

SEQ ID NO: 869896 - DNA, 664 bp, Homo sapiens
acccatttcaaatttatgaccaaaaatcttcagtgagcactcaacactatctgacaactaaacttccctagtaaattcattaacctactcccaagatgactattacacactttctcctcagtcctcaaatctccaacatctcctcccactcaacttcagccgaagactttgtcrtatatttcatgcagaaatatagatgcaatcatgtgaaaaccatttcaacttcccaccttcattccacaagcttattcatatctgtagtcacatgctctggtaaacttgtgccctatttcccagcttgctctccttctcatgagctgggctcctgaaacagtttcttcttttctgtatcatctattccttcctaaactaaatctttaagcactagctcctccagcaattttttttataagtctcttctctggctacacttttttctttagtgattccaaaagcccccatgtcttcaaatatcatccaaatgttgatgatgcccaaattcattttactagtccagatctctttcctgaggtttagatttgcatgtataaatacatctttattacatctctgtacgtttaataggtgtcttaaattaacacggctgaaactgagctattgatcttctctatcaaaaaaaatcattcctaaattattttcctat

SEQ ID NO: 869897 - DNA, 618 bp, Homo sapiens
tgttgttatccactttataggttgcaacttagaatagctaataatcacacaaggtcatacagctagcaagcagaagaactgaagtcaaaatcgctccagatctcttgttctgaactattatgttgtattagctgtcagtataatattacaacttgaggataaaatctgaaggacaataataaaaactattccagaattaagatcttgggtagtctctattttccacttttcaatgtgcaattgtaattcagtaattctgctagtagaaacatagttctgcagaatcctttgattgttactaccatggtagaggaaggaacaggcagttatccttgatttcatttctgagaactccatttcaacagcatgagatttgtttgacayacagtgaacccttcaagcaaacatgttcccttgaacattcaacaaataatctaatttggaaacaccaaataccacaaggaaaaagtagtacttttgttctattttctgacagatttccacaccagtgatttatggacgtatgttaagtttaggattcttatctgaagccaagaaaaaaacctttatatttttgaagcctatcatcctcaatgatggaagccaaacccttggaat

SEQ ID NO: 869898 - DNA, 556 bp, Homo sapiens
attaatccaaatatttgtgttatctgatatagtttggctatgtcccacccaaatctcaacttgaattgtatctccaagaattcccacatgttgtgggagggacccaagggaaggtaatttaatcatggggctctgtctttcccatgctattctcatgatattgaataggtctcatgagatttgatgggtttatctgggatttctgcttttgcttcttcctcattttctcttgccaccacyatgtaaggagtgcttttcacctcccaccatgattctgaggcctccccaggcatatggaactgtaagtccagttaaacctctttttcttcccagtctcaggtatgtctttatcagtagtgttgaaacagactaatacagaaaattggtaccagtagagtgggacgttgctgaaaagacacctgaaaatgtggaagcaactttggaactgggtaacaagcagaggttggaacagtttgaaggactcagaaggagacagaaaaatctggcaaagtttggaaattcctagaaatttgttgaatggctttgccccaaaaat

SEQ ID NO: 869899 - DNA, 556 bp, Homo sapiens
attaatccaaatatttgtgttatctgatatagtttggctatgtcccacccaaatctcaacttgaattgtatctccaagaattcccacatgttgtgggagggacccaagggaaggtaatttaatcatggggctctgtctttcccatgctattctcatgatattgaataggtctcatgagatttgatgggtttatctgggatttctgcttttgcttcttcctcattttctcttgccaccactaygtaaggagtgcttttcacctcccaccatgattctgaggcctccccaggcatatggaactgtaagtccagttaaacctctttttcttcccagtctcaggtatgtctttatcagtagtgttgaaacagactaatacagaaaattggtaccagtagagtgggacgttgctgaaaagacacctgaaaatgtggaagcaactttggaactgggtaacaagcagaggttggaacagtttgaaggactcagaaggagacagaaaaatctggcaaagtttggaaattcctagaaatttgttgaatggctttgccccaaaaat

SEQ ID NO: 869900 - DNA, 655 bp, Homo sapiens
tctctaaggcccagcgatggtgagctttttttatatgtttgttggccacataaatgtcttctttggaaaagtgtctgttaatatccttcacccactttttgatgggatgggttttttataatcttctaaatttgtttaagttccttgtagattctggataatagctctttgtcagatggatagattgcaacaattttctcccattctgtagtctgcctgttcactcaaatgattgtttcttttgctgtgcagaagatctttagtttaattagatcataaatcattatactatgaaggcatatgcacatgtatgtttattgtagcactattcacaatagcaaagacttggaaccaacccaaatgcccatcaattawagactggataaagaaaacttggaacatatacaccatggaatactatgcagccataaaaaagaatgagctcatgtcctttgcagggacatggataaagctagaaattatcattctcagcaaactaacataggaacataaaaccaaacactacatgttctcactcataagtgggagtcgaaccatgagaacatatgggcacagggaggggaacgtcatatgctggggccagtcggtgggtgggggtcaaggagagggatagcattaggggaaatacccaatg

SEQ ID NO: 869901 - DNA, 584 bp, Homo sapiens
cattgcacatcaatatgtaaatgaatataattctgataaagatagacaaaactatacaaatctttgattaatagaatataggtttaaacatatttcttgtttactctatgctgttcaaattactaaggacaaccaacaagcaccttaaaattgagacaaaatgactgtttttataacacagaattttaggttaaattataaattataaacattatatagttcttgatgaaacaagaggttgtagtttcttctataactggcttacgggggtggggagtggagattagagagggtaagactcagaataagacagttcttwaaaaaattaaccttttattgttttggtttgggagtgcttggcaagtttttttttccaggtattctttaaacataactactttcatgtatataagtgtagaaaaatgtgacttgtgcatcagctgtaggttaaaataatggaataaataatatcttgtggcattctgaatagggaactggtactgagagtctcttttccccctgaggccttcccctctgtcacctgccaccacttctgacctatgagtcactgactattccaactt

SEQ ID NO: 869902 - DNA, 584 bp, Homo sapiens
gctggatctagagtgcagtgtggcaatcatagctcactgcagcctggacctcctgggctcaagcaatcttcccacctcagtgggtgcatgccaccatgcatggcaaattattttattttttatattttgcagagacgaggtcttgctctgtwccccaggctggtctcaaacccctgggctcaagcaatcctcctgcctcagtctcccaaagtgctgggactccaggtgtgagccactcagactggcagtgttctctttttaatggtattcttcttgtatttttaatctttttaaatatttatttccctttttacttatatgttgcttctccctctttttcttgaacaaacttgccaaagatttgtatattttgtctttttttttaaattttattattattatactttaagttttagggtgcatgtgcacaatgtgcaggttagttacatatgtatacatatgccatgctggtgtgctgcacccattaactcatcatttagcattaggtatatctcctgatgctatccctcccccctctccccaccccacaacagtccccagagtgtgatgttccccttcctgtg

SEQ ID NO: 869903 - DNA, 534 bp, Homo sapiens
tgctagggcagtgtggaagggaaatgtggcgttggagcacccacacagagtccttactagggcactgcctagtggagctgtgagaagggggtcactctcctctataccccagaatggtggttccaccaacagcttgcattgtgcatctggaaaggcacagacactcaatgccagcctgtgaaagcagccagaaagaaggcttaccctgcaaaaccacaggggtggagctgcccaagaccatgggaactcacctcttgcatcagtgtgacctggatgtgagagatggagtcaaaggagatcattttggagctttaagatttgackgccccagtggatatcagacttgcatcggccctgtagccattttgttttggccaatttctcccatttggaatagttgtatttacctgatgtctgtacccctattttatctaggaaataaatagcttgcatttcactttacaggctcataggcagaagggacttgccttgtctcagatgagacattggactgtggacttttgggttaatgat

SEQ ID NO: 869904 - DNA, 613 bp, Homo sapiens
aatggtggttccaccaacagcttgcattgtgcatctggaaaggcacagacactcaatgccagcctgtgaaagcagccagaaagaaggcttaccctgcaaaaccacaggggtggagctgcccaagaccatgggaactcacctcttgcatcagtgtgacctggatgtgagagatggagtcaaaggagatcattttggagctttaagatttgactgccccagtggatatcagacttgcatcggccctgtagccmttttgttttggccaatttctcccatttggaatagttgtatttacctgatgtctgtacccctattttatctaggaaataaatagcttgcatttcactttacaggctcataggcagaagggacttgccttgtctcagatgagacattggactgtggacttttgggttaatgatgaaacgagttaagactttgggggactgttgggaaggtatagatggttttgcaatgtgaggatatgagatttggcagtggctaggggtggaatgatatgatttgcctctgtccccactcagatatcatcttgaattgtattcccataattcccacatgttgtgggagggacctggtgggagatgactgaatc

SEQ ID NO: 869905 - DNA, 613 bp, Homo sapiens
aatggtggttccaccaacagcttgcattgtgcatctggaaaggcacagacactcaatgccagcctgtgaaagcagccagaaagaaggcttaccctgcaaaaccacaggggtggagctgcccaagaccatgggaactcacctcttgcatcagtgtgacctggatgtgagagatggagtcaaaggagatcattttggagctttaagatttgactgccccagtggatatcagacttgcatcggccctgtagccattttgttttggccaatttctcccatttggaatagttgtatttacctgatgtctgtacccctattttatctaggaaataaatagcttgcatttcactttacaggctcataggcagaagkgacttgccttgtctcagatgagacattggactgtggacttttgggttaatgatgaaacgagttaagactttgggggactgttgggaaggtatagatggttttgcaatgtgaggatatgagatttggcagtggctaggggtggaatgatatgatttgcctctgtccccactcagatatcatcttgaattgtattcccataattcccacatgttgtgggagggacctggtgggagatgactgaatc

SEQ ID NO: 869906 - DNA, 594 bp, Homo sapiens
aactccctgagtcagggaaattatattttattttaattattatattcatatatataaaacaactattataaatgctgtgctgtgagatcccctttgttttgaggaaggtctgagtgttccatctcctgactggaaaaactccagagaatgtcatttcatcaagaattcgcccactatgcagccatcgtacaagttatcacccacactggatcctggggccagacccaggatctgcctggaaggaccgtrtactgcctaggaaggagccagtgcctccatctaagtctcctcaagtgtctgggaacagatttcccgtagtcttaaccaagggggtggaatgaaagttgtttctactccactctaagaaggcttattattccaagtgcttattagccatttcctcaggaagttcatttaagaaacatagggagaaggtacgttgtcacccagtttaggggaagaaaatggaatagaggcagagagaggtaagtgatttctccaaggtcaccctttactctgggaattggcaaagccataactacattgcaaggctgtgccccaaaagagtagatgtccttactggtcctgcattat

SEQ ID NO: 869907 - DNA, 661 bp, Homo sapiens
aattgtgattaaacactatactttgcccttctacatctgtttttaaatcaagtacaaactttaataatacactcagcagaggcatctggaagatgtgttgatcctagctggcagcagacaccagatgggttagtcaatctggaacagatggtaaattgatattaattaattataagcctggacttttccaccattcatgattctcagtttctatgaatattcacyatttttggttaatctcggtttactaaattcccctttctaacctatgtgattgtaagagaaaaagaggagaaattttctctctcactagagaatatcttgagctcttgaaacactctgcagttgaaaaatgaactccaacgagctcataacatcatggtagagctggggggctcatcattagcatgatcacagacctaggatttttctattcctgctctgccaattaatgctactctcttcccacaattctcctcccctactctgtactgtcaataaaagtacctgtgagaactctatgcaaagaacaacaaccaagtaagtgtaaagttcactcccatcaatagctacacacatatccactattcaaatgtagagctctctggaaggcaaagattgaagtaaacaattgagaattaagttctgagcagaacttcta

SEQ ID NO: 869908 - DNA, 733 bp, Homo sapiens
atttatttatttatttggttaacactttcttttattattgctttgtgtttctcagaagaatagaggcctggtgaggggaggtagcagagtcttcttgttgagaaatcaatgcccagcacccagatggccaggaaggggccagcggctctgggctgctaccctgcacccagagcttcccaggtgctctttggatctcacttgggtcagcactttatttacaactctcagtcctcatacctcagcctccaaaatgcacatggtatatcattttatgtcatttgctgggcctgttgaaattcttctcacagctatgtgggcaggagggaaaagggttgatacagaaagaggtatgcaaagtgcctatatctttaaaaaataaaacacactttgggaggccgaggcrggtggatcacttgaggtcaggagttggagatcagcctgaccaacatggtgaaagcctgtctctactaaaaatacaaaaatagctgggtgtggtggtgggcacctataatcgcagttacttgggaggctgaggcaggagaattgcttgaacccgggaggtggaggttgcagtgagccaagatcacgccactgcactctagcctgggtgatagagtgagactctgtctcaaaaataaaataaaataaaataaaataaaaaataaagcacaaacatgaatttcataagaaagagttttagggacttatagattcagagcctcagtaaggaaat

SEQ ID NO: 869909 - DNA, 733 bp, Homo sapiens
atttatttatttatttggttaacactttcttttattattgctttgtgtttctcagaagaatagaggcctggtgaggggaggtagcagagtcttcttgttgagaaatcaatgcccagcacccagatggccaggaaggggccagcggctctgggctgctaccctgcacccagagcttcccaggtgctctttggatctcacttgggtcagcactttatttacaactctcagtcctcatacctcagcctccaaaatgcacatggtatatcattttatgtcatttgctgggcctgttgaaattcttctcacagctatgtgggcaggagggaaaagggttgatacagaaagaggtatgcaaagtgcctatatctttaaaaaataaaacacactttgggaggccgaggcaggtggatcacttgaggtcaggagttggagatcagcctgaccaacatggtgaaagcctgtctctactaaaaatacaaaaatagctgggtgtggtggtgggcacctataatcscagttacttgggaggctgaggcaggagaattgcttgaacccgggaggtggaggttgcagtgagccaagatcacgccactgcactctagcctgggtgatagagtgagactctgtctcaaaaataaaataaaataaaataaaataaaaaataaagcacaaacatgaatttcataagaaagagttttagggacttatagattcagagcctcagtaaggaaat

SEQ ID NO: 869910 - DNA, 590 bp, Homo sapiens
ggacacaggcatgggcaaggcttcacaactaaaacaccaaaagcaatgacaataaaagccaaaattgacaaatgggatctaattaaactaaagagtttctgaacagcaaaagaaactatcatcagagtgaacaggcaacttacagaatgggagaaaaattttgcaatctatccatctgacaaagggctaatatccagaatctacaaggaacttaaacaaatttacaagaaaaaaaacaaacgaccccatcaaaaagtgggtgaaaaagagaagcgaacaggcacttctcaaaagaagacatttatgcggccaaaaaacatatggaaaaaagctcatcatcactggtcattagagaaatgcaaatcaaaaccacaatgagataccatctcatgccagttagaatggccatcaytggaaattcaggaaacaacagatgctggggaggatgtggagaaataggaatgcttttatactgctagtgggagggtgaattagttcaaccattgcggaagacagtgtggcgattcctcaaggatctaaaaccagaaataccgtttgacccagcaatcccattactgggtatataccca

SEQ ID NO: 869911 - DNA, 548 bp, Homo sapiens
agtggattttacttcctggaggtctgcctgctttcagtacattctttgttattatataccctaattttgtatttattcctgttgttaaaaatggagcagttagtgttaaaaatgatcatcatttattgcttgttgctttaatgtatttctgtatacaagtgtttctatttttaagagtgtaggcgatatttaggaatgaatttaaattatggttgtcatctcttcaaattaattatttaacgtgtagaaattaattcatgcagaagaatcagttttcaaagccaaagaaggatgggaaacattcacyctcttatgctccatatgaagttgagtgttgattactaaaaattattcttttgtggtaagtttgccacatgtcctacaaatgtacatgaaaactgattacctacacctcatggtcctgaatcttttcctttttatctctgcttcagaatttacaattcagcacattatttgtgctttgctgatatgtacagtactgtgttttgcttcatttaccatatttactcacatattgttcactattg

SEQ ID NO: 869912 - DNA, 548 bp, Homo sapiens
agtggattttacttcctggaggtctgcctgctttcagtacattctttgttattatataccctaattttgtatttattcctgttgttaaaaatggagcagttagtgttaaaaatgatcatcatttattgcttgttgctttaatgtatttctgtatacaagtgtttctatttttaagagtgtaggcgatatttaggaatgaatttaaattatggttgtcatctcttcaaattaattatttaacgtgtagaaattaattcatgcagaagaatcagttttcaaagccaaagaaggatgggaaacattcactctyttatgctccatatgaagttgagtgttgattactaaaaattattcttttgtggtaagtttgccacatgtcctacaaatgtacatgaaaactgattacctacacctcatggtcctgaatcttttcctttttatctctgcttcagaatttacaattcagcacattatttgtgctttgctgatatgtacagtactgtgttttgcttcatttaccatatttactcacatattgttcactattg

SEQ ID NO: 869913 - DNA, 685 bp, Homo sapiens
acttgcttaagactgcacagaatatcattcaatatcccttatctaattatctacacaaatcatgaatattctttgtatggccatttcttctcacatgtgaaacctaatagccaagtgttacataatactggctatagtattgtgtggtctggaaatctaactttgtagtgattcaagtagatacagggtcagagctcagacattgtctaggaatggctgccagatagactatcaatctcagatatcaattgtctcaacttggcttcagactgtctagataatgtactgttcaaaatggtgtctgctgataccagacaactctgactttttgttatcaaaatgcttataatcaaagtcagccaatatctgcagaggtgtgcttcagatgcactgacaggcagayccaaaactcccatttaaaggtaacctctgacctctgtatagatcaaaagttagactcagactcaaagttcttcactatcaaatgtggaaagaaggtcacgtgatgtcatttgttatttttatgtgtagaagtaatagctttcatttcatatattttgtgttattttgggtaatttatctactctttgtcatcatgaagcagaatatccctggagattgaccactatgtcttttaaatacacacacacacgaacacactcatacccactttctcatgcccatg

SEQ ID NO: 869914 - DNA, 590 bp, Homo sapiens
ggacacaggcatgggcaaggcttcacaactaaaacaccaaaagcaatgacaataaaagccaaaattgacaaatgggatctaattaaactaaagagtttctgaacagcaaaagaaactatcatcagagtgaacaggcaacttacagaatgggagaaaaattttgcaatctatscatctgacaaagggctaatatccagaatctacaaggaacttaaacaaatttacaagaaaaaaaacaaacgaccccatcaaaaagtgggtgaaaaagagaagcgaacaggcacttctcaaaagaagacatttatgcggccaaaaaacatatggaaaaaagctcatcatcactggtcattagagaaatgcaaatcaaaaccacaatgagataccatctcatgccagttagaatggccatcactggaaattcaggaaacaacagatgctggggaggatgtggagaaataggaatgcttttatactgctagtgggagggtgaattagttcaaccattgcggaagacagtgtggcgattcctcaaggatctaaaaccagaaataccgtttgacccagcaatcccattactgggtatataccca

SEQ ID NO: 869915 - DNA, 582 bp, Homo sapiens
gtatctaccttgagcccatccccagagggctgggctttcccagctgctctctccaagggattagtgccctaggtctctgcagatgcagcaggaactgctgctccccagagccaagtatccacattttccccaagggcatctartgccaaagcaccctctagacagaggctgtttgcaaagtgaacgagtgctaaggataagggtcctaattcccagtcccacatcccgtcacttagatgtttcatctgcaaaatgggtggcaaaccattaaagtgactgggcctgatgacttccagagcccctgccagctccagaagctgtgatattctgaagtaatcttgaatggagccttcagacatgatcaggcacatcgcaaagaccacaagtgtgttctccctgcaatgcatgaacgccttccgacttattcagtccctgctttatagcgcagagtccagagggataattgtctctttctctctcattctggtttctctgcttacacaagccacataaaacctttctggttagagcccaggacacacagaaattatatgtatgcaccgtcatgtatgtgcctgtctc

SEQ ID NO: 869916 - DNA, 582 bp, Homo sapiens
gtatctaccttgagcccatccccagagggctgggctttcccagctgctctctccaagggattagtgccctaggtctctgcagatgcagcaggaactgctgctccccagagccaagtatccacattttccccaagggcatctaatgccaaagcaccctctagacagaggctgtttgcaaagtgaacgagtgctaaggataagggtcctaattcccagtcccacatcccgtcacttagatgtttcatctgcaaratgggtggcaaaccattaaagtgactgggcctgatgacttccagagcccctgccagctccagaagctgtgatattctgaagtaatcttgaatggagccttcagacatgatcaggcacatcgcaaagaccacaagtgtgttctccctgcaatgcatgaacgccttccgacttattcagtccctgctttatagcgcagagtccagagggataattgtctctttctctctcattctggtttctctgcttacacaagccacataaaacctttctggttagagcccaggacacacagaaattatatgtatgcaccgtcatgtatgtgcctgtctc

SEQ ID NO: 869917 - DNA, 582 bp, Homo sapiens
gtatctaccttgagcccatccccagagggctgggctttcccagctgctctctccaagggattagtgccctaggtctctgcagatgcagcaggaactgctgctccccagagccaagtatccacattttccccaagggcatctaatgccaaagcaccctctagacagaggctgtttgcaaagtgaacgagtgctaaggataagggtcctaattcccagtcccacatcccgtcacttagatgtttcatctgcaaaatgggyggcaaaccattaaagtgactgggcctgatgacttccagagcccctgccagctccagaagctgtgatattctgaagtaatcttgaatggagccttcagacatgatcaggcacatcgcaaagaccacaagtgtgttctccctgcaatgcatgaacgccttccgacttattcagtccctgctttatagcgcagagtccagagggataattgtctctttctctctcattctggtttctctgcttacacaagccacataaaacctttctggttagagcccaggacacacagaaattatatgtatgcaccgtcatgtatgtgcctgtctc

SEQ ID NO: 869918 - DNA, 664 bp, Homo sapiens
  misc_feature 318: n = A,T,C or G
ccctcagattttttcacctggaaaacaggtcaaaggcctgtcacagtggctcacacctgtaaccccaacacttggggaggtcaagtcgggtagatcatttgaggtcaggagttcagaaccagcctggccaacatggcaaaacctcctctctactaaaaatacaaaaattaaccrggtgtggtggcaggcgcctatagtcccagctacttgggaggctgaggtgggaggattgcttgagcctgggaggtggaggttgcagtgagctgagattgtgccactgcactccagcctgggtgacagagcaagactccagctcanaaaaaaaaaaaaggaagaaagaaagaaaaaagaaaacaggtcagcagaacagatgatctttaaggtcccaactccaaaagcgatctacaatattcactgacagagctaattgcttgggcagaactttctttcaaattaaagcagcaattgtcctggcttcccacagaagcatatgctgttactatcataatatgaaatggcttttcttttattagcatcgcctttggaatctggtgccttataggacataaaatgaatcataaatatttacaaatcatgtataataaagatgattttttaatgaggcacacttgagtgcttgacccagctcttgatctctctaaga

SEQ ID NO: 869919 - DNA, 664 bp, Homo sapiens
  misc_feature 318: n = A,T,C or G
ccctcagattttttcacctggaaaacaggtcaaaggcctgtcacagtggctcacacctgtaaccccaacacttggggaggtcaagtcgggtagatcatttgaggtcaggagttcagaaccagcctggccaacatggcaaaacctcctctctactaaaaatacaaaaattaaccaggygtggtggcaggcgcctatagtcccagctacttgggaggctgaggtgggaggattgcttgagcctgggaggtggaggttgcagtgagctgagattgtgccactgcactccagcctgggtgacagagcaagactccagctcanaaaaaaaaaaaaggaagaaagaaagaaaaaagaaaacaggtcagcagaacagatgatctttaaggtcccaactccaaaagcgatctacaatattcactgacagagctaattgcttgggcagaactttctttcaaattaaagcagcaattgtcctggcttcccacagaagcatatgctgttactatcataatatgaaatggcttttcttttattagcatcgcctttggaatctggtgccttataggacataaaatgaatcataaatatttacaaatcatgtataataaagatgattttttaatgaggcacacttgagtgcttgacccagctcttgatctctctaaga

SEQ ID NO: 869920 - DNA, 655 bp, Homo sapiens
aaaaattatatacttggtttatcttccactttcctttccctcaaaactaaaagtcttttagcacatgtaccacccctagaatttcctgtaaaccaccaccagctggaagatcacattctcatcaaaggtggaaagaaggaagactcaagccagcctgggaaggaccctaccttgtgctgctaaccactgagactgctgttcatacagcaaaaaagggattggattcatcacacccaagtcaagaaagcrccacccctctagagtcatgggctgtagtcccaagggaaaattctaccaaactaaagctaagaaaaatttaattcatctattctattagtgttccttcttttcttgctctattgctgaccatctagttattaacataacccagtcaattccacctcaaactattgaatttaatgcttcccttgttataccctgtgagggcttgccaagtcaaagacagctctctacttcagaaaagtacctctgtccctcctgactctcctcagactagtcattaataaattaggaccatttaatctcaggagaatttgataaagaccccagtgtcaactaggagtcttgcgcccagatgtagagcttttatgctgtagttggcccaacattctgtgaaccactaaagagcaaggat

SEQ ID NO: 869921 - DNA, 558 bp, Homo sapiens
cttgacatttgccttatttaaacatggattgaacagttgggcaccattgattggccaaatctcagttacttgcacaaaaataggttacagtctgtttacacctccagttaggtttcagtttaccacgtatgaagaaacctttaggctgaatttaaactatataaggaggcagagttaggctaaacaaaacatatttcatatgtgtgcaaactcttttcatccctttttgacatttgtaggctatytattattttcaacactgactaaaactactgtgcctaaaacaactgtgggggaaaggaagagagatcagactcttactgtgtctatgtagaaaaaggaagacataagaaactccattttgatctgtactaagaaaaattattctgctttgagatgctgttaatctgtaaccttaacctcaaccctgtgctcacagaaacatgagctgtattgaatcaagatttaatggatttagggctgtgcaggatgtgccttgttaacaatttgtttgcaggcagtatgcctggtaaaagtcttcaccattctccattcttg

SEQ ID NO: 869922 - DNA, 609 bp, Homo sapiens
cagtgtttggttttctgtttcttgcattggtttgctgaggataatggctttgagctacatccatgcccctgcaaaggacatgatcctgttctttttatggctgcatagtatttcatggttttatgtactacattttctttatccggtctatcactgatagccatttaggttgagtccatgtctttgttattgtgaatagtgctgcaatgaatatacacatgcatgtatctttttaatagaatgatttatattcatttgggtatatascactgggtatatacccagtgggattactgggtcaaatgtatttctggttcttggtctttgaagaatcaccacactgtcttccacaatggttgaactaatttacattcccaccaacagtgtaaaatcattcctatttctccatagccttgccagcatctgttgtttcttggctttttaataattgccattctgactggcatgagatagtagctcattgtggttttgatttgcatttctctaatgatcaatggtgttgaggcttttttcatgtttgttggccgcatgaatgtcatcttttgagaagtgtctattcatgaataggacctaatttttttatagatg

SEQ ID NO: 869923 - DNA, 655 bp, Homo sapiens
attaatcaagtcttctagtactacattaaatagtggtggtatttctgatattgtactattgattatgtatttgctgtagaattttgggcagatatttatcaagttaggagagccttctattgtttcagtttttctcagtttttttgttgctttgttttgttatttkgttttctttaaataatcctgtaaagtattgagatttttcagatgcctccctgcatccattggaatgatcatatattttttctgctttagaccattaatatggggcattatgacgactagattttcttatgttacagttgctacattcctgggataaaatctgtttgactgtgatacagacattttaatatagcattagaacagtaaatgtatatcttatttaggattttgggatctatgttcacatactaaaatgatcctataatgtcattttcttatatccaggctttggtttgaggttaataattagctttgttatatgatcaggaagcttacattctttttctacttactagaattttttgaataagatagagatcatcattgtcttcatagcatctgataatgaacctagggttgattcacagggaagttattgacagctttatgtctatcacaatgtgatagacacacacagtggtaaatacat

SEQ ID NO: 869924 - DNA, 605 bp, Homo sapiens
aatcgacgaagaacttaaacaaatttacaagaaaaaaacaacgccattaaaaagtggcaaaggacatcaaaaaaagacattcatgcatccaacaaacatatgaaaaaaggctcaacatcactgatcattacagaaatgcaaatcaaaaccacaaaaccatctcatgccagtcagatggcaattattaaaaagtcaagaaacagtagatgctggcaaggttgtagagaaataggaatgcttttacactgttggtgggaatgtaaattagttcaaccattgtggaagacagtgtggcgatttctcaaagacctagaaccagaaataccatttgacccagcaatcccattactgggtatatgcccaaagcaatataaatcacttcattataatgagacatgcacacgtgtgttcatygcagcactattcacaatagcaaagacatggaatcaacctaaatgcccgtcaatgatctactggatcaagaaaatgtgctacatatacaccatggaatactacgaatccataaaaaggaatgagattatgtcctttgcaggcacagggatgaagatggaagccattatcctcagcaaaccaacacaggaaca

SEQ ID NO: 869925 - DNA, 577 bp, Homo sapiens
ctttatgtcctactatcatacatggaaacgtgcctattttgcatattgttatattaaataataagacatatgcttagcttcccctaggttaaattttttacctaattgttattaacgtaaataatccagaaattaaagttttttaaaaaatttccagtgccctcactgtgcatratataattctattttttaaagtgttagtgctgtttgcattatataaaagaatattttagtgtatcaactaactacatacctgaaagcatggcttactttttcattagtatatacttttggttgtactcggctatttttctaaaagtgcttgcaaatcagttccaggccacagggctttgtcttcaacaaaataagaatgtctcagagacccacagaaataactgtaccaagtactcctataaacaggcttctgatagaatgacttacataactttgaaacactatcagtggactaagttatttctctaattctagcagagaagcatatgtgcttacaagatagagtaaaacaagtatgaataaaacaggactaaatgaactgacgatgaatgataataggttt

SEQ ID NO: 869926 - DNA, 641 bp, Homo sapiens
ctgctcctattatctcctcatttacattaggtatatctcctaatgttatcccttccccctcccccatcccacaacaggccccggtgtgtgatgttctccttcccgtgtccaagtgttctcattgttcagttcccacctaggagtgagaacatgccatgtttggttttttgttcttgcgatagtttgctgagaatgatgatttccagcttcatccatgtccttacaaaggacatgaactcatcattttttatggttgcatagtattccatggtgtatatgtgccacattttcttaatccaatctatgattattggacatttgggttgsttccaagtctttgctattgtgaataatgccacaatgaacacacgtgtgcatgtgtctttatagcaacacaacatggtactggtaccaaatcagagtacgtggtactggtaccaaatggagcagaacagagccctcagaaatagtgccacacatctgcaactatctgatctttgacaaacctgactaaaacaagaaatggggaaaggattccctatttaataaatggtgctgggaaaactggctagccatatgtagaaagctgaaaatggatcccttccttacacgttacacaaaaattaattcaagatggatta

SEQ ID NO: 869927 - DNA, 553 bp, Homo sapiens
tgttttgttttattctggtttggatgtccttcagggttttgttttgtggctatttattactacaatgcaacttctcccctaattgactgacaggtttgtacattctcaataaaatattttggtaaagtctttgtaaaaactgtgtagacaattttacagttttcataaacataaaacagtcaagactgtcatgatgaaaaagaaagattgagggcttaaagaattaaaatatgacacagctaaagtagtgtgcaaagggaaatttatggcactaaatgcccacaagagaaagcagaaaaggtctaaaatcggcatcataatatcacaattaaaaatctatkgaagcaagagcaaacaaattcaaaagctagcagaagacaagaaataattaagatcacagcataactgaaggagatagacacacaaaaagcccgtccaaaaaatcaacgaatccaggagctgtttttttgaaaagatcaaaaaataaataaactgctacccagagtaataaggaaaaagagaagaatcaaatacatgcaataggaaatgaata

SEQ ID NO: 869928 - DNA, 626 bp, Homo sapiens
ccagaagctgtcagaggctagcaaagcttatactctttgagaagcagctgttgacctgctactgggctttacaggaaacagaacacctttgtcttaatcatgatgtttttatgaggccccaaattcctaatatgacttgggtcatgagctccctcaaacctcattggatagggtacactcaagaaagtaaatggaaatggcacatacaagaccaggctaagccggaaccaaaacaggtatcatttttaaatgaggatgtgcaaaacttgccagctcagcaaaccactgagcaagtcctgcagacagggaaggaaacctcccctgcccaatggggcaaatcctttaaagaaccaagcccagactatcagagacatgcttgggtttgttgatgattccaccaaatatattgatgggacccgatgctgggaggccgtggcttayaatcctgttaaaaacataagcatttctgaggaagggaggggtgttagcagccagctggctgaactagaatctgttctctgaactattcaggaggaggccagagggatttgttacttgtatacctactcttgcttagcagaaaatggtcttactacctagttgcccgaatggcaatgaaacaaatg

SEQ ID NO: 869929 - DNA, 688 bp, Homo sapiens
ttcataggggctggggaaggatgcaatgaaatatttgcttctgtaaccaactggcattctcctgtttcagtccccaagtatgtctgaggatctgggtcctgagtgtaaaataaaacatacttaattttctcaaatatcactagttaggaaaaaagcaaaagaaaagcagagtaatttccttcctcatctcctgccrcaggtgattggattgcaggattgcatggagggagaagtgattttgtttcttggatggtgaaattaagtgagcacttcccaatttattcctaaaaacacggagacaccgcgtttatgttcctgaaatgagaaatcagtagaaacacaactgggtaaagaaagggaaattaaaaagaaaatcaccaatcatttgattatatgacaacacgtgaacactcacatacttgattgtactctgcaagtctgtagaaaggaggatcatttaagaaaaaaaaaaaaagacgctggtttcagcatgttttttgtaaggatgggctatggcagctggaaagctaagtgtcctgaaacaatggatggccctcacatttgtgcaaggtcttcagagtttacaaagcgctttcagacgtgttgtatttctcctccatgtcctggcttatgccaggctctccagctcccctttcaacccaccctccctgttcctgctccatgcttt

SEQ ID NO: 869930 - DNA, 618 bp, Homo sapiens
cattccatgctccgatacccagatttttaaattgatttttatttgtatacattaatgttcactctttgtattataatgttccatgggctttgaaaaatgcaatccgtctcatatccatcattacagtatcatacagaatagtttcactatcataaaaaattccctgtacttcatctattcaaccactccccacaatcccctgaaagctactgaatctgttattgtctctgtagttgtgcctttcctagagtgtcacataaagtttacaacatgtaatattttcagattggctcatttcacttaccaatatacatttaagattcatctatgttattgtatggatttatagttgattgctatttattgctgaatggtattccgttgtatgcatgcaccacaatttattcattcacgtattaargacatcttgggttctggtaattatgaataatgctgatataagcatttttgtgcaattatttgtgttgacgttaagttttcacgtgtttggtcagctggaccatgtaagactaggtttaactttataagaagttgccaaactgtttccaaagtggctgtaccattttgcatccctaccatcaatgtgtgaaagatcta

SEQ ID NO: 869931 - DNA, 610 bp, Homo sapiens
cggaggggtggtgagggtgaattacatttaatgaagctggaagttcacatggacctttcagacttaaaaaaaaaatgttgattttacatgccaaagtcttgaaaggggcttgacggctcacggctttagtgtgtttttccagatggcagatgccattttgtgttttgcataaactgactaaatttgcttgctctttgtacttatttcagagagaaccattctctgctttcaataggacagaagagctccttggcactggatgcctccgggtctggttgagagaggaatggttaggagactgttctgaggatacgcagacatcatccaaagcttcctacattcagatgaggacagaggttgggccagagctttgtawgcttgttacctaaggatggttctgaccatgtaagcagatcacagaaggtaagccatgctgaagaacttacaatagttatacttccagtttgtccatttttatctccatgggtagcaaataggttcatgatgctgttatttcaattactttacatcctgctaatggctagttgtgtgatcctgtaacttaatttctctgtgcctcagttttatctgaaagaaaaaaaaagataat

SEQ ID NO: 869932 - DNA, 655 bp, Homo sapiens
tgttggaatccctgggaagccaagttgtcaccaatggtcttagctgtctacagcactgaagtggatgattctcagaaggatgctcagaagctgacacatagccccatgtctgctatctgccagtgtgtcacaaacccgcctgtagctactgaaaaatgtctttttctcttccattttccagtgattgcaagagcacctctcaatggaagattataccaagaactccatgggcaagagagcttaggaaatgtagtttccaggctttcagtccttgtaatatgggaggaccttagggtcagagatggtacttactgagtctcaacaaaacaatgcctggcacacatggtccttatccttcttatgggaaattcaggtgtcatacttccataacccatcactctggaaagctccttgagratagatcttacaattctccatccccagtgccagacaataccagacaataaatcattttgaattgatttgaataaaatgataatagattcaatagaaaataagactttcccatgtgttgaagctagatttcaagaactttgtccatcaaatctgataattctccttaatgactgccctagatgctgccccagcttaagctattttgctccctagcctgctcagagtgaccatgaagggc

SEQ ID NO: 869933 - DNA, 608 bp, Homo sapiens
ttgttgtgtaataagctaccctaaatctagtgacttaaggaaacaatttattactatcactcatggttcttgggactgatggactccggtgggcagttcttgtctctcgtttggttgtagtcagattgtagctgagactggagccatctaaaggtttcttcactcatatgtctggcattgggctagtcaggaatctctctctctcyctctctccacatggttagcaaagctttttggtctcttggtaatcaggcttttctcttgtgacagatttcctcaaagcaagtgttctaagaaatccaggtggaagttgcaaaaattcttaaacctaaccttgcaagtcatacagatcacttcttccctcttgtatatgccaaagcaatcatgggggaacccaggatccagtagttggacaaatagattcggtctcacaagaggggaataatttgtgtattcaactagggaaagaattgatgtgttcatcttaatgagaagctgccacaagcacccactgtgtggcagacactatgctatgtgctggtacaacatgttgacaaaatgggcacaatccccttggtttgtggaggttaaaatctagtttaattagc

SEQ ID NO: 869934 - DNA, 608 bp, Homo sapiens
ttgttgtgtaataagctaccctaaatctagtgacttaaggaaacaatttattactatcactcatggttcttgggactgatggactccggtgggcagttcttgtctctcgtttggttgtagtcagattgtagctgagactggagccatctaaaggtttcttcactcatatgtctggcattgggctagtcaggaatctctctctctccctctctccacatggttagcaaagctttttggtctcttggtaatcaggcttttctcttgtgacagatttcctcaaagcaagtgttctaagaaatccaggtggaagttgcaaaaattcttaaacctaaccttgcaagtcatacagatcacttcttccctcttgtatatgccaaagcaatcatgggggaacccaggatccagtagttggacaaatagattcggtctcacaagaggggaatartttgtgtattcaactagggaaagaattgatgtgttcatcttaatgagaagctgccacaagcacccactgtgtggcagacactatgctatgtgctggtacaacatgttgacaaaatgggcacaatccccttggtttgtggaggttaaaatctagtttaattagc

SEQ ID NO: 869935 - DNA, 609 bp, Homo sapiens
ctgtgcaatacatttcaatattaagtctatttagttatgaaatgtgcaaaacatctattctggtcacttgtggtttggtcattttgactttttcaataaccaaactgaatgaaatttgtgggtatgtgatctgtaacttgatgatcaccttgatgagctgattcattcatgaattctttttttaatgcattctttaaaacacagtctgagcaaaactggggtgttcacctcttgcttaacaagcatgttgagttcctgatgtgcatgggggctgaaaytgaattcgttgactcataacagggaatataaaataaattgaaaagtcagattttgccccggatgagcttccattcttgttagcagtttgggtggtatgcaggtggagcagcttgtgacaatgacaaagaaaaagtgaacccagacagtgcatgataaactagacaggtggtatcagtttccttcctaagaattatcttttggagagaagtaattgattatttgcctccactttcttctctcttgtgccataaacagaaagtgatctaggtttgttaagtaaaaggagatttcaggacaggaatgttgacagaagaattggtggtgttcagc

SEQ ID NO: 869936 - DNA, 569 bp, Homo sapiens
cacacacagctctaaggaagtattaaaataaatttataaattcatggttactcgggacatttgttgttgctggttaatgacaacaaggacaactggattgtccttatgattactccacagcaattactaaaaaatattctgaataaacaagcattctgaaaatgtgaatcacagtgtggggctcaacttgtgttttaaaagataaatttctatgtataaatattgacaagagagtgggatacgactgaattgttgaggttaagcatttattatggggaaaaaattaaaatgctttggagctcagtgatccttactgaccagrtatttacttaaccattcttttcattttgactctttgttattgttgtttctgtaggaacttaggtttataagccccattaaaggggcattttatataggatagtcaaaaggatgataatgaatgagccagcagccaattatggatagaaactaagtaaattacacagctgacttctcatttttaaattagttgctatagagttttacaaactttccccgagacatttatcatccaacaatttttcctc

SEQ ID NO: 869937 - DNA, 620 bp, Homo sapiens
tgtggcagatatttgaatatataaccttctctattctttaatgaaaagtcaggctatgaagcaaaagtctatgaatatgcatcttttctaagagaaagcatacaccagactggatggtttacacggaaggttgaaggaatgttttagtcactgttttccaatctgctttttcagaagcaggtattgctaatgtagaaaaaaatgttggtagtctttctcttttgtttggtttaaaaaggatgaggctttgttttcttcctgttattcattttgcaactgcacaactactgctccggcaccgcagcagcttttgccagagtcagaggtgaggtcatgcttgactgaagaaatctaagatcaatttgttgtctcatatttcaacattaartgcagcttgaaatataattgttagtccatgcactctgtgctttaaggaagtgttccagcatctcagaacagggagtgtggttatcagtgataaaccacaacgtgtaccctaaaccacggctaaccagaattttcaggctgagagagacagaaagaggggcagaagggagactggagagggaaaagacaaaaaaagacagagctttggggagtcaaaagaagtgaatggcttg

SEQ ID NO: 869938 - DNA, 591 bp, Homo sapiens
ataaagaaatagggaaggcaaagccagttaaacagtcagcttggcggactccagcaaaagagctattaacaaaatattgagatctgtggaaagataaagtccatagagttgaagcactgacctctacacattcataatcaaaacatgaaggtagcagagtctaggatttgtttaatactctcctatcctcttctctccctttctcttattwccttcccctttcctgcccccttcacaccacagacacacacacaagacctggatgatagcttaatggcaattccatacccacttttaatctacccaaattaccaggttctccctgccatatgccaaggtgccagtgagctttctggtgccacccagcaattcagagtggttacgatggtaagatgagagctgtgcctctgctacagttggcctcacaaactccccttgcttatggcttcttaactttgcaataataagccccttggagaaaaataaaaagccaaggaatgaagaagggatcccagactaaatgtgaaaagaagaaaataaaacacccattttcaaatcagaagacaggaaaaaacaggggcaggaactggt

SEQ ID NO: 869939 - DNA, 662 bp, Homo sapiens
gcaccctcacccactgcttaaagtagattagttactcataacagtgaaatttcctttacatgaagtggtctaactttaaagttgttataagacatataatagggaagagcttggcaaattacagaatagcaaatatatatatatacacatacatatatatatttataaatttaatctacatagataacaaatcaytttaagatctttagaaatatctagtcacataacagccattgtgataaggcagaagttagatgaactagaatttatttacctctcttttttgatagtatttttattgcgatatactaaatttattaaagtttgaataaactcaaaattcaccattttaaggtatccattcagtagtctttagtgtatttgccatgttgtgcaaccactaccactatctatttccagaaatgttctatcttcctccacaagaaactccaaacctgctaaaattagcttcaatatgcccccttctagcatgccctggatcagcagcctagccacttcacccgtcttatgtgtagactgtggggcactgatgccctccccactctactcccaggcatgtctccaggcattcagagcacttgctgcctgaattagccacctgagctgccccacccttcctgtgcacagattgtggtgcagca

SEQ ID NO: 869940 - DNA, 636 bp, Homo sapiens
tcaaaaactagaatatacattcttctcgtctgcacatgaaacatactcaaacgttgaccatatccttggccatacagcaagtctgagtaaagtcaaacaaatcaaaattacaccaagcatctcctcagaccacaatggaataaaaatagaaataaataccaagaggaactcaaaaccacataaatatatgaatattaaacaacttattcctgaatgacttttgagtaaacaataaaattaaggcagaaatcaaaaagttctttgaaacaaatgaaaatatagacacaacataccaaaacctctgggatatgggaaaagcagtgttaagaggaaagtttatagcactaaacacctacatcaatragatagaaatatcttaaattaacaattcaatttcacacctgaagaatctagaccaaaaaaaaaaaaaaaaaccgaaagctagcagaagaaaataactaaaatcagagcagaactttatgaaattgagacccccaaaaacacaaacagaatcattaaaatgaaaagtttattctttgaaaggacaagatatatagaccactaggctcaattaacaacaacaacaacaaaaaaaatccaaataagcacaaagttaacaaaggtgacatccaacca

SEQ ID NO: 869941 - DNA, 642 bp, Homo sapiens
ttgtctcagcccaaaatctccttaagctgataagcatcttcaggaaattctttaagactgttgaaaattgtccccaatctcttctggcttgtaaagtttctgctgagaaatctgttgtttttctgatgggctttcctttttaggtgacctggcctttttctctggctgccccacacattttttttccttcattttgactttggagaatctgacrattatgtgtcttggagttgatcttctcatggagtatcttactggggttctctggatttcttgaatttgaatgttggcctgtcttgctaggttggggaagttctcctggatgatatcctgaagtgtattttccaacttgattctgttctcctcatctttttcaggtacctctgtcagtcttaggttcagtcttgtaacataatcccatagttcttgaaggttttgtttgttccttttcattcctttttctctaatcttgtctgcctgtcttatttcagcaagattgtcttcaagctctgatatcctttcttctgcttggtctatttggctattgatacctgtgtttgcattatgaaattctcatgttgtgtttttcagctcctttagatcatttattttcctctctacactgataattctggttaatag

SEQ ID NO: 869942 - DNA, 642 bp, Homo sapiens
ttgtctcagcccaaaatctccttaagctgataagcatcttcaggaaattctttaagactgttgaaaattgtccccaatctcttctggcttgtaaagtttctgctgagaaatctgttgtttttctgatgggctttcctttttaggtgacctggcctttttctctggctgccccacacattttttttccttcattttgactttggagaatctgacaattatgtgtcttggagttgatcttctcatggagtatcttactggggttctctggatttcttgaatttgaatgttggcctgtcttgctaggttggggaagttctcctggatgrtatcctgaagtgtattttccaacttgattctgttctcctcatctttttcaggtacctctgtcagtcttaggttcagtcttgtaacataatcccatagttcttgaaggttttgtttgttccttttcattcctttttctctaatcttgtctgcctgtcttatttcagcaagattgtcttcaagctctgatatcctttcttctgcttggtctatttggctattgatacctgtgtttgcattatgaaattctcatgttgtgtttttcagctcctttagatcatttattttcctctctacactgataattctggttaatag

SEQ ID NO: 869943 - DNA, 605 bp, Homo sapiens
tctttcccattggtctatatttctgttcttgtacctgtaccatgctgttttggttactgtagccttgtaatatagtttgaagtcaggtggcgtaatgcctccaattttgctctttttgcttaagattgccttggctattcargctcttttttggttccatatgaattttaaaatagttttttataattctgtgaagaatgccaatactactttaataggaatggcattgaatctataaattgctttggacagtatgaccattttcatgatattgattcttcctatccatgagcattaaatgttttctcattttcttttgttttcctgtttccttaaaagtctcataggtttttgttataaacaaggtatcatggatataatagaaaccttagattcttaattgcttttaagagacttgctgtgtttttaaattttcttttgtttatttttagtaacttgtatgaatttaaactgaaatttatcttctcaaaataaatctcttgcactaagtgttgccactgatcatttcagatcacttatatttcacattcttacactaagtataaccactgattactttcagatcattttatttgtattccact

SEQ ID NO: 869944 - DNA, 605 bp, Homo sapiens
tctttcccattggtctatatttctgttcttgtacctgtaccatgctgttttggttactgtagccttgtaatatagtttgaagtcaggtggcgtaatgcctccaattttgctctttttgcttaagattgccttggctattcaggctcttttttggttccatatgaattttaaaatagttttttataattctgtgaagaatgccaatactactttaataggaatggcattgaatctataaattgctttggacagtatgaccattttcatgatattgattcttcctatccatgagcattaaatgttttctcattttcttttgttttcctgtttccttaaaagtctcatargtttttgttataaacaaggtatcatggatataatagaaaccttagattcttaattgcttttaagagacttgctgtgtttttaaattttcttttgtttatttttagtaacttgtatgaatttaaactgaaatttatcttctcaaaataaatctcttgcactaagtgttgccactgatcatttcagatcacttatatttcacattcttacactaagtataaccactgattactttcagatcattttatttgtattccact

SEQ ID NO: 869945 - DNA, 571 bp, Homo sapiens
tttaaaatagttttttataattctgtgaagaatgccaatactactttaataggaatggcattgaatctataaattgctttggacagtatgaccattttcatgatattgattcttcctatccatgagcattaaatgttttctcattttcttttgttttcctgtttccttaaaagtctcataggtttttgttataaacaaggtatcatggatataatagaaaccttagattcttaattgcttttaaragacttgctgtgtttttaaattttcttttgtttatttttagtaacttgtatgaatttaaactgaaatttatcttctcaaaataaatctcttgcactaagtgttgccactgatcatttcagatcacttatatttcacattcttacactaagtataaccactgattactttcagatcattttatttgtattccacttttttagcctggcttcctaggaatcgcccatgagtatacacatcttggtggtatgccaatattgaggcagaaatagctgttaaatcccttgagtcagaaacattttcactgattgatttgagtggtgtgtgt

SEQ ID NO: 869946 - DNA, 652 bp, Homo sapiens
tctatccccaacagtatttcagacagaagtattcacaatttcttattaaaaatatattggcacaaattataaagccctagcttttaatgtttatagcatgcattgtctcttttaggttgtaatacacagtgggaaagaaatgggtttagaaattaaaaataaatgaataaccttcggccatatgatgtcaatcatgcctaaactaaagcatcaccacaataattgtttatatctgacttttgttttctgctgtgattatgtgaatatgcttgtgatggaaaataaatgagatcaaaagggcataaatatgtgatagaaagggtctgtgaacagtttaaggcctgaccacacaaaggcacaggctcgagtaacsagctgttcctgtatttttaagaattacctcattaatgcaaaacatccttacagagaaatacattaaatcaaatgcaagaaattatacatgaggtattggaataacaattcagaaaaccaaagaagttcagctaattcaaagatcttttttttatatgttcctgatgggcggagtccagacaatcattctatccgttccaaacaacagtagactccagctctgtttcatgtcaaattgcaacactgtcatcactgagactgagactggctttggagtcac

SEQ ID NO: 869947 - DNA, 669 bp, Homo sapiens
aaaatcgaaagcaagttagtttcttgctaggtacaatgggggtacaggcattgggtaaatacagccattccaaatgggagaaattggccaaaacaaaggggttacaagccccacacaaatccgaaatccagcagggcattcaaatcttaaatctccaaaattatctcctttgactctatgtctcccatctgggtcacactgatgcaagaggtgggttcccatgatcttgggcatgtctgcycctgtggccttacaaggtacatcctcccacctggttgctttcacaggctggtgttgagtgcagcttttccaggagcacggtgcaagctactggtggatctatcattctggggtctggaggatcatgtccctcttctcatagctccactaggtggtgccccagtaggggctctgtgtggggacttcaaccccacattttccttctgcactgccctagcaaaggttctccttgacagccccacccctacagccaacttctgcctgggtatccaggcatttccatacatcttctgaaatctaggcagaggttctcaaacctcagttcttaacttctgtgcacttgcaagctcagcatcacatgaaagctgccaagacttgagccttgcaccctctgaagccacagccacagctctacattggcccctttca

SEQ ID NO: 869948 - DNA, 669 bp, Homo sapiens
aaaatcgaaagcaagttagtttcttgctaggtacaatgggggtacaggcattgggtaaatacagccattccaaatgggagaaattggccaaaacaaaggggttacaagccccacacaaatccgaaatccagcagggcattcaaatcttaaatctccaaaattatctcctttgactctatgtctcccatctgggtcacactgatgcaagaggtgggttcccatgatcttgggcatgtctgctcctgtggccttacaaggtacatcctcccacctggttgctttcacaggctggtgttgagtgcagcttttccaggagcacggtgcaagctactggtggatctatcattctggggtctggaggatcrtgtccctcttctcatagctccactaggtggtgccccagtaggggctctgtgtggggacttcaaccccacattttccttctgcactgccctagcaaaggttctccttgacagccccacccctacagccaacttctgcctgggtatccaggcatttccatacatcttctgaaatctaggcagaggttctcaaacctcagttcttaacttctgtgcacttgcaagctcagcatcacatgaaagctgccaagacttgagccttgcaccctctgaagccacagccacagctctacattggcccctttca

SEQ ID NO: 869949 - DNA, 612 bp, Homo sapiens
cctctctttccttgtactctctgcactcgcttgactacccttcactttcagccatgagtggaagcaacatgaggccctcaccagaagctgagctgatgctgacaccatgatttctgtacagcctgcagaaccatgagccaaataaacctctgtttctttacaaattacccagcctcaggtatwcttttacaggaacacaaaacaggctaaaacatagatcatcagctgggttgcagttacatatgatatatcattgagcagtcaaatcaatgtgcagaagtcacaagcattctgatacatcaacaactggcaagaagagagccaaataatgaatgaactcccattcacaattgctacaaatagaataaaatatctaggaatacaattaacaagggaagtgaaagacctcttcaaggagaactacaaaccacggttcaaggaaaccagagaggacacaaacaaatggaaaaatattccttgttcatggataggaagaatcaatatcatgaaaatggccacactatccaaagtaatttatagattcaatgctattcccaataaattaccactgacattcttcacagaattagaaaaactattttaaaattaata

SEQ ID NO: 869950 - DNA, 591 bp, Homo sapiens
tcccagggctgcactgatgccagcaacaatcgctgaggttaatcctgcaggggaggggtgacctattattatccccacttacagtccaggaaacagaggctggggaccagaatgacacaccaaagccaccagcaagaaaggtcaaatagtgagggcaccttgaaccccagcgcccatgactttcggggcaaggatgggaggaaggtgtaggatgtctcttgccccgctgtgggcctggaactgccaccccatcccaagaccayagcctccctcctgcccaggcccccctgcggatccaggccaagacggagccctgcaggaggtcagaggaggggacttctttgcaccctgcgcctctttccaatcgccagagggcagggccctacccacattggggatgggaagtcaaatgcagaagttaggtgaagtcagttcttggatactcctgtactgtcaccctggtcttatctcatgccttagcccaagctgtgcacacaatggggtcctaggtccccctcacctcccagattccaccttcccagggatgggaccccctggaaccctcgggggcctgggcagtggccttgctgg

SEQ ID NO: 869951 - DNA, 622 bp, Homo sapiens
atttaaaaaagttcacaaattagtagaatttaaacaacacactctcaaacaaccaatggatcaaagaaatcacaaagaaattataaaattcttaaagacaaatgaaaatgaaagcacactatatccaaacttatgggctgtggccagttgtggtggctcacacctgtaatcccagcactttgggagactgagggaggtggatagctagaggtcaggagttcaatttcagccaggccaacatggtgaaaccctgtctctactaaaaacacaaaaattagctgggagtggtggtacgtgcctgtagtcccagctacccaggaggctgaggcatgaraatttcttgaacccaggaggcagaggttgcaccactgagctaacaccactgcactccagcctgggtgacagaatgagactctgtctcaaaaaacaaagaaacaacaaaaaaacacaacttatgagttgtggtgaaaggagtgctaaggaggaaatttatagctataaacacattaaaaaaagaaacacctcaattcaacaacataagtttacacattaagaaactagaaaaagaagaataaaactaaacccaaagttagcagaaggaaggaaacaatagagatcaggg

SEQ ID NO: 869952 - DNA, 569 bp, Homo sapiens
gggcagattagtgggagaaacaggcagagtctacaagggatccctccgttatttcttacaactgcatgtcaatctataatgatctcaagaaataaaaattcaattttaaaaacctgcagttccaagtctgccttgcagctggaggtagtcaatgagatggaaagcagcagctcttacggaaatcacagaagtctaggatgtacactttgctctttttctcccttccttatgtttcttgccaagaatgtgaatgtgaggatgggaatacagcagttatcttgaaccaygaagcaacactgagggaagaagccacgtgaaaagggtggtgaaatatgaaagaaggaaggaatcttggtcactgctgcctcatctggtttatgcctttagaatcacagtccgttggagtgacatcccctggagttgtgcggtgcataacctgggcaactaaacatacatgtgcaaccactaacaccgtgaaactgactgatattaatctcctggactgttaacctttagatttctgttgcataagacaggaataaacttgttttgtaaaggctgtgggtttt

SEQ ID NO: 869953 - DNA, 569 bp, Homo sapiens
gggcagattagtgggagaaacaggcagagtctacaagggatccctccgttatttcttacaactgcatgtcaatctataatgatctcaagaaataaaaattcaattttaaaaacctgcagttccaagtctgccttgcagctggaggtagtcaatgagatggaaagcagcagctcttacggaaatcacagaagtctaggatgtacactttgctctttttctcccttccttatgtttcttgccaagaatgtgaatgtgaggatgggaatacagcagttatcttgaaccatgaagcaacactgagggaagaagccacgtgaaaagggtggtgaaatatgaaagaaggaaggaatcttggtcactgctgcctcatctggtttatgcctttagaatcacagtccgttggagtsacatcccctggagttgtgcggtgcataacctgggcaactaaacatacatgtgcaaccactaacaccgtgaaactgactgatattaatctcctggactgttaacctttagatttctgttgcataagacaggaataaacttgttttgtaaaggctgtgggtttt

SEQ ID NO: 869954 - DNA, 578 bp, Homo sapiens
ggtggtaatttgttacacatgacaacgataagaaactaatacaaatgcctacattcatagttaactaattggcatgttgatttcagagtaataaaacatggctactgcaggaactctgacgtaaatagtatatttcgtaaatatactataatacattataatagtatatctggtaaaatacaataaaattcagggtgcttagaagtcccgggaaggaaatcctcacctattgttatttataaaagaagaaacaaaaacttattttatttaagccgttatttttcaggagctggtagaagacaattttgagggacacaggaattattaataaccatttcctgctggactgtattgaatggacacgcttcatcttaaaccactgctgtttccatttctgcatgagaaagtkcccactgagcttttaaagcttttgactgaagcatgacctcaacagaatgcttctgtttaggcttgtgtttttaccctctccaaggaaaatactttttttcaagtgcagagttacaaaccataagctagagaaagcatgattttatcaggccatagagaaataaagttct

SEQ ID NO: 869955 - DNA, 606 bp, Homo sapiens
aaatgattcctttttggcaacctcatctcctatgacagataattccttactgaaggaattgtggttcacccagtaggcaaatcagattgcattttctcatagaaagaatattttacagagttctgagatgccagaaccagccttcaagatgccaactaacctacaatgtatttgcagtattcatactattttcacacataatcccctgcccctgccctcgccgtgagtaaatgtcagcaagagtgctcacttgggttactaaattaatttttttamtcactaggattacttcttggggatggggataaaattaaaagcaacgctatgattcaattcagaatcttctaactaaaacggaaattgcaaatacatccctcctgcctcattaacactatctaggtggccaccatgctcctcgtaactgtaaactgtagaaagggttccactggagtttagttggggttaggcaagggcctcatttaggcaagggtaacttattatcacacaaaaacacacaaataaaaacactattctataactttatggttgcatagaagaagctgtcacttaattctaataatttactgcatgattaagaaataaaga

SEQ ID NO: 869956 - DNA, 607 bp, Homo sapiens
ttcagcaacagtaggccccacctgtcagtcatcccatttagaatgattctgccagtctctttttcattccatggaaatacctttctttccagtccaggacacatgtaagtgtcccttaatggaggaagggcatgctagaaaattttcaatttaccccccaggtcctctcttcactcttctccatcttgtcatttgcccaaggaagctgacctgaatggtgcatgcatctacagctccattgacttctgtctcctagttgggtgttgtatagctgagatatttgtcccctctggatgtcatgttgaaatatcmccaatattagaagtggaacctagtgggaggtgtttgggtcatgggggcagatccttaatgaatggcttggtgccatccccttggtgataagtgagttctcactccattagttcacatgagatttggttgtttaaagaatctggcgtattccttttatttcttgatcccttctcttttgctttgtctcttgccatatgacatgcctgcttcctcttcaccttctgccctgagtaaaagcttcctgaggcctcaccagaagccaaacagatgccagtgccatgcttgtacagcctgc

SEQ ID NO: 869957 - DNA, 644 bp, Homo sapiens
cccagtgtgtgatgttcccctccccatgtctatgtattctcattgttcagctcccacttatgagtgagaacttgcggtgtttggttttctgttcctgtgttagtttgctgagaatgatagtttccagcttcatccatgtcccggcaaaggacatgaactctttcttttttatggctrtatagtattccatggcatatatgtgccacatttgtgttatccagtctatcattgatgggcatttggtcagttccaagtctttcctattatgaatagtgctgcaagaaacatatgtgtgcatgtgtctttataatagaatgatttatgaccctttgggtatatagccagtaatggaatcactgggtcaaatggtatttctggttctaaatccttgagaaataaccacactgtcttccacaatggctgaactaatttatactcccaccagcagtgtaaaagcattcctatttctctacatcttctccagcatctgttgtttcctgattttaaatggttggcattctaactggcatgagatggtatctcattgtggttttgattttcatttctctaatgaacagtgatgatgagctttttttcatatgtttgttgtccacacgaatgtcttcttttgagtagtgtctgtt

SEQ ID NO: 869958 - DNA, 702 bp, Homo sapiens
cagtttccttactaagtaatacctacttatgccggtgctttagtagaatgatacagagcagaaggtggttaagacaatacatggctcacagcaggggtttgaagagacaactattattaattaggtcttccataaatatgtgtgatttggtgctcttactagctagtgtccagggggcctctcttgtacttttttttgtagtagtctaggaaaattggagctaaataaggtgaaagcctgcagagaggtgcagcacggagcattcccatacattttagcgactgtttattgtggatgtgtcatgtctatttgcctccttcctctttcaaagaattgatgcyatccagcgttggcgtgttttctcttcagttcttagagccctgcttactaagtcagtgaaattgtttatattgctttcaaagggccaagaagtgaaaccatttgaaaagagataggattatgttggggttttagaaagctgacatgtaacactaattttttccatctcgcattcacaatatattgagagaggacccagaagacagataaatggagatcaaaattttaaaatatttgttatgtattttgaaaattctaatcatgccaaagaagatgactttagctctatggtctaatacttcccctaggtctatgctaaggcttctcaaagcaaagaagagcaaagcaaaacaaaacaaagga

SEQ ID NO: 869959 - DNA, 622 bp, Homo sapiens
tgttccattggtctatatatctgttttggtacccataccatgctgtttggttactgtagccttgtagtatagtttgaggtcaggtagtgtgatgcctccagctttgttctttttgcttaggattgtcttggctatacgggctcttttttggctccatacaaaatttaaagtggttttttctaattctgkgaagaaagtcaatggtagctctttgagaataacattgaatctataaattacttagggcagtatggccattttcacaatattgattcttcctatccatcagcatggtatgtttttccatttgtttgagtcctctcttatttccttgagcagtggtttgtagttccccttgaagagttccttcacatcccttgtaagttgtattcctaggccttttattctctttgtagcaattgtgaatgggattttactcatgatttggctctctgcttgtctattattggtgtatagaaatacttgtgatattttcatattgattttgtatcctgagactttgctgaagttgtttatcagcttaaggagttttgggctgagataatggggtttctaaatattcaattatgtcatctgcaaacagataaattggcttccctta

SEQ ID NO: 869960 - DNA, 681 bp, Homo sapiens
cttctagattttctagtttatttgtgtagacgtatttatagtattctccgatggtagtttgtatttctgtgggatcagtggtgatatctcatttatcattttttactgtgtctatttcattcttctctcatttcttttttattagcctggctagcaagctatcgattttgttgatcttttcaaaaaatcagctcctggattcaytgatttttagaagggttttttgtgtctctatctccttcagttcttttctgatcttagttatttcttatattctgctagcttttgaatttgctcttggttctccagttgttttaattgtgatgttaggattttgattttagatctttcccactttctcctgtgggatttagttctataaatttccacctaaacactgctttagctgtgtcccagtgattctggtatattgtgtctttgttctcattggtttcaaacaacttatgtttctgccttaatttcattatttacccagtagtccctcaggagcaggttgttcagtttccatatagttgtgcagatttgggtgagtttcttaatcctgagttctaatttgattgcactgtcctctgacagactgtttgttatgatttcagttcttttgcatctgctgaggagtattttccttccaattatgtggtcagttttagaataagtgct

SEQ ID NO: 869961 - DNA, 681 bp, Homo sapiens
cttctagattttctagtttatttgtgtagacgtatttatagtattctccgatggtagtttgtatttctgtgggatcagtggtgatatctcatttatcattttttactgtgtctatttcattcttctctcatttcttttttattagcctggctagcaagctatcgattttgttgatcttttcaaaaaatcagctcctggattcactgatttttagaagggttttttgtgtctctatctccttcagttcttttctgatcttagttatttcttatattctgctagcttttgaatttgctcttggttctccagttgttttaattgtgatgttaggattttgattttagatctttcccactttctcctgtgggatttagttctataaatttccacctaaacactgctttagctgtgtcccagtgattctggtatattgtgtctttgttctcattggtttcaaacaacttatgtttctgccttaatttcattatttacccagtagtccctcaggagcaggttgttcagtttccatatagttgtgcrgatttgggtgagtttcttaatcctgagttctaatttgattgcactgtcctctgacagactgtttgttatgatttcagttcttttgcatctgctgaggagtattttccttccaattatgtggtcagttttagaataagtgct

SEQ ID NO: 869962 - DNA, 628 bp, Homo sapiens
agaactttctttatgaagctgggtgctccagtattgggtgcatatatatttagcattgttagctttgcttgctgctttgatcactttaccattatgtaatgccattctttgtcttttttatgtttgttggtttaaaatctgttttatcagaaactaggattgcaacccctgctgtttttttttctttccatttgcttggtaaatattcctccatctctttattttgagcctttktgtgtctttgcacatgaaatggatctcctgaatactgcacattgatgggtctcgactctatttaatttgccagtctgcgtattttaattggggcatttagcctgtttacatttaaggttaatattgttatgtgtgaatctgatcctgtcattatgatgctagctggttattttgcccattagcttatgcagtttcttcatagtgtcaatggtatttacattttggtatgtttttgcagaggctggtactgctttttccttctcatatatagtgcttctttcaggagctcttgtaaggcaggcctggtggtgacaaaatccctcagcatttgcttgtctgtaaaggattttacttatcattaacttatgaagtttagtttggctggatatgaaac

SEQ ID NO: 869963 - DNA, 628 bp, Homo sapiens
agaactttctttatgaagctgggtgctccagtattgggtgcatatatatttagcattgttagctttgcttgctgctttgatcactttaccattatgtaatgccattctttgtcttttttatgtttgttggtttaaaatctgttttatcagaaactaggattgcaacccctgctgtttttttttctttccatttgcttggtaaatattcctccatctctttattttgagcctttttgtgtctttgcacatgaaatggatctcctgaatactgcacattgatgggtctcgactctatttaatttgccagtctgygtattttaattggggcatttagcctgtttacatttaaggttaatattgttatgtgtgaatctgatcctgtcattatgatgctagctggttattttgcccattagcttatgcagtttcttcatagtgtcaatggtatttacattttggtatgtttttgcagaggctggtactgctttttccttctcatatatagtgcttctttcaggagctcttgtaaggcaggcctggtggtgacaaaatccctcagcatttgcttgtctgtaaaggattttacttatcattaacttatgaagtttagtttggctggatatgaaac

SEQ ID NO: 869964 - DNA, 677 bp, Homo sapiens
attaaatatcacaatatgatgcctgatttagcatgaagtgggaaattatagcacataattgaaacccatgggttcgtgaacttcagcccatactttaaaaagttgtgtcagttttaaaattaaatattaattcactttgttttaaaacgtacaatttatacacttatcttgttttatgaacaacttaaaagctttttttaaagctcttagaattttgttacattttactgttttatrcaagcaatccaagatgtgggattattagggtggtagagagatactaagatactaatagagaaatagcataactcttttttttttttttccaagatggagtctcacttggtcatccaggctggagtgcagtagtgtggtctcagctcactgcaacttctgcctcccgggttcaagcgatactcctgcttcagcctcccaagtagctgggattacaggcatgcacccccatgcctggctaatttttgtatttttggtagaaacagggttccaccatgttgcccaggctggtctggaacccctgacctcaggtgatccacccactttggcctcccaaagtgctgggattacaggcttgatctctgtaacgcctggcctcattttcatttgaataaatctagaaattttatgtcagaaacaccattgataaagagtttgcaatt

SEQ ID NO: 869965 - DNA, 677 bp, Homo sapiens
attaaatatcacaatatgatgcctgatttagcatgaagtgggaaattatagcacataattgaaacccatgggttcgtgaacttcagcccatactttaaaaagttgtgtcagttttaaaattaaatattaattcactttgttttaaaacgtacaatttatacacttatcttgttttatgaacaacttaaaagctttttttaaagctcttagaattttgttacattttactgttttatgcaagcaatccaagatgtrggattattagggtggtagagagatactaagatactaatagagaaatagcataactcttttttttttttttccaagatggagtctcacttggtcatccaggctggagtgcagtagtgtggtctcagctcactgcaacttctgcctcccgggttcaagcgatactcctgcttcagcctcccaagtagctgggattacaggcatgcacccccatgcctggctaatttttgtatttttggtagaaacagggttccaccatgttgcccaggctggtctggaacccctgacctcaggtgatccacccactttggcctcccaaagtgctgggattacaggcttgatctctgtaacgcctggcctcattttcatttgaataaatctagaaattttatgtcagaaacaccattgataaagagtttgcaatt

SEQ ID NO: 869966 - DNA, 677 bp, Homo sapiens
attaaatatcacaatatgatgcctgatttagcatgaagtgggaaattatagcacataattgaaacccatgggttcgtgaacttcagcccatactttaaaaagttgtgtcagttttaaaattaaatattaattcactttgttttaaaacgtacaatttatacacttatcttgttttatgaacaacttaaaagctttttttaaagctcttagaattttgttacattttactgttttatgcaagcaatccaagatgtgggattattagggtggtagagagatactaagatactaatagagaaatagcataactcttttttttttttttccaagayggagtctcacttggtcatccaggctggagtgcagtagtgtggtctcagctcactgcaacttctgcctcccgggttcaagcgatactcctgcttcagcctcccaagtagctgggattacaggcatgcacccccatgcctggctaatttttgtatttttggtagaaacagggttccaccatgttgcccaggctggtctggaacccctgacctcaggtgatccacccactttggcctcccaaagtgctgggattacaggcttgatctctgtaacgcctggcctcattttcatttgaataaatctagaaattttatgtcagaaacaccattgataaagagtttgcaatt

SEQ ID NO: 869967 - DNA, 677 bp, Homo sapiens
attaaatatcacaatatgatgcctgatttagcatgaagtgggaaattatagcacataattgaaacccatgggttcgtgaacttcagcccatactttaaaaagttgtgtcagttttaaaattaaatattaattcactttgttttaaaacgtacaatttatacacttatcttgttttatgaacaacttaaaagctttttttaaagctcttagaattttgttacattttactgttttatgcaagcaatccaagatgtgggattattagggtggtagagagatactaagatactaatagagaaatagcataactcttttttttttttttccaagatggagtctcacttggtcatccaggctggagtgcagtagtgtggtctcagctcactgcaacttcygcctcccgggttcaagcgatactcctgcttcagcctcccaagtagctgggattacaggcatgcacccccatgcctggctaatttttgtatttttggtagaaacagggttccaccatgttgcccaggctggtctggaacccctgacctcaggtgatccacccactttggcctcccaaagtgctgggattacaggcttgatctctgtaacgcctggcctcattttcatttgaataaatctagaaattttatgtcagaaacaccattgataaagagtttgcaatt

SEQ ID NO: 869968 - DNA, 596 bp, Homo sapiens
gaccttattgtctatatgctatcaggcttttggtaaaagccattccacaagtctctagaaagttccaaactttctcacgttttcctgctttcttttgagcactccaaattgttccactctctgcctgttacgcagttccaaagttacttccacatttttgcttacctttttagcaatgcccygctctactggtaccagtttactgtattagtccattttcatgctgctgataaagatatatctaagactgggaagaaaaaaagttttaattggacttacagttccacatgtttggggaggcctccaaatcatggcagaaggcaaaaggcacttcttacatggcggcagcaggagaaaatgaggaagatgcaaaagcggaaacccctgatgaaaccatcagatctcatgagacttattcactaccacaagaacaatatggggaaaaccacccccgtgattcaaattatctactactgcatccctcctacaatgcgtgggaattataggagtataattcatgatgagatttggctgggtcacagggccaaaccatgtcagccctgtggttgctttcatgggctggcattgagtgcctg

SEQ ID NO: 869969 - DNA, 594 bp, Homo sapiens
tcagtgaaaaccttataggccagaagtgaacggtgtgacatatttcaatgctgaagaaaaaaatttttgacctagaacagtatattcagtgaaaatatccttcaaaccttaaggagaaatactttcccagaaaaacaaaagttaaaggatttcataaataccagaattgtcccacaagaaatgcaaaagagagtacttcaatcagcaaaaaaaaaaaaaaaaaaaaaaaaattgatttttaatgagcaataataaataatctcaaggaacaaaactcactgatagtattaggtmcacagaaaaacacaaaatattttaatgttgtaactgggatatgtaaactactctcaagtaaaaagactaaagggtgaaccattcaaaaataataactacaacaacttttcagggcttaggcggtaaattaagatttaattagaaccaacaagaagttaaacaacggggagatgaagttaaaaaggggtataatttttattagttttcttttggctggttggttaattcaaacagggttaagtttttgtcagcttaaaataatgggttacaaagcagtatttacaagctacattgtaactt

SEQ ID NO: 869970 - DNA, 561 bp, Homo sapiens
ctagccaaaatggcaaaactctgactctattaaaaaacacaaaaattagccacctgtagtcccagctactcgggaggctgaggcaggagaatcgcttgaacctgggaggcggaggttgcaatgagccaagatcgtgccactgcaatccagcctgggcaacagagctacactccatctcaaaaaataatagtaataaataaataagctgggcatggtggcacrtgcctgtagtcccagctactctggaggctgaggtgggaggatcacctgagcccgggaggttgaggctgcaatgagccatgattgagccactgcactccagcctggatgacagagcaagactctatctcaaaaaataaataaatctaagagtatggttcttgcctgctaaaaaaagaaaaaaataaataaaatctaagagtataagtttggcctagggttgccaaataacatacaggataaccagttaaatttgaatttcagataaacaaatcatttttagtgaaagtacatctcaaatatactaaaaattacccattgtttacctgaaattcaaatttt

SEQ ID NO: 869971 - DNA, 622 bp, Homo sapiens
tttcatatagttcagtttaaataactgtcattaagttataattttaaatcattaatcagaacatctactaagtataaaaatagaaaaacccacattagaaaaataaaaacttaagtattggtttttctgatattagaccagaatatattctcctagtgtcatattcctaaaatagtcttatatttctcaacatcccaaatatcaaagctatcaaacaaggttgtatacatcaaagattatacactattacataaaataagtatttcttgtataagatgattccatacaagtttttaaaagctkcctgtgaacaaattatatccattaatataattcaagttgtaataatctttaaaaatatatttattaggaagaaaaaatcccaacatcaactgcaaatcacaattattagctacatcaacacaatgttagactggctcaccttctgaagtaaagcaccaagagttgcaactccatgggagtgaataagattgccctggttgataggatgtctctgaataaaatgtttcacaattaagataaatgttgcaactaggtttctctctagtcttgactctgtagaatcaggaacatattaattatcataatttctctaatcact

SEQ ID NO: 869972 - DNA, 660 bp, Homo sapiens
ccttacagaggaaagctttttttactgtagtctccagccatttgcaagagcatcatctgagtgattgttaaagttacagaaattgaagcaaaagaaaaatctgcatttctaacgagttctttaggaagtattatttatatctaggtttgagaactattggtctaagggctttctttcagttttattttatctggagagactcccactcactctgacacctttcagaagccacctttgcctgtagtggttactgcaaggcatttcctgagccggcctcttagaacaaaatgtggaagggggcaatgagctgagtggtggtggaattacagagagaawcatttgttgtaattcaccaccccgtacatctgtggtgggaggttatgaagagtgatggatggtgaaggatggcactctgtgatcttctctctgctgaggactcagggaatgtagccatggcaggaaagcaggggttgccagcaagaagctgcccaagtgtgtgaccttgaccaaggcagggaacggggcctgccaaagactaaggcagctgctactgggaggattccctaaatgctttatggcagactgcatttctcaaaatggttcaacgatatttttagacccacatgctcttccagaactgtatctctccttttaaaaggt

SEQ ID NO: 869973 - DNA, 660 bp, Homo sapiens
ccttacagaggaaagctttttttactgtagtctccagccatttgcaagagcatcatctgagtgattgttaaagttacagaaattgaagcaaaagaaaaatctgcatttctaacgagttctttaggaagtattatttatatctaggtttgagaactattggtctaagggctttctttcagttttattttatctggagagactcccactcactctgacacctttcagaagccacctttgcctgtagtggttactgcaaggcatttcctgagccggcctcttagaacaaaatgtggaagggggcaatgagctgagtggtggtggaattacagagagaatcatttgttgtaattcaccaccccgtacatctgtggtgggaggttatgaagagtgatggatggtgaaggatggcactctgtgatcttctctctgctgaggactcagggaaygtagccatggcaggaaagcaggggttgccagcaagaagctgcccaagtgtgtgaccttgaccaaggcagggaacggggcctgccaaagactaaggcagctgctactgggaggattccctaaatgctttatggcagactgcatttctcaaaatggttcaacgatatttttagacccacatgctcttccagaactgtatctctccttttaaaaggt

SEQ ID NO: 869974 - DNA, 645 bp, Homo sapiens
ttggaacatggtcactgcgacctaccacacaagcttacacattgattgctattgtgtactctgtacttcctagttttatgtctccttgcacaaacacatttgattttcacaatcatctggttcagctcaagggaaactccttgcaacactgaataatacttccacatggctgtgagccagtaatcattgtaaatttctctggataactgtgggttatcaaaaaaacgactttctgtgtggtcgcatgtgagatggatagaagactggaaatgtactttcttgggctgcctgttataatgccaaatacaaaaaattttaaatgcttcaaagcaataggttaagtatggaaaaatctggatacttatctgaaggttatctgatcttccctaggtatgctttttcacaagaaataagtaccttctcaaagtgctaaattccttttctttttrtctgtccagatggatgtagcaaatgcaacttcctattcagcaaggtccagctgcctctcccagcatgttcatctccactggagggcacaggagtttgtatatcaaaggctataaaacttatttggagacctggttcaggatggatttggcctaatttttatattatgcaagcagatcaccccgataaactttcatg

SEQ ID NO: 869975 - DNA, 644 bp, Homo sapiens
ccctatggatggaagttatagtaaggaaagtacaagttcatgtgcccagatgggttgaagttgttttaacatatggagatgcttgtgacgtaacagatccaatggagaacaataggattattctatcttgaactgcaaattttaaatataaaatgtaaaatttgggacttaaaggtcatgaacagtttgcaaagactagtcaagtctaacagagaaatgctctccatttcagaagttgagaggcactgaaaacactgtgttatctcttcaagatcacatggtgaaactaytagtcaaaaaaacaaactaaaaacccccaaaaaaccaccagtttttagagcaggtgtcatattggtctttgttaacactgtaaggcacggagtcgggaaagactttagatgtttacacacaaattcatactgacctgcttagacttgataggaagagttaagacacagattttaaaaactaaagcttacttggtggaagaggctcatcgattgttgggtagtgatgatgttcaggcctcagggaaggaagctggcttactggctgggaattatggagtataggacattcacctacggacaagatagtcaatacattcagattcattcactgccgtggcaacatcatcaaaaaag

SEQ ID NO: 869976 - DNA, 584 bp, Homo sapiens
ttagagtaattcttttgttccctgaaggtgattgtttgacttatgtttcttgtcctcattattattctttctaatactcgaattttatttgttaagggagaaaaaaggcttaaaacaaagcctcattatcctcatctggataatgatggcattgtgagactatgcaatttcttgctttktttggcttaaagaacctctatatgtgcgtgaaataaatgccaatttaacgttttagatttctgctacaaggctggggcagctggaatcatccagcagttcctcctttatgctggtttgtggccattctcgttccaagagaagacaaacttgcatttcaaaattaaactctgaaatttaaaaataaaagcaggaaaaaaaaaaaaaccaaaactttcctaggccagaaggaatgatttaaattttcggagagctccttggcgtttcaagggtagtgataaaccattggaatttactttgatgtttcagctctagcacagcaccccctcagcctccccaggcctcctcctccatcccctgtgtctgactgggtagttactgctctggggcctggaacccttccagtc

SEQ ID NO: 869977 - DNA, 646 bp, Homo sapiens
gggtctgtgttcttactgtgtctcagaagcatttgacgcagtgggcctctttctccttgaagcgttctgttcccttggcttccatgccactgtgcactctggcagttctgcttggtgttctctactgcctgtgctgcctccctcggctccttgatgttggacttccttgacatccttttcctttctaccccctccctaggtggtctcatctcctccgtggctctaaatcccactcatacattgacagctctcaaatatctgtatacctggatctctcctctgaccccagatacctatatctaactgcctttctacctgaaggctcttggttatgttaaacttaacacacccaaaactgaacttctggttactccyctccagccccttcatcctcagcttccccatttcagtaaatggcacaactacccacccagttgttcaaaccacaagcctgggagacccccgtctccaatacaaatgcaggtccagataattctacttccaaactgcatccttaatcactccattttcaccatctctgctcccactagcctagtccaagctaccagcagctctcgagcaactgtgagagcctcctaatcagctgccactccacttccactctgtccctttctacttctttcct

SEQ ID NO: 869978 - DNA, 620 bp, Homo sapiens
atttaatgaatttctcttccatggattctttaaggagtttctaaccccagttcatattgtttatgttcttgagctggtagagaactaaagcagttctctaaccatgtctttcaatgtgtcacacttaattctaaagcaaatgtctaagggatttgttagtaatacaatgtcagcttttctcatttcagttatctgttcaaaagaatatggctctatctttcagaagaaaagagttacggtgatatatttttgattgtgcaggctcwagttattctctttctgagatggtgaaagcattctgactgcttcacataatgggtcatatactggcctaagcaatcaagtgtataagggatataatcattaagatgtaattgatccttgtatcggcattatgccaaataaagcagaaattgcaatctttggacctattcagttttccattaagtagaagactaaagtgaaatagagagatgtgatatttaacaagaattcctgtctggctcaagagattcattacatttgaattcatcttagaaataaggaatcaaagtgaacctgaccaagtatatagacattcactcctcttacctgtaaatcaatcaatcaataagaagaaa

SEQ ID NO: 869979 - DNA, 629 bp, Homo sapiens
tgctatgttttaagtcagcttccagtatagggtgctacttttcccacagccaggattcgtgagtccagaaatcaaggagagcaaacagaaattacccagttcactattacccctagtgatctaatctaccagcaaaatttctgcttcttgtccctgcaactttgggctctgcctgtctagagggctcagttccaaagggaggaatgcttccaccaggagacacaacaatgattctactgaactgttagttaaaactgccatctggccactttgggctcctcatgccttggaatcaacaggcagcagagggcgggtactgtactggctggggtgattaatcctgattaccaaggggatattaggtygctactatacaacagaggtaaggaagagtatgtctcaaatgtggcagatctcttagggtgtcccttagtactaacatgacctctaattagtcagtagaagatcacaacccagttcacatgggactgctagtggcctagaagacattttaggaatgaaggtcaccccaccaggcaaagaactaggacaaactgaggtacttcctgagggcaaagggaatatgaaaaggggagtagaaatatcaccctttccacaccaaacctggt

SEQ ID NO: 869980 - DNA, 651 bp, Homo sapiens
attaccaagcaaagccatcaagcattaaaggaaacaaagaagaaccaaaaaaatagaaagtacaaaatgatatggcaggggtaagatcaattattagttaaaacattaaatagaaattggaaatacttcactaaaattagattttttgaacaattcaacctgatcattactagagggacacrtaatataaaatatacaggaagtttaaatgggaaggatggacaaagtttatttaatcacttgcaagcagaaagggaagagatgatatcagataaagcaaaacaaaaagtgttaaaaggaatgaaaagggtcatttttataatgatcaagactaaatgtataactattacagactcttttgtgataaatctcattgttccaaaatatactgagtacaacctaaacgtcccaaaagaagaatggttaaatgtattgtggtatatctgtgtggtagtcttatttgtaatggttaagaatggtattgttgaagtttctttgtttatcaaaaaagccattagtgatatattgttgatcaaaaaaccatactgcagatagtgtgaatattatgcttctactttgattaaagtagaaccaaaaatgttaacaagggttatctctcagtgatgtaactggagtcaatttaaatatttt

SEQ ID NO: 869981 - DNA, 670 bp, Homo sapiens
tttttgggaatccactcatcccatggaatcaactttttgggacttaggaccagtgtcagtgagaaaataatatttgtttgcaaaagctcagactgggaccaatttttgttacttggatgcaaactgggtattttgaagagtctaaatattaggcaaagtttatgaacaaaccaatagaataacaccagcaatagctaatatttcacgagctctcactgtggaaggctggaagtgtcatcactttgttcaaagaacaaagtgtggccaaagtggtgaaatgtcttgccaacagctaatgagcagtggagacaggatttgctccctggaacccagtttctggagcccttgttcttggcccctccackattagatgttgtaatgcttgccaagctggatgtccaggcctcctgtatactttgaagtgaaccttgtaggcagcatttgtcaatcattttttagttaggtattgcctcctcatttttttccttgagcaataatagtaatttttcacatccttgatggcttgggaaactgtaaatcaaatggtacatagactaaaatgttaatagttattatgaactgttgccatcataggtgagttctatgctatctgtgcttttctcaattttttgcatttttactacacgtattgcttttggaatgagaagtt

SEQ ID NO: 869982 - DNA, 652 bp, Homo sapiens
cttgcttgtttgttttttgtttttgtttcaaatcttcagtgcctctttcagtgatatgaagttaaaatcagttactgtaagtgatcacctgattttttggttcttacgaaggtgtgtagttttttgtttgtttttcttttatgtgtagataattggtaacttgatgttcttggggtgagggggagggctgtaatcagtggagctttctatttccaccattttgtttcttttctctccaaatttttatttattgattgaactttaaattttgtatatgcatagttttccaatatttttatttgttcctgcatttttgggatttcttttacatctaaggagtgttttataataatcatgtttaattctgtttcaggaaattcatttttgtaattttttaaaagatgtattaatattctttattagttttattaatattctttatctgattatatgtttgcattgagtcttacagactggtttaggtttgaagtttttctctrttaggcttttgtgctgaagatattgcctttgggattacagttttgtgagttctaagtaggtctcctggctaaacttggtgcacaataaaaactgaattttacagtccagttaccaggagaactagtagactggagttctatctgtatcctgg

SEQ ID NO: 869983 - DNA, 642 bp, Homo sapiens
cttcaaatgaaacaggaatgttctagactgattgttttatgcagaaaatgttaactttgtacatatgttatgtggaagaccattttaactttcagaactggtattcagatttgttcagatttcaagaaaacggggttcattttaaaaatgaggagatgcctggcgaagtggctcatccctataatcccagtactttgggaggcaaaggcaggaggatcacttgagcccaggggtttgacatcagcctgggmaacatagctagaccttgcctctacaaagtaagtaagtaaataaataaattaggccaacattgtggtacctgcctatagtcacagctatttgggaagctgaaatagaaggatcacttgggcccagtagttcgaggctgtagggacccatgatcacaccactgccctccagcctgggtgaaagagtgaaagcctgtcttaagaaaaaaaaacatggagactaattagcttctaaaatacttgatagtgctattttgaagtcagaatgctaacttttcaattcttttccatattttagttatttgaataccatcagccagatatctttaatatattaactgtaattgttggaggattgatttttttctgaacgtttatagaaatctttccagag

SEQ ID NO: 869984 - DNA, 642 bp, Homo sapiens
cttcaaatgaaacaggaatgttctagactgattgttttatgcagaaaatgttaactttgtacatatgttatgtggaagaccattttaactttcagaactggtattcagatttgttcagatttcaagaaaacggggttcattttaaaaatgaggagatgcctggcgaagtggctcatccctataatcccagtactttgggaggcaaaggcaggaggatcacttgagcccaggggtttgacatcagcctgggcaacatagctagaccttgcctctacaaagtaagtaagtaaataaataaattaggccaacattgtggtacctgcctatagtcmcagctatttgggaagctgaaatagaaggatcacttgggcccagtagttcgaggctgtagggacccatgatcacaccactgccctccagcctgggtgaaagagtgaaagcctgtcttaagaaaaaaaaacatggagactaattagcttctaaaatacttgatagtgctattttgaagtcagaatgctaacttttcaattcttttccatattttagttatttgaataccatcagccagatatctttaatatattaactgtaattgttggaggattgatttttttctgaacgtttatagaaatctttccagag

SEQ ID NO: 869985 - DNA, 642 bp, Homo sapiens
cttcaaatgaaacaggaatgttctagactgattgttttatgcagaaaatgttaactttgtacatatgttatgtggaagaccattttaactttcagaactggtattcagatttgttcagatttcaagaaaacggggttcattttaaaaatgaggagatgcctggcgaagtggctcatccctataatcccagtactttgggaggcaaaggcaggaggatcacttgagcccaggggtttgacatcagcctgggcaacatagctagaccttgcctctacaaagtaagtaagtaaataaataaattaggccaacattgtggtacctgcctatagtcacagctatttgggaagctgraatagaaggatcacttgggcccagtagttcgaggctgtagggacccatgatcacaccactgccctccagcctgggtgaaagagtgaaagcctgtcttaagaaaaaaaaacatggagactaattagcttctaaaatacttgatagtgctattttgaagtcagaatgctaacttttcaattcttttccatattttagttatttgaataccatcagccagatatctttaatatattaactgtaattgttggaggattgatttttttctgaacgtttatagaaatctttccagag

SEQ ID NO: 869986 - DNA, 642 bp, Homo sapiens
cttcaaatgaaacaggaatgttctagactgattgttttatgcagaaaatgttaactttgtacatatgttatgtggaagaccattttaactttcagaactggtattcagatttgttcagatttcaagaaaacggggttcattttaaaaatgaggagatgcctggcgaagtggctcatccctataatcccagtactttgggaggcaaaggcaggaggatcacttgagcccaggggtttgacatcagcctgggcaacatagctagaccttgcctctacaaagtaagtaagtaaataaataaattaggccaacattgtggtacctgcctatagtcacagctatttgggaagctgaaatagaaggatcacttgggcccagtagttcgaggctgtagggacccatgatcacaccactgccctccagcctgggtgaaagagtgaaagcctgtcttaagaaaaaaaaacatggagactaattagcttctaaaatacttgatartgctattttgaagtcagaatgctaacttttcaattcttttccatattttagttatttgaataccatcagccagatatctttaatatattaactgtaattgttggaggattgatttttttctgaacgtttatagaaatctttccagag

SEQ ID NO: 869987 - DNA, 697 bp, Homo sapiens
gcattggtttgcttaccctgagaagacctgaaagatgagattatgatctttcatctcaaattaaagaaggcttgtctcaggaaccatttgacaagttcaaacgctgctgacttagatactggcctcttatcagcaccttcaatttaatgtttggagtgagtggtaggcctatgttgttgaatttttatcatatttcccctcatcttggtagattatgctttaattcactattctgtgacttatcaatattgtctrttttatgctattgagctataataaataaatagcgtaatgcagtacttacaggtagtgaaattgaggcaaaatgggcttgtgacataggctagatcaaaaaggtattacctgcaagttaataagtagctcagattctgctataatttgctttattcataggtcttgtgggggaaaaaataaaataagctttctcgttctgataatcccttaaaagagtcatgaagttttgatctttggcttatttgatttatttttaattgatagaaaccaagccattcctgtgcctctcaaaaatctatctgtggaaaatattttaacttttaaccaaattatgtcttcccagtattagtgaccctctatgttaaaatgtttttcccttgaaagttagaactccaatgttgttagaagagtttgattctctttttgaagaatcatagaaaca

SEQ ID NO: 869988 - DNA, 697 bp, Homo sapiens
gcattggtttgcttaccctgagaagacctgaaagatgagattatgatctttcatctcaaattaaagaaggcttgtctcaggaaccatttgacaagttcaaacgctgctgacttagatactggcctcttatcagcaccttcaatttaatgtttggagtgagtggtaggcctatgttgttgaatttttatcatatttcccctcatcttggtagattatgctttaattcactattctgtgacttatcaatattgtctgttttatgctattgagctataataaataaatagcgtaatgcagtasttacaggtagtgaaattgaggcaaaatgggcttgtgacataggctagatcaaaaaggtattacctgcaagttaataagtagctcagattctgctataatttgctttattcataggtcttgtgggggaaaaaataaaataagctttctcgttctgataatcccttaaaagagtcatgaagttttgatctttggcttatttgatttatttttaattgatagaaaccaagccattcctgtgcctctcaaaaatctatctgtggaaaatattttaacttttaaccaaattatgtcttcccagtattagtgaccctctatgttaaaatgtttttcccttgaaagttagaactccaatgttgttagaagagtttgattctctttttgaagaatcatagaaaca

SEQ ID NO: 869989 - DNA, 654 bp, Homo sapiens
ccaacagaacaataattctaccctgctcagaattatccaaatgcttaatctcaacttgatatttaacttcaagtctgtacattaagaaataaagcccagaaactcttctgtgcatgcatcaggctgcaccacttttgattacaggctgttttgtcatacggagctcttcataggcccctctgaagcataacttgtagctatgcctcttagtgtactatatggccattgaccataacagcggaatattgcttcttagagtattgatgccartgtgcctaagcactagcatgcattacatgtttgtggtttcatttagttactgtctttcttcctgggcgtttgcgcctgacatacagtgtagttgcttctagaactaaaatatactaaatacaagcatatatgtcaactgcttctgaaagaattatgagcagaatgaagttacgacatccatgagaatgattttctaaaatgttgcttttgtggttggaatttatgtggtagtgctgttgctgttcaataaaaagaagtatcagctctgttgcagttagaaaaaatacctttccctaaatccacatcaaaatgtccctaaatccacatcaaaatttgcgttttattttgtccaggaaagcacaaatgaagtctaaatgatccgtc

SEQ ID NO: 869990 - DNA, 654 bp, Homo sapiens
ccaacagaacaataattctaccctgctcagaattatccaaatgcttaatctcaacttgatatttaacttcaagtctgtacattaagaaataaagcccagaaactcttctgtgcatgcatcaggctgcaccacttttgattacaggctgttttgtcatacggagctcttcataggcccctctgaagcataacttgtagctatgcctcttagtgtactatatggccattgaccataacagcggaatattgcttcttagagtattgatgccagtgtgcctaagcactagcatgcattacatgtttgtggtttcatttagttactgtctttcttcctgggcgtttgcgcctgacatacagtgtagttgcttctagaactaaaatatactaaatacaagcatrtatgtcaactgcttctgaaagaattatgagcagaatgaagttacgacatccatgagaatgattttctaaaatgttgcttttgtggttggaatttatgtggtagtgctgttgctgttcaataaaaagaagtatcagctctgttgcagttagaaaaaatacctttccctaaatccacatcaaaatgtccctaaatccacatcaaaatttgcgttttattttgtccaggaaagcacaaatgaagtctaaatgatccgtc

SEQ ID NO: 869991 - DNA, 603 bp, Homo sapiens
gagaaacactttgagtggagaaagagagaaatgtggaaaggagttaaggcctcaggagaaaaggtgagagagactggcagttctgaaggtcagaaatactaaacggatctcactgggctaaaatcaagatgttggcagagttgagtttcttctagaggctctagggaaaaatccacttccttgtcttttccagcttctagaggccacttgcattccttggcttgtgacccccttgtctgtcttcaaagagaccttcctccctcaagatccasctgggatgcttccatctctctggttcagatcttctcttccatttctctcttccacttacaaggacctcggtgattacattatgtccacctgaataatccaagataattttattttaaggtcattgattagcaacctcaattccatctgcaaccttaattccactttgccatataatctaatctattcacaggttctggaggttagaacatggacatctttgcagggagcattgttctgctgactccaagagatctatgttatttctgtcttcataatacaatgaaaaggaagaatagagacttgggcccttgcatccactttcccagcatt

SEQ ID NO: 869992 - DNA, 591 bp, Homo sapiens
aatctaatctattcacaggttctggaggttagaacatggacatctttgcagggagcattgttctgctgactccaagagatctatgttatttctgtcttcataatacaatgaaaaggaagaatagagacttgggcccttgcatccactttcccagcattggccagttggactagccattgacacagctgtgtgctcagcactgtttgatctcccagattcaaataatgcttataggttgaggtcttccaaatcctgatcctcaaagtggatgatccttctgagtttcatcgacttgatggaactctccactggatacattttcttgaccatcccaaggcaccatatttattgaatctgctyctttgtctctccgtatctctctttctctctccatctctctctctcttccttgtcactactccctgtgggctgaaaacatcaaatttttttttttcatggattacctacagtctcttaccaagttttttttttttttaagaattaccattctttttaagggtagcaggaagtgggggataaagaaggatcaattagtgaatataagaatatagttgtaggaataatatctag

SEQ ID NO: 869993 - DNA, 609 bp, Homo sapiens
actatcaaagactttgatctgaagtcaatgaggggagcattggagggttttaagtggtgctgggaaatctagtcaggtctgcatttttgaaatattgctcactgtggctgcaatttggaggaggaaatgctgaggaattagttaggcggctgacgcagaattttactaagatacactgaggcctgagctagatcagtggtgtggagaagaagaaatgctattcctaccctgccaagctcttctgctctataattcttcaactaaggtgtttatgattccatttcaggatctcttgctctatctctttgtttgactctcaatggtgttcaaaggcttgtgaaggctctatgctagaacttcaggcatcgataatgagtagaacagcagtttcaggggaggaatttctttttttttttttttttaggttacctaacawcataccattgccctggttatttattcatgggtctgagccaaggtggcttttagggactgacctagtggtgttctctctctactgcactttgagctacttgcccctaagcatgctcagcccaacatgttcagcatctccagctagacttccttcctgcacacagataggcacca

SEQ ID NO: 869994 - DNA, 594 bp, Homo sapiens
gcccaggataagcttatcctaaacttcacaattaagccaaagccactggaagggcttaatttttcaaggccagaggtctgcctctttggagctttcactcttctgtttgaagaatgacattcatacagcactggggtgtgtttcctgaacaacttgtgtaaaacaaaaggcccctgggagcctgaggttctgtccaggatagataatgagacatgctgactctgyccatcgttccccaaatgatgtctcctcaccttcctgggttatggaattgtagagcagggactgtgacaacgtgcttctgagctgatgccctgccctgtcttctagacaggaactgtgggaagaggtcaaagatctggccctgagcccctggattttcatgcaccccgaaaaatcctccttgatttcaattcaccttaagatatctagagtttgatcttttaatcgaatggctatttaaataaaattttaaaaagcaattgcagcccaaatatctccttaatgtgatgttttcaaaagttgtttcagaatttttaagcaaaacgcccgcctgtacttattgtaatgattttctcaatacctcatctcccc

SEQ ID NO: 869995 - DNA, 594 bp, Homo sapiens
gcccaggataagcttatcctaaacttcacaattaagccaaagccactggaagggcttaatttttcaaggccagaggtctgcctctttggagctttcactcttctgtttgaagaatgacattcatacagcactggggtgtgtttcctgaacaacttgtgtaaaacaaaaggcccctgggagcctgaggttctgtccaggatagataatgagacatgctgactctgcccatcgttccccaaatgatgtctcctcaccttcctgggttatggaattgtagagcagggactgtgacaacrtgcttctgagctgatgccctgccctgtcttctagacaggaactgtgggaagaggtcaaagatctggccctgagcccctggattttcatgcaccccgaaaaatcctccttgatttcaattcaccttaagatatctagagtttgatcttttaatcgaatggctatttaaataaaattttaaaaagcaattgcagcccaaatatctccttaatgtgatgttttcaaaagttgtttcagaatttttaagcaaaacgcccgcctgtacttattgtaatgattttctcaatacctcatctcccc

SEQ ID NO: 869996 - DNA, 594 bp, Homo sapiens
gcccaggataagcttatcctaaacttcacaattaagccaaagccactggaagggcttaatttttcaaggccagaggtctgcctctttggagctttcactcttctgtttgaagaatgacattcatacagcactggggtgtgtttcctgaacaacttgtgtaaaacaaaaggcccctgggagcctgaggttctgtccaggatagataatgagacatgctgactctgcccatcgttccccaaatgatgtctcctcaccttcctgggttatggaattgtagagcagggactgtgacaacgtgcttctgagctgatgccctgccctgtcttctagacaggaactgtgggaagaggtcaaagatctggccctgagcccctggattttcatgcaccccgaaaaatcctccttgatttcaattcaccttaagatatctagagtttgatcttttaatcgaatggcyatttaaataaaattttaaaaagcaattgcagcccaaatatctccttaatgtgatgttttcaaaagttgtttcagaatttttaagcaaaacgcccgcctgtacttattgtaatgattttctcaatacctcatctcccc

SEQ ID NO: 869997 - DNA, 594 bp, Homo sapiens
gtaatttgttttggcagccccagaaaactaggacaggcccattgtaataggactttctttccaacctcttctcccttttatatcttcctaacatgctgtactcaaaccacactctaccttcatggatgcctcattgaatagtgtttttcgttatcatcctcatcatcatcatgatcaacatcataaaagctaacacactaccagcccttaatacctcctargtccttaaaatcatctctgcaatagcaaatgtgaatactcatcttataaatgaggaaattaagctgcagatatatgatccccaaattcatatgtctagccagacaaggagccagttttgaaacttgacaatctgttatgaatatcttagtcatttctcaattctactgccttcaactttcttctctagcttacaaactccttcttatgcttctgtatgctcttccacagtcttcccagatgctctctctcttttgctccttgaaaacatgcttcctctccttcccttctctgagatcctacaggcttacatttttctccctgtaccattgtcttccacctttaccttttatgaggtatttgtatattgtgctc

SEQ ID NO: 869998 - DNA, 568 bp, Homo sapiens
aaagtcatttcattttaaaacagcagtgcctgaataccacttatgttgcctgaatttgttcacattactattcacgaagcttgacatcctgcaatgacttctgcacaaaactcaaagtcagtaaaactttaggctacttaccatcaagacagggaacaaacccttctctctgcaaggtttttataattaaacatcatgacatctaatgatgtctacacagaaccgcttctcactagcacagaaaagttatctctaatagaaatgttctttctaaatggtaaaggagggagcatataaatatctctgcagtggtggcttctggtatagctggtcagagtggacaggacrcataccaattactgttagggtttgcaaagaaaatagttcccattcatttactatttgatagaggagaagggatcaatgagcatgaaatatgccaacttataaattcatatttctaaaacctaaactaggcaaggagtaatgttcacaatgtataaccagtgaggatggttatgcctcactgtactgcccaatcagaaagagtggacactggccttaggcc

SEQ ID NO: 869999 - DNA, 669 bp, Homo sapiens
accttcatttctatgactaatttatttcctaggtgatttggattgtgaaacctgtaccataacacggagtggactgactggtcttgttattggtggtctataccctgttttcttggctatacctgtaaatggtggtctagcagccaggtaggaaatraaaaactttttataatatgtgattacctataaaactcacaacttaaagcagcaaatatattttgtttttaaggcatttagaccaaaggcaatgttaccctcttgattagaagttagcaagacctgttttttcttataatgaaattctacttatcaagaatttcaaacagttatacttggtgtgtagttaggctattaaccttaatttgtgtactgaatactaaactaactacaaagctgcaaacagtattatgcatgaaacttctatcatataaacaattatcttggatgagtttgaacacttgcactaaaggaaaattccatcagaaaatgtctagctgttatattagccttctattctaaaataattctggctattctctgttgaactcttgcatcagcaatctatgctatagccttgaagcaaactggataaagaaacaaaagtttttaggattaatagacactgaagacctttactttaatattcagttttatcttaagacttctagg

SEQ ID NO: 870000 - DNA, 706 bp, Homo sapiens
agtataagccaggtaaatttccgtgtcagctcattgagagactttccaggggcagctggggccaattcacatttgctctatactccctccaaagacacccccttcaacacacacacacagaacacttaattctggtaccaccagccaaaaggggcccgagttcccttgggagcagcccagccgctgagaggcggaaatctctgaaagggccactcagatgaccaaagcaataggcgcctacgtaccttacaacaagccaacctcaagttccaacctagagaaatgcatggactctggtgggagagtcttattccgtttttgttttcttcttttkttttgttttgttttgttttggtttggttttcttccatttcttctcagccttgtctcttcagaaaatacccctccaccccttccttggcgcgtaaactgtcttcagggtggccttaggagttctgggacaatgtggagggtacccaataggatttccttaagtttcctctactgcttttccacacatattaatgctgagatcctgtatttgattaaagcaccttccatttccaaagttaaaatacaaacgggtctggtaacttacaaagtcgccagcatcttcgtgtcaattaacttccccagacaagtaagaacgagctgcactagggcctgcgctctctccggggctaacaacaagcagcaccagtccccc

SEQ ID NO: 870001 - DNA, 611 bp, Homo sapiens
caggagtagtgatgctgtaaaaaggaacaggacacaactggaggctgcggaaatggtagggagcatgccaacatctctcctgcgaagggcaagcggagatactcacatccccagattaacatggtattaagtgctcaattcaagccaagatagactctaaggtccaaaggcaaatgaggtatccaagaaaggaagcagaggtcccacggggtgaggggtgggaacaggaagcaccactatattgcaccgtgtcaggtccgccatagtggaggtgtggagggccccaccttgtgaacgatttrtgttttatcctagaatgcaaagtaggttccctcttgactgacaaagtacaatgctcttcctctgctggtaccactgatagcattcataatatgcttttacgaataatgcaatctggagacatctgaaggatacagcttttggtcaataaatccaactctaaaagcccttttaaagctttgcccaaccacctcggccttctttaatagaattacttctgtttttccacagaatgatttctcctctgattaagaatcacttcaaactatagaagagatgcatatgacagatctgtgtatcttcaggacttt

SEQ ID NO: 870002 - DNA, 586 bp, Homo sapiens
tttttttttttttttttttttgagacggagtcttgctctgtcgcccaggctgcagtgcagtggcacgatcttggcttactgcaagctctgcctcccgggttcacaccattctgctgcctcagcctcccgaggagctgggactacagacactgccactaygccaggctaaattttgtatttttagtagagatggggtttcaccgtgttagccaggatggtcttgatctcctgaccttgcaatccgcccgccttggcctcccaaaatgctggggttacaggtgtgagccaccgcacccagccccatgcccagctaattaaaaaaaattttctggagagacagggtcttaaacatctgggctaaagtgatccttccacctcggcttcccaaagtactaggattacaggtgtgagccatggtgcccagcctctatgtcttttttctgtagtcacatcttcttttctactgttaagggctgttgtggttgtattgggcctactcagataatccagcatattctcactgttataaggtcagctgattagccaccttaattccatctacagccttgattccccttcgccatgt

SEQ ID NO: 870003 - DNA, 651 bp, Homo sapiens
agtgactttaacataattcctaatgatacttccataaacaacaggaccattgaatttttgagatttctctgtggttctttttttcctcaggatattttccattgaaatgtatggttgaaatttgatctttgaaaatctacttgatgtataattaggcttatttctatcagtttgttttttaagagttgttttgattttttcckttttatttaaccttggtttttaataatctaaaacttgtacatgattccaaaatcaaaactatgaaacaaggtacatttggagtattcattcctgtctgttctctatacccttttaacaaatgaattttaaaaattagtttttagtgtatgttttagtttacttatttctttttaaaagcataagcaaacccacacacatgcatatataagataataatatgaatatttatacatatatcaattcataaatcttttcccctttctacacaaatgtagtatactagatgcactctactggaccttgttttctcatgtaacaatacattctgaagatcattttatttcttttgatagctgcacagtaccatattatgtggctacataatattttattcattaggttgcacactgatagacataggggttgtcatatcatgctttaaataaa

SEQ ID NO: 870004 - DNA, 651 bp, Homo sapiens
agtgactttaacataattcctaatgatacttccataaacaacaggaccattgaatttttgagatttctctgtggttctttttttcctcaggatattttccattgaaatgtatggttgaaatttgatctttgaaaatctacttgatgtataattaggcttatttctatcagtttgttttttaagagttgttttgattttttcctttttatttaaccttggtttttaataatctaaaacttgtacatgattccaaaatcaaaactatgaaacaaggtacatttggagtatkcattcctgtctgttctctatacccttttaacaaatgaattttaaaaattagtttttagtgtatgttttagtttacttatttctttttaaaagcataagcaaacccacacacatgcatatataagataataatatgaatatttatacatatatcaattcataaatcttttcccctttctacacaaatgtagtatactagatgcactctactggaccttgttttctcatgtaacaatacattctgaagatcattttatttcttttgatagctgcacagtaccatattatgtggctacataatattttattcattaggttgcacactgatagacataggggttgtcatatcatgctttaaataaa

SEQ ID NO: 870005 - DNA, 608 bp, Homo sapiens
gataaaactgtgattcagtagcaaagactatatttttcagaatttaaaattgtaatttccatcttgatggcatttgtaattattatattgcttacacatttttatgtttttcataagaacagctgagaatacatttagttaaccaaagcctccaaggaaaatttcattcctctattattgttattatcatatctacatgtattattacagagcttacaataagcagggtttaataagtgagttgtttaatataagaaacgagcctatgatataacacatatacaagcacacactatgcatacatataattgttccttttgatggtattcttcctctcccaggctaaaatgtactattgataaaggagaacargaaggaagttgctggctttttccctctctagtttcagagtacatgtaaagactctatgggctgactcagaggatacacaatatacattgttaagaagcttcagtctcacctactcagatttaatactaggacatagttacctctaaaacatacttttcctatacaagactttatacgctagctttgttttttagcagtcttagatatcagtttcttggttgatagcaaacccacga

SEQ ID NO: 870006 - DNA, 688 bp, Homo sapiens
gaagagaacctttcagaagctggaagaagaaagcaattcccagggaagctcataagcctcctcagatcctcctctagaacggaaattccacccaccaaggagaagcagtttggacccactgcaccattgctgacagctgggttcctctctgcctctcctcccctatctccaccaggagaaagaagacccaaygataggtcttggggaaaagcttttcaaaaagcatcttttttctatcttcctttctctcaacaccacatgacagtcatgatagtcctaggatggctgcaacctcaaaaaaagcaaaacctgcaaataacccctgtgagacctctgtcctgactgtccaaaacatgaagcccaagagccagtttttcaaatgcactaatgtccacgggatgaaaatcttgtcctgtttgcctatattttcccttaccctcctcaactcctcgtctatgctgagaatatcagcatgctctatgatttccataacaaagtaagattcagaaaaagaagtataactagaagaaatattgttgcaaccattctacttttggatttggtatcaagtcgtatttaagacataatttattgccctacttcggacaaaatgtccaaatctgatctattccctctccctaactccaatctcaatgtcactcccatatttttcatgtaggttaagaca

SEQ ID NO: 870007 - DNA, 688 bp, Homo sapiens
gaagagaacctttcagaagctggaagaagaaagcaattcccagggaagctcataagcctcctcagatcctcctctagaacggaaattccacccaccaaggagaagcagtttggacccactgcaccattgctgacagctgggttcctctctgcctctcctcccctatctccaccaggagaaagaagacccaatgataggtcttggggaaaagcttttcaaaaagcatcttttttctatcttcctttctctcaacaccacatgacagtcatgatagtcctaggatggctgcawcctcaaaaaaagcaaaacctgcaaataacccctgtgagacctctgtcctgactgtccaaaacatgaagcccaagagccagtttttcaaatgcactaatgtccacgggatgaaaatcttgtcctgtttgcctatattttcccttaccctcctcaactcctcgtctatgctgagaatatcagcatgctctatgatttccataacaaagtaagattcagaaaaagaagtataactagaagaaatattgttgcaaccattctacttttggatttggtatcaagtcgtatttaagacataatttattgccctacttcggacaaaatgtccaaatctgatctattccctctccctaactccaatctcaatgtcactcccatatttttcatgtaggttaagaca

SEQ ID NO: 870008 - DNA, 688 bp, Homo sapiens
gaagagaacctttcagaagctggaagaagaaagcaattcccagggaagctcataagcctcctcagatcctcctctagaacggaaattccacccaccaaggagaagcagtttggacccactgcaccattgctgacagctgggttcctctctgcctctcctcccctatctccaccaggagaaagaagacccaatgataggtcttggggaaaagcttttcaaaaagcatcttttttctatcttcctttctctcaacaccacatgacagtcatgatagtcctaggatggctgcaacctcaaaaaaagcaaaacctgcaaataacccctgtgagacctctgtcctgactgtccaaaacatgaagcccaagagccagtttttcaaatgcactaatgtccacgggatgaaaatcttgtcctgtttgcctatattttcccttaccctcctcaactccycgtctatgctgagaatatcagcatgctctatgatttccataacaaagtaagattcagaaaaagaagtataactagaagaaatattgttgcaaccattctacttttggatttggtatcaagtcgtatttaagacataatttattgccctacttcggacaaaatgtccaaatctgatctattccctctccctaactccaatctcaatgtcactcccatatttttcatgtaggttaagaca

SEQ ID NO: 870009 - DNA, 610 bp, Homo sapiens
tatatactttcttctttagatggccgagcttttccttttcagtgttctcacctttctaatttttcatgcagtcaagaagtattttcctaatatatttgatcatttccattattttaagttgttatgaaaaatatttgggtaatatcttaaatatatcattctgaagtggaatagctacaggaggttgcaactgtaagaaataagcccaaagcattctccaaggtgacttctgtgctaccttatttaacattaacataaaagttaaaactttactatggtaagaacaattttttttaaatttgttgttaaaaaaaggaaatcaaaacaatytagagaacataagtcaagggttatttaatcttttactaagtcagttgggggtgatttggagagcagttgatagtgctagagtgagcaggaatctagcaaaaaagagctaattgctgtctaatcacgcttgcaatggaatgaatacactagtaagtattacagttaagccaggcataatggttggcttaaatacattctgttatatcagtgttataaccagtatatattcagcctcaggatgggaaagagttgtagttatgtctatagttccccgatttag

SEQ ID NO: 870010 - DNA, 622 bp, Homo sapiens
tgggcactgcctagtggagctgtgagaagacggccaccatcctccagacccgagaatggtagatccactgacaacttgcaccatgtgcctggaaaagctacagacactcaacaccagcctgtgaaagcaactaagacggggactgtactctgcaaarccataggggtggagctgcagaaggctgtggaagcctacctcttgcatcagcgtgacctggatgtgagacatggagtcaaagaagatcatattggaattttaaggtttgactgccctgttggatttcagacttgcatggagcctgtagcccctttcttttggccaatttctcccatttcgaacaggtgtaattaccgaatgcctgtaccctcattgtatctaggaagtaactaactttctttttattttactggctcataggcagaaaggacatgccttgtctcagatgagactttgaacttggacttttgggttaatgctagaatgagttaagactttgggggactgttggaagggcatgattgtgttttgaaatgtgaggacatgagattcgggaggggtcggggtggaatgatatggtctggttgtgttcctagccaagtataatccccacatgtgatggtag

SEQ ID NO: 870011 - DNA, 622 bp, Homo sapiens
tgggcactgcctagtggagctgtgagaagacggccaccatcctccagacccgagaatggtagatccactgacaacttgcaccatgtgcctggaaaagctacagacactcaacaccagcctgtgaaagcaactaagacggggactgtactctgcaaaaccataggggtggagctgcagaaggctgtggaagcctacctcttgcatcagcgtgacctggatgtgagacatggagtcaaagaagatcatattggaattttaaggtttgactgccctgttggatttcagacttgcatggagcctgtagcccctttcttttggccaatttctcccatttcgaacaggtgtaattaccgaatgcctgtaccctcattgtatctaggaagtaactaactttctttttattttactggctcataggcagaarggacatgccttgtctcagatgagactttgaacttggacttttgggttaatgctagaatgagttaagactttgggggactgttggaagggcatgattgtgttttgaaatgtgaggacatgagattcgggaggggtcggggtggaatgatatggtctggttgtgttcctagccaagtataatccccacatgtgatggtag

SEQ ID NO: 870012 - DNA, 644 bp, Homo sapiens
agagatgtaagtccttagagatgtgattgatgtggtaacagtaagcgggtgataggacaaccatcttggcatcacaatattcggcacatagtaaaccctcaataaacagtacttattactattatcatattaaaggtgggagagttctgagaaaatagaaaacagagatgtgagctgatggtcaaattcctgcagacttttatggcaatatagctttcacacacacacaaaatgaagatagggaaaagtataatgaggaattcaaatcttatcaaggccagttggaagtacggrttggctggagaggggctaagacttgtatgagggacatgcagggatcacaggcaggcagtgaggaggtaaataaaaccaacctgtaggaaaaactgagttcaaactactctgaagcttcaaggcaaaacctacaggatcagaggaagagggagataagcatgaaaggagaaaaggatttagggtacaaggactgtttgggtacctacatatgtggctgaggggttggggctttttggcagtgagaggcaatccctacttggagctacgatagatgatacagtttcagagcttaaatgaactgaaattcatgtaagatgatctcatcctgtctccccattctacaagatgag

SEQ ID NO: 870013 - DNA, 607 bp, Homo sapiens
caaaggaaaagaagagaaatgaaattagtcttgctgctcttgcttccagctagggctgcattaaacggaaagtgtgctgagcggggcagagtggcaggagaggtggggaggggctgtgacagttagaggagggaggggttggcatagtccaggagggcagacatcagggttcaggcagaactgaacaacagtggagccagaacacaatattacttgtggaatgagatttgagagagtatcggatagactcctttactcaaaatataccccgcagcggggacaaaacattttggtggatacacacttgcatataagcaccatgttctctgccaatacacagaacatcaaaatacaaataaggttgttctttttttttccctgtaaattyggtgaagttggggctagatctgtctacttcatctggtattcccaggacctaatacatagtaggtccttaaaaagtatttgttgaatgaataaatgtatggataggagagatggaggacaatgtaagaatattgggaatggatgggaaaagaccctgaaggctcaaatcatctgtattcctgttcttggagccagcagagcctggacattggagttccca

SEQ ID NO: 870014 - DNA, 650 bp, Homo sapiens
ggcagataagacatagaagtgacaatagatatcatcttagctccagctgccataacacaataccatagactgggtggcttaaacagcagcaatttatctcgtggttcaagaccatgagaaatgtcttcccagcatcatcagagagaaggaatccaagaggtcatctggttcaaccctctgcctccagcagaattgctcctaatcccccaaaactgagaaccaactgagctttctgacaattgtctagggagagccacattccaccatattctctcctttctgtctttttcagtggtagttggaagtctgagatcagggtgctgacactgctgggttctggtaagggccctctttctggcttgcagatggtcaccttctcactgtgtactcacatggcctttcctcaggggtggagtgggggagagagggagagggagaggaagaaacagaaaggaagagagagagagaggaagagagaggragaggaaaagagagagagaggaagagagagggagagagagggagaagggggggggagagagagagaggaaaagagagagagaggaagaaagagagaggaagagagagagagggagaaagagagagagagagatcttcctcttataaggccaccaatcctatcaggttaa

SEQ ID NO: 870015 - DNA, 657 bp, Homo sapiens
ctggtttaggagtcccaagagatgacactgaggtgtggactggagcagttttctaattaaaaagtcagatggtctttttctctaaggaaagcttcaactcccagtgaatgcttggctcatagcttcttggcccaaggccatttagcatctgcctcaacaaaaccccttcctgaagtagagtctagcaagmaatgtagattcaagtcctcaaaaaccaaagaacttggaaagctaaagaaccccttccaagcacaattttgaaagaaaattcatttaatggaaacagctatttgcaaaattttaaccaatagatgaataaggaaaaaatggaaaaatggaaccgttttagccattgatgaaaacatcaatcacagctcccttctgatacagtttttttcttttgttttagaaaggcttattatatttcccctttatgaaccttcaaacaattggaatcagcggtttgagttccctgctatcagcatttggttctttttttaatctctgttgtagcagtttatataccttttcaaatcttgaatcacttcattatcacagctcatggttttaaaatatttgctataatgaaaaaccacacatcttaccccccaaaaaaatgtatagttcactgatttttttttcaggctggtggatcgg

SEQ ID NO: 870016 - DNA, 582 bp, Homo sapiens
tttgctgtcataaatcaaagtttgacaaccatataacacaacccattttaatctgacttccatctctactacattaaatatctctaaactgcagttatcagtgtctataaatctgattgccatttttcagttcttattctactctctaatagatccaacatagctgaccttactacctctstaagtaaacctggcttcagtgacaccatactcactgctttattgtgaattctttagtatcttgcagacatcccctttacccaagcattaaatgtctcatggccaagtcatacactggtagattgttctattattaatcccaattcttcatactttaccagggacaatgcttccccttgactgtgaccttgattttgtcacttgatttggaaaattcaatgtcagaggacacaatatgagcagaagccttaaaagattactcctttacactcctgtgagaaacaatatgccttgggtagctgctgatccaaaataaaaaaaaaaaatgaagaaatgtgcagcaggcctaaactcaaacagcagcatgaagtgaagcccacctaatcccagcagagtgcagca

SEQ ID NO: 870017 - DNA, 655 bp, Homo sapiens
ggctgtctcagtagaggttcttattggcaaaaccccacttagttcaggtataaaaggcagcctgaggccaaggcaggtagatcacctgaggtcaggagttcgagacctgtctggccaacatggtaaaaccccatctctactaaaaatacaaaaattagccgggtgtggtggcatggatctgtaatcccagctactcaggaggctgagacaggaaaatcacttgaacccgggaagcggaggttgccatgagccaagatcgcgccactgcactccagcctgggtaacagagtgagactccatgtcaaaagaaaaggcagcctgagaatcaccacgagggctcacagaagcaaggctagaggctcctaggccaaacgcccatgccatattgaattccagaacccctttcacagcacaaaaagtcctcccccatagtggcgtgtgggacctcaatcctcagccctgttcagctgcccctgaatgctggacaccctttctcrccctcaccaggaatcaattctgcaaagaaccctcttcctcatgtcactgcctgctaaattgttctcagctattcacattggatctgtgtcactgtgccctagttacaaggatgcctggaaacgagttcttggctttcgtcttgaagaggcaagtccca

SEQ ID NO: 870018 - DNA, 610 bp, Homo sapiens
ttagtttctattgctgctataataaattaccacaaacttggtggcttaaaataatgcaatttattctttattagttatggagatcagaagtctaaaatcagtttccttgggttaaagtcaaggtgtcagcagggctggttgcttctcataggaatccatttccttgccttttctaacttctagaggctgctggaattccttggcttatggctgcagcactccaatttctgcttctgttatcatgtcactttcttctaattttgatccttctgcttttctcttataagaatccttgtaattacactgggcccaaccagataatccaggataatctacacatcttaaactccctaagtttaatcacaccagtaaatatctcataccatgtgaagtaacattcataagctctgggaattaggatatggacatcttyagggagccactattcagtttaccacatctttcaactcattgatattcacaattaaaatcatttgcttatggattagtatcagtatttcataggacctatttgtttaaaaaatttcttttcaaagataaaatacataaaatctcattacaaatcagcattaacagatgaacatttaca

SEQ ID NO: 870019 - DNA, 664 bp, Homo sapiens
ggattcaaaagacctgaataatactattaacatcttgacctcgttgacatttgtagagcactctatcaacaacagaatgcacattgttttcatgtgcttcaggtttgattgtttctgttgacctgtctttgagctcgcagatgcttctgctrcttatttctgatctgtctttcccatttggctacagatttctgtgcagcgggaactgtgtcaaattctccatttgcttattaccaaacgtagggattggcagagaggaattatttggtaactctctgtggttggtgcagctttccagcaggcagcaggaatggggaccttcaactcagtgagagtatattcaaattttctgaaaatagatgtgggagaataaaagatgtgaatattccctgtcccttatctctgatcagttttggtgggatgctgaagccaatagatttttcagaatgttgaaagggtgatgtacacctatatggttaattactgacctaaaataaacatactttgcaacaaaccagagctaatgagcagcttctagatttatttcatagtgatgataatgaagatggtagtaacaatggctaacattgatcagattttattaccactcacactgactttctaatattatgatgcattgaactcacataacataacataacaa

SEQ ID NO: 870020 - DNA, 664 bp, Homo sapiens
ggattcaaaagacctgaataatactattaacatcttgacctcgttgacatttgtagagcactctatcaacaacagaatgcacattgttttcatgtgcttcaggtttgattgtttctgttgacctgtctttgagctcgcagatgcttctgctacttatttctgatctgtctttcccatttggctacagatttctgtgcagcgggaactgtgtcaaattctccatttgcttattaccaaacgtagggattggcagagaggaattatttggtaactctctgtggttggtgcagctttccagcaggcagcaggaatggggaccttcaactcagtragagtatattcaaattttctgaaaatagatgtgggagaataaaagatgtgaatattccctgtcccttatctctgatcagttttggtgggatgctgaagccaatagatttttcagaatgttgaaagggtgatgtacacctatatggttaattactgacctaaaataaacatactttgcaacaaaccagagctaatgagcagcttctagatttatttcatagtgatgataatgaagatggtagtaacaatggctaacattgatcagattttattaccactcacactgactttctaatattatgatgcattgaactcacataacataacataacaa

SEQ ID NO: 870021 - DNA, 664 bp, Homo sapiens
ggattcaaaagacctgaataatactattaacatcttgacctcgttgacatttgtagagcactctatcaacaacagaatgcacattgttttcatgtgcttcaggtttgattgtttctgttgacctgtctttgagctcgcagatgcttctgctacttatttctgatctgtctttcccatttggctacagatttctgtgcagcgggaactgtgtcaaattctccatttgcttattaccaaacgtagggattggcagagaggaattatttggtaactctctgtggttggtgcagctttccagcaggcagcaggaatggggaccttcaactcagtgagagtatattcaaattttctgaaaatagatgtgggagaataaaagatgtgaatattccctgtcccttatctctgatcagttttggtgggatgctgaagccaatagatttttcagaatgttgaaagggtgatgtacacctatatggttaattactgacctaaaataaacatactttgmaacaaaccagagctaatgagcagcttctagatttatttcatagtgatgataatgaagatggtagtaacaatggctaacattgatcagattttattaccactcacactgactttctaatattatgatgcattgaactcacataacataacataacaa

SEQ ID NO: 870022 - DNA, 595 bp, Homo sapiens
tccataacccatgttatgaggccagcatcaccctcaaaccaaaacctggcagagatacaacaaaaaaagaaaatttcaggccaatatccctgatgaacatcaatgcggaaatcctccataaaatactggcaaaccaaattcagcagcacatcaaaaagcttatcaaccacaatcragtcagcttcatccctgggatgcaaggctggttcaacatacgcaaatcaataatcataatccataacataaacagaaccaatgacaaaaaccacatgattatctcaataaagaaaggccttagataaaattgaatatcccttcatgctaaaaaaaatctcaataaactaggtattgatggaacatatctgaaaatagtgagatatttatgacaaacccataggcaatatcatatgaaatgggcaaaatctggaagcattccctttgaaaaccagcacaagacaaggatgttctctctcaccactcctattcaacatagtattggaagttctggctggggcaatcaggcaagagaaagaaataaagcatattcaaataggaagagaggaagtctaattgtttctgtttgcatatgacataa

SEQ ID NO: 870023 - DNA, 567 bp, Homo sapiens
actttcttttgattgagcattttggtaactgtctctttgtagaatctgcaaagggatatttctcagaggtttgaggcctgtggtgaaaaaggaaatatcttcatgcaaaaactagatggaagctttttgggaaacttctttgtgatgtgtgtattcatctgacagagttgtacctttcttttcattgagcattttggacggattcttttttgtggaatctgcaaagggatatttgggagcccttcaaggactacaatgaaaagggaaatatcttcacataaaactagacagaatctctctgagaaacttctttgtgatgtgttcattcatgtcacagagttgaacgtttctttggattgaccagttttgaaactctttttataaaatctgcaaagggatatttggaatccrtttgaggcctatggtgaaaaagcaaatatcatcacataaaaaaaagacagaagatttctgagaaacttatttgtgatatgtgcattcatctctctgatttgaaccttcctttgattgagcagtttgtaacattctttttgaggaatctgcaaaggt

SEQ ID NO: 870024 - DNA, 631 bp, Homo sapiens
tgaggcatattttgaaaaaggaattatcttcacataaaagctagacagaaattttctgagaaacttttttttgatgtgtgcattcatctcacagagcggaaattttcttttgattgagcagtttggaaacagtctttttgtagaatctgcaaacggatatttgggatccttttgaggcctaaggtgaaaaagggaatatcttcatataaaaactagacagaagctttctgagaaatgtctctgtgatgcgtgcattcatctcacagagttgaacctgtctttttttttgagaagtttggaaaaagtctttttgtagaatcttcaaagggatatttctgagcagtttgaggcttgtggtggaaaaggaaatatctacacataaacactagacagaaactttctgagaaacttctttgtgatgcgtgcagtcatctyacagagttgaactttcttttgattgagcagtttttaaagtcttttggtagaatctgcaaaggaaatatttctgagtggtttgaggactatggtgaaaaaggaaacatcttcacataaaaaacagacagaagctttctgagaaacttctcagtgatgtgtgcatccatatcacaaaattgaacctttcttttgattg

SEQ ID NO: 870025 - DNA, 463 bp, Homo sapiens
gtaacttctttgtgatgtgtgcattcatctcacagagttgaaacattctcttcattgagcagtttggaaagagtctttttgtagaatctgcaaggggatatttctgagtggcttgagtgctactgtgaaaaacaaaatatcttcactatctgcaaagggatatttgrgagccctttgagtcctatggtgaaaaaggaaatatcttctcatggaactagagggaagatttctgagtaacttctttgtgatgagtgcattcatatcacagagttgaacttttctttttattgagcagtttggaaacagtcgttttgtacaatctgaaatgggatatatctcagcgatttgaggcctatggtgaaaaatgaggtatcttcaaattaaaactaaacagaagatttctgagaaacttctttgtgatgtgcgcattcatctcacagagctcaaattttcttatgattga

SEQ ID NO: 870026 - DNA, 544 bp, Homo sapiens
tcaaattaaaactaaacagaagatttctgagaaacttctttgtgatgtgcgcattcatctcacagagctcaaattttcttatgattgaggagcttgtaaaaagtatttttgtagaatctgcaaaggggtatttgagggcactttgaggcctatggtgaaaaaggaaatatcttcatataaaaattagatggaagctttctcagaaactcctttgtgatgtatacattaatcgcacagagcttaacctttcttttgattggagaaraaaggaatatcttcacctaaaaactaggcagaagctttctgagaaacttctttgtgatgtgtgcattcatctcacagagttgaacatttcttttcattgagcagtttggaaacaatctttttgtagaatccgcaaagggatattgggaggcctttgaggcctatgttgaagaaggaaaatcttcacaaaaaaactatacagaagcgttctgagaagctgattttttatgtgtgcattcatctcataaagttgagcctttcttttgactgaacagcttgg

SEQ ID NO: 870027 - DNA, 544 bp, Homo sapiens
tcaaattaaaactaaacagaagatttctgagaaacttctttgtgatgtgcgcattcatctcacagagctcaaattttcttatgattgaggagcttgtaaaaagtatttttgtagaatctgcaaaggggtatttgagggcactttgaggcctatggtgaaaaaggaaatatcttcatataaaaattagatggaagctttctcagaaactcctttgtgatgtatacattaatcgcacagagcttaacctttcttttgattggagaagaaaggaatatcttcacctaaaaactaggcagaagctttctgagaaacttctttgtgatgtgtgcattcatctcacagagttgaacayttcttttcattgagcagtttggaaacaatctttttgtagaatccgcaaagggatattgggaggcctttgaggcctatgttgaagaaggaaaatcttcacaaaaaaactatacagaagcgttctgagaagctgattttttatgtgtgcattcatctcataaagttgagcctttcttttgactgaacagcttgg

SEQ ID NO: 870028 - DNA, 587 bp, Homo sapiens
aagacacataattgtcaaattcaccaaagttgaaatgaagcaaaaaaaggtaagggcagtcagagagaaagttcgggttagccacaaaaggaagaccatcacactaacagcagatgtcttggcagaaactccacaagccagaagacagtgggggacaatattcaacattcttaaagaaaagaattttcaaccyagaatttcatagccagccaaactaagcttcataagtgaaagagaaataaaatactttacagacaagcaaacgctgagagagtttgtcaccaccaggcctgccctaaaagaaatcctgaaggaacactaaacatggaaaggaacaaccggtaccagccactgtgaaaacatgccaaaatgtaaagaccatcaaggctaggaagaaaactgcattaaataacgagcaaaataaccagctaacatcataatgacaggaccaaatacacacataaaaatattaactttgaatgtaaatgggctaagcgctccaattaaaagacacagactggcaaattggataaaaagtcaagacctattagtgtactgtattcaggaaacccatctcacacactgag

SEQ ID NO: 870029 - DNA, 623 bp, Homo sapiens
acgtctttgtgatgtgtgcattcatctcagagagatgaaaatttcttttgattgagcagtttagaaacagtctttttgtagaatctgcaaacggatatttctaagccgtttgaggcctatgatgaaaaaggaaatatcttcacataaaaagtagacagaagctttctgagaaacttttttgtgatgtgcacatttatctcacagagttgaacatttctattgattgagtagtttrgaaacagtctttttgtagaatctgcaaagggatatttctgagcagtttgaagccaatggtgaaaaaggaaatatcttcgcatgaaaactagacggaagctttctgagaaacttctttgtgataagtgcattcgtctcatagagttgaacttttcttttgattgagcaggttggaaagagtccttttgtggaatctgcaacagatatctgggggcactttgaggcctatggtgaaaaagaaaatatcttcacataaaaactagacagaagctttctgagaaacttctatgtgatttgtgcattcatctcacagatttgaaactttcttttgaatgagccgtttggaaactgtctttttgtgtaatctacaaagggatatttgggagctc

SEQ ID NO: 870030 - DNA, 623 bp, Homo sapiens
acgtctttgtgatgtgtgcattcatctcagagagatgaaaatttcttttgattgagcagtttagaaacagtctttttgtagaatctgcaaacggatatttctaagccgtttgaggcctatgatgaaaaaggaaatatcttcacataaaaagtagacagaagctttctgagaaacttttttgtgatgtgcacatttatctcacagagttgaacatttctattgattgagtagtttggaaacagtctttttgtagaatctgcaaagggatatttctgagcagtttgaagccaatggtgaaaaaggaaatatcttcgcatgaaaactagacrgaagctttctgagaaacttctttgtgataagtgcattcgtctcatagagttgaacttttcttttgattgagcaggttggaaagagtccttttgtggaatctgcaacagatatctgggggcactttgaggcctatggtgaaaaagaaaatatcttcacataaaaactagacagaagctttctgagaaacttctatgtgatttgtgcattcatctcacagatttgaaactttcttttgaatgagccgtttggaaactgtctttttgtgtaatctacaaagggatatttgggagctc

SEQ ID NO: 870031 - DNA, 562 bp, Homo sapiens
acattctttatggacaacatgcaaagggatattttggaacccttggaggcttactgtgaaaaaggaaatatcttcacataaaatgtagacagaacctttctgagaatcttgtttgtgatgtgtgcatttatctcacagagttgaactttttatgattgagcagtttttgaaacagtatttttctaggatctgcgaagtgatayttgagggcactttgaggcctatggtgaaaaaggaaataccttcacacaaaaactagacagaagctttctgagaaactgcattgtgatgcatgcattcatctcacaatactgaccttttcttttgattgagcactttggaaacattctttttgcagaatctgcaaagggatatttctgagctgtttgaggcctatgatgaaaaagtaaatatcttcatataaaaaacagagagatgcgtctgagaaacttctttatgatgtgttcattcatcttacagaattgaacatttcttttgattgagcagtttggaggcagtcgttttgtggaatctgcaaagtggtatttgggagccctttgag

SEQ ID NO: 870032 - DNA, 562 bp, Homo sapiens
acattctttatggacaacatgcaaagggatattttggaacccttggaggcttactgtgaaaaaggaaatatcttcacataaaatgtagacagaacctttctgagaatcttgtttgtgatgtgtgcatttatctcacagagttgaactttttatgattgagcagtttttgaaacagtatttttctaggatctgcgaagtgatatttgagggcactttgaggcctatggtgaaaaaggaaataccttcacacaaaaactagacagaagctttctgagaaactgcattgtgatgyatgcattcatctcacaatactgaccttttcttttgattgagcactttggaaacattctttttgcagaatctgcaaagggatatttctgagctgtttgaggcctatgatgaaaaagtaaatatcttcatataaaaaacagagagatgcgtctgagaaacttctttatgatgtgttcattcatcttacagaattgaacatttcttttgattgagcagtttggaggcagtcgttttgtggaatctgcaaagtggtatttgggagccctttgag

SEQ ID NO: 870033 - DNA, 599 bp, Homo sapiens
tctgtgacatgaatgcacatatcacaaagaagtttctcaggaagcttccgtatagttttaatgtgtagatatatcctttttcaccataggcctcaaactgctcagaaatacccattgcagattctagaaaaagaccgttttgaaactgctcaatcaaargaaaggttcaactctgtgaaatgaatacacacatcacaaagaagtttctcagaaaacttctgtctagtttttatgtgaagatattccctttttcaacatgggcttcaaaaggatcccaaatatcccctttcagattctagaaaaagactgtttccaaacagctcaatcaaaagagaggttcaactctctgaaatgaatgcacacatcaaaagaagttcctccgaaagcttatgtttattttttacatgaagatatttccttcttttcaccttaggcctcaaaccgctcagaaatatcactttgaagtttctcaaaaaaactgtttccaaactgctcaatcaaaagaaaggttcaactctgtgagatgagtgcatggatcacaacgaagtttctcagaaagcttctgtctagtttttatgtgatgatatttccctcttcac

SEQ ID NO: 870034 - DNA, 599 bp, Homo sapiens
tctgtgacatgaatgcacatatcacaaagaagtttctcaggaagcttccgtatagttttaatgtgtagatatatcctttttcaccataggcctcaaactgctcagaaatacccattgcagattctagaaaaagaccgttttgaaactgctcaatcaaaagaaaggttcaactctgtgaaatgaatacacacatcacaaagaagtttctcagaawacttctgtctagtttttatgtgaagatattccctttttcaacatgggcttcaaaaggatcccaaatatcccctttcagattctagaaaaagactgtttccaaacagctcaatcaaaagagaggttcaactctctgaaatgaatgcacacatcaaaagaagttcctccgaaagcttatgtttattttttacatgaagatatttccttcttttcaccttaggcctcaaaccgctcagaaatatcactttgaagtttctcaaaaaaactgtttccaaactgctcaatcaaaagaaaggttcaactctgtgagatgagtgcatggatcacaacgaagtttctcagaaagcttctgtctagtttttatgtgatgatatttccctcttcac

SEQ ID NO: 870035 - DNA, 599 bp, Homo sapiens
tctgtgacatgaatgcacatatcacaaagaagtttctcaggaagcttccgtatagttttaatgtgtagatatatcctttttcaccataggcctcaaactgctcagaaatacccattgcagattctagaaaaagaccgttttgaaactgctcaatcaaaagaaaggttcaactctgtgaaatgaatacacacatcacaaagaagtttctcagaaarcttctgtctagtttttatgtgaagatattccctttttcaacatgggcttcaaaaggatcccaaatatcccctttcagattctagaaaaagactgtttccaaacagctcaatcaaaagagaggttcaactctctgaaatgaatgcacacatcaaaagaagttcctccgaaagcttatgtttattttttacatgaagatatttccttcttttcaccttaggcctcaaaccgctcagaaatatcactttgaagtttctcaaaaaaactgtttccaaactgctcaatcaaaagaaaggttcaactctgtgagatgagtgcatggatcacaacgaagtttctcagaaagcttctgtctagtttttatgtgatgatatttccctcttcac

SEQ ID NO: 870036 - DNA, 599 bp, Homo sapiens
tctgtgacatgaatgcacatatcacaaagaagtttctcaggaagcttccgtatagttttaatgtgtagatatatcctttttcaccataggcctcaaactgctcagaaatacccattgcagattctagaaaaagaccgttttgaaactgctcaatcaaaagaaaggttcaactctgtgaaatgaatacacacatcacaaagaagtttctcagaaaacttctgtctagttyttatgtgaagatattccctttttcaacatgggcttcaaaaggatcccaaatatcccctttcagattctagaaaaagactgtttccaaacagctcaatcaaaagagaggttcaactctctgaaatgaatgcacacatcaaaagaagttcctccgaaagcttatgtttattttttacatgaagatatttccttcttttcaccttaggcctcaaaccgctcagaaatatcactttgaagtttctcaaaaaaactgtttccaaactgctcaatcaaaagaaaggttcaactctgtgagatgagtgcatggatcacaacgaagtttctcagaaagcttctgtctagtttttatgtgatgatatttccctcttcac

SEQ ID NO: 870037 - DNA, 626 bp, Homo sapiens
ttcaccacaggcctcaaagggctcacaaatatccatttgcagattcaacagaaggactgtttctaaactgttcaatcaaaagaaagtttcaactctgtgagatgaatgcacacattgcaaagaagtttctcagaatgcttctktctagtttttaagtgaagatatttcctttttcaccataggctccaaagcattccaaatatcactttgcagattgtgcaataagactgtttccaaagcactgaatcaaaagaaagtttgaactctgtgagatgaatgcacatatcacaaagaagtttctcagaatgcttctgtctagtttttatgttaacatattccctttttcaccataggccttaaacagctcactagtatccatttggagattctacaaaaagactgtttccaaattgctccactagaagaaagtttcaactctgtgagatgaatgcatgcatcacaaagaagtttctcagaatgcttctgtctactttttatgtgaagatatttcctttttcacgataggcttcaaaacgctcaaaatatccatttgcatatacttccaaaagagtgtttccaaactgctcaatcaaaagggaggttcaactctgtgagatgaaagcaca

SEQ ID NO: 870038 - DNA, 618 bp, Homo sapiens
cttttccaccataggcctcaaagcgctccaaatatcctcttgcagattctacaaaaagactgtttcaaaacttctcagtcaaaagaaaggtgaaactctgttagttgaatggacacatcacaaagcagtttctcctaatgcttctgtctagttttcatttcaagatatgtccttttcaaaataggcctcaaagcactccaaatatccatttgcagatactacaaaaatactgtttccaaactggtctatcaaaagttcaactctgtgagatgaatgctgacatcacaaagaagattctgagaatgcttctgtctaktttttatgtgaagatatttcattttccaccataggacaccaagcactacaaatatccacttgcagattctacaaaaagagtgtttcaaaactgctcaatcaatagaaaggttcatctctgtgagttgaatgcacacatcacagagaagtttctcataatgcttcagtctagtgtttacgtgaagatatttttttcctccatagtccactaagcgcccacaatacccacttgcagattctacaaaaacagtgttccaaaactgcttaatccaaagaaagattcaacattatgagattaatgca

SEQ ID NO: 870039 - DNA, 582 bp, Homo sapiens
taggccaccaaacactacaaatatctacttgcagattctacatgaagagtatttcaaaactgctcaatcaacagaaaagttcaactctgtgagttgaatgcaaacatcacagagaagttattcataatgcttctgtatagtatttatgtgaagatatttttttccaccatagcccactaaacgccccaaatacccacttgcagatactacaaaaagagtgtttcaaaactgctcaatccaaagaaaaattcaactctatgagaatgcatgcatcacaaagaagtatctcagaatgcttctgtctagtttttatgtgaagatattcccttttccaccataggcctcaaagcactccaaatatcctcttgcagaatctacaaaaagagtgtttcaaaacttctcaatcaaaacaaagtttaaactctkttatttgaatgcagacatcacaaagcaatttctcagaatgcttccgtctagttttcatttgaagatatgaccttttcaaaataggcctcaaaacactccaaatatccatttgcagatactacaaaaagactgtttccaaactgctctatcaaaagt

SEQ ID NO: 870040 - DNA, 543 bp, Homo sapiens
ttatgtgaagatattttcttttccacattaggcctcaaagcactcccaatctccacttgcagactctgtgaaaagagagattgaaaactgatcaatcaaaatgtagcttcaactctgtaagttgaatgctcacatagcaaagaagtttctcagaatacttttgagtaatttttatgtgaagatatttccttttccaaaattggcctcaaacccctccaaatatccacttccagattttataaaaagagtttcaaaactgctcaatgaaaagagagrttcaaatctgtgtgatgaatgcactcatcacaaaggagtttctctgattgcctctgtgcagtttttatttgatgaaatttccttttccaccatagggtgcaaagggctcgaaatatctactttcagattctacaaaaacagagattcaaaactgctcaataaaagaaaggttcaactctgttagttgaatgcacacatcacaaagaggtttctcagaatgcttctgcctagttttcatctgaagatacttccttttccaaaagagga

SEQ ID NO: 870041 - DNA, 611 bp, Homo sapiens
tcaggcctcaaaccactcagaaatatccctttgcagattatagaaaaagacagtttccaaactgttcaatcaaaagaaatgttcaactctgtgagttgaatgaacacatcacaaataagtttgtcagaaagcttctctattttttgtgtgaagatatttcctttttcacggtaggcctcaaagggttcccaaatgtccctttgcagattctacaaaaaaactgtttccaagctgttcagtcaaaagaaagtttcaacattgtgagatgaatccacacataacaattaagtttctcagaaagcttctgaatagttttgttgtgaagatatttcctttttcaaygtggacttcaaaggactccaaaaatccctttgcagattctacaggaagactgtttccaaactactcaatgaaaagaaaggttccactgtgtgagatgaatgtacatatcacaaagaagttcctcagcaagcttctttctagtttttatgtgaaggtattccctttttctccaatcaaaagaatggctaacttctgtgagatgaataaacgcatcacaaaggagtttctcagaaagcttctgtctggtttttatctgaagatatttcctt

SEQ ID NO: 870042 - DNA, 597 bp, Homo sapiens
aaaactgatcaatcaaaatgtagcttcaactctgtaagttgaatgctcacatagcaaagaagtttctcagaatacttttgagtaatttttatgtgaagatatttccttttccaaaattggcctcaaacccctccaaatatccacttccagattttataaaaagagtttcaaaactgctcaatgaaaagagagattcaaatctgtgtgatgaatgcactcatcacaaaggagtttctctgattgcctctgtgcagtttttatttgatgaaatttccttttccaccatagggtgcaaagggctcgaaatatctactttcagattctacaaaaacagagattcaaaactgctcaataaaagaaaggttcaactctgttagttgaatgcacacatcacaaagaggtttctcagaatgcttcygcctagttttcatctgaagatacttccttttccaaaagaggatgcaagcgctctaaatatccacttgcagattctacaaaaagagtgtttccaaactcctcaatcaaagcaaagattccattctgtgagttgaatgtacacatcacaaagaagtttctgagaatgcttctgtctagttt

SEQ ID NO: 870043 - DNA, 595 bp, Homo sapiens
aaactaagtttcaactctgagagacagatgcacacatcacaaagaagctttccagaaagtttctgtctagtttttatgtgaagatatttcctttttcaccatatgcctcactgcaccctcaaatatcactttgcagatgctacaaaaggactatttccagctgctcaatcaaaagaaattttcaactctgtgagatgaatgcactcatcacaaagaagtttctcagaaagcttctgtctagttttcatgtgaagatatttccttttttaccataagcctcaaagggatcccatatatcatkttgcaggttgtacaaaaagactgtttctgaactgttcaatcaaaggaaagttttaggactgtgagatgaatgcacaattacaaacaagttcctctgaaatgtactatctactttttctgtgaaggtaattcctttttcaaaataggcctcagagggctcccaaatatccctttgcagattctagaaaaaggatgtttcctaactgctcaattaaaagacaattgcaactctgttagatgaatgcaagcataacaaacaagtttctcagaaatctttggtcttctttttatgtga

SEQ ID NO: 870044 - DNA, 595 bp, Homo sapiens
aaactaagtttcaactctgagagacagatgcacacatcacaaagaagctttccagaaagtttctgtctagtttttatgtgaagatatttcctttttcaccatatgcctcactgcaccctcaaatatcactttgcagatgctacaaaaggactatttccagctgctcaatcaaaagaaattttcaactctgtgagatgaatgcactcatcacaaagaagtttctcagaaagcttctgtctagttttcatgtgaagatatttccttttttaccataagcctcaaagggatcccatatatcatgttgcaggttgtacaaaaagactgtttctgaactgttcaatcaaaggaaagttttaggactgtgagatgaatgcasaattacaaacaagttcctctgaaatgtactatctactttttctgtgaaggtaattcctttttcaaaataggcctcagagggctcccaaatatccctttgcagattctagaaaaaggatgtttcctaactgctcaattaaaagacaattgcaactctgttagatgaatgcaagcataacaaacaagtttctcagaaatctttggtcttctttttatgtga

SEQ ID NO: 870045 - DNA, 517 bp, Homo sapiens
tttttaacattggcctcatagggatccaaaatatccgttttcagattgtagaaaaagactgtttccaaactgctcaattgaaagaaagtttcaactctgagaaataaatgcacacatcacaaagaagtttctcagaaagcttctgtctagttttttgtgcagatatttcctttttcaccataggcctcaaactgctcagaaatatccctttgaagattctacaaaaagactctatccaaactgctctttcaaaagaaaggttcaactctgtgagatgaatgtgcacatcacaaaggaatttatcagaaagcttctgtctagtttttatgtgaagatatttcctttttcaccataggcmtcaaatggctcccaaatatcactttgcagattctacaaaaatactgtttccaaaatgctcaaccaaaagaaaggttcaactctgtgcattgaatccatgcatcaaaaggaagtttctcagcaaacttctgtctagtttttatgtgaagatatttcctta

SEQ ID NO: 870046 - DNA, 601 bp, Homo sapiens
ctacctttttttttgcatctgctttcactctcacaccaaaaaagacaagaacactaaataaataaataaataaataaataaataaataaatagtgaaataaaaaaatgtttattactgattttgttttattgcttaaaagcctgcataggtgaaagatmaagttttattttctggatggtgagaaagtcaccagaggaagcaggagagaagtgggggaagaattttagcagtgaaaaagttgatgatttgttgttcatacctacatacatatcagttaacagtcctgaaaaataggttgaaaaaactgtagagtgttagaactgtataagtctctagggaagcttgtttctaaaaggcaggtctagctgcttagaacaagtttcacattctttatcttgaaaaggaagcagcagatgcagcagtctccccagaacccagctatttcagacaaagatgtcagtggagtctgccaagaagtggaactcagaatttcatttctaaatattctcaaggccataaggctaaggatacttacacatgtggggcagaaaaaaagaaagatcagactgaattctgactcagactctcccactatgcttt

SEQ ID NO: 870047 - DNA, 650 bp, Homo sapiens
tcaagtattcaatgctacagctatccaatttccattacgtaagaataagatccaatagctgtcatattctgggtaagatctaagagttgtcactccctattctcatctttggtgatatattgtgcatagaattatctcagtgtgaattcagatccccagcaaaatatttgggctagctttatatctttactttcaagctggtaagaaagttgtttttctttctttcttttcctccctccctargggtaaaagatgccccttatcaatgtaccattcccatttgttctagtctctaatgctttctttttttttttttttttcctcttgagatggagtcttggctctattgcccaggctggagtacaatggtgggatctcggctcactgcaacctccacctccaggattcaagcaattctcctgcctcattctcccgactagctggggctacaggcatgcaccaccacgccggggctaattttttgtatttttagtagagacagggtttcaccatgttagccaagctggtctcgaactcctgacctcaggtgattctcctgccttggcctcctgaagtgctgggattacaggtgtgagccactgcacctggccttataatgctttctgaaataagactatgaaagaatgtgt

SEQ ID NO: 870048 - DNA, 621 bp, Homo sapiens
gggcacatctaagagttattggccttaaagaggacgtagagaaagagataggggtagaaagttcattcaaagtgataataacagagaacttcccaaacctacagaaaaatatcaatatctaagtacaagaaggttatataacaccaagcagattaaatccaaagaagactacctcaggacatctaataataaaactcccaaaggccaaggataaagagatgatcytaaaagcagcaagagaaaataaacaaataacatacaatggagttccaatgtgtctggcagcaaacttttcagtggaaaccttataggccaggagagaatggcatgacatatttaaagagctgaaggaaaaaatttttaccctagaaaagtgtatctggtgaaactatccttcaaatacaaaaatgaaataaagacattcccagacagacaaaagctgagggatttcatcaacaccagacctttcctacaagaaatgctaaagggagtacttcaattagaaaaaaaaaaagacattaatgagcaataagacaccatctgaaggtacaaaattcactggcaatggtaaatatacagaaaaacacagaatattatagtgctgaaactgtggtatgtaaa

SEQ ID NO: 870049 - DNA, 600 bp, Homo sapiens
tcacttgtcatttttgtccttcttggtgggagttgcagagtggaggtgtttctattcagctatcttgtctgtttcccctgtatcttcttagaaaagtgtctgttcaagtcctttttctgtttttcaattgggttgtttgtgcttttgttgatgagttataggagttctttatatattctgtaaactaggctcatcaaatagaagatttgcaaatattttcttccataggttgtatttttactttctagataacgtgtttttgtgaacaaaagtttttaatttggtgaagtctgctatatctattttttgtcactttcgtttttggcgttatatgtaagaatctattgtcaagtccaagggcatggagatktacccgtatgttttcttttgtgagctttagttttagctctaaaatttagatctttgattcattttaaattaatttttatatctgtatattatgtatatgtttctgtgtaatagtatatatattttatataagggtataacttcattcttttgcatggatgtcaatttgtcccagcactatttgttgaggaaacaattatttccccattaaatgatcttagcatccttgtc

SEQ ID NO: 870050 - DNA, 632 bp, Homo sapiens
gctagtcatcaggacactggaagaatgaccccaaagacatttcagagatctttgaggccaccagtcccatcaaaggacgaatgtgcaagagccttgggggcagaacagtttcaaaggaggggcccatggaaccttggactcactgtccagtgcttttttaaagttctgcttcctgatttccaccaagcacttcttcactatctcagctccagctccagctggcctaggtgcagtggtggttgcccctcaggacagtacaggcagaaaaccttggtaacacccatgtggtgccatttcacacagtgcatgagctggcaagacatggctatctccatctagatttcaaaggatggagctctcagagcytcaagcactaaactaaggcagagggctgctgagagggcagggcccctgcagagagtcttcaactatgacagtgcctagtatagccatgagggaagtgctaccccagagaccccagactggaagagccacttgcttgggattccagcctgggagagatacaggcacccaactgcaagccacccaactggaagccataaaaggagaagtgtgggctgtgcccagctaagccagaggagactaacttctgtccaagtgtgtccagaaga

SEQ ID NO: 870051 - DNA, 622 bp, Homo sapiens
cagaagatttcttctctaaaggaatgtggactttttctttttccttcatgatacttggaaaatgaattacattttaatacttaatttcctgagtctatcatcttccggaggttgctaataaaaaaaaatgatgaaagcctccctcaaacttcagaatagacacatgatgactttgaatgaattgacttgtaaactagtttataggtttcaccattgctcatcctattttaaaaccaagtttcacttttccattactagaaataagtctgctacctggggtaattatatcagttcctacaatgtcattactaattttgctctagaattcagtcaggcgcatcttaaagcacaaccgtgaagttaatcctttttcattcaggatcattttctttgacacatgctgccttgaaagcaaagtcaaatatcttaatcttttcttgcatttgtttcccagaactgcrgtaaaaattagcacaaaccaaggggtttacaacataacttattttctcacagttcttggagctgtaagtctaaaatgaaggtgtcagcctgccttctggagactctgagggagaatctgttccacacccctctttcgtagcttttcatggttgcaggcagt

SEQ ID NO: 870052 - DNA, 613 bp, Homo sapiens
gtttgagaatgaattttcaatacgtctggtagatactttataaacttttgtaaaatgcttcattaaaaagtataaaataatgacaaagattttgcacttaatctgaactataacttatgtgatttcctgtcattagcctagacttataaataaactctatggacaattcttgtgggctcaaagaccaagatttgaagattattcaagattcttttttttttttattgaggcagagtctcactctgtcacccaggctggtgtgcagtggtgcgatcttgtctcactgcaagctccaccttccagattcaagcaattctcctgcctaagcctctcaagtaggaaaaaaaaaaaaaagattgttgttagccctaacaccagarctttgtcgacaaggacatcatcatttgaagtcagttttaatgtgttttcacaagttatttttgtaattctattccaaattctcaaacttgtcaaatcacaagatgatatataatacgtcttgctttttatgaaatgacaattttcaaaagtgacctagataaataacttaaaagagagataacacactttagagaaacatttcaaaaaactttctgcatggaacatactggtt

SEQ ID NO: 870053 - DNA, 600 bp, Homo sapiens
ccgcaacaatggagttggctttgtccccaggatgcaaggttgattcaacatatgcaaatcaataaatgtgactcatcacataaagagaactaaatacaaaaaccacatgattatctcaataaatgcagaaaaagcatccaataaaattcagcattccttcaggtttaaaattctcaataaactaggaagtgaagaaacatacctgaaaataataagagccatatacaacaaacccacagccaatatcatactgaatgtgcaaaagctrgaaacgttccacctgaaaactggcacaagaaaagaatgccctctttcaccactaccattcaatatagtatcagaagccttggccaggaaaatcaggccagaggaagaaataaagagtattctaatagaaagagaggaagtcaaattatctttgtttgcagatgacctgatcctacatctagaaaacctcattgtctcaggcccaaagcttcttaaggtgataagcaacagtagcaaaatctcaggatataaaatcaatgtgcaaaagtagctagcattcccatgcacaaacaacaggcaagcagggagacaaatcatgaatgaactttcatt

SEQ ID NO: 870054 - DNA, 600 bp, Homo sapiens
ccgcaacaatggagttggctttgtccccaggatgcaaggttgattcaacatatgcaaatcaataaatgtgactcatcacataaagagaactaaatacaaaaaccacatgattatctcaataaatgcagaaaaagcatccaataaaattcagcattccttcaggtttaaaattctcaataaactaggaagtgaagaaacatacctgaaaataataagagccatatacaacaaacccacagccaatatcatactgaatgtgcaaaagctagaaacgttccacctgaaaactggcacaagaaaagaatgccctctytcaccactaccattcaatatagtatcagaagccttggccaggaaaatcaggccagaggaagaaataaagagtattctaatagaaagagaggaagtcaaattatctttgtttgcagatgacctgatcctacatctagaaaacctcattgtctcaggcccaaagcttcttaaggtgataagcaacagtagcaaaatctcaggatataaaatcaatgtgcaaaagtagctagcattcccatgcacaaacaacaggcaagcagggagacaaatcatgaatgaactttcatt

SEQ ID NO: 870055 - DNA, 590 bp, Homo sapiens
tcctgagtgaactcccattcacaattgcttcaaagagaataaaatacctaggaatccaacttacaagggatgtgaaggacctctttaaggagaactacaaaccactgctcaacgaaataaaagaggacacaaacaaatggaagaacattccgtgctcatggaaaggaagaatcaatattgtgaaaatggccatgctgcccaaggtaatttatggattcaatgtcatccccaccaagctaccattgactttcttcacagaattggaaaaaactaccttgaagttcatatggaaccaaaaaagagcccgcatagtcaagacaatcytaagcaaaaagaacaaagttggaggaatcgcgctacctgacttcaatctataatacaaggctacagcaaggaaagcagcatggtactggtaccaaaacagatacatagaccaatggaacagaacagaggcctcagaaataacaccaaacatctacaaccatccgatctttgaaaaaaactgacaaaaacaagcaatggggaaaggattccttatttaataaatggtgctgggaaaactggctggccatatgcagaaaactgaaact

SEQ ID NO: 870056 - DNA, 590 bp, Homo sapiens
tcctgagtgaactcccattcacaattgcttcaaagagaataaaatacctaggaatccaacttacaagggatgtgaaggacctctttaaggagaactacaaaccactgctcaacgaaataaaagaggacacaaacaaatggaagaacattccgtgctcatggaaaggaagaatcaatattgtgaaaatggccatgctgcccaaggtaatttatggattcaatgtcatccccaccaagctaccattgactttcttcacagaattggaaaaaactaccttgaagttcatatggaaccaaaaaagagcccgcatagtcaagacaatcctaagcaaaaagaacaaagttggaggaatcgcgctacctgacttcaatctataatacaaggctacagcaaggaaagcagcatggtactggtaccaaaacagatacatagaccaatggaacagaacagaggcytcagaaataacaccaaacatctacaaccatccgatctttgaaaaaaactgacaaaaacaagcaatggggaaaggattccttatttaataaatggtgctgggaaaactggctggccatatgcagaaaactgaaact

SEQ ID NO: 870057 - DNA, 596 bp, Homo sapiens
ctcaataaccattatatttaacattgatagcttggagggcagggaaggacacagatgacacaatcttcaaagtttaatttagttataaggttttttttttgttcttgcttagttttgcttagtttttggatacaaggtcttgctctggtgcccaggctggagggcagtggcataatgataactcataatttggttgtaatggttctttaaaatatatttttgcygagagtgctagctcatacctgtaatctaaacactttgggtggccaaggtgggatgatcgcttgatcccaggagttcaagacgagtctgagcaacataagtaggctcagtctctagaaaaatatttaaaaattgtctgggtgtagctttgcatgcctgtagtcccagctacttgagaggctgatttgaaagcatcactggagcctaagaatttgaagatgcagtgacccatgattcagccactgcattgacagagtgagatatgtgtgtgtgtgtctgtgtgtgtgtataaagaatttgtatgtgaaaaaaattcaagcacaggagaaaagtgaaagcccacggtgggggatgtggagaaaggtcactgtggc

SEQ ID NO: 870058 - DNA, 658 bp, Homo sapiens
ctatgggcaccatggcaaaacctcatatctactaaaaacacaaaaattagccaattggtggtgtgtgcttgtagtcccagctacttgggaggctgacgcatgagaatcgcttgaacctagggggtggaggttgcaataacccaagatctcaccactgcactccagtctgggtgacagagcaagaccttgtttcaaaaaaaatttttttgtattttarttaggaatcaaataagataattaaatgtaaacttacacttaatttactttttaagcattttaagaattggtattctaattttgtgtcggtacattttaagaatcaataaaattatttttaaaatcaaagcaattttaaagcttttacttcattagactccctggcaagaaagccctgggaagatagaaagtttggaggatgtcagagggaagtttgggaaaagtagaggaatatatggagggcagaaggagtgaacattagggaaaccctcccctagctcagtcttcagatacgctggtggacttccccactcagcctgagtcaccttcgctactgacctcatcttgtcttctgactggatgctcctttcaggaagctggtgtctggaaaacttctcaattttagtatcaattattattcagaggctgaaaggcaagcctc

SEQ ID NO: 870059 - DNA, 658 bp, Homo sapiens
ctatgggcaccatggcaaaacctcatatctactaaaaacacaaaaattagccaattggtggtgtgtgcttgtagtcccagctacttgggaggctgacgcatgagaatcgcttgaacctagggggtggaggttgcaataacccaagatctcaccactgcactccagtctgggtgacagagcaagaccttgtttcaaaaaaaatttttttgtattttaattaggaatcaaataagataattaaatgtaaacttacacttaatttactttttaagcattttaagaattggtattctaattttgtgtcggtacattttaagaatcaataaaattatttttaaaatcaaagcaattttaaagcttttacttcwttagactccctggcaagaaagccctgggaagatagaaagtttggaggatgtcagagggaagtttgggaaaagtagaggaatatatggagggcagaaggagtgaacattagggaaaccctcccctagctcagtcttcagatacgctggtggacttccccactcagcctgagtcaccttcgctactgacctcatcttgtcttctgactggatgctcctttcaggaagctggtgtctggaaaacttctcaattttagtatcaattattattcagaggctgaaaggcaagcctc

SEQ ID NO: 870060 - DNA, 631 bp, Homo sapiens
aaagccatccatacttccactgcttgactaggggtaattatctcattcacccagcctaatttttaaacttaccttcctgctcccaccctctcttcactctgaacaagattttactaggttgttgttatgttctggggttcggagaatctgactagtgtgagtttcccaaggtaaaggtaatgccttaataattttcactttaattgctgtttgcgcagtgttttgcacaaaatttaacacaataattgctcccagagtaaatgtataaatctttgcaatgtctgatttgactcccttagagtttggatcttttcccctacaaccatccagagtcctgtctaaccaaagtgaaaatgsggaactccctctttctggctggcatccctgcagagaatggaaataaatgctgtctatgccaactccctagaacaagtataggtttcatctagactagttttcaaaatgaggaaacaggatgcagacaaatactttattcccactttttggcctggggtttattaacaaggtgaaattatacagaagaataaattagtttagctgaaaaaagaaaaaatgtatagttaatggagggaaaaaattgaaaatgcactaaaaccacaagatgttcagg

SEQ ID NO: 870061 - DNA, 631 bp, Homo sapiens
aaagccatccatacttccactgcttgactaggggtaattatctcattcacccagcctaatttttaaacttaccttcctgctcccaccctctcttcactctgaacaagattttactaggttgttgttatgttctggggttcggagaatctgactagtgtgagtttcccaaggtaaaggtaatgccttaataattttcactttaattgctgtttgcgcagtgttttgcacaaaatttaacacaataattgctcccagagtaaatgtataaatctttgcaatgtctgatttgactcccttagagtttggatcttttcccctacaaccatccagagtcctgtctaaccaaagtgaaaatggggaactccctctttctggctggcatcmctgcagagaatggaaataaatgctgtctatgccaactccctagaacaagtataggtttcatctagactagttttcaaaatgaggaaacaggatgcagacaaatactttattcccactttttggcctggggtttattaacaaggtgaaattatacagaagaataaattagtttagctgaaaaaagaaaaaatgtatagttaatggagggaaaaaattgaaaatgcactaaaaccacaagatgttcagg

SEQ ID NO: 870062 - DNA, 631 bp, Homo sapiens
aaagccatccatacttccactgcttgactaggggtaattatctcattcacccagcctaatttttaaacttaccttcctgctcccaccctctcttcactctgaacaagattttactaggttgttgttatgttctggggttcggagaatctgactagtgtgagtttcccaaggtaaaggtaatgccttaataattttcactttaattgctgtttgcgcagtgttttgcacaaaatttaacacaataattgctcccagagtaaatgtataaatctttgcaatgtctgatttgactcccttagagtttggatcttttcccctacaaccatccagagtcctgtctaaccaaagtgaaaatggggaactccctctttctggctggcatccctgcwgagaatggaaataaatgctgtctatgccaactccctagaacaagtataggtttcatctagactagttttcaaaatgaggaaacaggatgcagacaaatactttattcccactttttggcctggggtttattaacaaggtgaaattatacagaagaataaattagtttagctgaaaaaagaaaaaatgtatagttaatggagggaaaaaattgaaaatgcactaaaaccacaagatgttcagg

SEQ ID NO: 870063 - DNA, 631 bp, Homo sapiens
aaagccatccatacttccactgcttgactaggggtaattatctcattcacccagcctaatttttaaacttaccttcctgctcccaccctctcttcactctgaacaagattttactaggttgttgttatgttctggggttcggagaatctgactagtgtgagtttcccaaggtaaaggtaatgccttaataattttcactttaattgctgtttgcgcagtgttttgcacaaaatttaacacaataattgctcccagagtaaatgtataaatctttgcaatgtctgatttgactcccttagagtttggatcttttcccctacaaccatccagagtcctgtctaaccaaagtgaaaatggggaactccctctttctggctggcatccctgcagagaayggaaataaatgctgtctatgccaactccctagaacaagtataggtttcatctagactagttttcaaaatgaggaaacaggatgcagacaaatactttattcccactttttggcctggggtttattaacaaggtgaaattatacagaagaataaattagtttagctgaaaaaagaaaaaatgtatagttaatggagggaaaaaattgaaaatgcactaaaaccacaagatgttcagg

SEQ ID NO: 870064 - DNA, 599 bp, Homo sapiens
accatggtttctgtatcctgagatcatggtcattttctgtactatctattctgcctcaatttccccctaagagattttagggcaataatcatattggaggttgaggggttaggccattatttctggagctgtttcctgctgagygggtgttacttctgcctagcctgggccttaaagtttcttcctgtgtgatctaacagggtgtaaaccatgtcgttcgtggaaccagtgggaagatgctggcaaccaaaggttgaaagccttgcaaaaccatcatgcaaacatggagttgccgtaagcaagagagcaagaaatcagttaacattttaaacaaaattggaacaaaagtaaaagttgaaaatataataatgacgggtactattaaagagagcaaggcagacaacggacatagctttcatgttcccatggaagttcctagagattcaattttgtctgcctgggtgatgatattattaatattttcttcgactaaaccagactgattgatctcaaaaacagcattcttcttttagatataaacatgttcctctttacccggctgggagaagatcccaggctccttggttttgtcggactac

SEQ ID NO: 870065 - DNA, 592 bp, Homo sapiens
cctaaatagtcagcagcttcaggttacattttggagcttgtccacttaaatgggttgatgaaaatggctcacaaaactcacgccttggaaagcgggttttctcccttgctcttagattttctgcaacccattaaactaacttcctgatgcctcgactttcacattcgtgaaaaaggcgccattgagagtgacgtttccaggaaggctcagcccttgtcagcccctgcagagctctgaagctgttcacaagcaggccatgtggaagatttctctcaaaagcsattgagcacgcgctctggctagagaaaaaagagggctgctgcacaatggacagtgtctcagacatcaggacagtttccacagtagtttaggaaaaaaggcagtgccctgagctgcagaaggtgcaatgctctggaaggaaccctgggtgcagctgaaagaggaacctgagaagcatagggccaatcgggtgaggataacccgcctgatttgggcaaaggtaaggtgcctacatagggtaataccctcctcaatgctcagcccagacctgtcctccaggtccacctctgtactcactctctgtggcaaagag

SEQ ID NO: 870066 - DNA, 646 bp, Homo sapiens
ctttaatccatcttgaattaatttttgtgtaacgtgtaaggaagggatccattttcagctttctacatatggctagccagttttcccagcaccatttattaaatagggaatcctttccccatttcttgttttagtcaggtttgtcaaagatcagatagttgcagatgtgtggcactatttctgagggctctgttctgctccatttggtaccagtaccacgtactctgatttggtaccagtaccatgatgtgctgctataaagacacatgcacacgtgtgttcattgtggcattattcacaatagcaaagacttggaascaacccaaatgtccaataatcatagattggattaagaaaatgtggcacatatacaccatggaatactatgcaaccataaaaaatgatgagttcatgtcctttgtaaggacatggatgaagctggaaatcatcattctcagcaaactatcgcaagaacaaaaaaccaaacatggcatgttctcactcctaggtgggaactgaacaatgagaacacttggacacgggaaggagaacatcacacaccggggcctgttgtgggatgggggagggggaagggataacattaggagatatacctaatgtaaatgaggagataataggagcagca

SEQ ID NO: 870067 - DNA, 632 bp, Homo sapiens
ttgcaaatcaagcaaggttgagatcacttatgagacctaactaatttcgtctgctcagagattattgagacgtgatctccattttaatttattttaacaaattttctgtacttttaattcccatccaaactgtaacttataaattattattgttgtacatatataggcccatgttgtgtatgctttgaagacatgtcctgctttcaaactcrtttgtattatgttattattgaatttgccccatttattggaattatatactgcaatctcccaactacaagaggtatgagttctgaggagatcacagtaaagatgagtcagaagtgaaaacggttctccaactcacacatgcagtaaaaacaaatttcacgtggatataatgagtaattatttaaaatttaaaataccctgaaaacattaacgtttatctcattactatgtaatatggaaattacaagacaaaaaaacccaaagacttatttttaaaatagaaatggagctttttatatgatgaaatggtccataatttaaatgtaaaaagtgaataggaaatacatgaaataaaataaaattatttgtaaaagtgacaatgcccgtattagatttaacaatatcttacaatgaaataagtt

SEQ ID NO: 870068 - DNA, 635 bp, Homo sapiens
ccatttgtttcattgccattcgggcaactaggtagtaagaccattttctgctaagcaagagtaggtatacaagtaacaaatccctctggcctcctcctgaatagttcagagaacagattctagttcagccagctggctgctaacacccctcccttcctcagaaatgcttatgtttttaacaggattrtaagccacggcctcccagcatcgggtcccatcaatatatttggtggaatcatcagcaaaccaagcatgtctctgatcgtctgggcttggttctttaaaggatttgccccattgggcaggggaggtttccttccttatctgcaggacttgctcagtggtttgctgagctggcaagttttgcacatcctcatttaaaaatgatacctgttttggttccggcttagcctggtcttgtatgtgccatttccatttactttcttgagtgtaccctatccaatgaggtttgagggagttcatgacccaagtcatattaggaatttggggcctcataaaaacatcatgattaagacaaaggtgttctgtttcctgtaaagcccagtagcaggtcaacagctgcttctcaaagagtataagctttgctagcctctgacagcttctgggtctaaaac

SEQ ID NO: 870069 - DNA, 640 bp, Homo sapiens
ggaaccctggtgagatacttcaggttaaaaaatgtgagatcctataaacagggaaggaacttccatttccttttttttttttttttttttttgagatggagtcttgccgtcacccaggctggagtgcagttgcgcgatctgagctcactgcaacctccacctcctgagttcaagcacttytcctgcctcagcctctggagtagctgggactacaggctcatgctgccacgcccggcttatttttggtttttgttttgttttgttttcttttgagacggagtctcgctctgtcgcccaggctggagtgcagtggcgcgatctcggctcgctgcaagctccgactcccgggttcatgccattctcctgcctcagcctcccaagcagctgggactacaggcgtccgccaccacgcccagctaattttttatatttttagtagagacggggtttcaccctgttagccaggatggtctcgatctcctgacctcctgatctgcccgcctcagcctcccaaagtgctgggattacacgcgtgagccaccgcgcccagcctatttttgtatttttagtagagacggtgtttcactattttggccaggctggtctcctgacgtcaggtgatccgcccgccttggcctcc

SEQ ID NO: 870070 - DNA, 640 bp, Homo sapiens
ggaaccctggtgagatacttcaggttaaaaaatgtgagatcctataaacagggaaggaacttccatttccttttttttttttttttttttttgagatggagtcttgccgtcacccaggctggagtgcagttgcgcgatctgagctcactgcaacctccacctcctgagttcaagcacttctcctgcctcagcctctggagtagctgggactacaggctcatgctgccacgcccggcttatttttggtttttgttttgttttgttttcttttgagacggagtctcgctctgtcgcccaggctggagtgcagtggcgcgatctcggctcgctgcaagctccgactcccgggttcatgccattctcctgcctcagcctcccaagcagctgggactacaggcrtccgccaccacgcccagctaattttttatatttttagtagagacggggtttcaccctgttagccaggatggtctcgatctcctgacctcctgatctgcccgcctcagcctcccaaagtgctgggattacacgcgtgagccaccgcgcccagcctatttttgtatttttagtagagacggtgtttcactattttggccaggctggtctcctgacgtcaggtgatccgcccgccttggcctcc

SEQ ID NO: 870071 - DNA, 667 bp, Homo sapiens
ctggcagcccctagatagcttcatgatgggggctggtcaccagaaaaaccaatggtcaattagagagtggggactttgcaaccctgctcctttgccaaaatgcacttcaaaacattttgcatttataactaacatttgggatttatttaatgcaaatctaatagtattcaggattagccagttataatcagactggtaagataattttcagctctttttttatatatactttaagttctgggttacgtgtgcagaacatgcagttttgttacataggtatacacgtgccatmgtggtttgctgcacccatcaatccgtcacctacattaggtatttctcctaattttatccctcccctagctccccaccccctataggtccctgtgtgtgatgtccccctccctgtgtccatgtgttctcattgttcaactcctacttatgagtgagaacatgcggtgtttgattttctgatcttgtggtagtttgctgagaatgatggtttccagcttcatccatgtccctgcaaaggacatgaactcctcctttttatggctgcatagtattccatggtgtatatgtgccacattttcttaatccagtctatcattgatggacatttaggttggtttcaagtctctgctattgtgaatagtgctgcaataaacaa

SEQ ID NO: 870072 - DNA, 683 bp, Homo sapiens
gtgttctttaaatagtcgtgatattagtcatctctcaatgatatgcactgcaaatgtcttcttcaagtttgtcttaaatgtgccaatctttgtctttagggtttgtgttttgtgcatcttgcttaacacattctccccctttccaatattataaagatagtctcctatatttctttttagtagtttttctttatgcgtttaggtcattaatgcacctgaaactgatttttgtgtatggcataaggcaggatcttattttctttttgccatttggattaccaattgtcccagtacaatttcctgaatgggtcattytctcctcattaatttgtaagagcgcctcttgtcataccttaacttttcatatatgaataggtctgctaataggctctattcttccattgctctgtgaccatccctctcatctaaggtttaatatcgcaatcatcataatcactcacttgaactgcacactagaatttgcaaagcactttcaaatccattttccaattcaaatctcaaaatggtcctatgagttaggcactactgttcatatctgtctggatgaagagcgtcaggttcataaaggttaagtgaatcatggtcactagagcataagtgtaataagaacaaggacccaatctcatgtgttcagttagcactctttccaccagactctgtta

SEQ ID NO: 870073 - DNA, 670 bp, Homo sapiens
tacttgagagagatgatttagggtatctggcagaagaaatttctaagcagcaaagcattcaagaggtgacttgggtgctgttaaaggcatttagttttataagggaagcaaagaataaaagtttggaaaatttgcagcctgataatgtgatagaaaagaaaatcctattttctgaggagaaattcaagccagttgcagaaatttgcataagtaatgagaagctgaatgctaacccccaagacaatagggaaaatatctccaggacatgtcagaggtcttcatggcaatccctcccatcacaggcccagaggtttagaagcaaaaaatggttttgtgggccaggcccagggtccctctgctgtatgcagtctarggacttggtgtcctgtgtcccagccactccagctgtgattaaaggggccaatgcagagcttgagatgtggcttcagagggcacaagccccaagccttggcagctttcaagtggtgttgagcctacaggtgcacagaagtcaagaattaaggtttgggaacctctgtctagatttcagaagatatatggaaatgcctggatgcccaggaagaaatttgctgcagaggtgggttcctcatggagaacctctgctagggcagtgcagaagggaaatgtggggtgaaggcccccacatgga

SEQ ID NO: 870074 - DNA, 478 bp, Homo sapiens
aaagaatatatcttcacataaaaagccgacagatccattgtgagaaacttgtttatgatgtgtgcattcatctcacagagctgaaactttctttagattgagcagttttctaaacagtcctttcatagaatctgcaaagggatatttctgggcccattgaggcctatggtgaaagaggaaatatcttcacatgaaagctaaacagacgytttctgagaaacttctttgtaatgtgtgcattcatcacacagagttgaacctctcttttgattgagcagtttggaagcagtctttttgtagaatatgcaaaaggatatttgtgagccctttcaggcctatggtgaaatagggaatatcttcacaaaaaaaaactaaacagaagctttctgagaaacttctttgtgatgtatgttttcctctcacagagttgaacttttcttttgattgagcagtttggaaacagtctttttgtagaatc

SEQ ID NO: 870075 - DNA, 641 bp, Homo sapiens
aactacacagaagcattctgagaaactgctttatgatgtgtgcattcatctcacagagttgaacctttcttttgattgagcagctttgaaacactctttttgtagaatctgcaagtggatatttcgtgtgctttgagtcctaccatggaaaaggaaatatcttcacataaaaaatactcagaggaattctgagaaacttctttgtgatgtgtgcattcaactcacagaattgaayctatctttagattgagcagtttagaatctctctttttgcagtatctgcaagtggatatttggagccctttgcagcctgtggtggaaaagaaaatatcttcacacaaaaactactcggaagcattcttagaaacttctttttgatgtgtgcattcaaatcacagagttgaacctatattttcattaagcagtttaaaatctctcctttgcagaatctgcaagtggatatttgaagccccttgtggcctatggtggataaggaaatatcttcaaataaaaactacacagaaacattctgagaaacttctttgtgatgtatacatttatctcacagggttgaaactatcttatgacagagcagttttgacacactctttttgtagaatctgcaagtggatatttgcagc

SEQ ID NO: 870076 - DNA, 640 bp, Homo sapiens
atatacccgtttctgtcggaggcctcaaagcagtcaaaaatatccacttacagatactacaaaaagagtgtttcaaaactgctctacgaaaaggtatactcctttgtgtatactctgtaatgtttgcatacaactccrtgagttatatgcaaacattacagagaagtttctgagaatgcttctttctactttttatgtgaagatatttccttttccaccaaaggcctcaaagctcttcaaatgtccactttgcagactctacaaaaagagtgtttgaaaactgctctataaaaagaaaggttcaactccatgagttgagtgcacacatcacaaagaagtttctgagaatggttctatctagtttttatgtgaagatatttccttttccaccataggcctcaaagcactccaaatgtccacttgtagattctataaaaagagtgtttcaaaacttctctatcaaaagaaatgataaattctgtgagatgaatacacacattcctaagaagtttctgagaatgcttctatctactttttatgtgtagatattctcatttccaatgaaggcctcaaagccgtccaaatatccactggcagattctacaaaaagagtgtttcaaaactgctgtattaagaagta

SEQ ID NO: 870077 - DNA, 604 bp, Homo sapiens
gtttatctgaagaaatttcctttttcaccataggcctcaaagcactccgaatatgcatttccagattctataaaaagtctgtttccaaactgctcaatgaaaagaaaggtttgactctgtgagatgaaagcacatatcacaaagaagtttctcaggatgtttctttctagtttttttgtgaagatatttcctctttcactatagtcctcaaagtgctccaaatatccatttgcagattatacaaaaagactgtttacaaacggctcaatcaaaagaaagtttcaactctgtgagatgaatgcatgcataacaaagtagtttctcagaaagcttctgttcagttgttttgtgaagatatttccttttcaccataggcctcaaaacactccaattatccatttgcagattctgcaaaaagagtgtttccraactgctcagtcaaaagaaacgttcaactctttgagatgaaagcactcattgaaaagaagtttctcagaaagcttctgcctagctttcatgtgaaggtatttcctatatcaccaaaggcctcaatgggctcagaaatatccctttggggatactacaataggactgtttccaaact

SEQ ID NO: 870078 - DNA, 595 bp, Homo sapiens
tatgctgttttgtgatgtttccatataaatttcagaattttttttctatatctgtgaggaatgtcttcttcttcttcttcttttttttttagattgcatcttgctctatcacctagactggagtgcagtgatgttacacctgcacaccacaacctccacctcctgggttcaagcaattctttgcctcagcctcctgagtagctgggattasaggcacccgccaccatgcctggctaatttttttgtatttttagtagaggtggggtttcaccaagttggccaagctggtcttgaactcctgacctcgtgatccaccaacttcagcctcccaaagtgctgggattacagacgtgagccactgcccctagcctgttattttgatagagatggcatgaaatgtatagattgttatggattgtatggacattttttaaaaatacagattcttccaatctgtgaacataaaaatatctttccaatttttgggtcctttttcatttcttttatcagtgttttacagttttaactgttgagaacttttatttctttggtaaattcccacacattttgttttatttgtggctactgcaaatag

SEQ ID NO: 870079 - DNA, 620 bp, Homo sapiens
cattcaatgcaatctcaataaaattccagcaagctattttgtaaatatcaaccaactgattctaaagttcatatgaaaatgtaagagatttagaatagctaacacaataccaaagaagaacacagttggagaattcacactacttgatttcaagacttaatataaagctacagtagttaagaccttattatactggggaaagaatagacacatagaacgatggaaagaatgtagagcccagaaattgaccaacacatatgtagtcaacttatctttgacaaagaagcaaagaaaattcaatggagaaagaagagccttttcaacaaatagtctagaacaattagatgtccatgcaaaaacaaaaaaaacaaaacaaaacctggagagaaaaattacatctttcacaaaaattaactcaaattgcattatggacytaaatgtaggatgcaaaacataaaacttctgtatgaaaatatcagcaaaaatctaggtgaccttcattatagtgatgagtgtttagatacaacatcaaaagcacaatctatgaaagaaaaaaattgatgtcattaaaattaaaaacttctgctctgtgaaagactatttatttgcagaattaaaag

SEQ ID NO: 870080 - DNA, 591 bp, Homo sapiens
ggagataaggatggtgtacacacaaggaaccatgttatgttaaagatttataggagcattgtgacctgaccaaggacaaggcagtttcacaaccctccctgagatccttgttgccacccagatgtctgtgatcattgatcacctcttgatctcaacctcctccctcttcaccttccccaacataaacagggcctaaaattctgttaactaaagatggttctttaggacatcagtacacaatattcttggtttactggctgtccaaaataaagtcgccttccttcccctaacaccttgtctcttgacttactggctattktgcagcaagtgatatgagcttggacttgttaacagttcagcaatatatatgaataaaaacagaaattatatatatacatacatatatatatgaggagagggaatatgtgtaaatgtaggtgaatctaggtaaaagctatatgaatgtcaattgtaataatcttacagatttttggtaggtctgattctctttcagaataaaagtgtatggataatttaaaaaatgttgagagttctcttctgagaggtgttcaagtagagactagatgaatt

SEQ ID NO: 870081 - DNA, 703 bp, Homo sapiens
ttttgcagattcaatctttctggctatagttagcagctgatctatgacgaatctatcgtagtaccccatttacccagacaaattctcagcccagggaaatgtacatgttgcaaatagagccaatcgtaacttttccctaggactgtttaactcaggattagagaaatagcatgcatttaatgttcttttctaaaatggcgctatgtgactttagagctatgagcagccacagtttccatcctgtgaaagaagccagtctgtaggaataaatgaaactgcacataggaaagagcagacatgaaagaacgcgattaagctgtcacagatggcagcagtttcttctcccagctgcttctcccccctccccccaggtaagtaagctttctcatcactcttcttttargccaaagctagttcacagttggttttaaccaaaacagtactgaataacatatcttttaatctaaagaccaaaaaatgaaatgataaagccagaactaccacagacagttgtatactttgtgcactgcacaagagccaaagtgagcagaagatgataaaaatccagccatgcaacttggtgagagttagcacccacctgcaagtggtgatgttttcaaattttcacaaatcactttaatcatagggctaatgttggccctaaatgaagtcaacaaagaaaatagcaacttgtaagccttct

SEQ ID NO: 870082 - DNA, 600 bp, Homo sapiens
cctcaattctttgaaatagttttgatagaaactgtaccagctcttctgtgtacatctggtaaaaattggctgttaatctctctggttccaggctttttttttttgttggcaggctatttattactgattcaactttggagcttgttatggaggtctgttcagggattccagttctttctggttcaktcttgggagggtgcatgtgtccaggaatttatccatttcttttagattttgtagtttatgtgcatagaggtgtccatagttatggtatttatgtgtaaatgcacataacatgatagttatgtgtatttctgtggggtcagtggtaatatctcctttgtcatttctaatgtgtttgtttggatcttctctcttttcttctttactagcccagctagtggtctatctactttattaattttttcaaaaatcaactcctagattcattgatcttttaaatggttttttgtatctcaatctctttcagttcagctctgattttagttatttcttgtcctctggcacctttgggtttgattttctcttgcttctatagttcttttggttgtggtgttaggtttataaatcaagatcttt

SEQ ID NO: 870083 - DNA, 650 bp, Homo sapiens
tagcaatatattaattagacacacttgagaatcgaatacaaaaaatagataatacatattgtatcatacttcaataatgcagtttaatttgatttaacatcttatctagaaaatctataacccttaaagtaatgcaacccttgaagcatttgtttggtagtcatctcatctctctcatttctctaaataagactggaactgctgttaaaatataggataatttttaaggaaatcgcccttaaaaataggaygttttttatttggagggattaaaagatagttacattacttgggagaccaatgagatgaatgatgtccttccaattttcatatttgtttgattctaaaatagcagtaaatgtattagaatatatctgactattaggggaacatgtaaatgatttgtacaattatagataattgattcatcagacaagtgtccctctcacaattgttttattttgttgtcttattaaaaagagatggggtctcactacgttgctcaggttggtcttgaacttctgggctcaagcgatcctcccacctcagcctcccaaagtgctgagattataagtgtgagtcaccatgcccagccacatttgattattttaaaatgtgatttataacttacttacgatatacttgaagca

SEQ ID NO: 870084 - DNA, 619 bp, Homo sapiens
taacaaaatgtatcccacagatatgaacaaattttatgtatcaataaaaacatgtaaatataacaatgtcatttcactgcttaaattcttgcaatgatatacactcagaataaaattaaatgcaagattcctatacaaatagctctagggtacttacttctatgatagtatcttgaaaggcttttccctttaacaactctgttttatccatactgcctcctttttgtttcattaatacattacattctttcctgactcaagctttttgcacattttcttaacattgcctgtaacgttcatcactcatcatccaggtctttacatggtgggctccctcgcttaactcactttgcgttcctaattcagttattcaaagagatgtttccttacaactccacttaaaataggacrctccatcctgttactctgcattgctttatctgcttatctattttattctttggtaatagtacttgaagataggaaattatcttcatgaattgcttatttacttatctatacaatgatagcttcttacaagcagaaacctctgtctgatttctcactgtctccccagtgctaagagcagtacctgccaaaaaagttatttttttagaag

SEQ ID NO: 870085 - DNA, 448 bp, Homo sapiens
tcactatccaaggggtcctaggacagccagtcactagatacttctcccagccactaagttgtgactggggaactttatacttttcacatgcttttctaattatgcctgaaagccccactcccttgttagggagagacattctagcraaagcaggggccattatacacctgaacataggagaaagaacacccgtttattgtccccctgcttgaggaaggaattaatcctgaagtctgggcaacagaaggacaacatggacgagcaaagaatgcccattctgtttgagttaaactaaaggatttcacctcctttccctaccaaaggcagtacccccttacacccaaggcccaacaaggactctaaaatatttttaaggacctaaaagcccaaggcctagtaaaaccatgcaatagcccctgcaatactccaattttaggagtacagaaac

SEQ ID NO: 870086 - DNA, 448 bp, Homo sapiens
tcactatccaaggggtcctaggacagccagtcactagatacttctcccagccactaagttgtgactggggaactttatacttttcacatgcttttctaattatgcctgaaagccccactcccttgttagggagagacattctagcgaaagcaggggccattatacacctgaayataggagaaagaacacccgtttattgtccccctgcttgaggaaggaattaatcctgaagtctgggcaacagaaggacaacatggacgagcaaagaatgcccattctgtttgagttaaactaaaggatttcacctcctttccctaccaaaggcagtacccccttacacccaaggcccaacaaggactctaaaatatttttaaggacctaaaagcccaaggcctagtaaaaccatgcaatagcccctgcaatactccaattttaggagtacagaaac

SEQ ID NO: 870087 - DNA, 727 bp, Homo sapiens
gacgcactgttcttgcagtttggatcacataggtcaacaagaccaagagatgaggactatatgtacattatagcaggggtgttaggccataagttagtaaaaaaaatcagagagagagtaaatactcaaaatgatttcagagttcaaatgatgggaagaaaataatacaaagtagaatggaaggtgytctgcatgctcaaggagtgtgtttcaggaaatgacagttgaggcaaaaatatggaaaaagagcaccctagactgattctgtgaaaagccaatgtatgacctatgtgatgaggtatagccatgaaaaatggaaaaatagcttgctagacagaagtacactgaagtgagggtgatcaacttgtcccaatttactctggattttcttgattttagctctctaattcccatgttctgggaagcccctcagtcccaatcaaatctgaatgatggacaccctaactggtggtctaagacctattagaatatgaggtctactgaaaggtcagtggtctgatggtcaacatccaaactacagccatagtcactggcagcttggcttggatcacataaaaaataattagaggaaaaaacctttttgattttgagacattctggcatctgatattgtggctttcagtagcgcccaagcctcagcccaatttattaataactaatcagttcttttgcatttcctgaggagtgttttacttccaattatgtg

SEQ ID NO: 870088 - DNA, 709 bp, Homo sapiens
ccatctggtcctggactctttttcgttggtaagctattgaatattgccacattttcagagcctgttattggtctattcagagagcgaacttcttcctggtttagttttgggagggtgtatgtgtcgaagaatttatccatttcttctagattttctagtttatttgcgtagaggtgtttgtagtattctctgatggtagtttgtatttctgtggtatctgtggtgatatcccctttgtcaytttttattgcatctatttgattcttctctcttttcttctttatcagtcttgctagtggtctatcaattttgttgatcctttcaaaaaaccagctcctggattcattaattttttaaaaaaattgaagtctttcagttacactctcttggatgtacggtataatcacaagaataatactaatagttataataataattactcattttaatacctaacttttaataataatagctaacctttttaggatattttctaggtgccaatacagttttaaatattgtatatatagtgactcgtttagtcatcatgacagtcatttaaccatttacctcatttatcagatgacagaagataactacaaaaaggttaagtaatttgcctgaggaaattagtagcagagccgagaatcaattccagtctcttgaatcctaaaagcccttgctttttaaaagagccaccgtatcagtt

SEQ ID NO: 870089 - DNA, 604 bp, Homo sapiens
gagacttgatggtttgctgcacacatcaacccatcatctacattaggtatgtctcctaatatccctgccctcgccacccatcccccaacaggccctggtgtgtgacgttctcctccctgactccatgtgttctcattgttcaactcctacttttgagtgagaacatgcagcatttggttttctgttcttgtgttagttggctgagaatgatggttcccagcttcatccatctccctgcaaaagacatgaactcatcctttttatggctgcatagtattccatggtgtatatgtgccacattttctttatccagtctatcactgatgggttttagggttagttscaagtctttgctattgtgaatagtgctgcaataaacatacatgtgtatgtgtctttatagtagaatgatttataatcctttaggtgtatatccagtaatgggatcgctgggtcaaatggtatttctgcttctagatccatgaggaatcgccacactgtcttccacaatggttgaactaatttacactcccaccaagagtgtaaaagtgttcctatttcttcacatcctctccagcatcttttgtttcttttttaatgattg

SEQ ID NO: 870090 - DNA, 632 bp, Homo sapiens
ataagggcacctcccttataaattggattagtgaccctataaaagaggccccagagagttctttttccccttgtgctatgtgaggacactgccaaaacgcagcagtctatgatttaggaggcaggtcctcaccagacaccaaatcttccagcaccttgatcctgaactactctgcctccagaactgtgagaaataaatttctgttgtttataatccatcatgccaacctgtggtatttttgtgatagtascctaaccatgctaagacagaaaatatccagagtccctgtattggttcatcatcacattgctataaagaactacctgagactgggtaatttataaagtaaagaggtttaattggctcacagttctgcagatggctgtacaggaagcctggctgaggaggcctcaggaaacttacaatcatgatggaaagcgaagagaaagcaagcatgtcttacacggctgaatcaggaggaagagagtgaaggaagaagtgctacaaacttttaagcaaccagatctcaggagaactcacgaaattaaactagaaatcaattacagagaatatcaagaaagatatttaaatacttgaaaaataaacaccatatgtctcagtaagccatgttt

SEQ ID NO: 870091 - DNA, 632 bp, Homo sapiens
ataagggcacctcccttataaattggattagtgaccctataaaagaggccccagagagttctttttccccttgtgctatgtgaggacactgccaaaacgcagcagtctatgatttaggaggcaggtcctcaccagacaccaaatcttccagcaccttgatcctgaactactctgcctccagaactgtgagaaataaatttctgttgtttataatccatcatgccaacctgtggtatttttgtgatagtagcctaaccatgctaagacagaaaatatccagagtccctgtattggttcatcatcacattgctrtaaagaactacctgagactgggtaatttataaagtaaagaggtttaattggctcacagttctgcagatggctgtacaggaagcctggctgaggaggcctcaggaaacttacaatcatgatggaaagcgaagagaaagcaagcatgtcttacacggctgaatcaggaggaagagagtgaaggaagaagtgctacaaacttttaagcaaccagatctcaggagaactcacgaaattaaactagaaatcaattacagagaatatcaagaaagatatttaaatacttgaaaaataaacaccatatgtctcagtaagccatgttt

SEQ ID NO: 870092 - DNA, 632 bp, Homo sapiens
ataagggcacctcccttataaattggattagtgaccctataaaagaggccccagagagttctttttccccttgtgctatgtgaggacactgccaaaacgcagcagtctatgatttaggaggcaggtcctcaccagacaccaaatcttccagcaccttgatcctgaactactctgcctccagaactgtgagaaataaatttctgttgtttataatccatcatgccaacctgtggtatttttgtgatagtagcctaaccatgctaagacagaaaatatccagagtccctgtattggttcatcatcacattgctataaagaactacctgagactgggtaatttataaagtaaagaggtttaattggctcacagttctgcagatggctgtacaggaagcctggctgaggaggcctcaggaaacttacartcatgatggaaagcgaagagaaagcaagcatgtcttacacggctgaatcaggaggaagagagtgaaggaagaagtgctacaaacttttaagcaaccagatctcaggagaactcacgaaattaaactagaaatcaattacagagaatatcaagaaagatatttaaatacttgaaaaataaacaccatatgtctcagtaagccatgttt

SEQ ID NO: 870093 - DNA, 616 bp, Homo sapiens
aacagtaggcaaattaccaaactcagaggaatgagataaagaagattttcacagaggcgcggatgttagtgaggagcactgtaggataaatgaaaattttcagggaaaaagggggaatagaacatttgtgacaaagttaccagaatcgtctaattgagtattataaaacaccaagatagaaggtaagcacagaaaggctagaattctggtaatactcaatttattctcttctcatgtctattagtcaacyttatctgacctgtcctgttccccagaaagctacctctttggcctgcttcttcttacctccttactattttggcttctatttgggttcaaccaagggttggcactggcaggacacgagggtgggaggagagaataaaggtgcattacttcctcactcccttcctaattccatggagatgttctggtagaagctctgtccctccatgactgtagcgtccccctagatggcccctccatctagggcaaaggagctatggattccttccccctagaattggctcctccacgtttccaattctcactgagctccagtaatgtctttcctcccttgtctctttgaccattgaattggcaatggctttctact

SEQ ID NO: 870094 - DNA, 609 bp, Homo sapiens
aaaccactcatatagtgaaaaacaaaatgccaccttgccacttacaccattttctttccatcacttttgtaagactgttttctcccagggagtagagaagtggaataatgtttaaatgagaagccttcacaccttttctcaatctcacagctcaagacaactccaaggccaattttcttccgggcttaacttaataactacttggaataaggagggaagaaaggaacaatctattttcttccactcagagaagcaagtgtgcacgttcatgactgatttaacattttgtatttgggtgctgctctcagcataaaggtgatatagaaatgactacaaatttatggcaggacataaatagagatggcattttaaggtgtgatgagtaaaaaaccttcagcttttgaccaaagtcatttttaatgaaatattgactaatatttccttactaaaataagtaaaaatgcaytgaatagacaagaaactaggctttgtccagcttaagccatccggctccacaagtatattcttcccacaaagaaatgtttatcacagttttgcagttacacactttggcagcttattaagaattctgtttgtttttcctttttt

SEQ ID NO: 870095 - DNA, 609 bp, Homo sapiens
ctggccccaggaagcctctggaagaattcaggattgaatgattgaatggaagcactggcacaaactcaccacagctggccaggaaagccctgaccaacgggcgtccccaggtccctctgtggtgtgtgcttcagcctgctgccagctgaggagtgtcccccractgatttctccggatagagctgaatccagaaagcaggctgttcaagagaggcatgtggcttggctgagtcaggcccacttcctttccccagtctggtatttatggctccctgcagcagcctagttggcaggtctggactgcttctccacctacattcctaagccacactgcttggccaagatgcatacctgcagcctggcctccagtgttggacagtgtttgtgggagtcttgctgctccttgggagatcagcacctggtggctgggagcgaattttggatacctgcaaagcctccaagttgcagccattattttagcccaggccacagggcaggaggactttatcatatagaatgcatcagaatgaatacaccggtgttccagatcccagttctgtcctttagggaaggctgtggcctcaaacaggtcatacgcctctctaaccc

SEQ ID NO: 870096 - DNA, 609 bp, Homo sapiens
ctggccccaggaagcctctggaagaattcaggattgaatgattgaatggaagcactggcacaaactcaccacagctggccaggaaagccctgaccaacgggcgtccccaggtccctctgtggtgtgtgcttcagcctgctgccagctgaggagtgtcccccgactgatttctccggatagagctgaatccagaaagcaggctgttcaagagaggcatgtggcttggctgagtcaggcccacttcctttccccagtctggtatttatggctccctgcagcagcctagttggcaggtctggactgcttctccacctacattcctaagccacactgcttggccaagatgcatacctgcagcctggcctccagtgttggacagtgtttgtgggagtcttgctgctccttgggagatcagcacctggtggctgggagygaattttggatacctgcaaagcctccaagttgcagccattattttagcccaggccacagggcaggaggactttatcatatagaatgcatcagaatgaatacaccggtgttccagatcccagttctgtcctttagggaaggctgtggcctcaaacaggtcatacgcctctctaaccc

SEQ ID NO: 870097 - DNA, 604 bp, Homo sapiens
tagtatccatgatttttctcatcagtgtcctttaaatacatccacattatatctgaggtttaaaaacaaggcaaatgggcacagcatgcttcggtaggactgtcctttgtggctgtagaaatgagccttagctaacttaggcctgagtggttccagtacytaagtagatccctatacttaactcagcaaagcatacatagttgttattcaattgttatttacttttttggtctccttttatttcatttcctaggaaactgagtggacgttgaatctgtgaatgggaagggaattcttgtattttctaaccagatttgccaggacctaagagcagataatggggcgggggaagaaaggaaaattgccccccatgtatccaatacgccaataaattctatacaccaaaactttgaatgaacaaagtaatttttagaaaatcaaatagggattgtctagggagaataaaaagacatagtgttagtccagtgtatttattggcatggcacatgttgattgattacctactgtaagctaggccctctgccagaccttggaggcatgaaaataaacaagacagatgtgattactcttgctagttgagaag

SEQ ID NO: 870098 - DNA, 644 bp, Homo sapiens
atccacattgtagcatatgtcagaagtttcttccctttttagtgctgaacagtattccattgtgtgtgtgtgtgtgtgtgtgtgtgtatatatatatatatcacattttgcttatctattcatctatttatggacactttgcttgcttctgtgttttagttattgtgaataatgctgctaagaacatgggtatacaaatatctttttgagactctgcttttaattcttttgggtatgtacacaaaagtggaattggcagatcatatagtaattctattttaaactttttaagaaacaatgacactgttactcatagtagctrtatactattttacattcccaccaacagtccacagggttccaatgtctacatattttcatcaacagtggaatattctgttcttttttagtagcctttctaatgggtattaggtattatctcattgtaattttgatttgcattttcatgatattgacagatgtcatcattttccatgtgcttattggccatttgtatatcttctttggagaaatgtctgttcaagtcctttgcccatttttgaattgggtagtttgttttccattgttgttgggatttaggagttctctatatattctggatattaatcccttatcatatatga

SEQ ID NO: 870099 - DNA, 561 bp, Homo sapiens
gcttttttaaaataaaaactaaatatatcataatttttatttccagaggggctggcaagatggccgaatagaaacagctacagtctgcagctcccaggaagaccaatgcagaaggtgggtgatttccgcatttccaactgaggtacccggtttatctcactgggacaggttagacagtggatgcagtccatggagggcaagcaaaagaagggtggggagtcgcctcacccaggaagcacaaggggccagagagctacctcccctagccaagggaagcccttagggaccatgtcatgagagtcggtgctatctggcccagatactacgcttttcccayggtcttcccaacccacagaccaggagcttccctcatgtgcctacactatcagggccctgggtttcaagcacaaaactgggcagccgtttgggcagacactgagctagcttcagggtttttttttcacaccccagtggtgcctgaaatgccagtgagacagaacaattcactcccctgaaaagggggctaaaaccagggagccaagtggtcttgctcagctccca

SEQ ID NO: 870100 - DNA, 657 bp, Homo sapiens
attgacaaatgggatctaattaaactaaagagcttctgcacagcaaaagaaactatcatcagagtgaataggcaacctacagaatgggaggaaattttcgcaatctatccatctacaaagggctaatatccagaatctataagaaacttaaaccaatttacaagaaaagaaaaacaaccccatcaaaaagtgggtgaagraaatgaatagacagttctcaaaagaagacatttatgcagacaacaaacttatgaaaaaaagctcatcatcactggtcattagagaaatgcaaatcaagaccacaatgagataccatctcacgccagttagaacgatgatgattaaaaagtcagaaaacaacagatgctggagaagatgtggagaaataggaatgctcttacactgttggtgggagtgtaaagtagttcaactattgcggaagactgtggtgattcctcaacgatctagaactagaaataccatttgacccagccatcccattactgggtatatacccaaaggaccataaatcattctactataaagacacatgcacacgtatgtttattgcagcaccattcacaatagcaaacacctggaacaaacccaaatgcccatcaacgatagactggataaagaaaatgtggcacatataca

SEQ ID NO: 870101 - DNA, 604 bp, Homo sapiens
cttgtggtggcacatatacactgtggaatactacgcagccataaaaaagaatgagttcatgtcctttgcagggacgtggatgaagctggaaaccatcattctcagcaaactaagacaagaacagaaaaccaaacactgcatgttctcactcttaagtgggagttgaacagtgagaccatatggacacaaggagggtaacatcacacactgggacctgttgtggggtgaggggctagggragggatagcattaagagaaatacctaatgtaaatgatgggttgatgggtacagcaaaccaccatggcacgtgtatacatatgtaacaaacctgcacgttctgcacatgtatcccagaacttaaagtataattttaaaaaaaagaagaagaaagtagttggaaaatgtctcttggctgttaggtgtcatgttaccttacttatttaacttctctctagaagtgaccacatctaaatttaaaatgatgacaattgagaatagggactaatatgactgtgccaatgacagcagtgagttaaaagcagaaaaaagaacatggattctggcataagagaaaatccagtagcaattctccacaggcagcaa

SEQ ID NO: 870102 - DNA, 617 bp, Homo sapiens
cttgtagaacagatgcttcagcagagacaggaatccggctacagccacaaaaacttttgcttttgtttattcttcctacaccccattctccaacaggactcctgggccaatgtttagacaaatctgtaacagtgatagaaaggctctttttacctaatcaaacagtaaaaactttgcaagtctatctttccttaattacacaaattgtgactttgggcaggcatatttcaaaaatgcttacaggatataaccttgataaaattattgttccrttagactcccagcaacaggctgcagcatgggaaatgttgactgcatggcaaattgctttcactgattttgtaggtgcaatagataatcattatccctcagacaaaattttgcagttttataaagtccattctttcattcttcatgtgattactcatcacaagcctattccaggtggccagacctattttactgacagcttttccaaaggttgcacagctatttatggacctaaacatactcagaaaataaggacctctggggtttcagctcaactcttagagttaattgcagtcattctagttttagagctcacagcttcaactcctattaatattgtctgtgat

SEQ ID NO: 870103 - DNA, 649 bp, Homo sapiens
caggaagaaatataaaaccatataaacaactttgttttactggcaagtgtatttggaagctatgttaaattgagaaggggaagggaaagcctctaaggatatcgattaatcaatgaccgaaagctgatgagacttgtctggaawtttttttggagactctgagacttaaaattttgaaaaaataaggagatgaattgagtagtgtggaagagacattttctgaagtcagcagagaaaggagagacaaaaatggtaaggggaaaatagtatgaagtaataatatgaatgaagagctttctaaagtataacacatgtaagttgtgttaaatgtaaactatcatgattatatcattactgtctgactgatacaactatatccacctcagttagccacataagatcaattttcctataccttagagaataccagtaacctccagttcagaaacagcataaatatctatccacagctgagcagacacatacagctagctaccagatgaaatgggctatatcttcaaatactattgttttccgttttttaactgtggcaaaacacactcaacaatttgcatcttaaccactgttaagtatacaattcagtgtcattaaatgtattcacaatgttgtgcaagcatcaccaccaccc

SEQ ID NO: 870104 - DNA, 685 bp, Homo sapiens
aaattttaatttaaattaattttaaatacaatttaatttttaaaatttaatttaaaaaatgttttaaataacaaataataattgtatatattgtatatttatggggtacaatatgatgttttgatatatttttattttatggaatgattaaatcaagcaagttaacaaatccaccaccaatcatactttttttgtggtaaaaacacttaaaatctacttttttagttattgaaatatacaatgcattattatttattatagtcactgttttgtgcaatagatcactgaaacatatgtattccttctgtctaactgaaattttgtacattttgaccaacatattctctttcttcattagtyccccttcccccagcctctggtaaccaccattctattctttacttctatgagtttgacttttttagatttcaaatataggtgagattgtgcactatttgtctttctgtgcctgcttatttatttcagcataatatcctccaggttcattgttgcaaatgacagaattttcttctttttaaaggctaaatagtattccattgtgtatatatataccacattttgtttatgcattgatccaatgatggacacctgcagtggttccataacttagctattatgaataatgctgcaatgaacttgggaatgcagatatcactgtgacatg

SEQ ID NO: 870105 - DNA, 650 bp, Homo sapiens
cattactgtttgatagatggtccctgacttaagatggttcagcttatgagtttctgattttatgattgtaaccaagtccaaaattcataatgctcactgcaaaatagacaataagtttagagacaaagtgtttggggcaaagaaagtgacttttactcagcccacaaattgagaagatggtggaccagtgtcctaaaaaaacattgtaatgtgaattttaggcttcttttatgtcaccggaaggggaaaaaggagtggggttgaattttaggcctcttttgttactggaaggggaaagaggagtggggttgaggtcaagagacagccaatgagcacagayatttgggtggcagtgagggtctatggagtttatgaaacttccttttccttggtcaggtcacagagctcctataaatctttaacataatattgtcacttgtgtgtgtacactccttgtctcctcaggggttagttttgggaagatactattatcatccttgccttaaagttaaactataggctgaattcctccagtagttagcttggcctatatgcagagatcaggaaaagcagttaacctaaatggcataaggagtaagggggttaagagcaaaatggagttagtcatgctaggcctccttttcactgcc

SEQ ID NO: 870106 - DNA, 650 bp, Homo sapiens
cattactgtttgatagatggtccctgacttaagatggttcagcttatgagtttctgattttatgattgtaaccaagtccaaaattcataatgctcactgcaaaatagacaataagtttagagacaaagtgtttggggcaaagaaagtgacttttactcagcccacaaattgagaagatggtggaccagtgtcctaaaaaaacattgtaatgtgaattttaggcttcttttatgtcaccggaaggggaaaaaggagtggggttgaattttaggcctcttttgttactggaaggggaaagaggagtggggttgaggtcaagagacagccaatgagcacagacatttgggtggcagtgagggtctatggagtttatgaaacttccttttcyttggtcaggtcacagagctcctataaatctttaacataatattgtcacttgtgtgtgtacactccttgtctcctcaggggttagttttgggaagatactattatcatccttgccttaaagttaaactataggctgaattcctccagtagttagcttggcctatatgcagagatcaggaaaagcagttaacctaaatggcataaggagtaagggggttaagagcaaaatggagttagtcatgctaggcctccttttcactgcc

SEQ ID NO: 870107 - DNA, 662 bp, Homo sapiens
ctccccccaggaatgcattcctttcccagggtattaatattaatattccttgctaggaaaagaatttagtgatatcttccctacttgcatgtccatttataggctctctgcaagaagaaaaatatggctgtttttgcttgaccccrcaggcagtcagaccttatggttgtcttcccttgttccctaaaaatcactgttgttctgttctttttcaaggtgcaatgatttcatattgttcaaacacacatattttacaatcaatttgtatagttaacacaattatcacagtggtcctgaggtgatgtatatcctcagcttacgaagataacaggattaagagattaaagtaaaacaggcataagaaattataaaagtattatttgggaactgataaatgtccatattaaaatgaaatcttcacaatttatgttcctctgccgtggctccagccggtccctccattcaggctccctgacttcccgcaacaattgatcaccagagaaatgtgagtcaatctacaatgagatgttatcttaccccagttaaaatgacttttatcccaaagataccagcaacagatgctggtgagaatgtggagaaaagggagcatttgcacactgttggtggaatgtaaattggtacaaccactatggagaacagtt

SEQ ID NO: 870108 - DNA, 608 bp, Homo sapiens
gaaccatctactgtgaattccttgtctggagtaaaacaacagaagcaaaagcagtcaaactgggagacagtactatgacggtcagaacatataacatggaagcgctccaaaaagaactgaatccaggttcacatcactagtgccaggccctggatataagcattttaggttccccagaaggatgcagaggtgctagtttcctgataagkgtaatagattaaatcggactaaattatctttagcgatctataaagtggttcctacataccttccacgatagataacccttttttcctccttcggctgtaagtcacttaaaatttcaaagctgtgaaatattttaagacttaagtttgaagttagcttttaaggtagcagtaggcaaatacaatattttgctagaaatgtattaccaatgagaaacatagttataacaaatgcattacaaaataaatgaggctagtataattttcaggcagactaaggatgctgcattactagtaatcataccgtaaccaatggagaaaaaacccagcactacacaaatgacttttagctagttacttctccaacacctcactataaacttaaagctaatattcaatatg

SEQ ID NO: 870109 - DNA, 586 bp, Homo sapiens
tgatatgtggattttgctgtctctaagtttatataaataaagcagcattcttggggatggatgttttctctcaagaggatgccagtccagtcaagctctgcctaaattggggttgcatttatcatctaagaatctctggtggccatgttaatcctgatggtgtggatgaaaggctggagactatttgaactttttttaggaaactattccccttctgcttttaccaggactgccgctgctaaaaggggctatcagaagtcttagaaacrtgttggttaatttcaaaatgttaccagaaaggtgaagctaatgttatcttttgggagaacagcctgaactccacaatttgttataacggacttagcatcaattaagagatccaggacatgaggattttaagtcatggatactaactctggaaactctgattaaccaagcaaatatacctctagttgtgcttaggaatttcttacctcagtcagatatctctggctatgaacttgttaactgttaatgttgagtgttttttaatgtaatcaacattgtaacctatataactattagccttataactattggctacagg

SEQ ID NO: 870110 - DNA, 669 bp, Homo sapiens
aaccatctacagttagggctggaagagttttagctggcatttgggcatgactttataaaatgaccttccacacacaactctaaaatcaggtctggggtctgaggccagccctaggtcagctcccactgaggtactttgcactggctgcctttttcttttgggagggacgactgtagcctttgaggtgggtcctcataggctttcagtagtgtgaagctttggtcaaatctgggtgcctagcactatatttaagcacatacatatctgctcaacrtcactcagctagtaagtagtagagtcagtgctggaaaccagatctgtctgacttcaaagctcaagctttaaaccattaccccaccatttctcagcctccagcctctcaaataccaccttcatgatttttgccatatcgtgtactgcctacactattattttgtaaaattttttaatttttaatttttatagggacatagtaggtatatatacttatgggggacataagatgttttgatacaggcatgcaatgtgaaataagcgcatcatggagaatgggatatccatcccctcaggcacttatcctatgtgttacaaacaatacaattatactctttaagttattttaaaatgtacaattaagttattattgactatagtcaccccgtggtgcta

SEQ ID NO: 870111 - DNA, 633 bp, Homo sapiens
attattaaggggtcctttgatagaggccaaattctgcataagagataaaggcaagagctggcaaaatttggaagagtgagagattgtgtgaccttttatatacctgcaggctggcaaggtctggggaaactcaaagtacacacagtttagagaaaaatcctggaccactgcctgctaccccagttccagacatcacagaaaaaggggtacatgtccatataataaagatctctttcaaaagtctcagaaaggcttttcaaatacgtacagccaactgatctttgacaaagcatacaaaaacataaactggggagtggacaccctatttaataaatggtgctgggaaaacttgcaagccacaggtagaagaatgaaactgaatctttatctctcmtgttatacaaaaatcaacccaagattgattaaagacttaaatctaatacgcgaaactataaaactttcagaagataacatcgaaaaaacccttgtagacattggcctaggcaaagaattcatgaccaagaccccaaaagcaaatgcaacaaaaacaaaaataaataattggaacctaattaaactgaaaagcttctgcacagcacaagaaataatcagcagagtaaacagacaacccac

SEQ ID NO: 870112 - DNA, 576 bp, Homo sapiens
atcctacaattttgatgttttactttcattttcattcagcttgctcttaagctttgttaggacaggtctagaataccctttagtttagggttaattttgcactcctactaaggtatcattcttctgaggattctactaartaatctgtgtattaggagatttttctactctggctggtgaagacatgtactattaccagccttctgtgagctccaggaatgattctagttactccttttttggtgattatttccttggctcttggtattttcttcttacttctgtgcagatcagtacttagccaaagacttaaggggactcttctgccaatctctgggacattttctctgtgcagcttcttcctctctggtagtctgttccacaaattatagttgccttgacctccctgaacaccagtctctgtctcctcaactcaaggagactgctgggttctgtttgggtctcttctccttgtgctgcatactggaaacagccttatgcaatggcagggttaactttgtgtgtttccagatatttgggggttacaattcttcactgcttattgccccaatgtct

SEQ ID NO: 870113 - DNA, 652 bp, Homo sapiens
agaatggataaacaacctgtggtatataatacaatggaataccattcttccttaaaaaggaaggaaattcttacacatgctacaacacgatgcacactgaagacattgtgctaaatgaaacaagccatatacaaaagggctaatactacatgattctaattatatggaatacctagagttagtaatatttatagagacaaaaagtagaatgatggttgccaggggctgggggagggaaaaaagaaagggggtgggtacacagtttagttttacaaaatgaaaaaagtactggagatggatggtggtgatggtagcacaatcatatgartatacttaatgccactgaaccgtataattaaagatggttaaaatgattttttatgtatatttaccatgataataaaactccactgcaaaaagaaaaaaaagaaagattgagataagaccagatagaaaaccagcaagggaatagaagacttgaatagtactgtataccaaccagacctaaagacattatacaacactgcacccaataatagcagaatacacattcttctctcaggtgcacatggaagattgcaggttaggccatatgttaggtcataaaactagtctcattaaatttaaaaagactgaaattggccagatgtgg

SEQ ID NO: 870114 - DNA, 652 bp, Homo sapiens
agaatggataaacaacctgtggtatataatacaatggaataccattcttccttaaaaaggaaggaaattcttacacatgctacaacacgatgcacactgaagacattgtgctaaatgaaacaagccatatacaaaagggctaatactacatgattctaattatatggaatacctagagttagtaatatttatagagacaaaaagtagaatgatggttgccaggggctgggggagggaaaaaagaaagggggtgggtacacagtttagttttacaaaatgaaaaaagtactggagatggatggtggtgatggtagcacaatcatatgagtatacttaatgccactgaaccgtataattaaagatggttaaaatgattttttatgtatatttaccatgataataaaactccactgcaaaaagaaaaaaaagaaagattgagakaagaccagatagaaaaccagcaagggaatagaagacttgaatagtactgtataccaaccagacctaaagacattatacaacactgcacccaataatagcagaatacacattcttctctcaggtgcacatggaagattgcaggttaggccatatgttaggtcataaaactagtctcattaaatttaaaaagactgaaattggccagatgtgg

SEQ ID NO: 870115 - DNA, 595 bp, Homo sapiens
ggaacctgtctggccccgcctgaccctgctggccggtgcaggcccttcagtgaggccaattctccaaggctgcggtcttctcccagggtcatgggtgaaggggtttggaggctccctgcgtgggtactggcctgctggggtacacacaatgctgccatagccagtctgccccaacacccagcctggggccacatctcgggtctctcagtcctgaggagcccggtgccccacccctcacatcctctctccmtgagtcagggcctgggtctcgtgagctgagtgactgatacttggtgtcctggatgagggcgtggtggagaggggccacagcgggtgtttcctgaccctcttccaggaagcccagcccaagggaggcctccgctgctgctgctgcagaggacacatacaggatgccccttcctgctccctgcctcccactgggcccacaaaagccagggcaagcctcccctccctgccagccacctggtctgcttcccagaagttctgtcttgcaggctgttgggaggatcccagtgctttgtaaattaaagcaagggaggagtggctgctctctctctctgttcattcattcacc

SEQ ID NO: 870116 - DNA, 603 bp, Homo sapiens
aacctcctctggaaggtgactttgctgtcaccttctccacatcctcccaaaactctaccactctcttctgtgttatatttgtattttgtacatatacttggtcactggtctaatcaaacagcattacaatctgttcctcataggtcttgctcctygattaaatttccttcatttattttataaacatttattagacacctgcagtttcagacttgcactgtggagtccttgagaacagacacaatgttttattcatgtcattctcttcaaaacttgccacagtgcctggctcctggtaggtgtttagtaaatatttgctaagctgaattcctatgccatctctgtttgctcttatgtatgatggcttctattggatctgtagtgagataatttaagagtagaaatatgtttagtggctaaacttcctcaaatataaatcactaactaagaaagggggaattctgaatataatattttttattagcatagattcagccacttttccgcagatatgttactaaaaaatattcagtgtgtcataggttagcaaccttctaacatattcaggttttcacctatatttgtgaaggaaaaagttttaaa

SEQ ID NO: 870117 - DNA, 646 bp, Homo sapiens
tttttagcaagagctacaataagcttccttctgaaggaataatcttgtgatttcatgcgagaaaaatctctccttgaggtgaatgagagatgaagttgtgaaagttacagttggaactattttgcttttcccttcgcttttccctttctgaccaaatgacaagagaacattttctacttttcctggattcttttattgttttctctgctaaaagcaaatcaaatattacaaatacccttcaactcaaattagccttaagccccataagttatatttccaagagccttttgtggtggaaagaacctgccaattttggttagagaaatttctttaggctcgcctttgcaggcaaggcaagtgacgggctttctggttttcctggtaaccaagaatcagtgagaagcacttgtactagacagctgccatagtcttacatttatggagtacctactgtgtgctttctactatcagccatcaaaaagaatgataaaagtccacagcataggaatcygttcatctgagtgttctgccaaaaaatacagtaattacaagtagtgtcaccatcagtgacaagggcagggaagactatttttcctttttttcccaacttattcaaatacttaaacctcttctatttcgagttcaa

SEQ ID NO: 870118 - DNA, 618 bp, Homo sapiens
gaatacaaaatagcactagacagttgttattacagatctaaaagtaaaaatcactttcaaatgtttggcatacttttattctctaacaatttaccatttgtgtagagttaagcttctctcaaaacaaaaagtcttgtgacataattattctgatataatcttaaggaaatcttcagcatacaaaaaaaaggttttggtgcatgttatttcaaaatccattcatgcataacaaagaacatgctctttctctgaggtttcctgttgaatagattagaggaagaaaatacttaggtgaatttatttaataattgatartggaaatagagtcttaatgaaatttccatcttcctgaaacatgaactctgtatttattacttctgttattacctaatactgatgtatgtttaattgttcattgtcaagaatgacatgtgaaacaatgtcctgccaaaacctggagaatcatgtctgagcattttatatgtagacataagtaagcaaatgtgtaatgagtgcttaaaatggttataagacatctactggaaacttaagagaagtatcttcccccacctcacgtcccaccacccagaaaaatttaggtaagctcttaaagaaggt

SEQ ID NO: 870119 - DNA, 641 bp, Homo sapiens
cacattgagtgcctactggggtattgcctaatggagctgtgagaagagggccactattctccagaccccagaatggtagattcactgacagcttgcactatgtacctaggaaagccacagatactcaatgccagcctgtgaaagcagacaggagggagrctgtgccctgcaaagccacaggggcagagctgccaaagccatgggagccgcctcttgcatcagcatgccctaaatgtgagacatggagtcaaaggagatcatttagaaactttaatatttaatgactcccctattggattttggactttcatggggtctgtagccccttcgttttgtccaatttctcctatttggaagaggtgtatttatccaaagcctgtactctattgtatctgggaagtaactaacttgctgttgattttacaggctcataaggtaaaaggtacttaccttgttgtctcagatgagactttctactgtggacttttgagttaatgctgaaatgagttaagaccttgaggaactgttgggaaggcatgattggttttgaaatgtgaagacatgagatttgggaggggccagggatgaaatgatatggtttggctatgtccccacccaaatctcacgttgaattgtaataa

SEQ ID NO: 870120 - DNA, 617 bp, Homo sapiens
ctgggttgaatggtatatctgcctctgggtctttgagaaattgccacactgtcttccacaatggttgaattaatttatactctcaccagcagtgtaaaagtgttcctttttcttcataacctcaccagcatctgttgttctttgacttcttaataatagccattctgactggcatgagatggtatctcattgtggttttgatttgcatttctctartgatccataatgttaaacttttttgtcatatgtttgttaaccacgtgtacgtcttcttttgagaagtgtctgttaatgctctttgcctcctttttaatgggttttttttctcataaatttgtttaagttctttgttgactctaggtattagacctttgtcagatggatagattgcaaaatttttctcccattctgtgggttgtctgttcattctgatagtttcttttgctgtgaagaagctctttagtttaattagatctcatttgtcaatttttgcttttgttgcaattgcttttgggattttcataatgaaatctttgcctgtgcctatgtcctgattagtattgcctagattttcttctaggctttttatagttttgggttttacatttaagtcttta

SEQ ID NO: 870121 - DNA, 579 bp, Homo sapiens
ggtttcatacctccctgggatggagcacccagcaggagggtggaccaccatctttgctgtttgggacttagctgtctcaccctttgggctttggagaatccagggcatctggggactgaagcagatccccagaacagcacagctgctctatgaaaacatagccagacctgctggttcccaataccattccttctcactggatgggacctcccaatggggtctccagcaacctcctacaggtgtcttccagccagcaacaggtctgaacctctctgggagggagctcccaaggggagaggaaggctgccatctttgctgtttcacagccttcactgttgatacccctaggtaccagaaaagccaaggtgactagggattggtatggactgctggcatactgcagcacccctayggaaaagtggcctgttcctgtacctcctcaccaggcaggtcctctaggcatgggcctccagccaccccctgctggggctattgagccagtagcagctctgcaactccctgggcagagcccacaggggtaactgaaagctctctgccaccacctctgcagtggacgtg

SEQ ID NO: 870122 - DNA, 526 bp, Homo sapiens
ccacatgggaagtttggaaacagggccttgtcagtttagccaccagacatttactaatgttatcatacatcatttcctgctaattaaacttcttaatgaactctattccaagatgtcctgcaaagatatggatgtgcctgtttccaaataatagctatttcaggtatattcaagctatgcagagtgggatgttgaataaatttttcaactgagccatttgtgaaagcaaaacttggcataggtttaacagacaaagaagcctttagatgggcaaaagaagcaaaaatcactgagccacggaggtcaaagtttacagaggcagtaggacttgggtaagactctctgctggcagataggaagaactcaaggagacggtagtgaawacggtgatatttttgaaggacagaaatgcaattgctccataatgtagggttgaggtaggggaagagggtgaaattaagtggtgtaggcaaaataaaggcaggttactaagagccttgaaaactatcggtgggattttttgttt

SEQ ID NO: 870123 - DNA, 606 bp, Homo sapiens
aagtaagggacaggaggattggcaccccaagagaaaccaaatcagggagctgggggggaggatggggaagacattgattagtgatatgatacatattcaaaattcaggtaaaaagaaaggtctaagcctgatgcagtggctcatgcctgtaatcccagcatttgggaggctgaggcaggaggattgcctgaggccaggagttcgagaccagcctgggcaacataacaagaccctgtctcaaaaaaatcaaaaaattagccagcatggtggcacgtggctgtagtctcagctgcttgggaggctgaggcaggaggatcagttgagcctaggagttggaractgcagtgaattatgatcatgtgactatattccagcctgggtgacagagcaagaccctatctcagaaaaaaaagagaagaaaaaaaaaaaagagagaaaggtctctgtattatgtggttgattccagggctgcctaagaagtgtaaaattattctgtttacaaattccaactttaaattgtatgtatacatacatagttatatctccaagtgccaatagatatttataacttgagaggcagatggctaggacatcgaatcctgagca

SEQ ID NO: 870124 - DNA, 630 bp, Homo sapiens
agtgctagagtgaatgcttaataaatgttcccaaatttgagtgcccttaagaggttcagactggaattcttccagggcatttcattcacgtatgtctatttagttaattgattctttcctgatttggaaattctctttctaggtgtattagtccattttcacactgctataaagaactacctgagactgggtaatttataaagaaaagaggcttaattgactcacagttctccatggctggggaggcctcaggaaacttaaaatcatggtggaaggtgaaggggaagcaaagcatgtattacatggaggcaggagagagagaaagacagagagagagagaagaggtgtcacactttttttttcttgttttgttgttttgtttttttttctattattattatactttaagttttagggtacatgtgcacaacgtgcaggtttgttacatatgtatayatgtgccatgttggtgtgctgcacccattaactcatcatttagcattaggtatatctcctaatgctatccctcccccctccccccaccccacaacagtccccggtgtgtgatgttccccttcctgtgtccatgtgttctcattgttcaattcccacctatgagtgagaacatgc

SEQ ID NO: 870125 - DNA, 545 bp, Homo sapiens
ggaggaaacacagaagtcctctactccagaaaacagagaaattggtcaattctgacttgctcttccaacaagtattatgtacagagtctgtgccagcagtagagacagcatgcctaacaagacaaggtccctgccattgggaagtttatagttaggggccaataaaagtctagatcccaggcctcaccagccagtgccctacaaagttcattccaaattttcctttccaaaatgggaaaatatcaactatttccagagtgcaaattgtgcccaaagcttgaccttggctctgaattcccagaatatcatgcccaacacttccaaggaagaacttctgagaagtctagaaagcaggtgactttgctttggaagagtcatcaacaactgagagtayaagggagccggcacaggactgcagacacaaacaggaccaggagaacctctgcttccctctgtcctcaatgaagtggcttaaaccatcagggatgaggatgtctcaggatctcagcctgcactttcacagttacattacggaaaacagcaag

SEQ ID NO: 870126 - DNA, 623 bp, Homo sapiens
gtggtttttgttttcagttctgtttatgtgataagtcacatttattgatttgcatatgttgaaccaaccttgcatcccaggcataaaccctgcttgattatggcggattagctttttgatgtgctggtagattcagtttgctagtattttgttgaggatttttgcatctgtgttcatcaaggatattggcctgtagttttttctttgctgtgtctctgccaggctttggtatcagaatgatgcttgcctcatagaatgagttagtgaggagtctctggtcctcaattgtttggaatagtttcaagcagggatggtagcagctcttctttatacgtctggtagaatttggctgtgaattcatctgatcctgggctttttcttgctcaaaatcataaaattagatggaaattattttattactgattcaatttcaaaactcattattagtctgttcagggtttcagtttcttcctggttcaattttgsggagttgtgttttcaggaatttttccacattttgtaggttttctaggtgcctagaggtgttcataatggtctcagagtttttgtatttctgtagggtcattgataatgtctcctttgtcaattttgattgtgtttat

SEQ ID NO: 870127 - DNA, 620 bp, Homo sapiens
agatattcccgtttccaacgaaaccttcaaagctatccgaatatccacctgcagattctacaaaaagagtgtttccaaaatgccatatcaaaacaaaggttcaactctgttagttgagaacacacatctcaaataagtttctgagaatgcttctgtctagtttttacttgaagatatttcctttctcaccataggcctgaaagcgcttgaawcgtcagcttgcagatactacagaaagagtgtttcaaacctgctctatgaaagggaatgttcagtcctgtgacttgaatgcaaacatcacaaagaagttcctgagaatgcttctctctaggttttatatgtaatcccgtttccaacgaaatcctcaaagctatccaaatatccacttgcagattctacaaaaagagtgtttcaaaactgctgtgtaaaaagaaaggttcaactctgttacttgagtacacacatcacaaagcagtttctgagaatgcttctgtctggtttttatgagaagatatttcctttttcatcataggcctcaaagcgctgcaaatgtccacttccaaatattacaaaaagagtgtttcaaacctgctctatgaaaggaagttttcaactctgtg

SEQ ID NO: 870128 - DNA, 612 bp, Homo sapiens
ccgtttccaacgaaaccttcaaagctatccgaatatccacctgcagattctacaaaaagagtgtttccaaaatgccatatcaaaacaaaggttcaactctgttagttgagaacacacatctcaaataagtttctgagaatgcttctgtctagtttttacttgaagatatttcctttctcaccataggcctgaaagcgcttgaaacgtcagcttgcagatactacagaaagagtgtttcaaacctgctctatgaaagggaatgttcagtcctgtgacttgaatgcaaacatcamaaagaagttcctgagaatgcttctctctaggttttatatgtaatcccgtttccaacgaaatcctcaaagctatccaaatatccacttgcagattctacaaaaagagtgtttcaaaactgctgtgtaaaaagaaaggttcaactctgttacttgagtacacacatcacaaagcagtttctgagaatgcttctgtctggtttttatgagaagatatttcctttttcatcataggcctcaaagcgctgcaaatgtccacttccaaatattacaaaaagagtgtttcaaacctgctctatgaaaggaagttttcaactctgtg

SEQ ID NO: 870129 - DNA, 620 bp, Homo sapiens
agatattcccgtttccaacgaaaccttcaaagctatccgaatatccacctgcagattctacaaaaagagtgtttccaaaatgccatatcaaaacaaaggttcaactctgttagttgagaacacacatctcaaataagtttctgagaatgcttctgtctagtttttacttgaagatatttcctttctcaccataggcctgaaagcgcttgaaacgtcagcttgcagatactacagaaagagtgtttcaaacctgctctatgaaagggaatgttcagtcctgtgacttgaatgcaaacatcacaaagaagttcctgagaatgcttctctctaggttttatatgkaatcccgtttccaacgaaatcctcaaagctatccaaatatccacttgcagattctacaaaaagagtgtttcaaaactgctgtgtaaaaagaaaggttcaactctgttacttgagtacacacatcacaaagcagtttctgagaatgcttctgtctggtttttatgagaagatatttcctttttcatcataggcctcaaagcgctgcaaatgtccacttccaaatattacaaaaagagtgtttcaaacctgctctatgaaaggaagttttcaactctgtg

SEQ ID NO: 870130 - DNA, 669 bp, Homo sapiens
ctcaaataagtttctgagaatgcttctgtctagtttttacttgaagatatttcctttctcaccataggcctgaaagcgcttgaaacgtcagcttgcagatactacagaaagagtgtttcaaacctgctctatgaaagggaatgttcagtcctgtgacttgaatgcaaacatcacaaagaagttcctgagaatgcttctctctaggttttatatgtaatcccgtttccaacgaaatcctcaaagctatccaaatatccacttgcagattctacaaaaagagtgtttcaaaactgctgtgtaaaaagaaaggttcaactctgttacttgagtacacacatcacaaagcagtttctgagaatgcttctgtctggtttttatgagaagatatttcctttttcatcataggcctcaaagcgctgcaaatgtccacttccaaatattacaaaaagagtgtttcaaacctgctstatgaaaggaagttttcaactctgtgacttgaatgcaaacatcacagagatgtttctgagaatgcttctgtcttgattttatatgaagatattcccgtttccaacgaaatcttaaaatctatccaaatatccacttgcagattctccaaaaggagtggttccaaaatgttgtatcaaaagaaaggttcaactctgttcgttt

SEQ ID NO: 870131 - DNA, 669 bp, Homo sapiens
ctcaaataagtttctgagaatgcttctgtctagtttttacttgaagatatttcctttctcaccataggcctgaaagcgcttgaaacgtcagcttgcagatactacagaaagagtgtttcaaacctgctctatgaaagggaatgttcagtcctgtgacttgaatgcaaacatcacaaagaagttcctgagaatgcttctctctaggttttatatgtaatcccgtttccaacgaaatcctcaaagctatccaaatatccacttgcagattctacaaaaagagtgtttcaaaactgctgtgtaaaaagaaaggttcaactctgttacttgagtacacacatcacaaagcagtttctgagaatgcttctgtctggtttttatgagaagatatttcctttttcatcataggcctcaaagcgctgcaaatgtccacttccaaatattacaaaaagagtgtttcaaacctgctctatgaarggaagttttcaactctgtgacttgaatgcaaacatcacagagatgtttctgagaatgcttctgtcttgattttatatgaagatattcccgtttccaacgaaatcttaaaatctatccaaatatccacttgcagattctccaaaaggagtggttccaaaatgttgtatcaaaagaaaggttcaactctgttcgttt

SEQ ID NO: 870132 - DNA, 669 bp, Homo sapiens
ctcaaataagtttctgagaatgcttctgtctagtttttacttgaagatatttcctttctcaccataggcctgaaagcgcttgaaacgtcagcttgcagatactacagaaagagtgtttcaaacctgctctatgaaagggaatgttcagtcctgtgacttgaatgcaaacatcacaaagaagttcctgagaatgcttctctctaggttttatatgtaatcccgtttccaacgaaatcctcaaagctatccaaatatccacttgcagattctacaaaaagagtgtttcaaaactgctgtgtaaaaagaaaggttcaactctgttacttgagtacacacatcacaaagcagtttctgagaatgcttctgtctggtttttatgagaagatatttcctttttcatcataggcctcaaagcgctgcaaatgtccacttccaaatattacaaaaagagtgtttcaaacctgctctatgaaaggaagtkttcaactctgtgacttgaatgcaaacatcacagagatgtttctgagaatgcttctgtcttgattttatatgaagatattcccgtttccaacgaaatcttaaaatctatccaaatatccacttgcagattctccaaaaggagtggttccaaaatgttgtatcaaaagaaaggttcaactctgttcgttt

SEQ ID NO: 870133 - DNA, 590 bp, Homo sapiens
aacactgtttagatgttggctacctctgggagagtgggtctgtggagaggcgaaggggagcttccttttatactcagtgcatacttaacaaaggaaaaagaaaagtatcctctcctcctctgacttggtctcccttactctgtctcaatggggaacaggaccttctcctggcagctgcctatgttttggatgcccagtacaacagaaatgttccatttgaaactcacctcaggccatcaggtaactaacatgttaaaccatcatgtrgaaccacctgtccttcagcacttgatactcttgaacttgaacccaaactgaaggcattgtttacacagatattttgagaagtatatagggtacagcacatagatttggacgtaatccaatacttttttttttttttttgagacagggtcttgctttgttgcctgggctggagttcagtggtgtgatcatggctcactgcagccttgaactcctgggctcaagtgatcctcccaccaaggcctgggattagatatgtgagccaccatgcctggctgaattttttttttttttttgagttataagagcatgggcctcacacgcag

SEQ ID NO: 870134 - DNA, 613 bp, Homo sapiens
ggaagagggttccaaagccccaggctcaccaaatgcaggagaagccaccttctcatcatctaaagtgtgctgctgcctcagcaacgggcccagagaacactcaaaacgagtgttaaattccaggcccacatcacagcgctgggggaggaaactgctctgggtccatcggggcagacctactcctcctagcacctagatccttccatcctggtctgggactacctgtttttcatcaaacttactttactgcaagtttctttctttctttctttytttttttttgagacggactcactctgtcgcccaggctggagtgcaatggcgtgatcttggctcactgcaagctctgcctcccaggttcacgccattctcctgcctcagcctcccgagtagctgggaccacaggcgcctgccaccgcgcctggctaatttttttgtatttttagtagagacggggtactgcaagtttctttactccacctacaacccagacactggcacagtttccctcccatccttagagatagagggtaaaaccacatgtttggaggtttaaagatttcccagaagtctttttctaattttctggtattaaattggaaaggaaatagaa

SEQ ID NO: 870135 - DNA, 444 bp, Homo sapiens
acccgtttcgaacgaagccacagagtggtccaaatatccacttgcagatcctacaaaaagagtgtttcaaacctgaactmtcaaaggaaggttcaactctgggatttgaatgcaaacatcaccaagaagtttctgagaatgcttccgtttagttaggtgcagttatcccgtttccaacgaaatcctcagagaggtccaaatatccacttgtagattctacaaaaagtgtgtctcaaacctgctccatccaaaggaatgttcagctctgtgagttaaactcaatcatcacaaagtattttctgagaatgcttctgtctagtttttctatgaagctattccctttactaccataggcctcaaagcgctccaaatctccacttgcacattccacaacaagagtgtttccaaactgctctatcaataggaatgttcaactctgtgagg

SEQ ID NO: 870136 - DNA, 643 bp, Homo sapiens
cgtctccatcggcctctacatgcccgccaccagcttcttgctcctggtccttggtttcaaggctctgcaactgtggatgcagctgcatgaggccggagtgggccttgaggagctcaggggggtccctgaccctagtgtcccccctcccccagcacaggatggtaagcacacaggtcccagacaggggctggatggctctgaagctggtagccctgatctacctartactgcagctgggctgcatcgccctcaccaacttctgactggacttcctgctggccgccactatggtgctgccgctgtgctcgccgagcctttgggccctggaccctctgtgctgtcctgctggtgttgacaagcccggcagccacgctccttggcagcccattcctgtggcgggagctgcaggaggcaccactgtcactggccaagggctggcagctcttcctggcagcactggcccagggtgcgctggagcaccacacctaaggcgccctgctcttcccactgctgtccctgggcctctgcccttgctgactacttttctggaatgtgctcttctggaagtgagatctgcctgtccggggcaccaggctgggacagagactccccaaggaccccattctgcctccttcaagggaaa

SEQ ID NO: 870137 - DNA, 643 bp, Homo sapiens
cgtctccatcggcctctacatgcccgccaccagcttcttgctcctggtccttggtttcaaggctctgcaactgtggatgcagctgcatgaggccggagtgggccttgaggagctcaggggggtccctgaccctagtgtcccccctcccccagcacaggatggtaagcacacaggtcccagacaggggctggatggctctgaagctggtagccctgatctacctaatactgcagctgggctgcatcgccctcaccaacttctgactggacttcctgctggccgccactrtggtgctgccgctgtgctcgccgagcctttgggccctggaccctctgtgctgtcctgctggtgttgacaagcccggcagccacgctccttggcagcccattcctgtggcgggagctgcaggaggcaccactgtcactggccaagggctggcagctcttcctggcagcactggcccagggtgcgctggagcaccacacctaaggcgccctgctcttcccactgctgtccctgggcctctgcccttgctgactacttttctggaatgtgctcttctggaagtgagatctgcctgtccggggcaccaggctgggacagagactccccaaggaccccattctgcctccttcaagggaaa

SEQ ID NO: 870138 - DNA, 611 bp, Homo sapiens
gagctaaattaagagaactcgtggacacaaagaaagaaacaatagacactagggtctatctacttgatggtggaagatgggaggagggggaggaaaagaaaaaataattatcgggtactaggcgtagtacctgggtgatgaaataaaataacctgttacaacaaacctccatcacactagcttacctatataacaaacctgcacatgtaccccygaacctaaaataaaagttaaaaaagagaaaatactatgtggcaagttctatcacgaacaaatcatcatttataaataacattctctctgcgtttaaatactccttgtcatctttgagcgaaaaatgagtattaatgtagcaaaagatgatttcagcagcctccatcagccctagagtggaccaaggagatgagagctggtctgaattcaaggacctagttctgactgaggaagtttactccaaagcaagagctattctctttacagctcccaaacatgcccaccacaaattgctgtttgttctcagccttcttttgcttgtcctcttagctgaaacttcccccaagtcctcattcttttgtcactatttgacctccctcttccctttcagaaggtga

SEQ ID NO: 870139 - DNA, 558 bp, Homo sapiens
tattctacgtcgctgcgatacacagagacccttagggattgctgtggtgtatggagcttcttgcctacacgaagtagtgtaggtgctttttgttttttcattttgagccagctgttcataaatttttctctgtcttttctcactggcatgctgtatgtgggttgccttttttactactgtcgttgtagtcagtcttcctgcttccatcaactcctagccaaacaaagcaagacattcccartgtgccaaagctcaggcaaattaccttgtactagcattttaggccgatgcttctcgtactttagtgtactacaattaatctggggatcttcttaaaattcagagggtgctttggtagctctggaatgggaactaaaaatttgtgtttctatcagcaaccaggtgatgcctttgctgctggtctttgcaacacaccttgaatagaaagatattagctatcatgactttttagaattgtgtctagattaaaagaaaatttgttttgagggagtgattggctactctcctataaataagatctaaaaatttagaatatga

SEQ ID NO: 870140 - DNA, 558 bp, Homo sapiens
tattctacgtcgctgcgatacacagagacccttagggattgctgtggtgtatggagcttcttgcctacacgaagtagtgtaggtgctttttgttttttcattttgagccagctgttcataaatttttctctgtcttttctcactggcatgctgtatgtgggttgccttttttactactgtcgttgtagtcagtcttcctgcttccatcaactcctagccaaacaaagcaagacattcccagtgtgccaaagctcaggcaaattaccttgtactagcattttaggccratgcttctcgtactttagtgtactacaattaatctggggatcttcttaaaattcagagggtgctttggtagctctggaatgggaactaaaaatttgtgtttctatcagcaaccaggtgatgcctttgctgctggtctttgcaacacaccttgaatagaaagatattagctatcatgactttttagaattgtgtctagattaaaagaaaatttgttttgagggagtgattggctactctcctataaataagatctaaaaatttagaatatga

SEQ ID NO: 870141 - DNA, 585 bp, Homo sapiens
gcattttattttctgtttagtggttgctgtagttttcttgagtcttctccctactgctaatttaagctatttggcatattcagcctcatggttgcaaaactggggttttaatattaaaacttccattgttcatttagatttttccttctgaaaatttgtagaattattcaaggcaatcttttatatacactttctaccttcctttgcctcccaaatcaacaacctgaaggtaggctgaattaatacacactagttgtggtaataatgtagttaagttgacactrtgagctgtggtctaggcagagaatgttacgtgcagagcttctattgtcttctttctcccaaacacagtggtaggttattcacattcattccttgctacacgcatctagttaaaataacttagactttttcaggaaagacaaactgaggccaaaagctattgctcatctcattgctaaaactctggcaacattttctgaattccacagatccacagtttgagaagatgattgtttaacttgtggcatcatgagggcccaacagtttagaaaacagtgggacagcctgttgccctgcagccag

SEQ ID NO: 870142 - DNA, 567 bp, Homo sapiens
gccccatacccaaacatgaaactaggaggagtagaaggagcaagacgccaactggatggagagccaggaaactgggatatactcctaagtccctcctgaacagtgcagtgcagtaatttggtactgtacatctgacccacacctgaccatgccaatttagggtttccttctctttacctaaaagggaactggagcacataattcaaagagcctccaaatatgatttgacaaatgcttgattacatcgtgtagctagagagaagagatgctccttgtattttcaatatactgataatgtgattttttgaggtgcttttacaagcgctgtcctatcaaacatataatcttctctgtttatagaatatttaaacatggatgtgtgaatttaggtgagaaacttgtamtttctctgtgaagggtgtgtttgtctctaaagattagggagtccagtgctaggaataaagtttaatttccatattgcggtgagaataatgtgaaaatgtctacaagagccattcattttgaaagctggttgtatctatgtaataaatattcatgataatatct

SEQ ID NO: 870143 - DNA, 594 bp, Homo sapiens
ccttctgttaactaagtgattatttccagccacatccatatttcttgctgttctatactccaagcatcgtgtggaatggaagttctcatctatccccaagttaaagtttatcaggtgacattggtcatagtactacccagtagcagagaaatgttttttataactggctgcttgtccaaaggtaaatgtggctccttctacatctttgatcttgaaccttcacttcgaaggtcattgtgtcaataagactgagttgatcaatacatgtttaaattgtttctggagaaactaccaatatggctaataaatgatcacttccatgtatttattcccaagatgtaataagaaataatctgacagaactctaatgatwgttgtgtgagagaaacaaagatgaatatctcattggcacttacattgtgaagacagtagttagtaagagagagaccttggaagttggaaggattttaatcagtggcttaatgagaagagagcagggagttcattgatttaattttgtagccagcatagcctgcagtgttctaagtcaaagagataaaaagacagaaagagattcaataatttgcattttct

SEQ ID NO: 870144 - DNA, 594 bp, Homo sapiens
ccttctgttaactaagtgattatttccagccacatccatatttcttgctgttctatactccaagcatcgtgtggaatggaagttctcatctatccccaagttaaagtttatcaggtgacattggtcatagtactacccagtagcagagaaatgttttttataactggctgcttgtccaaaggtaaatgtggctccttctacatctttgatcttgaaccttcacttcgaaggtcattgtgtcaataagactgagttgatcaatacatgtttaaattgtttctggagaaactaccaatatggctaataaatgatcacttccatgtatttattcccaagatgtaataagaaataatctgacagaactctaatgatagttgtgtragagaaacaaagatgaatatctcattggcacttacattgtgaagacagtagttagtaagagagagaccttggaagttggaaggattttaatcagtggcttaatgagaagagagcagggagttcattgatttaattttgtagccagcatagcctgcagtgttctaagtcaaagagataaaaagacagaaagagattcaataatttgcattttct

SEQ ID NO: 870145 - DNA, 617 bp, Homo sapiens
taaatatgtgtcattaaagtaaagaattagctacagttgaggccgagcgcggtggctcaacacctgtaaatcctggcactttgggaggccgaggcgggcagatcacttgaactcaggagttcaacaccagcctggccaacttgatgaaaccctgtctgtactgaaaatatagaaattagccagcttggtggcaggcacctgtaatcccagctactcaggaggttgaggcaggagaatcgcttgaacccgggaggtggaggttgcagtgagctgagatcacgccattgcactccagcctgggcaacaaaagcaagactctgtytgaaaaaaaaaaaaaaaaattagctacagttgaggttatttaggttatttccagttagaagttctgataccattaataaatattttacctttaagctaaaagaagcttaaccagtgttttagttaatagcagccaaacaacaatctgtctacttgcagagtctgccatgttccttctactcacagtccacacagactaagcagagctaaagatgcagacagggaataaccaagttcacacttcatctaggatgttttcctgataccccctaacctggagttaagtcatcgtcttt

SEQ ID NO: 870146 - DNA, 651 bp, Homo sapiens
aggcaggcaaatcacctgaggtcagaggttcaagaccagcctgaccaatatggtgaaaccccatctctgctaaaaatacaaaaattagccaggcgtggtggcgggtgcctgtaatcccagctactcgagaggctgaggcagagaatcacttgaacctgggaggcggaggttgcagtgagccgagattgtgccactgcactccagcctgggcaacagagtgagactctgtctcmataaataataataataataataataataataataataataataatagtagtagtagtagtagtagtagtagtagtaatagtaggccgggcgcagtggctcacgcctataatcccagcacttttggaggccgaggcaggcggatcacgaggtcagatcaagaccgtcctggctaacacagtgaaacccgtctctactaaaaatataaaaaattagctgggcgtggttgcagacgcctgtagtcccagctactcgggaggctgaggcaggagaatggcctgaacctaggaggcggaccttgcagtgagccgagattgtgccactgcactccagcctgggcgacagagcgagactccatctcaaaaaaaaaaaaaaaatagtaacagtaataaaataaaaattatttgtgaaggatgtgag

SEQ ID NO: 870147 - DNA, 639 bp, Homo sapiens
agcgggtgaatcacaaggtcaggagttcaagaccagcctggccaacatggtgaaaccccatctctactaaaaatacaaaaattagccagctgtggtggcaggtgtctgtagtcccagctactcgggaggctgaggcaggagaatcgcttgaacccgggaggtggaggttacagtgagccgagattgcaccactgcactccagcctgggtgacagagctaggttccctctcaaaaaaataaaataaaataaaaaawaaaggtaataagggccaggctcagtggcttacgcctgtaatcctaacactttgagaggctgaggcgggtggattgcttgagctcaagaatgccacaccagcctgggcaacatagtgaaacccatctctaccaaaaattagctgagtgtggtgatgcacacctgtggtcccagctactcaggaggctgaagtggaggttgcagtgagctgtcatgccactatactccagcctgagagacagacctctctcaaaaaaaaaaaaaaaatacccaagaaatctcgacttgaattcttcttggtgtagccacactgagcaggggaggcttgtgggttgttttgttttgtgacagggtctttatctgccacccaggctggagtgctacgg

SEQ ID NO: 870148 - DNA, 644 bp, Homo sapiens
tgagaaggctgcagacagacctacaaaggtttctcccactgactttcagtgaaatctgcatagctaataaagcatggatttgtgtatccctattgctccacctgccctgcaccatcaaagtggttgcctgggaacagcagttgctcattctcctggtgacctgggtcagctgcctgaggtcagagaattaattgtggcttcgatggtttagacagtatcattgtggaggtgaggttttacagaatcagctccaaagctctatttcatcgactcacaatgcctcagtcattacagctcagttatttgtacccatcaaaaacaaattctggaaattttcactgatgtggtctttataaattacatgaatgtattaaattatcacatgtattctgaaactaggtacattatgtatcaactataaaattgtttaacataactggagatttttttttttgagacagagtctcrctctgtcccccaggctggagtgcagtggcgcgatctcggctcactgcaagctccgcctcccgggttcacgccattctcccgcctcagcctcccaagtagctgggactacaggcgcccgccaccatgcctggctaatttttttttgtatttttagtagagatggggtttcaccgtgt

SEQ ID NO: 870149 - DNA, 619 bp, Homo sapiens
ggaaaaaatttgaaaacattatttcgaagacttttaatcaggaaaaattagaattcagtcccaaactgtagaaaataataaaaattgaaaaagatactaggcagaccagaatctaacaacaggtctacttgaaacataatttttctctctgcagtttcccattttcactgaagacaaatcatggtaggactggtttgctttattatacttggcctaattatttgtatayagtgcagcaagggtaattagtttttacataggcttttaaatgggctttgatggaactttgttccatagcaggaatctcagatacaacttcttaaagctgagcccagccatgaatttgtaccatcaaatacctatgagttgggtgaatttcctctcctctggagggtccaagataaacctggggcttctgcacgtgtcagaaagtgacattctttacttacctcagaaaccctatacatggactgtgtacacaaaatatgaggccatttgttccaagggctttattggctccataagtcaagtttgattccttaaaggaaagcacaccattccagtcaaagccttggtaaaataaccagtgtatccaactgtgccctattacaaaagaaaa

SEQ ID NO: 870150 - DNA, 619 bp, Homo sapiens
ggaaaaaatttgaaaacattatttcgaagacttttaatcaggaaaaattagaattcagtcccaaactgtagaaaataataaaaattgaaaaagatactaggcagaccagaatctaacaacaggtctacttgaaacataatttttctctctgcagtttcccattttcactgaagacaaatcatggtaggactggtttgctttattatacttggcctaattatttgtatacagtgcagcaagggtaattagtttttacataggcttttaaatgggctttgatggaactttgttccatagcaggaatctcagatacaacttcttaaagctgagcccagccatgaatttgtacyatcaaatacctatgagttgggtgaatttcctctcctctggagggtccaagataaacctggggcttctgcacgtgtcagaaagtgacattctttacttacctcagaaaccctatacatggactgtgtacacaaaatatgaggccatttgttccaagggctttattggctccataagtcaagtttgattccttaaaggaaagcacaccattccagtcaaagccttggtaaaataaccagtgtatccaactgtgccctattacaaaagaaaa

SEQ ID NO: 870151 - DNA, 604 bp, Homo sapiens
cactttcaccttctgtcactcccacaacacaatttaatgagatttggggagatttgtttcctgatttgtttcctttttgcttctggatggccacagacagaaatctggttaagggcaacctctagataagcaatagatatcagcccagagccctctagctgctactcaatccttatgctataccatgtcgcaggggaaagattagacagattaattagtactcattactgtggagccagaagatctcctcttagtatgacaaaacataataaaagccatcacatattgggctcaactggtcagaaagatggggcttcacaccgcagatgcatactttagcrttctctatcctgggacacaaaactaagctaaataaacaaaccaagaaacctttgcttggctctcccgttacctctggtaaccatccaattaatcttttttccttttattcacagcatctcagataattcggtttctatttggaatgcattcttctccaaataacagactgtctgactgattgttgtttaaactggagatgatttttctcacataacaagaagtctggaggtggttgtttgctgatgtttattcagtggctcac

SEQ ID NO: 870152 - DNA, 593 bp, Homo sapiens
acattacaggaactgataactagaataaccagtttagagaagaacataaatggcctgtggagctgaaaaacacagcatgagaacttcgtgaagcatacacaagtatcaatagccgaattgatcaagcagaagaaaggatatcagagattaaagatcaatttaatgaaaaaaaaacatgaagacaagattagagaaaaaagaatgaaaaggaacaaacaaagcctccaagaaatatgggactatgtgaaaagaccaaacctacgtttgactggtatatggaaagtgacagtcagaatagaaccaaattagaaaacactcatcaggatattatccaggagaacttccccaaattagcaaggcaggccaacattcaaattcagtaaatacrgagaagactacaaagatactcatcgagcaaagcaaccccaagacacataatcaaccacttcaccaaggttgaaatgaaggaaaaaatgttataggcatccagagagaaaggctgggttacccacaaaaggaagcccatcagactagcagcagatctctgagccagaaaccctaaaagccagaagagagtgggggccaatattaaa

SEQ ID NO: 870153 - DNA, 675 bp, Homo sapiens
gagctgtgctccaccgtcttttatgggtggcccatcctgagggttagatctcacagggttctgcaacttcctgggaacccattggtcccttgtgcttgcagaagtcagagtgacttgagtatgtttttggttttgggggaactgccccgaaaatcatgtaggttcttttctattttcctaagcgttggcaggcttgtgaaataaagggacagagtacaaaagagagaaattttaaagctgggcatccaggggagacttcacacattggtaggatccgtgatgccccacaagccacaaaaaccagcaagttttttttaggaattttcaaaaggggagggagtgtgtgaataggtgtgggtgacagacatcaagtacttaatagggtaatagaatatcacaaggcaagtggaggcaggacgagatcacaggaccacaggacggaggcaaaattaaaattgctaatgaagtttcaggtaccattgtcattgataacatcttatcaggagacagggttttgagatcaamctgtctgaccaaaatttattaggcaagaatttcctcttcctaataagcctgggagcactatgggagactggagtctatctcacctctgcaatctcgaccataagacacaggtacaccctgggggggccagttcagagacctacccctagg

SEQ ID NO: 870154 - DNA, 645 bp, Homo sapiens
taaccaattttgaaaagtgtatttcgttattttctgcaacaatgaaatcatgatttttatatgtaactacagctatatcatttagcaggcaaaggcagaaattagcaattagacattcaaatagaatctctttgaaagatagatagaaagttttttacatagtataccgaactatgcgatgactttaataatgtgcaattctagtttttttaaaaaaaggtaagaaattatttacctgygttttcagtagtttgttgatctatgtaaagtgtcaaggaaaatatcacctctaaataaggaagatttcctcatatcttaatgaaagatcaacaatttttttttattattatactttaagttttagggtacatgtgcacattgtgcaggttagttacatatgtatacatgtgccatgctgctgcgctgcacccactaactcgtcatctagcattgggtatatctcccaaagctatccctccccccctccccccaccccacaacagtccccagagtgtgatgttccccttcctgtgtccatgtgatctcattgttcaattcccacctatgagtgagaatatgcggtgtttggttttttgttcttgcgatagtttactgagaatgatgatttccaatttcatccatgtc

SEQ ID NO: 870155 - DNA, 533 bp, Homo sapiens
tagaacaagatcaataacatcggtactttacatacacacacacacacaaaaaggccgggcagtggctcacacctgtaatcccagcactttgggaggccgaggcgggtggatcacctgaggtcaagagttcaagacagcctggccaatgtggtgaaactccgtctctactaaaaatacaaaaaattagctgggcatggtgacaggtgcctgtaatcccagctactcakgaggctgaggcaggagaatcacctgaacccctgaggcggaggttgcagtgagccgagctcacaccattgcacactccagcctgggcaacgaaagcaaaactccatctctcaaaaaaaaaaaaaaaaaaaaaaaaaaggcttaactcttaggggtgagaaattaagactctataattgaatgtttctgtgttaaaccatgctaaaaagtgagtcacatgaagtcattttcggtcaacactaaataatgtttccaaagttcagaatatggactggtaaattctgtctttatttcccaatcaagcaacc

SEQ ID NO: 870156 - DNA, 577 bp, Homo sapiens
gagaaaaggttcagcattaattctggtcttatttttgtttcttataggtcaaagggctgggaaaccctgctcaaataagcagctgggaatggaggcagtttttaagagcaatgccacttaattcttcgcactcctttctgtgcatcyaatcccatggtgctctatcactcagccctccctccctccctttctttccttcttttttttttttttttttgagaaggaggctggctctgttgcccaggctggagggcagtggcacgatatcagctcactgcaacctccacctccctggttcaagcaattctatctcagcctcccaagtagctgggattacaggtgcccaccaccacgcccggctaatttttatatttttagtagagatggggtttcaccatgttagccaatctggtctgaaacttctgacctcaggtgatccaccccaccttggcctaccaaagtgctgggatcacaggcgtgagcccccacgcctggcctcactcaacattatttttaagacctcatcagttgatatccccatgaagtcctctcctcttcaattcagtttccttgagga

SEQ ID NO: 870157 - DNA, 577 bp, Homo sapiens
gagaaaaggttcagcattaattctggtcttatttttgtttcttataggtcaaagggctgggaaaccctgctcaaataagcagctgggaatggaggcagtttttaagagcaatgccacttaattcttcgcactcctttctgtgcatccaatcccatggtgctctatcactcagccctccctccctccctttctttccttcttttttttttttttttttgagaaggagkctggctctgttgcccaggctggagggcagtggcacgatatcagctcactgcaacctccacctccctggttcaagcaattctatctcagcctcccaagtagctgggattacaggtgcccaccaccacgcccggctaatttttatatttttagtagagatggggtttcaccatgttagccaatctggtctgaaacttctgacctcaggtgatccaccccaccttggcctaccaaagtgctgggatcacaggcgtgagcccccacgcctggcctcactcaacattatttttaagacctcatcagttgatatccccatgaagtcctctcctcttcaattcagtttccttgagga

SEQ ID NO: 870158 - DNA, 663 bp, Homo sapiens
gacttttaaaaattggaaactcatatctagacagctttgcacaggaagactttcaacaggctgtgaatctatgtaactatatatatatatatgtatatagatagatagagatagatatagagaattttttaattgattgctattgtctgaayatttatgtgccccctgaaatgcatatgttaaaatcctaacccccaaagtaatggcatttaggaggtgattaggtaatgaggctggagtgctcgtgattggaaataatgccattataaaagaaattccagagagctagctagtcccttccaacatgtaaagatgcagcaagaagtcattgtctatgagccttcagtagacaccaaatttgccaccacttgaccttggatgtctcagcctcaagaattgtgagaaataaatttgtgttgtttataagctacctatttatagtattttgttatagcattccgaatagattaaacagaaaattggtaccaagagtgggatgctgataaaacaaatatttaaaaatgtagagctgactatggtactgggtaaagggtagaacctagaaaagttttgatgtgcatgctagaaaaagcctatatcctgccattaaggacaattccactgaaggcccagaaagaagagaggagagatatagagggagcc

SEQ ID NO: 870159 - DNA, 619 bp, Homo sapiens
tgcactatcctctttggtcccccatgcacaataactttcttagtctctattctctttctcttctcctttttatatcttcctcatattattgcttcttcccaggatttcttcatctcattttttacagtgtttttcacttcttctggccatgataaactaagaaaaatgcatgacaatactcagaaatactgatccttgttccgtgggctatggccagggaagctgccatgagtttatcagtttttgccagctaggcagagttaggttgggttcatttttgtaaacaagactcagggggctggtttgtggcttttcctgaactagtgtttagccagggaaggctatgctattttcctcacgagatgaaaataaaggccattaaaaatggattaggctagtgtttgacatgagcgccctcatccatcttcctcctctgggccaagtggtggcccagaagagagstgattgccacagtcaggcactaagatgagagtttacagcctcagccacaaaccagctgtgggactttggggagattgcataaccttcttagggccgtgtttctgcatcaccagaaaagcccgacagtgaaatgtgtgccagctacttcacaaagggt

SEQ ID NO: 870160 - DNA, 602 bp, Homo sapiens
tggttgttcagaaattgtgaaaaatccttttttattcctgtacattacctcacacagttttagagaaagggcgccaaacttataaggcaacagacatatcagttgaaggaagatttcatatcaatacatttaaaaagaagctgaagaaatcacaaaaggaaggaaaaacaattaaaatacttacaaaagaactttctaacgggaatgatgattttctaaagaaggaaacaattgttcatacacattttttgttgtcgttgagatggagtctctctctgtcgcccaggctggagtgtggtggcatgatctcagctcactgcaaactctcctccaggattcaagcaattcttctacctcagcttcccgagtaactggrattacaggtgcccgccaccacacccagctaatttttgtatttttagtagagacaaggtttcaccatgttggccaggctggtcccaaactgctgacctcaggtgatccgcccaccttggcctcccaaaatgttgggattacaggtgtgagccagtgcacccggtggtcattcgctcttttcttccaccgcaggcatgcgtgcaacctcacaggccctcatcttctca

SEQ ID NO: 870161 - DNA, 584 bp, Homo sapiens
tcccatttcagttttctgcatatggctagccagttttcccaacaacatttatttaatagggaatcctttccccattggttgtttttgtaaggtttgtcaaagatcagatggttgtagatgtgtggtgttatttctgaggcctctgttctgttccgttggtctagatatctgttttggtaccactaccatgctgttttgtttactgtagcattgtagtatagtttgaagtcaggtagcatgatgcctccagctttgttatttttgcttaggattgtcttggctatacgggctcttttttggttccatatgaaatttaaagaagttttttctgaatcatgaagaaagtcartggtagcttgatgagaatagcattgaatctttaaattactttgggcagtatggccattttcacaatattgattctttctatctgtgagcatggaatatttttccatttgtctgtgtcctctcttatttccttgagcagtggtttgtagttctctttaaagaggtccttaacactcagtaaactaggtatggacagaacatatgtcaaaataaaaaaagctatttatgaaaaaccc

SEQ ID NO: 870162 - DNA, 613 bp, Homo sapiens
ttgaacgaagaggcagaggtttcagtgagctgagatggcaccactgcactccagcctgggtgacagagtgaggctctgtctcaaaaaaataaaataaaaacaaaaataaaaaaaagacaagaatcagcacctgggtacaaaaacactggagataaattttatttcatgtttatttatataactaattgtgtcacctgcaagcagcataaccctggaatatctgtaaaggtgtggcaaaggcatcagggagcgtgccgggtccagatgacttggatttcagacacttaacgaatatgtcctactgtgttttcagagtggtggagccctcttttgttgcaaagcatctctttatctttttgcaaagacattcatacagcttttycttggttcccacctggagaatgccttcaacccgtgccaagctcttgtggctatcaggggctactgagtcactgaaaaatgttactatctgtatctatgtctgcatttcccaaacctggaaaatgtaaaatagatggacagaactgtcaaaaccaaactgtctaatctagtgggtggaattggaatgtcttggtcctttcactcatctttcatactcatcaaaattcattcc

SEQ ID NO: 870163 - DNA, 541 bp, Homo sapiens
tcatgcagataactcctgttctgcttgatattcatgaacattttagctctccatgagagttctgaaagtttttcctttgttctaatgtcagtctctgaagtcattggaaacctgcatttaagagcagctgttacagttctatagctgaattataaaaccaccttctaaagaggatgaaaaaatgatgacaattgtctgtgggtgtcaaaacttctcagggcagccacagtcaaaggcacatttgccatgcaaatttgttacctctgtggcacmcaataatttaacataacaaatataattattattgataatgtatactaagttatatcagaattataggaatttcacataatgttggaagatgtaccaataacacatttataaagagcagattaatgctttaataaaactctgttgtgcttttattccaatgttcaatttctggaaaaactgaataattaaaaccactttagctaatatgatcacacacagaattttgtttacaagattaatttttcacaaaccatccccaactagcttc

SEQ ID NO: 870164 - DNA, 636 bp, Homo sapiens
attttgtgaagaaagtcattggtagcttgatggggatggcattgactctatagattaccttaggcattatggccattttcacaatattgattcttcctatccatgagcatggaatgttcttccatttgtttgtgtcctcttttatttcactgagcagtgctttgtagttcttccaccagataccctaaatcatctttctcaaattgaaacttccagagatatatagggcaggggcaaaatgcctccagtctcttcactagagcataacaaatgtcacctttrttccagttcccaacaaattcctcatctacatctgtgaccacatcaacctgaaatgtattgtccatatgactattagcattttggtcaaaactattcaacaagtccctaggaagttccacactttcccatgtcttcctgtcttctgagccctccaagtccctaggaagttccaaattttcccacattttcctgtcttcttctgagccctctaaactgctccaatctctgccttttaccaaattccaaagtcacttctacattttcaagtatctttatagcagcacctactctctgcattaccagtttactgtattagttcattctcacactgctataaaaaatacccaagactgg

SEQ ID NO: 870165 - DNA, 673 bp, Homo sapiens
gtaaattagtttaaccattgtggaagacagtgtagtgattccttaaggatctagaactagaaataccatatgacccagcgatcccattactgggtatacacccaaaggattataaaccatgcttctataaagacacatgcacacatatgtttattgcagcactattcacaatagcaaagacttggaaccaacccaaatgtccatcaatgatagactggattaagaaaatgtggcacatacacaccatggaatactatacagccataaaaaaggatgagttcatgtcctttgcagggacatggatgaagctggaaaccatcactstcagcaaactatcacaaggacagaaaaccaaacaccccatgtttttgctcacaggtgggaaatgaacaatgagaacacgtggacacagggtggggaacatcacacaccagggcctgtcggggggtgggaggatggaggaaggataccattaggagaaatgcctaacgtaaatgatgagttgatgggtgcagcaaaccaacatggcacatgcacacccatgtaacaaacctgcatgttgtgcacatgtaccctagaccttaaagtataataaaaactaaataaataataaaaattaaaaaaagaagaaaggtctcaaatcaacgacctaacataacatcttaaagaacta

SEQ ID NO: 870166 - DNA, 673 bp, Homo sapiens
gtaaattagtttaaccattgtggaagacagtgtagtgattccttaaggatctagaactagaaataccatatgacccagcgatcccattactgggtatacacccaaaggattataaaccatgcttctataaagacacatgcacacatatgtttattgcagcactattcacaatagcaaagacttggaaccaacccaaatgtccatcaatgatagactggattaagaaaatgtggcacatacacaccatggaatactatacagccataaaaaaggatgagttcatgtcctttgcagggacatggatgaagctggaaaccatcactctcagcaaactatcacaaggacaraaaaccaaacaccccatgtttttgctcacaggtgggaaatgaacaatgagaacacgtggacacagggtggggaacatcacacaccagggcctgtcggggggtgggaggatggaggaaggataccattaggagaaatgcctaacgtaaatgatgagttgatgggtgcagcaaaccaacatggcacatgcacacccatgtaacaaacctgcatgttgtgcacatgtaccctagaccttaaagtataataaaaactaaataaataataaaaattaaaaaaagaagaaaggtctcaaatcaacgacctaacataacatcttaaagaacta

SEQ ID NO: 870167 - DNA, 673 bp, Homo sapiens
gtaaattagtttaaccattgtggaagacagtgtagtgattccttaaggatctagaactagaaataccatatgacccagcgatcccattactgggtatacacccaaaggattataaaccatgcttctataaagacacatgcacacatatgtttattgcagcactattcacaatagcaaagacttggaaccaacccaaatgtccatcaatgatagactggattaagaaaatgtggcacatacacaccatggaatactatacagccataaaaaaggatgagttcatgtcctttgcagggacatggatgaagctggaaaccatcactctcagcaaactatcacaaggacagaaaaccaaacaccccatgtttttgctcacaggtgggaaatgaacaatgagaacacgtggacacaggrtggggaacatcacacaccagggcctgtcggggggtgggaggatggaggaaggataccattaggagaaatgcctaacgtaaatgatgagttgatgggtgcagcaaaccaacatggcacatgcacacccatgtaacaaacctgcatgttgtgcacatgtaccctagaccttaaagtataataaaaactaaataaataataaaaattaaaaaaagaagaaaggtctcaaatcaacgacctaacataacatcttaaagaacta

SEQ ID NO: 870168 - DNA, 650 bp, Homo sapiens
ctaagtaactcctattatatgagcttcttgttacactgagtgtagtgtaggagtatgacctcagcatttaaagagacatgttttccagaaaaaactatggccctcaagtataagccaactccatctgctggcaatcagataaagaaaatatgactcatcccaatacttaagaaaaagacagctatcttgagctacacattgcttatattttataacaaagtgcctgctaaaaagcttcaaaaggtaaatcaaataaatttttgccttaaaacctaatctcaactaaaagtgattccactctgaagataaatgatcagggagaacagtatctcttatttacagaaatcttcaacaacaaacagcaaacattagyttaagaaaaattcaattattcctgttaaagtctaatagagatacagctgatagattcaccagctgccaagaattaatctcgacctgagatctctttcaaacacacccacagccaagctgctaggctcccaggactgactattgagtgcccttgccagagttggccagaagcagctctgtgacatctcccatgctcaagtttgaacctttgctactcccattcagtgacacttatctaacaccaaaccactcagttgcccaaaatggccccactaagg

SEQ ID NO: 870169 - DNA, 601 bp, Homo sapiens
gttccattctatagtgaaccccacaaattaagtatctgaccctgttcataagaaccgtatgtcagaattctttgggttgcaaataaacccagccaaaattggcttaaaacatggagaaagctatctcaaatagcaagaaatcacaaaatcagttaacctcaggactgacacaattcagaaatactaccagtcaggtacaaaaacagttataaaatcttttaggtacatacgctcagccattccaacaaggaccttatgcgaaaatttctctccaaggtggtggctgcaccagtagtttgaaggcatgaccagtcaaccatatagttaaatcatacaacagggcttactgtgatgctgaggatygaaaacagaactaacagagatctagaccttgagtgccattacaaggttattagacatctgggctagctagttactttactttggaagagacataactctctagtcaacttattgtgtctatccccaatgaacagttatttccaacctcttttctacttacttggaaaccttcttatataaacttcagtaaccatatttgaagtgattacatatgctactctataatgtggatttgctt

SEQ ID NO: 870170 - DNA, 551 bp, Homo sapiens
ccaccctctattcttcatctcacccttcctttctccccaacctcaaaagaaaacaaaaaattatttttttaaattgtattagtaatttatgtttaatacaaaaggatgatttaatggtatcaccaaaggttgtttctcccattgtgcatgtccttcagtctcggccccatacccatcaccccattcttcaccctcatgcttccatcccaaggcaaacatgtgtcttcatcggaatctatgggtgttgaagttaaatgtgggggcagagatttaacaccatgacactaatacaaatcaaccattcttcactttcaaatggttaatcactacargaaggcgaactcttttcttggtttttggttaaaaacattttatacatatatatgtatatatgtgtgtgtatgtatggacataggtatgtatatgcacatgtacatgtatatatgtatatatccatcttcaatataaatatatcataagtgagagttgtaaatactccttggtcatatgtctgtctttctcatagtatcatatcttcaatgttatgttaa

SEQ ID NO: 870171 - DNA, 676 bp, Homo sapiens
caagaagtgtctgaaataaagaaaatcctagcttgcagaatataaataaattattgcagttttattctttttccctgatacattaactaaacctggtgagcaggctatttcttaataggagctcctaaatatgaaacattacatataaattgataagattttrtttggaatttgagctcctatgtgctgatttgtggtataaatgttcactgctgaaaaagaaaaatcattttcataggaaaaaatgacttcaggattcaccactgtatggaaagtcaacaatgcaaaattagtggaggtcatttggtgaggtttgagtgatgtgagtggtttcccatgaaaccgtgggaaggtttcatcactgagcagtcccatcaaggagtggtgctcatcttatccttacatgcagctaatctcatcccatgagtgccaggaagcccctgtgctgtttttcacatgtgtgaagaggggtaactttacatggcataggtgattgatgggctcagcaatttggatatattgagagaagcattgggtagtgtccatcagttggaggactcagtggccacctgcagtcactgtcaatggacagccttcactggacccactgaagagcagcttctcagtctctgtgtcacagtgagcacccaattaatggagagtggatgggacattg

SEQ ID NO: 870172 - DNA, 676 bp, Homo sapiens
caagaagtgtctgaaataaagaaaatcctagcttgcagaatataaataaattattgcagttttattctttttccctgatacattaactaaacctggtgagcaggctatttcttaataggagctcctaaatatgaaacattacatataaattgataagattttatttggaatttgagctcctatgtgctgatttgtggtataaatgttcactgctgaaaaagaaaaatcattttcatakgaaaaaatgacttcaggattcaccactgtatggaaagtcaacaatgcaaaattagtggaggtcatttggtgaggtttgagtgatgtgagtggtttcccatgaaaccgtgggaaggtttcatcactgagcagtcccatcaaggagtggtgctcatcttatccttacatgcagctaatctcatcccatgagtgccaggaagcccctgtgctgtttttcacatgtgtgaagaggggtaactttacatggcataggtgattgatgggctcagcaatttggatatattgagagaagcattgggtagtgtccatcagttggaggactcagtggccacctgcagtcactgtcaatggacagccttcactggacccactgaagagcagcttctcagtctctgtgtcacagtgagcacccaattaatggagagtggatgggacattg

SEQ ID NO: 870173 - DNA, 676 bp, Homo sapiens
caagaagtgtctgaaataaagaaaatcctagcttgcagaatataaataaattattgcagttttattctttttccctgatacattaactaaacctggtgagcaggctatttcttaataggagctcctaaatatgaaacattacatataaattgataagattttatttggaatttgagctcctatgtgctgatttgtggtataaatgttcactgctgaaaaagaaaaatcattttcataggaaaaaatgacttcaggattcaccactgtatggaaagtcaacaatgcaaaattagtggaggtcatttggtgaggtttgagtgatgtgagtggtttcccatgaaaccgtgggaaggtttcatcactgagcagtcccatcaaggagtggtgctcatcttatccttacatgcagctaatctcatcccatgagtgccaggaagcccctgtgctgtttttcacatgtgtgaagaggggtaactttacatggcatrggtgattgatgggctcagcaatttggatatattgagagaagcattgggtagtgtccatcagttggaggactcagtggccacctgcagtcactgtcaatggacagccttcactggacccactgaagagcagcttctcagtctctgtgtcacagtgagcacccaattaatggagagtggatgggacattg

SEQ ID NO: 870174 - DNA, 631 bp, Homo sapiens
tgttactgcctttgggatgagtcagcctaatacagaaagattgtttctttctctttttaattttacttttctttctttaatttccagcctcaagggtgatgggagaagatgtaagaaaagttatagggaaaaatgcaaaccttcttggaaggccaaaaactttggagaataatttagctgaaggcagctaaattctcttaagggcaaaggttagataacaagggaatgtaaagaaacatatctagaaaaattggtttacttatgtctcaggaaaccaacctttgatcattcatgtgcaagactgctctctacttaggggtcaacaatgttaatttcccacaaattatgtttgctccaggcctttgtcttcaaatctgtactaaattaatacaaagttctctggcttagtgggactgtactctcattggtgatgctaagcagtgcagtcccctagctgcattctcaggcaaaataactgtgtctgaatactttyttcattggtcgctcagccagagtgtgcgggatggacccgacacaagagaacaaagctggggcctaatacaagtaccccagagttagagcacccagtccagaagttgggagctgagtgttggtgccataaaatctccca

SEQ ID NO: 870175 - DNA, 507 bp, Homo sapiens
aaagtttaatcaaaatatttcttgaaatgtgtttattccgtgtagggtatcttaggcttcttgaatctatacatttgtgtcttctgcaaatttgaggtttttttgaagcactatttcttcaagtattctttcagcctcattttactttttttctggtacacgtaataaaaatgttggatcttttgttgttgcctcacacatacctacatctctgttcattttatgtatcagtctgttttatttatgttgttcaaattggttaaattctactattctgccctcacattcactgattttaccttctcgcatctcaatggcrctattgactccatccaacacatttttcatttctgttacagtgtttgtttgcttttataatttacatttggttcttttttgttgttgtttttttacaaatcaagtttggttaatattttgcgattttgttatatattttaagataatttctatttgatgttgaaacatttttgctagatattttaaaat

SEQ ID NO: 870176 - DNA, 618 bp, Homo sapiens
ttgcatatgcacctaaaaaaacctcagttgctcaacaccagcctgtgaaagcagctaggtgggaaccgtacctttcaaagccacaggggcagagctgcccaagtccatgggagcccacatcttgcatcagcatgacctggatgttaracatggagtcaaaggagatcattttgaagcgttaagattcaactgccttgctggagtttggacttgcatgcggcctgtaacccctttattttggccaatttgtcctgtttggaatgggtatagttaccgaatgcctgtacccccatagtatcaagaaagtaactaactttcttttgattttacaggcttataggtggaagggacttgtcttgtctcagatgagactttggactgtggacttctgagttaatgctgaaatgagttaagacttgaggaactgttgggaaggtatgattggttttgaaacttgaggacacatttagaggggacacaggcaaaataatatggtttggctctgtgtccccacccaaatctcatcttgaattgtagttcccataattgccatgcgttatggaaggacctagtgggagataattgaatcatggaggcagtttcccctatactgtcctt

SEQ ID NO: 870177 - DNA, 618 bp, Homo sapiens
ttgcatatgcacctaaaaaaacctcagttgctcaacaccagcctgtgaaagcagctaggtgggaaccgtacctttcaaagccacaggggcagagctgcccaagtccatgggagcccacatcttgcatcagcatgacctggatgttagacatggagtcaaaggagatcattttgaagcgttaagattcaactgccttgctggagtttggacttgcatgcggcctgtaacccctttattttggccaatttgtcctgtttggaatgggtatagttaccgaatgcctgtacccccatagtatcaagaaagtarctaactttcttttgattttacaggcttataggtggaagggacttgtcttgtctcagatgagactttggactgtggacttctgagttaatgctgaaatgagttaagacttgaggaactgttgggaaggtatgattggttttgaaacttgaggacacatttagaggggacacaggcaaaataatatggtttggctctgtgtccccacccaaatctcatcttgaattgtagttcccataattgccatgcgttatggaaggacctagtgggagataattgaatcatggaggcagtttcccctatactgtcctt

SEQ ID NO: 870178 - DNA, 543 bp, Homo sapiens
tttctttttaaaaatctttcagagaaagcattttagaagaaaatgagtctctgttctcaagttttgtctaccccaaaccttatgaatggaaccttatttgcaaatagtctttgcagttacaattagttaaggggaggtcatcaaggtgggccttaatccaatatgacttatgtgttttataagaagagggaaattttgacagacacacagagaggataggtaggtgaagacagaggcagaaatcagaatgatgtatttataagccaaggaacaccaaaaattgacagtcatcgccagaagctaaggagagagktgtggaatagattcttcctcacagctgtcagaagaaaccaacccggttaacacttttagacttctggcctccagaactgtgagaaagaataaatttctgctatttgaaagtcacataatttgtggtactttgttatgacagtctcatgagtctattataggcaatttatctttgtggtcttccacccaaaaacccataactttagtgtgttcttgataaacacatcagac

SEQ ID NO: 870179 - DNA, 543 bp, Homo sapiens
tttctttttaaaaatctttcagagaaagcattttagaagaaaatgagtctctgttctcaagttttgtctaccccaaaccttatgaatggaaccttatttgcaaatagtctttgcagttacaattagttaaggggaggtcatcaaggtgggccttaatccaatatgacttatgtgttttataagaagagggaaattttgacagacacacagagaggataggtaggtgaagacagaggcagaaatcagaatgatgtatttataagccaaggaacaccaaaaattgacagtcatcgccagaagctaaggagagaggtgtggaatagattcttcctcacagctgtcagaagaaaccaacccggttaacacttttagacttctggcctccagaactgtgagaaagaataaatwtctgctatttgaaagtcacataatttgtggtactttgttatgacagtctcatgagtctattataggcaatttatctttgtggtcttccacccaaaaacccataactttagtgtgttcttgataaacacatcagac

SEQ ID NO: 870180 - DNA, 573 bp, Homo sapiens
gtctcactggagatccaggtgccgctggagtatgtaaaaaactcctgaagctcagtgcctgcccaaacagctgcccagatttgtccctgaaaaggctcacgagggaatctcctgatctgcagattgcaaaaatccatgggaaaagcctagtacccttggcrggtagcacagtccctcaccatttcccctggctggggaagaaaggttgctccactttgtgcacttctcaggtgaaacgacaccccaccctggttctgctggctctccgtggttcatgcccaccacctagccagtcccaattactgccttctatattggtctcactgggagctgaagaccggagctgtttctatttggtcatcttggcccaagacctatccaaaatactgaaaatcctgtccagaaaataattagtaatcaataaattgttattatttgtatttttattcatctatattggtattatttaattcactattcccactgttttcttaaatccacagaattagcataaatcttaaatgcagagaacaaaggtgcagtagggtacttagactatccattatttaggcc

SEQ ID NO: 870181 - DNA, 635 bp, Homo sapiens
acagccatatgaaaagatgatcaacattactaatcatcagagaaaagtaaatcaaaaccacaatgaaatacttcatcacacctgtcagggtggtcattatccaaaaaacagaaaataacaagtgttggcaaggatgtggagaaaaggaaacccttgtataccattggtgggaatagaaaatgcatcagccactatggaaggaagtataaaatttcctcagcaaactaaagatagaactaccatttgatccagcaatcccatatctgagtatttatcccgagaaattaaaatyaggatctggaagagatatttgtactcctatgttcactgaagcaattttcacaatagctaaaggtagaaacaatataaatgtccattgacagatgaatgagtaaaggaaatatgggatatacattcaatggaatattatttagccttaaaaatgaaggaaattctgtcatatgctacaacgtggatgaacctcgaggacatcatgctaagtgaaataacagtcacagaaggacaaatactgtataattccacttacgtaagatatcttaagtagtcaaactcaaagaagcagaaagtaggatgatggctgccagagtttgaaaggggagggaaatggggagttg

SEQ ID NO: 870182 - DNA, 561 bp, Homo sapiens
aacaactggaaaacccaaagcttgtaaactgtttacaggaaaccaaatagtatttcctgggacatgagatgaatatgagatggcgttttttattgtcactttgggtacagaggccgaaggtcattatctaacaggcatacaaatggaatcaatctctccctcaaagagcctgtcagatgcacctgagccttcccgggtgtttgcagagtggttcatggtcaaaggcaagaatggatattggcacttcaggggaaactatattttcctgtcaatagacagaagattgcagtgtcctagacaggtaatcagttatcaaggaccacaatcagctcacgtttaaacattaaacaggtggggcaggagacaagcaaaatttatcatgtttactagttttgccaacaaccaaagaaytgctttattctttttaatcagttctaatctgtgcttctttatatctattttgaaagacattcaataattttttccccttggcaaacgcttggtggattcatagagtcaaaagtctatatttctataagtatatattttttaaaatctccc

SEQ ID NO: 870183 - DNA, 599 bp, Homo sapiens
tctagcagtgagtgtatgagtttgtgtgtgttggggaagctaggggcatgggaaggggagcatccagaaataggggccagcatagatgaggtctggaagttggggagaatgtacaggaggtccaaagagtgaagacgaggtcagtttggccacagtgtggtaagccaggcyataagttgaaggaaaagagctgagagaggtagtgggggccagaacacacaaggccctggaggacacacagatgatattgaagacaatgggtctctatgctaagagtagtgacaagcactgaaagggtgtaggcagaaagagaccaagtcaggtttggattttggaaagttcattcttattgtcatgaggggagggaaacatgaggggagacctactgcaagatccaggcaggcaatgacaatggcttgggttagggatggagtcagatatatggatattttgaaagattatattggtggtgatagaatcaacaagattggtgctgtgtggcgttcctgcaaattagcttctaacatttgctagtcccagatgtagatttgtgtgtgtgtgcctgtgtgcaactatgtgtgcatattgcgtgtgggtgt

SEQ ID NO: 870184 - DNA, 631 bp, Homo sapiens
tataaattccttaatacattgttattatttttgctttaggtaatcaactatcttttaacttgattcaaaaataagaaaaaaattaccttctatttcctatttctggtgtcatttattcctttgtgtagatccgtatttctgcctgaagaacttcctttaacataaaggtccccaacccctgggtcacagaccggttaggaaccacgccacacagcaggaggcgagcgctggcgggcgggcaagggaagtttcatccgtattaattcatcgtggtctgaggctgaagaccgcgacatactctggttctgacctatgcgttccttycacgccccttatcccaccagagtgtgagctccatggggtgggaatattctggaacgtctgctggttttattctttgccttctccccaactaggacctggcacaggagggtgcgcattacctctcggcaaacagaacaactaactggcctagtttgctggggaccgaaggatttcctggaaccggagcccgcttgcccagcaggcatggtgtattctgtacctcaggcccgcaaaaatgttttaaagaaaaaaatgagctttagggtagaagaaaaggttttatttttctttctcacattggaaaaaa

SEQ ID NO: 870185 - DNA, 544 bp, Homo sapiens
gcctcaattatatttttaatttaatatcttgaatgtgtaatatgctcacttggcttaaaagttaaacaacataaagtgctatgtagttacaaagtattagttccacttctccccccaccattcccaacatcccttatccccttcccatagataaccactttttgtttttttgtgtatcctctcagggtttctttctgcaaatagaagtctatatttttgcctttttcccttttttaaaattcagaggttgcayactaaacaggtcttctgtgccctgcatcagaacttgcttcctggtatccaggacagtagccacccactcttctcaccacctttggaacaaggccatttcttccctggaaaagccctgcagaaatgtaaaagcagagactaaactcccacctaccccacttcctccagcctccgcctcttttatctagactattccttcagccattcctcacagagtgtgatgtctaaactgatcctgtttgcaactttctgaatgtgtgaggcccagagctggccaattgacccaccaaag

SEQ ID NO: 870186 - DNA, 647 bp, Homo sapiens
agtttgcaaattagactgagcagtactttggatcctcaggaactcctgtttttaaagagatgccatgttctcttttgttcattatcattgaagatagaaatgtcaactcttaaaaacataagattttgtggttgaaatttttccttatattttatagaaagtctctgcatattttgtgctccatgtattgatttcctgttgctcctgtaacaaattattacaaacatggcttaaaacaacacaaatttgctattttatacttctctgggtcacatgttcaaaatggatcttactggctaaaattaargtgtcagcaggtctgttttcttcctggaggttttaggagagagcccattcccttgtctttttcagctcctacaagtcacctacatttctgaactcaaagccttttcctccattttcaaagccaacagcatcgtatcatccaatctccctctgtctctgaccctcctgactgtctcttaaaaggacccttgtcctttaagattaggcccaactggatcatcccagataatctccccatctgaaaattctcaccctaatcatatttgcaaagtctcttttgtcatctatggtatcatatggacagattttagggattggaaggtagacatattggagtggga

SEQ ID NO: 870187 - DNA, 647 bp, Homo sapiens
agtttgcaaattagactgagcagtactttggatcctcaggaactcctgtttttaaagagatgccatgttctcttttgttcattatcattgaagatagaaatgtcaactcttaaaaacataagattttgtggttgaaatttttccttatattttatagaaagtctctgcatattttgtgctccatgtattgatttcctgttgctcctgtaacaaattattacaaacatggcttaaaacaacacaaatttgctattttatacttctctgggtcacatgttcaaaatggatcttactggctaaaattaaggtgtcagcaggtctgttttcttcctggaggttttargagagagcccattcccttgtctttttcagctcctacaagtcacctacatttctgaactcaaagccttttcctccattttcaaagccaacagcatcgtatcatccaatctccctctgtctctgaccctcctgactgtctcttaaaaggacccttgtcctttaagattaggcccaactggatcatcccagataatctccccatctgaaaattctcaccctaatcatatttgcaaagtctcttttgtcatctatggtatcatatggacagattttagggattggaaggtagacatattggagtggga

SEQ ID NO: 870188 - DNA, 647 bp, Homo sapiens
agtttgcaaattagactgagcagtactttggatcctcaggaactcctgtttttaaagagatgccatgttctcttttgttcattatcattgaagatagaaatgtcaactcttaaaaacataagattttgtggttgaaatttttccttatattttatagaaagtctctgcatattttgtgctccatgtattgatttcctgttgctcctgtaacaaattattacaaacatggcttaaaacaacacaaatttgctattttatacttctctgggtcacatgttcaaaatggatcttactggctaaaattaaggtgtcagcaggtctgttttcttcctggaggttttaggagagagcccattcccttgtctttttcagctcctacaagtcacctacatttctgaactcaaagccttttcctccattttcaaagccaacagcatcgtatcatccaatctccctctgtctctgaccctcctgactgtctcttaaaaggacccttgtcctttaagattargcccaactggatcatcccagataatctccccatctgaaaattctcaccctaatcatatttgcaaagtctcttttgtcatctatggtatcatatggacagattttagggattggaaggtagacatattggagtggga

SEQ ID NO: 870189 - DNA, 631 bp, Homo sapiens
ggacagattttagggattggaaggtagacatattggagtgggataaagcattattctgcccaccacactgccctcttaacttaaaagaattattttaacttgtttctcactagacgttgctttagttttacagtttcttcaggtttatcagaaatagaatgagaagtagcgwtcatctcagacatttgcctaaaataaatataatttctgacacttacaaaatgtatttatctctctcatattccagtttaataatggagaccttacttgttatgtatttgtgttttttttaataataaaataaggagaaaaaagaaacggaattgtgagattatatttagattggggaaataaataattccttaggttctttaaagggtgagagaacaaagccccttcaatagaaacgattttgtatgacattgtattaatttcctagggctgccataacaagtcaccacaagcttcctggctcaaaataacagaaatttctctcaaagttctggaggctagaaattcgaaatcaaggtgttggcagggccacactctctctgaagtctctaagaaagcatccatcctgtcctgcctcttccatcttctggtggctccaggcattccttggcttgtggga

SEQ ID NO: 870190 - DNA, 662 bp, Homo sapiens
ttaatcctcataatacccccatgagggcatttatagggcttttccaggcatgtccccacctcagtacttttgcacttgctgtttgctctgcctggaaagcttttacttcatatccatgtggctggcttcctcactttcttcaggttattattcaaatggcatatcagtaaggccttcttttctaaactctattctaaatttgcaacccccccaatttttatctcactttcttgaccatttttctccttagcagctatcactttttaatatgtgctatattttttacttatttgccttttcactgcttccccgccccgcatttgaatacatgttctatgtaggtaagaattgttgtcactttttttgacttttttgacttcttgatttccatgattcctagaacaatactragcatatgtaaaagtgttcaatgaatatttgttgaatgaatgaatatggttaggactattataatcacacatacatacacacacacactgtttacatgttacttaaaaactttatatttaaatatacttatatttgaaattagtatataaaattatatgtcagatctcagagaatgaaaatgagaaaatatctatatatatgtaaattcttatgtgcagatggaaataaaatagtctctagtatgtgagcat

SEQ ID NO: 870191 - DNA, 602 bp, Homo sapiens
ctgtgggcatttagtgctataaatttccctctaaacactgctttagctgtgtcctacgtattctggtacattatgaatttttcttattgatgtcaaagaacttatttatctctgccttaatttcattatttacccagtagttattcaggagcaggttgttcaatttccatgtagttgtgtagttttgagtgagtttcttaatcctgagttctaatttgattgcactgttgtctgagagactgtttgttatgatttccattcttttgcatttgctgaggagtgttttacttccaattatrtggtcaattttagaataagtgtgatgtggtgctgggaagaatgtatgttctgttgatttggggtggaaagttctgtagatgactattaggtctgcttggtccagaactgacttcaagtcctaaatatccttgttaactttctgtcctgttgatgtgtctaatactgacagtggggtgttaaagtctcccaatattattgtgtgggagtctaagtctctttgtagtctctaagaacttgctttatgaatctaggtgctcctgtattgggtgcatatatatgtaggatagttagctcttcttgtt

SEQ ID NO: 870192 - DNA, 602 bp, Homo sapiens
ctgtgggcatttagtgctataaatttccctctaaacactgctttagctgtgtcctacgtattctggtacattatgaatttttcttattgatgtcaaagaacttatttatctctgccttaatttcattatttacccagtagttattcaggagcaggttgttcaatttccatgtagttgtgtagttttgagtgagtttcttaatcctgagttctaatttgattgcactgttgtctgagagactgtttgttatgatttccattcttttgcatttgctgaggagtgttttacttccaattatgtggtcaattttagaataagtgtgatgtggtgctgrgaagaatgtatgttctgttgatttggggtggaaagttctgtagatgactattaggtctgcttggtccagaactgacttcaagtcctaaatatccttgttaactttctgtcctgttgatgtgtctaatactgacagtggggtgttaaagtctcccaatattattgtgtgggagtctaagtctctttgtagtctctaagaacttgctttatgaatctaggtgctcctgtattgggtgcatatatatgtaggatagttagctcttcttgtt

SEQ ID NO: 870193 - DNA, 594 bp, Homo sapiens
gctcttggtttgactgttgttggtgtataagagtgttagtgatttttccacattgattttgtatcctgaggctttgctgaaattgtttatctgctgaaggaacttttggtttgagatggggtttcctaatataggattatatcatctacaaagagataatttgactttcttcctgtttggatgccatttacttccttcttgcctgattgctttggccagaacccaacactatgttgaataggagtggtgagagagggtgtcctggtcttgtgctgattttcaaggtgaatgtttccacattttgcccatttattctaatgttggctgtgggtttgtcatataggggtcttattattttgaagtagkttccttcaatacctagcttattgagagtttttaacatgaagggatgtttaattttattgaaagccttttctgcatctattgagataatcatgtggttttttactttagttctgtttatatgatgaatcacattttattgatttgtgtatgttgaaccaacattgcataccagggataaagcctacttcattgtgtggatacactttttgatgtgatgctggattcagt

SEQ ID NO: 870194 - DNA, 663 bp, Homo sapiens
catctatttgctttaaataatattggcaatgtttcatattttaaccatatcaagtaaatttaattttaaacattgtaataatttttagtaatttagaaaaagttgaagaacctttgggtaattacaactttatttctattatataggctcattcaastccattaacacgttccctcctttttagttttccctggttggttggttcttccaatgctgaagaaaaattatttgacaatatattactgaggattcagtggtgagcaagtcatgaacattgaacgtagtctgccaggattactggatgagtgtgaaaaatacaaagggaacgataagtgttggattttagcctatatatgggacaatataaaagatttgtaccctctgcataagtcaaacattaagcattttagttactacttactttttccccaacagaattaaaaagccagttggtttggtgtaatcttcataattaaacaactaaaccaattggattacacctgttattgtgttcattcaggatttatttagaacaaagaaagaagtaattattcaaggtcaagaatcaagaaggcaaatggtaagaaaaggtactctgaattctactctctgaaaaggaagaagaaaacgaacacttcactgaaacagccacagtgcagttct

SEQ ID NO: 870195 - DNA, 663 bp, Homo sapiens
catctatttgctttaaataatattggcaatgtttcatattttaaccatatcaagtaaatttaattttaaacattgtaataatttttagtaatttagaaaaagttgaagaacctttgggtaattacaactttatttctattatataggctcattcaactccattaacacgttccctcctttttagttttccctggttggttggttcttccmatgctgaagaaaaattatttgacaatatattactgaggattcagtggtgagcaagtcatgaacattgaacgtagtctgccaggattactggatgagtgtgaaaaatacaaagggaacgataagtgttggattttagcctatatatgggacaatataaaagatttgtaccctctgcataagtcaaacattaagcattttagttactacttactttttccccaacagaattaaaaagccagttggtttggtgtaatcttcataattaaacaactaaaccaattggattacacctgttattgtgttcattcaggatttatttagaacaaagaaagaagtaattattcaaggtcaagaatcaagaaggcaaatggtaagaaaaggtactctgaattctactctctgaaaaggaagaagaaaacgaacacttcactgaaacagccacagtgcagttct

SEQ ID NO: 870196 - DNA, 663 bp, Homo sapiens
catctatttgctttaaataatattggcaatgtttcatattttaaccatatcaagtaaatttaattttaaacattgtaataatttttagtaatttagaaaaagttgaagaacctttgggtaattacaactttatttctattatataggctcattcaactccattaacacgttccctcctttttagttttccctggttggttggttcttccaatgctgaagaaaaattatttgacaatatattactgaggattcagtggtgagcaagtcatgaacattgaacgtagtctgccaggattactggatgagtgtgaaaaatacaaagggaasgataagtgttggattttagcctatatatgggacaatataaaagatttgtaccctctgcataagtcaaacattaagcattttagttactacttactttttccccaacagaattaaaaagccagttggtttggtgtaatcttcataattaaacaactaaaccaattggattacacctgttattgtgttcattcaggatttatttagaacaaagaaagaagtaattattcaaggtcaagaatcaagaaggcaaatggtaagaaaaggtactctgaattctactctctgaaaaggaagaagaaaacgaacacttcactgaaacagccacagtgcagttct

SEQ ID NO: 870197 - DNA, 663 bp, Homo sapiens
catctatttgctttaaataatattggcaatgtttcatattttaaccatatcaagtaaatttaattttaaacattgtaataatttttagtaatttagaaaaagttgaagaacctttgggtaattacaactttatttctattatataggctcattcaactccattaacacgttccctcctttttagttttccctggttggttggttcttccaatgctgaagaaaaattatttgacaatatattactgaggattcagtggtgagcaagtcatgaacattgaacgtagtctgccaggattactggatgagtgtgaaaaatacaaagggaacgataagtgttggattttagcctatatatgggacaatataaaagatttgtaccctctgcataagtcaaacattaagcattttagttactactyactttttccccaacagaattaaaaagccagttggtttggtgtaatcttcataattaaacaactaaaccaattggattacacctgttattgtgttcattcaggatttatttagaacaaagaaagaagtaattattcaaggtcaagaatcaagaaggcaaatggtaagaaaaggtactctgaattctactctctgaaaaggaagaagaaaacgaacacttcactgaaacagccacagtgcagttct

SEQ ID NO: 870198 - DNA, 610 bp, Homo sapiens
tttgatctcagctgttggtgatattgttgggactgatttgctatctataaagccaaatttgagaaaagacaggttaaaaataaacagggaggatgatggtagtaaaaataacgtgactgtcttcttatcttggaattcttttttagtttttagcagagttacatttcttcgttgtggtaaaatacttaatgccactgaactgtcacttaaaatggttaaaattgtgcactttagattatgtatactttaccacaataaaaatgaatttttttttttttgagacggagtctcgctctttcgcccaggctggagtgcagtggtgtgatctcagctcactgcaagctccgcctcccgggttcacaccattmtcctgcctcagcctccggagtagctgggactataggcacccaccaccgcgcctggctaatttttttgtatttttagtagagacggggtttcaccatgttagccaggatggtctcaatctcctgacctcgtgatccgcccaccttggcctcccaaagtgctgggattacaggtgtgagccaccatgcctggccataaatactttttttataaagccagtgagctgatggggaacccggcaagg

SEQ ID NO: 870199 - DNA, 638 bp, Homo sapiens
acatatctccatctcagacatcactattcccagatagaatcagtggtggcaatccttcccatgactgtcaaatgtgaactaaggtgttttacaaactaagaagactaaagggtccatattggtccctcctgtatcagctggccttgacaatacctcttacagatatgggacaactgttacatcacctttcttcctgcacagagcactcagatgaatgcataatttttgaaagaragtaaggcctagaacgttttgtgggaactgtccaaggtggcaaaggaggacaataccttggaattaatctgtaagacagcacctattgtcaccaattttaaaaacaaaccaaaaagaggaacttttatctaaaaaactctagccttttcttagcattccaggaagacttctctgaaggttggcctgtagctgtggaactggtgattggataggtctcaatgttcatgataaaatccttgatgtatcaaaaactaagctgtcattgaaggactacacccttctgggaggaggataaatcatcctggagaagtggagcagaaaggttgaaagaaaaggagattgatgaaaatctgttgacaagatcttactaggtcattcactgctgtgtaaagctttttatttgg

SEQ ID NO: 870200 - DNA, 570 bp, Homo sapiens
ccttttagttggggaatttaactcatttacattcaagtttagtgttgatatgtgtggatttgatcatgtcatcatgttttcagcttgttatttttcagacttgtttatgctcagcacagttcttgatgtggctgctttatagtgtcaccrgtttgtgtactccagtgtgtttttgtaatggctagtaatggtcttttctttccacatttagtgcttccttcacatgctcttgtaaggggggtctggtggtaatgaattccctcagaatttgcttgtctgaaaagaattttatttctccttcacttacgaagctcagtttagccaggtataaaattctgggttaaaatttcttttctttgaaaatgttgaatattgaccctcagtctcttttggcttgtatggtttctgctgacatgtccactgttagtctgatggacttccctttgtaggtgatctgacctttctctctagctgctttgaacattttttgtttcattttgactttgaagaatctgatgactatgtgtcttggggatcatctttttgtgaagtatcttactgaggttcttt

SEQ ID NO: 870201 - DNA, 534 bp, Homo sapiens
gtaaatcataaaacttggattaaggtaccatgtttatatgaaatgtcacacagaaaaagaattgctttctaagttgtcacagaacacattagtttatgggtgttgttactgtaagtttacttcagaatattttgaagtttcttacaatgacatgtttacacattggtacagaatattctgaagtttcttacaataatttgcttacacatgggtacatacyttggttattactattattaattaggggatttttaaaagaatctatttttacctcttagatacagaagagtttaaaaacaaaaacaaacacaaaaagaatggttatattcatgcttatgccttctcatataaagaagaaacagtatgactggaaagcacaaggctgaaaattcagatgagtctgaatccaaatttgtggatgtatgaatatttgtacgcgtatgtgtatgcaggtaatccgttttcccctttataaggttgatgccgcactttaaggattgcatgccgattagggggatgttatgataaattttt

SEQ ID NO: 870202 - DNA, 652 bp, Homo sapiens
cattgcagcactattcacgatagcaaagacatggaatcaacctaaatggccatcgatgacagattaactacataaaatgtggtacatatacaccacagaatactacgcagccataaaaagagcaaggtcatgtcttttgcaggaatatagatgaagctagaagccattatccttagcaaactaatgcaggaccagaaaaaaaaatactgcatgttctcacttataagtgggagctaaatgatgagaactcataarcacaaagaagtgaacgacaaacaccgggacctacttgagagtggatagtgggcggagggagaagaacagaaaaaataactatcgggtactttgcttagtacctgggtgatgaaataatccatacaacaaacatccatgacaaagggtttaccaatataacaaatcttcccacatacacttgaacttaaaacaaaagttaaaaaatgataagagtaaataaattggggaaattaaaaatatatatataacatctatttaaattttctaaatgtgacaccccaacttttgtgaaataaaaaaaaggcaaaacttcagttatcatatgcatatttggtttattactaaactacatttcttttacttattaaaaatgagaataacatttgatgttgagaac

SEQ ID NO: 870203 - DNA, 652 bp, Homo sapiens
cattgcagcactattcacgatagcaaagacatggaatcaacctaaatggccatcgatgacagattaactacataaaatgtggtacatatacaccacagaatactacgcagccataaaaagagcaaggtcatgtcttttgcaggaatatagatgaagctagaagccattatccttagcaaactaatgcaggaccagaaaaaaaaatactgcatgttctcacttataagtgggagctaaatgatgagaactcataagcacaaagaagtgaacgacaaacaccgggacctacttgagagtggatagtgggmggagggagaagaacagaaaaaataactatcgggtactttgcttagtacctgggtgatgaaataatccatacaacaaacatccatgacaaagggtttaccaatataacaaatcttcccacatacacttgaacttaaaacaaaagttaaaaaatgataagagtaaataaattggggaaattaaaaatatatatataacatctatttaaattttctaaatgtgacaccccaacttttgtgaaataaaaaaaaggcaaaacttcagttatcatatgcatatttggtttattactaaactacatttcttttacttattaaaaatgagaataacatttgatgttgagaac

SEQ ID NO: 870204 - DNA, 652 bp, Homo sapiens
cattgcagcactattcacgatagcaaagacatggaatcaacctaaatggccatcgatgacagattaactacataaaatgtggtacatatacaccacagaatactacgcagccataaaaagagcaaggtcatgtcttttgcaggaatatagatgaagctagaagccattatccttagcaaactaatgcaggaccagaaaaaaaaatactgcatgttctcacttataagtgggagctaaatgatgagaactcataagcacaaagaagtgaacgacaaacaccgggacctacttgagagtggatagtgggcggagggagaagaacagaaaaaataactatcgggtactttgcttagtacctgggtgatgaaataatccatacaacaaacatccatgacaaagggtttaccaatataacaaatcttcccacatacacttgaacttaaaacaaaagttaaaaaatgataaragtaaataaattggggaaattaaaaatatatatataacatctatttaaattttctaaatgtgacaccccaacttttgtgaaataaaaaaaaggcaaaacttcagttatcatatgcatatttggtttattactaaactacatttcttttacttattaaaaatgagaataacatttgatgttgagaac

SEQ ID NO: 870205 - DNA, 588 bp, Homo sapiens
gatatatgcatttggatatggaatgatcagcattttaaactcagcatgtgcaggacagcattctttaattcttccctgaaaccgcattgcacactctggctctcctctttcttcctcagcttggcaaatggcaccactgaatttcacttgctcaggcccgaattttggagctaaggtcactttctctctttttsagatcccccactggcaatatgtcagcaaatatctgtgttcctaatccctgaacctcttgaagaatatacccttttctctgcatgtctctgtaattagttatattagtcagagttctccagagaagtagaatcaatagaagatatctatgtatctaagatatagatatagatacagatatagatatagatatagatatagatatagatacagatacacatacacacatgcatgcacacacacacacagagacacacacacacaaagacacagagagaacgattttaaaagactatgggactggcaagtccaaaatctccaggataggccagcaggctggagactcaaggaagagttgcagttagagcccgaaggcagtctcctgacagaattctc

SEQ ID NO: 870206 - DNA, 634 bp, Homo sapiens
aaagttccttttactctgtaagtgaacatattcataggttccagagattaggacatggacatttttaatggggccattattccatataacaagtaaaaactagcactaaatctactggtacacaacccttgcctattattagaaagagatatctctgtgaagacttcatattgtttggattcggattgctacttgtgtaaacaggagaatacaaagtaatgaragcacactttgagctggggtcaacaggatttagttaaaagacacccagggcccaactatatcttttgttcaacatgtgcataaaccttttggacatagcaatagaaaactatcatctaagtgtttattatgtgaggcttaagaagagagaaaatccctgctcatatgtggattggaaagtccttcaaaggcttaagtaataggcttagtggagtagaacagaattcagcatgaatgaatataaaatcctacacctgggtccaaaaatagcaatggtataattaaagaatgagggagataatacttctgcaacaatgatgtctaaatacagcattctggcacacacacacaaaaatcatacactttaggattttctttttgttttaaggagctcagtgtgattaaaaatagg

SEQ ID NO: 870207 - DNA, 491 bp, Homo sapiens
aaggaaaactggtaccagccactgcgaaaacataccaaaatgtaaagacaatcgacactatgaagaaaccacatcaactaatgggcaaaataaccagctagcatcataatgactggatcaaattcacacataacaatgttagctttaaatgaaaatgggctaaatgccccaattaaaagacacagactggcaaactggatagagtcaagacccatctgtgtgctgtattcaggagacccatctcatgtgcaaagacacacacaggctcaaaatgaagggatggaggaatacttaccaagcaaatggaaagccmaaaataaaaaaaaaaaagcaggggttgcaattctcatctctgataaaacagactctaaaccaacaaagataaaaaaagacaaagaagagcattacataatggtaaagggatcaatgcgccaagaagagctaactatcctaaatatatatgcacccaatacaggagcacccagattcat

SEQ ID NO: 870208 - DNA, 585 bp, Homo sapiens
ccgtctcctgatgagacacactgttctaccttggcactccccagttgtcctggatcaaccccatcttgccacttcttttctgcctacagctgattttagcatgtcttgttgccttacttcccttgcctaattctcacactagtatctccattttgctccggccttgactcctggtcttcccttcaattacaaggggattttgttcatgtcttcactcacccctaagcaatgacgattgatctatgaaaaataaagtgaagaggaggagggacgtgtgtaaagaggaaagcctttggtgtgacacattgtgtttttgagaagtattttctataaaattccttctttttccttgttgttctcacttcaggccatgaaatgtgatgcccaaggagcaaagtgtcttaaagttcctaactccactaacccacaagatccggtatcttgagaracctcagattatatgtcctctcttcttcctgctcttgattctatttttttcttttactgttagtaaactggtctctcaagattaaccatgagagcactctcctccatagaacatatttctgcattgacctgtggtct

SEQ ID NO: 870209 - DNA, 653 bp, Homo sapiens
gtagtaattagcagtaattaaaaagtaatgatgatgtctttttagtatagtcctgatctcaccaacgtgaagtttaacagtgttgttggagttctagatacaaaagcagagcctcagttcctaaatgggtctcctggttttctcctttctctgatttttaaatagttattccattgtgcaagttaaaatggtacaggatgcactaatttaaggtggrtttaacttagaactgttttatagcaatgcagcaaggcttgatgtgggctgcttgtgtttttcaatattttgtttcctcttgccttttctctctccttactggggaagaaggttttgtgtgtgtatctggggagaaatagaacagtgattctcaactgcggttgatttttcccactctttccacagacatttggcaatatctagagacatttgcggttgtcaggaatcaagtaaggatgctactggtatttcctggatatagcaatattgagagaagctttaaatggtaaggaggagctaactattcagagggggataggaagatttttccaagcagacaggcatcaagagcacaggcaggtggatgcaggtggcaacaagctgtttggtgtagctgatgtataaaatatgaagcaaggaagagcagctgaatcaag

SEQ ID NO: 870210 - DNA, 653 bp, Homo sapiens
gtagtaattagcagtaattaaaaagtaatgatgatgtctttttagtatagtcctgatctcaccaacgtgaagtttaacagtgttgttggagttctagatacaaaagcagagcctcagttcctaaatgggtctcctggttttctcctttctctgatttttaaatagttattccattgtgcaagttaaaatggtacaggatgcactaatttaaggtggatttaacttagaactgttttatarcaatgcagcaaggcttgatgtgggctgcttgtgtttttcaatattttgtttcctcttgccttttctctctccttactggggaagaaggttttgtgtgtgtatctggggagaaatagaacagtgattctcaactgcggttgatttttcccactctttccacagacatttggcaatatctagagacatttgcggttgtcaggaatcaagtaaggatgctactggtatttcctggatatagcaatattgagagaagctttaaatggtaaggaggagctaactattcagagggggataggaagatttttccaagcagacaggcatcaagagcacaggcaggtggatgcaggtggcaacaagctgtttggtgtagctgatgtataaaatatgaagcaaggaagagcagctgaatcaag

SEQ ID NO: 870211 - DNA, 584 bp, Homo sapiens
ccatgcatcatagctttcatgcatgatggcttccatgcatcatgtcttccatgcattattgcttccactcatcatgtcttccatgcattatggcttccatgcctcttgacttccatgcatgatggcttccatgcgtcatgtcttccatgcattattgcttccactcatcatgtcttccatgcattatggcctccatgcctcatgacttctatgcattatggctactgtgcctcatgtttttcatgcagtatggtttccatgtgttgtgactgtttgatgcaacatgatgaccatgcagcatgggttccgtgcatcatgagtggtctgtrtgtcataatattcaggtattatggcttccatgcagtataacttccatacaatcatgactggtccatgcatcttgacttcatacacaggtaattttgcttgcatgaaaaaataagccaatgaaaaagtaactttaaaaatcacaagtggtcattctttgcctgcatccccctccaccacttcacctacacatctgtaactaaagaaagcttgttgaatcaacctaattgaggatgaccacttcttcattactcaga

SEQ ID NO: 870212 - DNA, 632 bp, Homo sapiens
aaaattccaaagacttagcaatattctcagaggataattagtaggagagagatagaggctgcccttttatttattattcattatttgtttattttttgtatctacaaaaattgtacattttaatggtgtacataaccatgtttttatatatgtaacattgtagaatggctagatcaaactaattaacatatgcattgcctcccatattttaatatgagaacacttaaaatctattcccttatcaattttcaaatatgaaatacattactattaactctattcaccatgttgcacaatagatctcttgaacttattcytgcagtctaagtgaaattctatgtccttcgactaatatctcctcaatccttgccttgcagcttcaccagcccctcataaccatcattctactctctgcttctgtgaggtcaactctttaagatttcacatataagtgaaatcatgtggtatttgtctttctatgcctggcttatttcacttagtataatgttctccaggtccatctatgttgtagaaatgacagtatttccttctttttatggctgaatagtattccattgtgtgtgtgtatatgtatgtacgtgtgtgtgtgtgtgtgtgtgtatagatagata

SEQ ID NO: 870213 - DNA, 632 bp, Homo sapiens
aaaattccaaagacttagcaatattctcagaggataattagtaggagagagatagaggctgcccttttatttattattcattatttgtttattttttgtatctacaaaaattgtacattttaatggtgtacataaccatgtttttatatatgtaacattgtagaatggctagatcaaactaattaacatatgcattgcctcccatattttaatatgagaacacttaaaatctattcccttatcaattttcaaatatgaaatacattactattaactctattcaccatgttgcacaatagatctcttgaacttattcctgcagtctaagtgaaattctatgtcyttcgactaatatctcctcaatccttgccttgcagcttcaccagcccctcataaccatcattctactctctgcttctgtgaggtcaactctttaagatttcacatataagtgaaatcatgtggtatttgtctttctatgcctggcttatttcacttagtataatgttctccaggtccatctatgttgtagaaatgacagtatttccttctttttatggctgaatagtattccattgtgtgtgtgtatatgtatgtacgtgtgtgtgtgtgtgtgtgtgtatagatagata

SEQ ID NO: 870214 - DNA, 614 bp, Homo sapiens
ctctgacagcttcctagttttctcctgcagttgtttggttctcacctcctctctttgcaagtctgtcttgcattaagacatggccaagtgccctggaacacaagcttaatcgttctatcttcatttgaaaccaccaccacgctgccacaaacacacacacagtgggttccactcagcactggaggatgtctaaatcccttggtccagcaataaggtcttatacaacccatctcttgaattattgctaattttttgttgctgttgttgctttcttcaggggtgtcacattatcgcaagctgctccaattgctattccctaaaaattcttagcttcccttcccctctgtgcctctgttcacctatcccctccctcaacctgaactcccccttccttactctccctgtgctgccaaaaagtctctccctttctctgggaccaggtggaatygcaatttaattataccctctccaatcactccaatgaaaagtagctcctccctagaaggaccaaataacaatttgcattggagcctcttagagatacttatttcctgcaaaccaaacgtctacatgctctgtaaagggaaggatttagagtttgaagtcaggggttc

SEQ ID NO: 870215 - DNA, 623 bp, Homo sapiens
tatacataaacttcaccaaaaaacccccatgagattaggactaatgctctctctattaataaagagaaaacagaggtataagttaatttgccaagtactactacacactactaagtagcagagctaagttttgaattcaagaataccttctaccaaagctcccagctcgccttgtagagcagagattgaagcatggtggttaacagccacagkgcctgaggtctacccagctccaaagctgactggctttatggtctttggcaagttgcctagacattctgtgtctctatgtagttgttattataccacccagcagttcataaagtagaaattcaaaaactcttactgagaaccttccaacttctctcagctatctccaaccagttgctctaatgaacaaataaatcaattggcatttgatataattgaaatcaggtgcatatttgatttttccagtaatggtcttcaattgcttctgacagtcactgtgctgtgactattatcacttcaggtgattatagttaatatagtgcttttttttcttcaacaactctactaaaatgtctacatgtcaaatagagttggtaactgaaattaataatgtagatacatagtaaagcttt

SEQ ID NO: 870216 - DNA, 667 bp, Homo sapiens
tcaacaaccaaatttatcaagtgggagaaagaatatcagagattgaagatcaacttactgaaataaggtgtgaagacaagattggagaaaaaagaatgaaaaggaatgaacaaagcatccaggaaatatgggactatgtgaaaggaccaaacatatgattgattactgtacctgaaagtgacgrggagaatggaaccaagttggaaaacacacttcaggatatcatccaggagaacttccccaacctagcaagacaggccaacattcaaattcaggaaatacagagaacaacactaagatactcctcaagaagagcaaccccaagacacataatcatcagattctccaaggttgaaacaaaggaaaaaatgttaagagcagccagagagaaaggtcaggttacctacaaagggaagcccatcagactaacagtggatctctctgcagaaaccctacaagccagaagagagtgggggccaatattcaacattcttaaacaaaaaaaagttttcaacccagaatttcatacccagccaaactaagcttcataaggagaaataaaatcctttccagacaagcaaatgctgagggattttgtcaccacaaagcctgccttacaagacccctgaaggaagcactaaatatggaaaggaaaagctgttaccag

SEQ ID NO: 870217 - DNA, 596 bp, Homo sapiens
agttctttgaaaccaatgagaacaaagacacaacataccagaatctctgggacacatttaaagcagtgttgagagggaaatttatagcactaaatgcccacaacagaaagttggaaagatctaaaatcggcaccctaacatcacaattaaaagaactagagaagcaagagcaaacacattcaaaagctagcagaggacaagaaataactaagatcagagcagaactgaaggggatagagacatgaaaaacccttygaaaaaaatcaatgaatccaggagctgtttttttttaaacattaacaaaatagatggaccactagttagactaataaagaagaaaagagagaagaatcaaatagacacaataaaaaatgataaaggggatatcaccactgatcccacagaaatacaaactaccatcagagaatactacaaacactactactcaaataaactagaaaatctagaagaaatgacaaattcctggacacatacaccctctcaagactaaaccaggaagaagtcaaatccctgaatagaccaataacaagttctgaaattaaggcagtaattaagagcctaccaaccaaaaaaag

SEQ ID NO: 870218 - DNA, 614 bp, Homo sapiens
tgaagcagatttttattaaacataagtcattcctctcccagtgtcaggatctacctctaagaggtttagggataaagttgcaggttacaccactgaaagataaagagaaaataccactctcatgttctcctttcaaaattggagaagggcaggtggtgaaaagaggaatcccagaaggaagaaaataaatgagtacaagagaaatgccagtctcattgatttctggactcaaaacatctctgaagaatttctgataaatgactatgtagactcattagtatttccrtttctctttttatcctttggtaaagatgtaatgaaaatttgaagctaaataatgaaaagcaagcaggcagaaagatgaagtagacacagaggcatgaaagatgtacttgctactccttgaaaataaaaaatgaactcaccaacctccccacaacacatactgtgcacatgcatacacgtgtgcatgagtgtgtgcggaataggaaattgtccaggtcatttgatggagataggattcaagtggctatcaatgacctgaagacatggtcctattctcatttagtacaatgggcatttcttaactcttaagggaatcatgcttcagcttt

SEQ ID NO: 870219 - DNA, 614 bp, Homo sapiens
tgaagcagatttttattaaacataagtcattcctctcccagtgtcaggatctacctctaagaggtttagggataaagttgcaggttacaccactgaaagataaagagaaaataccactctcatgttctcctttcaaaattggagaagggcaggtggtgaaaagaggaatcccagaaggaagaaaataaatgagtacaagagaaatgccagtctcattgatttctggactcaaaacatctctgaagaatttctgataaatgactatgtagactcattagtatttccatttctctttttatcctttggtaaagatgtaatgaaaatttgaagctaaataatgaaaagcragcaggcagaaagatgaagtagacacagaggcatgaaagatgtacttgctactccttgaaaataaaaaatgaactcaccaacctccccacaacacatactgtgcacatgcatacacgtgtgcatgagtgtgtgcggaataggaaattgtccaggtcatttgatggagataggattcaagtggctatcaatgacctgaagacatggtcctattctcatttagtacaatgggcatttcttaactcttaagggaatcatgcttcagcttt

SEQ ID NO: 870220 - DNA, 647 bp, Homo sapiens
acacccagcactttgtaacttataattcattttcttttccatagaaactatgacaacagttaaatgaaagcaagtcttcccaggaatgatcacaagtgcctatttaactaatgttggtattaatagctaataggcattgacaacccacttggctctaggtgctatgctaatcgctttaatgtgatttctcatttactcatcacaaccactcargtgcgtacaattatcatttctatttttacagatgagataactgaaggtaagttatttgtctcaaattacaaggctaataagtgacaaactccaggcttcttaaatctccatatcctttaatactacactatacaatgattttgtatttgcaagaaaaattataatagaaaagtaagctgttatagtaataattaactaggaaaaaataagtgactattttgtctgcttccaaaaaatatgtgaaatgagataaaatagaaaaaaataggtttaaaaatgtcaccagtacaagctaaaccttaggaaaggtaagtgttgttaaagtaaaagaagctagatgagtatttttgtggtaatctaaaaagtacttaagattatttccaaaggcttgagagaggggatgaaatgtgtttatattgactattttcatttta

SEQ ID NO: 870221 - DNA, 531 bp, Homo sapiens
ctagtctctttgcataccaaaagtgacctttactccagttcccaacaagctcttcatctccatctgataccacctcagcctggactttattgtccatatccttattagcattttggtcaaagccattcaacaagtctctagaaagttccaaagtttcctacattttcctgtcttctgagccctccaagcctctaggaagttccaaactttcccaaatattcctatcttcttctgagccctccaaactgttctaacctctyctgaagtcacttccacattttcaggtatctttacagcagtgccccactctctgcagtaccagttttttgtattagtccattctcatgctgctatgaagaaatacccgagactgggtaatttatataggaaagaggtttaattgactcacagattcgcagggctggggaggcctcaggaaacttataatcatggtggaaggggaagcaaacacgtccttcacatggcagcagcaatgagaaatgcagagcagagagggggaaaagtccttta

SEQ ID NO: 870222 - DNA, 531 bp, Homo sapiens
ctagtctctttgcataccaaaagtgacctttactccagttcccaacaagctcttcatctccatctgataccacctcagcctggactttattgtccatatccttattagcattttggtcaaagccattcaacaagtctctagaaagttccaaagtttcctacattttcctgtcttctgagccctccaagcctctaggaagttccaaactttcccaaatattcctatcttcttctgagccctccaaactgttctaacctctcctgaagtcacttccacattttcaggtatctttacagcagtgccccactctctgcagtaccagttttttgtattagtccattctcatgctgctatgaagaaatacccgagactgggtaatttatataggaaagaggtttaattgactcacagattcgcagggctggggaggcctcaggaaacttataatcatggtggaaggggaagcaaacacgtccttcacatggcagcagcaatgagaaatgcagagcaragagggggaaaagtccttta

SEQ ID NO: 870223 - DNA, 644 bp, Homo sapiens
ccctttttaaatgtagttaaggttctgtgaggagtttagaaatagatgcttaaaaagaaaaagagggttaccaagatagctctgcatcataataatacaaaaagctatctttatttgggtgggaagaatattttgtaaataattatgcctttaggaaaaagtctcttcccctactcccaattaatgtcaattatactgtattatctctgtttagcctatactgtactatttagcctcagaatgttttcttgagtgtgggtttgtgtgtatgtgtgttttgtccaaatattacctyaggagtctgtaaataaggactgaaaacaatagaaaaaaacgaaagggatgccttcacctcacatggagggagaatccccaagggagactacatatacagcatggatcagtatgtctcccttttacactgaacatgcacatgcacacacgtgcacacaccatacacatacggtacacactcgcatacagacgtagtctgcctttatggtgtgactgcaggtaaaataatctaaagtttgagaaaaacagttgcattgattttcatgccctacagatattcagatggagtttcaaaaggatggatcctctagtgaaaatcaacatttagtatcaaagtaagattttccaga

SEQ ID NO: 870224 - DNA, 601 bp, Homo sapiens
gtcagtttctgccccaagtaaatcacctatattaattcatttaaatttcacagtagtcctatgtgggaactatctttattaataaaggcactgtgtcttgggtaagttaaacattctgtgtaggaacaaacacaagyaaatcgtggagcttgaatttggacatggacaacctagtcagagtatgtttcttaatcatgatgctctacagatactcaagcgttctattctctctcaggacaatttatgtacctggctacagaaggctcaatccactggaaagtcagtgaaatgtaagtatgatcacacctttagtaaacgaattctgtactatgtgttactcaaggtgagaagagatgtgaaagagcagaaacagactctatgatttaggagcaaactgcagttgctcaaaaacaacaaatcgagcaaaaatctaaccaaatgtcttagtggttgtgttagttcattctcacactgttataaagaactacctgggtaatttataaagaaaagaggttaaattggctcatggttccacaggctgtacaggaagcacggctggaaaggcctcaggaaacttacatcattggcagaagggggagca

SEQ ID NO: 870225 - DNA, 601 bp, Homo sapiens
gtcagtttctgccccaagtaaatcacctatattaattcatttaaatttcacagtagtcctatgtgggaactatctttattaataaaggcactgtgtcttgggtaagttaaacattctgtgtaggaacaaacacaagtaaatcgtggagcttgaatttggacatggacaacctagtcagagtatgtttcttaatcatgatgctctacagatactcaagcgttctattctctctcaggacaatttatgtacctggctacagaaggctcaatccactggaaagtcagtgaaatgtaagtatgatcacacctttagtaaacgaattctgtactatgtgttactcaaggtgagaagagatgtgaaagagcagaaacagactctatgatttaggagcaaactgcagttgctcaaaaacaacaaatcgagcaaaaatctaacmaaatgtcttagtggttgtgttagttcattctcacactgttataaagaactacctgggtaatttataaagaaaagaggttaaattggctcatggttccacaggctgtacaggaagcacggctggaaaggcctcaggaaacttacatcattggcagaagggggagca

SEQ ID NO: 870226 - DNA, 561 bp, Homo sapiens
ttattacctagtcttgaaagcgcacctgcagccactgcgaatttctagggtccatgacacagttttcctatcttctggtccacatacttcacagccacctacacctgacttcaagccagttctagtttcctggagcagtcaacatttccacagcccatacagggacactcaggaatttcaggactatccccacatgataaaacaggcctgggragacctggtttggagggtgggtagcagctagctcaggcccactctgtgcctaaacacagggaaccattttctctgctttcagtttccttttaacctatctgaaatttccatagttgtcatttcttcagcccagtatttcatccacagaatgagagaggccagggactctcactatctactatcttctccacatcctccccaggctcctcctttctgacccaggaagccagcaatgtgggatccaggcttatgctaacactctacactccagtcctttggccttcctttttgatatttgaagggagctatgtggtatttacaaagcactcttctatacgcctggctctt

SEQ ID NO: 870227 - DNA, 528 bp, Homo sapiens
tctctacttaaatgcagtttaaatgtattactatacatcaaacgaagtcagcccagtaatttcctacaaaattctcccactcaaagtttataaagatttgacaatgacttttaggtagtttacaaagagatttgtccttgaatgttttgaatgtttaaacttgaaaagaaaagaaaaaagagtctcctacataactgtaagaacgaatacttcaaatcagcytcaatggataattttaaatgaatgtatatattttaacataatttatagaatacttcttttccccatatatctctgaaccaattatacatttttttcaactccacatgacagaatttttaatattgtatgtctacttgcttaggcatgatctacttatgtctattgattacttcatggtaatagctacttaaatgccaaaaagtgaaagcttgatagatgataaagaacctagatgacaggcatcattgagaaggaaaatgagtatcatgctgtgttaattttcttggactaccataacaaaatacc

SEQ ID NO: 870228 - DNA, 528 bp, Homo sapiens
tctctacttaaatgcagtttaaatgtattactatacatcaaacgaagtcagcccagtaatttcctacaaaattctcccactcaaagtttataaagatttgacaatgacttttaggtagtttacaaagagatttgtccttgaatgttttgaatgtttaaacttgaaaagaaaagaaaaaagagtctcctacataactgtaagaacgaatacttcaaatcagcctcaatggataattttaaatgaatgtatatattttaacataatttatagaatacttcttttccccatatatctctgaaccaattatacatttttttcaactcyacatgacagaatttttaatattgtatgtctacttgcttaggcatgatctacttatgtctattgattacttcatggtaatagctacttaaatgccaaaaagtgaaagcttgatagatgataaagaacctagatgacaggcatcattgagaaggaaaatgagtatcatgctgtgttaattttcttggactaccataacaaaatacc

SEQ ID NO: 870229 - DNA, 528 bp, Homo sapiens
tctctacttaaatgcagtttaaatgtattactatacatcaaacgaagtcagcccagtaatttcctacaaaattctcccactcaaagtttataaagatttgacaatgacttttaggtagtttacaaagagatttgtccttgaatgttttgaatgtttaaacttgaaaagaaaagaaaaaagagtctcctacataactgtaagaacgaatacttcaaatcagcctcaatggataattttaaatgaatgtatatattttaacataatttatagaatacttcttttccccatatatctctgaaccaattatacatttttttcaactccacaygacagaatttttaatattgtatgtctacttgcttaggcatgatctacttatgtctattgattacttcatggtaatagctacttaaatgccaaaaagtgaaagcttgatagatgataaagaacctagatgacaggcatcattgagaaggaaaatgagtatcatgctgtgttaattttcttggactaccataacaaaatacc

SEQ ID NO: 870230 - DNA, 428 bp, Homo sapiens
tacatcataatctatgaaaaatgacacatactgcaaatcatacttttcagtataacttcttaagatagttgatttctgatttactgatgcatttcatgtaggcaataagccagcacaaagccacttatagattaaaataatttgtgctcaataaaaaatacatatgttacatacatagatmtgtatttgtaaatgaaaatgtctcatttctgaaatggtgtccttccaaatggcatcttatttctgaaatggtgtcctaatcaactactgaatgtgaactagaatttctcaaagtcttcacctgtaatctcagatctcaatcacacttaatacaactgaacagcagataaagtgacctgcaaaataactctaagaaaaattcacagcttacactgtgacacagaatatatggaaatcagaagacaata

SEQ ID NO: 870231 - DNA, 623 bp, Homo sapiens
cccagtgatcccattactgggtatgtacccaaagaattataaatcattctactataaggacacatgcacatgtatgtttattgcggcactattcacaatagcagagacttggaaccaacccaaataccgatcaataatagactggataaagaaaatgtggcgcatatacaccatggaataccatgcaaccataaaaaaggatgagttcatgtcctttgcaggaacatggaggaagctggaaaccatcattctcagcaaactaacacaagaatagaaaaccaaacaccacatgttctcactcgtaagtgggagctgaaccatgagaatgcrtggacacagggaggggaacatcatacaccagggcctgtcagagggtgggggctgggggagggatagcgttaggagaaatgcctaatgtagatgactggttgatgggtgcagcaaaccaccatggcacgtgtatacctatgtaacaaacctgcacgttctgcacatgtgcccttgaacttagagtataattttaaaaaatttaaaaaaaaggaaaaaaaaaaaagcaatgcatgttgccatgaacctcaaaaaataggctaagtgaaaaagtcagacaaaaaagtgacatgctg

SEQ ID NO: 870232 - DNA, 612 bp, Homo sapiens
tatgttttgtatattttagaaatggttttctcatagtaaattttacttgacaaccatatttattttcacttgacaactgtatttataactagtcattttcacttgataatcatatttataactagtattttatacttaacactatcattaattaattggcttcaatgctcatcaagagtttatcacattkttttctattattttctcttaaatgtaattattttattaactgaatagagtgtttcttcattgactattttgtaagaagtgtgaagaaaaggtatgctttgcaagctcttgaaactcagaatgtctttctgttgatttggaaagtatcttggtctggcataatgttactgggtcaaaaatatatttacaatatatttatagctatcagatatttgccaagaattatgccaatcatttatactcattgtctatatttcttataaaaatttccatttattataattaattatttatttatttattttaaaatggagtctttctctgtctcccaggctggagttcagtggcatgattttggctcactgcaacctccacctcctgggctcaaggaattctcatgttccagcctcccaagtagctggg

SEQ ID NO: 870233 - DNA, 639 bp, Homo sapiens
cattctgtaacctgaaagcagaaggctggtctctggcagccaactgccatcaacatgcaggaagttggcaaaaagctgaaaggtttggttaaatatacagtttttgaaattgcttgaaagttttatagagggctactttttttttcaaaaatttctgttttaaaacatagaaagactggaccccttgttatatactggtttgctttccaagggagacatctggtcttcccacagtgctgatgtttttgattgagttctaaagttggaaagatgggattttagactatttttaacatgttttctcttaccaaaaacaaataaaggtggataatcactttacaaagtgtcattaaaatttgctttagaaatatttattaaagtttaagaattagaagacctgatttttttttctcagtaattagcttgtcctkgtcaaaaacaaacacaatgacaaaaatcagaataaaaactggtttagaccatcccgacaaaacaagtttgcctccagatttcacatttctctaaaataaatatagtaacatgttaactcaagaaatcaaaccctaaataattatggtcttttaaactcagattattttaacttttggagaaaagatatggaattttctttcctttggg

SEQ ID NO: 870234 - DNA, 580 bp, Homo sapiens
tgcatgtgtgtgctaacaggtgtctgagatgactctgagtttggctatttactttgtgatttggaaatcttcctagttctcagagaattatgtaaactttcaaacaggtagattagaaatattttaactttaaataatgttttcaactatgactattgcacttttaaaaaatactgaatcctctaacagttttttttaatccattcaatttgcaatctcttcttctacctttcttggttttcttccttcttttccccttcttctttcttcccatttatgaaattactagtactgagaaatctactctgctgatgccttttgcaaaccctttaatcccaaataggtttcttcctgttmtgagattcctctgaaccctacctctgttgtttgtttagatacacaaaacaggaagtgtggcccacaaggaaaaatgaattagatgctaaatctgctgcaaacaatttccttagggtactcacttaaaagcatattttcctatttgagtttgacatgcatttattaaatacctactatgtggactcaggggaaaaaaattaaaacctgaacctgatccgaatct

SEQ ID NO: 870235 - DNA, 580 bp, Homo sapiens
tgcatgtgtgtgctaacaggtgtctgagatgactctgagtttggctatttactttgtgatttggaaatcttcctagttctcagagaattatgtaaactttcaaacaggtagattagaaatattttaactttaaataatgttttcaactatgactattgcacttttaaaaaatactgaatcctctaacagttttttttaatccattcaatttgcaatctcttcttctacctttcttggttttcttccttcttttccccttcttctttcttcccatttatgaaattactagtactgagaaatctactctgctgatgccttttgcaaaccctttaatcccaaataggtttcttcctgttctgagattcctctsaaccctacctctgttgtttgtttagatacacaaaacaggaagtgtggcccacaaggaaaaatgaattagatgctaaatctgctgcaaacaatttccttagggtactcacttaaaagcatattttcctatttgagtttgacatgcatttattaaatacctactatgtggactcaggggaaaaaaattaaaacctgaacctgatccgaatct

SEQ ID NO: 870236 - DNA, 639 bp, Homo sapiens
ctgatgtttgccaggtttgggaaacatgtaactggtatagttacatgctgcggtggaagatccagatccagttgctgtgtgggctacactagttggttgtaacacagtaaaaagagctctgagtataatgctaggaaaataattttccagtgcaatctctactatttattagctgtaggaccttgaggaagtcacttaacttgtccagtttctttatttataaaataagaataatacataattcacagggttgttgtggagctaaaattaggtaacctaagttttggttctagcactggtaaaggcatttaatataaacttaaaaaatgttctcccacctcccccaccacctatatgtttactccaagcttgttcatactgacagatttgaaaaatgtaagcaatttcctcaaggyattccccaattctctcagctgcaagtaatctctcccttctcacaagcagtctaccagcatttctttactggagcttatttctactttgttttatacatgtttatgcacatgacatattcctccccctccccctcaataggctgcaaacttttttagaacaagaagcttgcctaatttatcttcacagccctagcatttaacatggtgcctggaagagataggg

SEQ ID NO: 870237 - DNA, 681 bp, Homo sapiens
gaaggaagctaaaaccttgacaaagagtacaggaactgctaactagaataaccagtttagagaagaacataaatgacctgatggagctgaaaaacatagcacaagaacttcgtgtagcatacacaagtatcatagccaaatcaatcaagtggaagaaaggatatcagagactgaagatcaacttaatgaaatagacatgaaaacaagattagacaaagaagaatgaaaaagaatgaacaaagcctgcaagaaatatgggactatgtgaaaagaccaaacctgtgattgattggtatccctgaaaatgatggggagaatagaaccaagttggaaaacacacttcaggctattatcctggaggatttcccaagctagcaagacaggccaacattcaaattcaggaaattcaaaagaacaccattaagatacttctcaagaagagcaaccccaggacacatagtcgccagattytccgaggttgaaatgaaggaaaaaatgttaagggcagtcagagaaaggttgggttacctacaaagggaagcccatcagactaacaacagatctctctgcagaaaccctacaaaccagaagagattgggacccactattcaacattctcaaagaaaagaattttcaacccaaaatatcatatccagccacagtaagtttcataactgaagg

SEQ ID NO: 870238 - DNA, 575 bp, Homo sapiens
actattcaaaaaaatcgaggagtaggagctctcctgactaactctatgaagccagcatcagcttgatacaaaaatctggcagaggcataataaaaagagaaaacttcataccaatatccctcattaacatagatgcaaaaatcctcaacaaaatattagcatactaaatcctacagcacatcaaaaagttaatacacgacaatcaagtaggctttattcctgggatagaaggctggttcaacatacacaaaccaaaaaatgtttcaccacataaacaggatcaaaaacaaaaaccatatgattatcacaatagacacagaaaagctttccaataaaatacaatattccttcatgayaaaaaaccctcaacagatgaggcaccaaagaaacatacctcaaaaaaacaagacctatctatgacaaacccacagccaacattatactgaatgggcaaaagctagaagcattctcctttagaattggaacaagacgaggatgcccactctcaccactcctatacaatatagtactggaagtcctagccagagcaatcaaacaggagaaagaaataaaag

SEQ ID NO: 870239 - DNA, 640 bp, Homo sapiens
ggttagtccagctatactacattttttaattagcagtctgaaatataaatgttcactccaacacttaacaatacttgcatgcacagccactgctgtggtgaccaactctgagggggatccaactgagttccctccagaagcaatcccagatattgtcctgtggtcggaaaacatgctctgtataattctgattctttgaaattattgaagacaccaggcgccgtggctcatgcctgtaatcccaacactttgggaggccgcagctgtggatcacctgaggtcaggagtttgagaccagcctggccaacatggtaaaaccctgtctctactaaaaatacaaaaattagccaggcatggtggtgcaggcctgtagtctcagctactygtgaggctgaggcaggagaattgcttgaacccgggaggtggaggtcgcagtgagctgagattgcgccactgcactccatcctgggagacaaagcaagactccatctcaaaaaagaaaaagaaaaagaaaagaaaaagaaattgttggagacctgttttatggcccagtatatggtcagttttgcagttttggtagataatccatgtgcacttgaaaataatatatattttgccattcttcaggaccatgtcctat

SEQ ID NO: 870240 - DNA, 624 bp, Homo sapiens
gaaatagtcactatcacaataataccaaagtttggcttttttgaaaaatgggtttgagatttgtttgtgagtatattcaaataaatcagggagctttgtggtttgggaggtggtgggagagaatcagtcttcctctttctgcctttctaktctatcttgtgggctctcacacctgctgaagggaacaaaagaacatgaaaagggccctttaataattaaaggacagtttatatttacttgtctttaaatacacacttataaagcacttactatgtgttaggcacgccctgttctaattaccaatattaatttatttgatccttaaataaccctgtgagatagagctatgattatatagatgagggatctgaggcccagagaggtttagcagtgagtccaaagccacacagcagcaagtggtagagtcaggattgtgaactcaggagttcctcctgcatcacctccagaaggcctaagtttaggtacctgcacaagacggtcagcacccctcttctggcccacagtaggtcggtttgcgggcttgactctaggtggcccagctttggaagggaggtgtcatgccccacagacactgagctggaagcccaacgggacagcctccaa

SEQ ID NO: 870241 - DNA, 611 bp, Homo sapiens
tggctattctggagtttctcatctgtgagcctcaaagttccattttctaatgtagtccatctgccacatatgaccactcagaaaaaagctctctgtagtattcaacaatgtgaattctagaatatgaaatacctactgtgggggcggggggggcaattttccagttctttgtaaaatgctcatattcagatgagaagtcagccatgtaccagcctaattatatatactatagtaattgctatgtactatagtaattgctatgatggaaccatggagttggaagcccacagtattayggccttgcagttctaagagcgggccccagacctacagtattgcgtcatcaataaaacattaaaaatgctatggggcagggcttctccattgctgctcatgttggaatcacctggaagcttttaggaatcaagatgtccagccaggcgaggtggctcacacctgtaatcccagcattttgggaggttgaggtgagtggatcacctgaggtcaggagtttgagaccaccctgaccaatatggtgaaatcccttctctactaaaaatacaaaaattagctgggggtggtggcaggtgcctgtaatcccagctactcag

SEQ ID NO: 870242 - DNA, 611 bp, Homo sapiens
atgcggagcttaaaacctaaatgacaggttgataggtgcagcaaaccaccatgccacacgtatacctatgtaacaaacctacacattctgcacttgtatcctggaacttaaaggaagattaaaaaaaaagaaggtaaaataaaactaccatttgactcagcaatcccattactgggtatatacctgaaagaaaacacatcactctaacaaaaagacacatgygcttgtttgctcatcgctgcattatccacaatagcaaagatatggaatcaacttaggtgcccatcaatggtggattggaataagaaaatgtggtatatacatacattggactactacacggccatgaaaaggaacaaaatcttgtcttttgcagcaacattgatgcagctcgaggccattatcctaagtaaattaacagaggaacataaaaccaaataccatatgttctcacttataagtgggagctaaacattggttactcatggacttaaagatgaggacaatagccactaggaatgaatagaagggagaggtatggaggggagcaatagttaggttttttaggattaaaactagaaatacgaattagtttttgggagttttaatcc

SEQ ID NO: 870243 - DNA, 596 bp, Homo sapiens
ctcttatttttgcatgcccagcattaattcactgttcattttgtaacaactagggtgtcattttttttttagaaccagtgccttccacctttcatttcatatgattctgatggacatgagcccagttcctggtacgaggtgtgggtctgacccaggtgattagcttagattgaaacgcaagccagccgggcgcrgtagctcacgcctgtaatcccagcactttgggaggccgaggcaggcagatcacgaggtcaggagatggagaccattctggctaatatggtgaaaccccgtctctactaaaaaatacagaaaaaaaaaaattatccgggcgtggtggcaggcgcctgtagtcccagctacttgggaggctgaggcaggagaatggcgtgaacccaggaggtggagtttgcagttagctgagatcgcaccactgcattccagcctgggcaacagagcgagactccgtctcaaaaaaaaaaaaaaaaaagaaaagaaaagaaacgcaagtcaatccagccaataaaagtcagtcttgaaattttgtcttgaactattggaacaagctctctttccagtagggttgctaagctggc

SEQ ID NO: 870244 - DNA, 583 bp, Homo sapiens
ggtgaaaccccatctccactaaaaatccaaaaagttagccaagtgtggtggcacgtgcctgtagtcccagctactcgggaggctgaggcaggagaattgcttgaacccaggaggcggaggttgtagtgagccgagatggcrccactgcactccagcctgggtgacagagtgagactccgtctcaaaaaaaaaattataaatggctattgagtttacctatttcttcttgtcaggagtttgatagtttgtatctttgaagaaatctgtccattttatccaagttgtcaaacttattggcataaagttgttcataatatttcctaattacattttcaacatcattgatatttactcttttattcttgatattggtaatctgtgccttctatctggttccttatcactctggtaagctagaggtttatcaattttattaatagtctcaaagaacaaggttttgttttcattgatttttctcttttgcttttctcttttctgtttcactgatttctgtttgtacctttattttttttcttcttctgataactttggaactctaattacaaacatatccatcagcttg

SEQ ID NO: 870245 - DNA, 630 bp, Homo sapiens
gagggagaggatcaggagaagtaactaatggatactaggctcagtacctgggtgacaaaataatctgtacaacaaacatccatgacagaagtttacctatataacaaacctgcacatgtacccctgaacttaaaataaaagttaaaaacaaacaaaagaaggttggaacaagtaccattttaacaaagaaccaagcaggtttgggaaaatgtccaaaaggaggcctttgtccatggttttgactgagaactcaacytaacagacagcctcatgcctggtacatagaaaatgacccataaatatgtgtggaagttaggataaattgcccttcacatcggacaaatgatcagtgggtggagtctctcaggaatttccccttgacagttatctgacactgaatcctgcctaaccgctacaaatgcccatcattgtttacttcattatttcttctttccctctgtattcccactgaatattggtctagaagggcaagaaccatactgtttgttcaccaacctacccaaagcatccagcatagcctctcgatacccactgaatatgtgctgaatgagtgtgctgatatggtttgtttgtgttcccacccaaatctcatcttgaattgtagctccc

SEQ ID NO: 870246 - DNA, 665 bp, Homo sapiens
acccatttcaaatttatgaccaaaaatcttcagtgagcactcaacactatctgacaactaaacttccctagtaaattcattaacctactcccaagatgactattacacactttctcctcagtcctcaaatctccaacatctcctcccactcaacttcagccgaagactttgtcrtatatttcatgcagaaatatagatgcaatcatgtgaaaaccatttcaacttcccaccttcattccacaagcttattcatatctgtagtcacatgctctggtaaacttgtgccctatttcccagcttgctctccttctcatgagctgggctcctgaaacagtttcttcttttctgtatcatctattccttcctaaactaaatctttaagcactagctcctccagcaattttttttataagtctcttctctggctacacttttttctttagtgattccaaaagcccccatgtcttcaaatatcatccaaatgttgatgatgcccaaattcattttactagtccagatctctttcctgaggtttagatttgcatgtataaatacatctttattacatctctgtacgtttaataggtgtcttaaattaacacggctgaaactgagctattgatcttctctatcaaaaaaaatcattcctaaattattttcctatc

SEQ ID NO: 870247 - DNA, 635 bp, Homo sapiens
atgtatcaggctaatttttttgcaaagcaatgtatgcattcctttcacttattaaatcactggctttagtgtttatgtagagatatctgtagacctcagaacagaattaaaacattgtgaaaattatagcttgataaatgtgtactgtaaaaataaatctaatttgttgactacacattacaacactgtgttaagaatgctgagggagaaaaataattttaagatgtagtttctactgtctaagaagtttagtgtcaaggtggaggtagaaagaatacaattataaaaataagtaaaagcatgatactctaagatgtgscgcaggcaatgcacagctttttggataaggagtcagctgagaaaaggccccgagggaggtaagtttgaaatgttctgtgtagataagggatgagctaccttgaaatttgcaaaggttacaggtagatatgtcaggtaatgtgaaattgtaaggagttagcaatttattctatgagaacaatattccattgaaggtgtattagtagggagtagtttgatcacagggctattttaggatgataattttaggacaaattttgtaggaagttgattggagcagtaattctcaaaatgattttttccctgaacttgaggag

SEQ ID NO: 870248 - DNA, 623 bp, Homo sapiens
aacggtaataccctagggaatggtatatattctccatgttcaagaaaaccaaatgtctcattcaccttctaagcaggactgtgtagaaagaggaaggcatttattcattcattcacttcttcattcaacagatatatatatggggagcctgttatatattcgacattgttgtggatgtttggaatacatctatgaaaaacacaaagacccctttcttcttgggacacatattctagyagttgaaggcaaatataaataaaccataaaaataagcacattttactttagaagatgaaaaattcaatagaaaaaaaagtagagcagagtaagggagattgagagggccatgcagaagttggggtgagttgcagatctaaatagattgatcgtggtaggggttgttgaaaaggtaggatttcagcaatgactcaagagggtaaaggtttgccagtagattatgaggaggaagagacttccatgcaaaagaaacagctagagcgaggactttgagatgtgggaatgaaaatgccttttatgtttaaaaacagaaagaggctagtgtgatggagcacagtgaaaatggtagaagatgaaatcaaaggcaaggaggcgatgatccagga

SEQ ID NO: 870249 - DNA, 669 bp, Homo sapiens
tctaactaaggtaattgatgaaggtggctgaactaaagaacaaattttcattgtagataaaacagccttctactgaaagaaggttctagtctgtggtatggtggctcagacctgtaatcccagcactttgggaggcaggggtgggaggatcgcttgaagccaggagtttgagacctgtctgggcaacaaagtgagaccctgtctctgtgaaaawtacaaaagtttctatggaaagtcaaagagccatgaatgtctaagacgatcttaaaatgctaaataaagtttgaggagtcatttctcttctgtaagttaatataaagttaatacgattgagacagtgtagaatttaggcagacatacacaaatataccaaaggcacagaatagacagttcagaaacagaccacacacataaggataattaatttataaaaaattgacactgcagggcagtgaagaatgattgtacttgcagtaaactgtactacatcaattgaatatcaacatgggaaataaagttatcatttaatctctatctcacattctttagtcagagttctccaaagaaatagaactaataggagatatatgtatacacacatatgcatgtttatacatatatatttataaatttattataagaattggttaatacagttaaggaggctga

SEQ ID NO: 870250 - DNA, 669 bp, Homo sapiens
tctaactaaggtaattgatgaaggtggctgaactaaagaacaaattttcattgtagataaaacagccttctactgaaagaaggttctagtctgtggtatggtggctcagacctgtaatcccagcactttgggaggcaggggtgggaggatcgcttgaagccaggagtttgagacctgtctgggcaacaaagtgagaccctgtctctgtgaaaaatacaaaagtttctatggaaagtcaaagagccatgaatgtctaagacgatcttaaaatgctaaataaagtttgaggagtcatttctcttctgtaagttaatataaagttaatacgattgagacagtgtagaatttaggcagacatacacaaatataccaaaggcacagaatagacagttcagaaacagaccacacacataaggataattaatttataaaaaattgacactgcagggcagtgaagaatgattgtacttkcagtaaactgtactacatcaattgaatatcaacatgggaaataaagttatcatttaatctctatctcacattctttagtcagagttctccaaagaaatagaactaataggagatatatgtatacacacatatgcatgtttatacatatatatttataaatttattataagaattggttaatacagttaaggaggctga

SEQ ID NO: 870251 - DNA, 640 bp, Homo sapiens
ctgttgcttagtcacaacttatttattcccacttgaagtcttctatttcctatttctcctggtaatgctctattctcagatctttgaacagtgggcactttcttgtcacttaagtctcaactcagatgttacctttttggagaatccttccctgacctcccctttcaagttgtcctccagtaactctctgttactttcacttgttttatttttcttctctcagcctattatgatcatttatttgtttatttgctcattctcccctccatcattttggtggatatcagcaactgaaaaagacattattataatcactgacttaatgacacactgttatcattggtcctgaagcatatctacttttatcttgcagttgttagagtaggcttcatgagaacaaagatttctcttacttgctgctgttcaccactgttttctcaacacttagcacagtgcaacagtgcctgtttagyactcggtaaaattttgtggaataatgaaagaactaatgaatgcatgcctttcatagtacaggttggtctatgaggaaaatgagacttaaagaggtcaaatgatttacccaaggctattagttaagaaagagatgaccttagaaaaatccagatttcctggcagtcta

SEQ ID NO: 870252 - DNA, 605 bp, Homo sapiens
taatttggtttgattttccaggctcatagattttccttatctcagatctgactttggacttttgagttagtgctggactgagttaagactttgggggaattattgggaaggcataattgtgttttgcaatgtgagaaggacatgatatttgggaggggtcggggtggaataatatagcttgggtattggtccccacccaaatctcatgttgaaatgtaattctcaatgttggatgtgaggcctggtgggaggtgtttgggtcatgtgkgtggatttgtcatggatagctttggccattctcttggtgataaatgagctctcactttgagttcacgtgagatctggtcattaaaatatgtgtggcacctcctcccactatctcttcctccttctctggccatatgatgtgcttgctttcacttcacattcttccatgattttaagttttccaaggcctccgcagaagcagatgctgctatgcttactgcacagcccgcagacccttaagccaattaaacctcttttttaaaaaaggtaaaataaatagcccagtctcaggtattttttttaaagcaatgcaagcatggcctaacacaccccctcat

SEQ ID NO: 870253 - DNA, 641 bp, Homo sapiens
taaattgagttatttgcctctttattgttgagttgtaagagttctttatatgttctggataaaagctttttatcaaatacataatttggaaatattttctcctctcttttcactttcttgatgttatcctcggatgcacacayttttacaattttgaggaagcacactttattttttctttaggtctatgattcattttgaattaatttttgtggatggtgtgaggtaggggtttatctttattcatttacatatgaatatccagttgttccagcacctttagttgaaaagattattattcttttcccattttattgtcttgtcattggtgttgaaaatgaaaggatcataaatgtgaaggtttaccctcaattctattctattgatctggatgtctatttatgtcaatatttgcactgtgtagctttgtagtaagttttttaaatcagaaagtgtgaatcctctaatgttgcatttttttttcaagatggttttggttgtttgatgtctcttgcatttctatactaattttagggttattatatgaaaagccagctgggattttttatagacatttatgtttagtgtgtagatcaatttgcggagtattgcacgttaacaatattgtcttctaatccatg

SEQ ID NO: 870254 - DNA, 622 bp, Homo sapiens
tatctgcaagcatggtaccaggaagttttattactgggtgggatcattccacttaatataggtcttgggaaaatttagatgtaaatatagttgctgggagagagatatagaaacttctctgaatcagtttttatggataatgttctagtagaatgagaatgctgtattatatgactttctatttggattggtaaagaggaccaaatcaagraagaacatttaagtttacatatattcattactgagaacacacagggaaattcctatatctgtgtgcataaattttctttagaccaatgcatactaaatttaatctaaatgattaaaaatatgaaatttatcagtagtattcactataattaaagtaagaacttgaactaatacctaaccacaccaaatattttataatacaaattattttgaagatagtagtagattattttccactctgctgtctgtaccccttcttccaaaggtcagcatgttgaaatatacataaatgaaatccacttttgaataaattggtaatagttgtattttattgagcagttactatgtgcaagcctccatttaattccttaagtgtattttcttattaaaacctcacatccatgttaaggaa

SEQ ID NO: 870255 - DNA, 622 bp, Homo sapiens
tatctgcaagcatggtaccaggaagttttattactgggtgggatcattccacttaatataggtcttgggaaaatttagatgtaaatatagttgctgggagagagatatagaaacttctctgaatcagtttttatggataatgttctagtagaatgagaatgctgtattatatgactttctatttggattggtaaagaggaccaaatcaaggaagaacatttaagtttacatatattcattactgagaacacacagggaaattcctatatctgtgtgcataaattttctttagaccaatgcatactaaatttaatctaaatgattaaaaatatgaaatttatcagtagtattcactataattaaagtaagaacttgaactaatacctaaccacaccaaatattttatartacaaattattttgaagatagtagtagattattttccactctgctgtctgtaccccttcttccaaaggtcagcatgttgaaatatacataaatgaaatccacttttgaataaattggtaatagttgtattttattgagcagttactatgtgcaagcctccatttaattccttaagtgtattttcttattaaaacctcacatccatgttaaggaa

SEQ ID NO: 870256 - DNA, 520 bp, Homo sapiens
cttagtttgctcactctgaaggcaagataagattccaagcatttcttaaatagttggtataatttattgtcattgcagtgcagtcagatttaaacccttgtggaccctgatgccacaaagcagttattcagagttcaaaggggtaggcctacacatgcgattaagttatcaccaatggagctacactaacccttgctgtgccctggctgatcctggtgttccaaagattatgtgattctcaaaagccttcacatacctattgtgcatattttgttgcataaatcatagctgtcagagwcaaatacatattcaatgaattacttcccaccgataacccccaaataatttcaaaatcaaaaatcatgtttcctcatgaatacaaatttttcttgacaaacctccagtgccaaatgtggtttccatttgctgtttttggatttatttgactgtgccaaagttcaggtgtgccagctctttgtaataagccatttggatgaaagcttggccagctcaaaggatc

SEQ ID NO: 870257 - DNA, 552 bp, Homo sapiens
gcggttattcctctcagcaatgtttctggttttgtgtgaagtaacatgttaccaacagataaggttttattttctaaatgtttaaatagaaccttttacatatcttaatcttttattattttatctttctttcactttattttttaaacctcattcccaaggttctaatatatgtatttacttagaaaacacactgctttcacaattattttatttcattttttaaaactgttgttttcttttcaaatgactttgcccaaactaacctggtgattctttgattaacatgataattcactgtacagcarttgaaattatataatttatgtaattagcctgtcatactggctatattttctttgtttccttcctaaagcagctgaaaataaaattatcttcctgcctttgcctacacatctagcagatgtccatatcatccatccaaatgcttctacttgtgagtatacaactaatttggatccaattaatgcacaagtaattaaagttgatttttgtatgttattataattttcctcacactgtgcttgtgtt

SEQ ID NO: 870258 - DNA, 622 bp, Homo sapiens
ttatttgatttttttttctctttacattctggaagattcccatgcctttatcacctacttcaccaaagcatgattcttatatgtaaatacagcttaagtatgtgaatgattcccaaacagactgtacattgctgggagaaaaaattaagagatctaaacaaaagaggttgtattcacattatggaatttatagccaagatatatgttcttttaaacttcacactccctactatttatcatctcctccccaaaaacccaaagatctctttcattaaaaggcaataaaaatgtagggaaagcacctaaaaatagctctcatgtttcttttgactggctttcccaaagatgtataaactaagaacatataagacaaatgttttctactgaaacttcacatacaaaaatcctgcacatttatcacaaatacgggaaaaatctctaagtargaatggataagagcaaagtcagttaagaattatctaccatacaactccttttctagcattttggaggaaatacaggaaatgttttatctaatattctatataattataataaaattttggaatgttccaacgtattcaaaaaattaacataattgatttcatatttgaagccagaa

SEQ ID NO: 870259 - DNA, 605 bp, Homo sapiens
tcttgatttcctgcacagaacatagcagaagaccttgcatacaggaaatgaccattgcatgctaagctgcagaaggccttccacattcatccatcctcttcctctcacctccatctcctcttcccctaggataatgaggcctgattggagtcaaacacaaagtggacttttagaaatatcagttgggcagccatgacttgctttaaatagaaaaatagaagtagagattagaaataatgctaaatgagagtattttctctcactttcattaccttcttctcttttttctgctcatgctgtgactgaaaaacagagccrggagagtgctgtgctaggtgcctactaagaaggccaagagggagacaaaaatgaagccgatgaaaagcctgggctagtgggaaagagaggttctagggtccatgcatgctctaggccaatcaatgccaaggcgagtgatcagcagccagtgtgggtaaagccttggctagtgactaagggtagttgcatacacacagacaggcattcacaaaacaacaataacaactgcaaaccaaccctgggcccccgcaggagtggctgtagttagtatcaatcctcgcttgatg

SEQ ID NO: 870260 - DNA, 628 bp, Homo sapiens
gtagatcctggtcccagccctattttttgaaatatgattaacaataagacaaatctatgttcaagtctcctcctattttatttcatatttatcaaagtcatgcaagcacatagtttaaaaaataaattttacattgaaaaactgatatctcctctactttcctccttacctgtagtcctatcctccaaaggtaactacttaaacattgctttaagctgatttttctggcacttatctttccatttctaaataatatgtttctgttttttaaaaaaacatattttcaatatcatcatttgacattctgctatggtagatgaagatttaactgttttccacttcccactttcttgtcccatcctttctcctaatwtaagagatcacatttttgttgttgttgaatcagtaatcagcatttccactagtgtgatcattaaatattgttcctcggagtggcagtgtattatatttccttttttaagtataactttttgttttttcttgaatcaataaaacccaattttccatttgtattgtttcttatgttcttttccttagtttttgctcccaaatgctccattaattctccacatagctacaagttttattttccccaaagccctatcac

SEQ ID NO: 870261 - DNA, 634 bp, Homo sapiens
acaggggtttctaatgtgaaaggccttgtaaaccataaagcactatataaatattataaaaattagaatgtatgttttcttaccaaataataaaggcagtggcccatcttgaaatgtacatgacatgcggcaccaacccagcacctcctacagtaataggaggactagtaatgtcagaatggaagtggcaaaatgatcccagaagaaaaatgaacataggccagtgtagcaggtttgctcttttgcttgcaaatggcagaaatctaactcacagggactttktgatgctctgattcaccaggactgggtcaaatattcactcctgaagtaaggggtagaatcagcttcaccagaactacataggttttgtgtttttttctagatggggttctccccctgtttcccaggctggcttcaaactcctggggtctagtgatcctcctaccttggcctctcaagtcgctggggctacaagcatgtgcaaccatgctaagcagaactacatagattgacagtagaatagccatgctttcccaaggaagattggggtgcccttactgaaaaaaggaggaatggaagaccctctaaagatccttccatttcatagagggtccttagaatcaacagtagtatc

SEQ ID NO: 870262 - DNA, 626 bp, Homo sapiens
atcttatttctctcccgacaatttcctgcaactctccaaagattactcttacattgaaagagatccttgaatggttaattgtccataatcacccggctagaaagaggcagactgaggattgtatatccagatacacatgactaaaaagcaaaactagcaaatcaccccccttcattacacttgccgtttcatgttcaggacttttttctccccaggtccttaccctggcatgcttcccccaaattggaaacaataggactatctattggaagagatagggcttttcattgaaagagatactagagatacagtgtctatcctcctcattyatggctaaaggcgcaggcaggagagaggtgaaatctcatgaggactagaagtcattatatctttccaagttcagggcaattcattcctcattgtgagcttcggattagtttatattaaaaaaatagtaaaatgtttcaacgacacagtatgaacctcatagaatgtttaccatatgaatgtgtgtatagttttaaaagccagaaaagccattaagcaacttaaaattctggcctccaattttgacaatttgtctcttgggtactgaccatgtctctgtgcatacagcagaattcaga

SEQ ID NO: 870263 - DNA, 575 bp, Homo sapiens
ggatcattatcttttttaaagaattagcttgtagggggaaaaatgcctttgtagttttcctcgaggttaagtaagatgagggttacagctgtcatgagaccaaaacaaaggtaaaagatatagggcacaggggtctacattttaaagaggaacagagaaggcatgacgaaatatcaagtggttaataacaaccaataagacaataacacaggccttgtgtcttgtacaaaccacaaaatgatgtagcgaatggagactttatattttttagcctaaaatatttggataatttatgtaaagtcttgttttgatctattttgttttgttgcttaaattatctgtataattgataaaattmttagctcagcttttgtgggaagatgcagtccataagctgagacagaaatgctaatttgggacactaaattagaaataaaagttccaagttgaaaaatattgaagtaacatgcaacattaagaagtttatattttggcagagggacctggttgtaatctgttttaaaataaatagattgtgtacagctgtccctatatccctggcgaaatgatgattt

SEQ ID NO: 870264 - DNA, 640 bp, Homo sapiens
tttattcaggctctgtccatggggcataaatctctcctatacattttaagtatttttcaatgtctttacttttatatagtttatttcttgtccacaacaactaacccccctacttaattttttcccatttgcagcatttttggcctcctctctaaatttgtcataactccattttactttcactttgagattaagcttgaagcatattactatgtaaaatcccatccaagaaagtgtgtattgctgagctgtctacaagatgtgcttaaattgtggaatgctgagcattttattatrtacaaatggaaacattttagaattacacgcaaattaaaatattagcgcatctggagtccctttgtgggcaagtgaagagaggctgcagtttaaatctgtgcggcactggtggcaaatgtgatgttctatgaacagctcttaaaattgctgtctgtaatattattaacattttgtatgattcttggatttctcttaatgatatcacatacttttgtgttttcatatggcctcataaaatttgatttcatttgatttctgttttatttagcattttaaaaattaatttaaaatggaagctattttatccttattaaccccttttacatttttacatgttctaaag

SEQ ID NO: 870265 - DNA, 640 bp, Homo sapiens
tttattcaggctctgtccatggggcataaatctctcctatacattttaagtatttttcaatgtctttacttttatatagtttatttcttgtccacaacaactaacccccctacttaattttttcccatttgcagcatttttggcctcctctctaaatttgtcataactccattttactttcactttgagattaagcttgaagcatattactatgtaaaatcccatccaagaaagtgtgtattgctgagctgtctacaagatgtgcttaaattgtggaatgctgagcattttattatgtacaaatggaaacattttagaattacacgcaaattaaaatattagcgcatctggagtccctttgtgggcaagtgaagagaggctgcagtttaaatctgtgmggcactggtggcaaatgtgatgttctatgaacagctcttaaaattgctgtctgtaatattattaacattttgtatgattcttggatttctcttaatgatatcacatacttttgtgttttcatatggcctcataaaatttgatttcatttgatttctgttttatttagcattttaaaaattaatttaaaatggaagctattttatccttattaaccccttttacatttttacatgttctaaag

SEQ ID NO: 870266 - DNA, 632 bp, Homo sapiens
ttcacgttcactgcaatactccttcaatccatccagttcctgatcttagatcctaaattagcagttttaactgtgatttgagaatcaataaggagaaagacaaatgcattgcaagtgaaatttgggttcagttgtagttgaagtggtagaattctataataaaaaattatcctcaggtcactcacaccttgggttcaaatgcaaatttaaatgatagaaatgacttacatttagtaccttatgaggttttaattttagccagtcctttttttttttgagacagagtttcactctttttgcccagrctggagggcaatggtgcaatctcggctctctgcagcttccgcctcctgggttaagtattctcctgcctcagcctcctgagcagctggaattacaggcacgcaacaccatgcctggctattttttttttgtattttcagtagagacagggtttcaccaagtagtcaggctggtcttgaactcctgacttccggtgatccgcccacgtcagcctcccaaagtcctgagattacaggcgtgagccaccgcgccctagccagtcttttcttgttaaactaccatattatctcattttctaatatgtactagttttctctcatacaaagttc

SEQ ID NO: 870267 - DNA, 632 bp, Homo sapiens
ttcacgttcactgcaatactccttcaatccatccagttcctgatcttagatcctaaattagcagttttaactgtgatttgagaatcaataaggagaaagacaaatgcattgcaagtgaaatttgggttcagttgtagttgaagtggtagaattctataataaaaaattatcctcaggtcactcacaccttgggttcaaatgcaaatttaaatgatagaaatgacttacatttagtaccttatgaggttttaattttagccagtcctttttttttttgagacagagtttcactctttttgcccagactggagggcaatggtgcaatctcggctctctgcagcttccgcctcctgggttaagtattctcctgcctcagcctcctgagcagctggaattacaggcacgcaacaccatgcctggctattttttttttgtattttcagtagagacagggtttcaccaagtagtcaggctggtcttgaactcctgacttccrgtgatccgcccacgtcagcctcccaaagtcctgagattacaggcgtgagccaccgcgccctagccagtcttttcttgttaaactaccatattatctcattttctaatatgtactagttttctctcatacaaagttc

SEQ ID NO: 870268 - DNA, 592 bp, Homo sapiens
tatatatcagccataatatgtgactcatttaggtgctgttgaaattgatggcctattgtgctgtttttcattatttggaggactcggcagctcagtgaagctccattcttttcagtgatttcaaatatttcttggcatgtctctgcaaaactcatttttayggttctatcaggccctggtgactttttgacccttctcactacctctgattgtaaaattaatgagcaattacttttgatcattggattcttaacaggcactgaaagggaaaggtgtctattttttcatgtttgggatcttgattttctctcaatgaaaattgttgattatcttcaaccataccaaccatagatgcttatactttgtttcattcagaaaacaatttttcatgatgtcatgatttggaggagtagcatttcttaaaaagggtattgtatggctaaggtttccaaagtttctattccttctcttaattactccattcaaggctgttttttttcctacctgaatctaggccaggaggtattgtggtcagttttacagagcactagatgagtgttgcccaatgtagctgtgtgcggtgatgaaaatg

SEQ ID NO: 870269 - DNA, 615 bp, Homo sapiens
aaggctatagaagagtaaacatatccgaaaatactatttaacaacattagagcatttcaattagcaggagacatatttgtcatctccatgacatacgaatttccattttggctattagcttaatagtatccaaaagaatagcaatgtttgcaattcaagaaaaagcccatactaggtaccaaaacagtttgaaaacaaggtactaatatctaacttctgtaatgcaataaaacactgaaatctgacacagattataaatttaaatggtgtttaaaatcaatttctttgtaggaaaactacacttaatataaactctctgatgacatttccaacctttctttgtggtatctctgaaaatttatctcatcacctgatgcartaccgtcaaaccctacccaacacttacgctgagcagtttctaaattaaattgctattctccaggcgctttcccagaaacgcaagctcacgtcagatcacactcacaatgctacaggagggaaatgttggtactgtattttaataggccaggggaagcacgtgctcctagagaccagtcggcccctgcgataataactgcacagctttgtttcatttgaaaacatacatctgtacac

SEQ ID NO: 870270 - DNA, 620 bp, Homo sapiens
caacttctgttaacttaagctgggttctgtaaatctgtctaaaaaaatcagggcagagtgctttgagatgttacaaatatatctagatatcaaacattgagctgcacaaattgtatccactttggaaactctaagtttgtatttatgtccataatatattttagttctgatgtttttaaaatgatgaagcaagtcttactctttttttcaccctgccttttccaatccttgctgaaatatctatgaaagagacttatgagcccaagacaaataaaatgagaaattctggaggttgtcacgatttaaaaacactttgtaaggtgatttgaggagaaaaaaatacaaaagtcaggcaaaatttcttrctaactacctgaaatttgtaactttattctagtatagtttaaaaacttcaatacataaaaatgttataaagctttgtatctgttatttcacccttgcagagctgttgcagagatcttaccttctcatctttttttagaaatagttgaaatgtcagaaaaatctggattaaaagaaaaggataaatcccacctctttagtaattcttcctatttataaattgcttttgcgatcaaagacagaaattgaagctcttc

SEQ ID NO: 870271 - DNA, 608 bp, Homo sapiens
aatagcaatcattaaaaaggaaacaaaagatgctggagaggatgtgaagaaataggaacacttttacactcttggtgggagtgtaaattagttcaaccattgtggaagacagtgtggcgattcctcatggatctagaagcagaaataccatttgacccagcgatcccattactggatatacacctaaaggattataaatcattctactataaagacacatacacatgtatgtttattgcagcactattcacaatagcaaagacttgsaactaaccctaaaacccatcagtgatagactggataaagaaaatgtggcacatatacaccatggaatactatgcagccataaaaaggatgagttcatgtcttttgcagggagatggatgaagctgggaaccatcattctcagccaactaacacaagaacagaaaaccaaatgctgcatgttctcactcaaaagtaggagttgaacaatgagaacacatggagtcagggaggagaacgtcacacaccagggcctgttgggggatgggtggcgagggcagggatattaggagacatacctaatgtagatgatgggttgatgtgtgcagcaaaccatcaagtct

SEQ ID NO: 870272 - DNA, 611 bp, Homo sapiens
gacagttgacttggacttggtgtgatttttaccgtggtagccaataatttaaacattggtaaactaaatggtcaagtctcagctttcattaaatcaatcaacaacatttggcaagttgataactacattacctttgaaacggttcattaacttagaatttccactgcttcatcagctaatcattctcctcctttcctgttcctcttcattcccaagctttcaaccttgacatatccaagaaattcctttcttttcttactrtgcttactacttgagtaatcttatcatgccccatagcttaaaatactacctgtgtgctcagagtcatacaggtagtatttatatgtccgtttttctaaatggtagatgactataactacttagaaacattttatggaggtgtctactaggcatttcaaccttaaaatattgatgttggaactcctgatctttccttctaaatcctcttctactacccatacaaacacaataaacacaataactccaaccttccaattcatgagtccaaaaccaaaaataaaacttcagattaatatgtgatttattgcacatttagataaccagcaaattttagacactaaactttgaaa

SEQ ID NO: 870273 - DNA, 589 bp, Homo sapiens
ttaaattcttcaaatatttctattggcattcacttagatctctaaaataaatactatgttttaacaaacttagctatcacaaagtgaaatttgctgtaagcttcattacttttcattttattgactccaggtgagaacaacaacaaaaaaagaactagaggtgaaagtatacctatcaatttgttttgctgctataaaaattaccataaacatatgggcttaagcaaaataaatattatcttagagtttttcaggtaagaagccccaaatgggtctcacaggactaaaatcaacaggtcactttttttttctgcctattgtaatacrctaagacatctccgtgagtggaaaatagacacaaggttgagtttcaaaatgctgccacctctaactgcctgctacaagcatcagtgaagtcctagatgtatggtgaagatgctaaagcaaatattttattaatctgttctcagactgctataaggacatacgtgagaatgggtaactcataaaggaaagaggtttaatggactcacagttctacatggctgggaaggattcacaatcatggcagaagatgaaggaggaggaa

SEQ ID NO: 870274 - DNA, 586 bp, Homo sapiens
tttataaggacaggaaaaagcatgaattgagatgctttttctaccctagatgtccattaaattgattttaaaacaggcaatggcattattatctttttattcttgagtaatacccatttaaggaaaacacaggacaaagggtaaaaaaaaatcattttttctttatttatttaagaaaaaatatggcctatccctaacagtttataataccttctgtgtgaaacacctaatggacttaataaggatcaatcaaagaaatgcaatgaattcccttaaaaaactactgtgcaatatatctcctaaaagamaatatataagaataaatcctttaatattcaaattaaaaataatgcaaatttcattggacatattggagtatggctaacttggaggaatatcttagcattattatcttggaaaaggttacgaagataatatagattcatatggttttaatttctgcatctatgtcatggtaaataaatttttgcatctatgtcattagtaaataaattaagtctcataataatatgaacatattataaaactgctaaccagttagaagcatctcagaatacacacccag

SEQ ID NO: 870275 - DNA, 660 bp, Homo sapiens
aaagaaatgccttaagagagtatatgaatatgtgaaaatgcatttacatcttcaataaaagaatcgtcatatgcataactacttaatgtcatcaagaaagggaaaaaagttctagtagtatactttgcatgaataattgaattaagctttttattcagcatctcttcctcttgtcttttagaattactggttcaggtgcagagacttctccagaaaygggttcatcaacttttgggcagcttgctcactccctcatctaccacatctctgtgctcaaacacaaataagggaaggagagaagctacatcatctatgttaggattgagaggttgctgtgggagatgggaggcagtgagtgagctcagcaatgctgcaacagtttatcaagtgttggcctcctctttctgcattttctctactcacctttttctctcaccaattgtctgtttaggcacgggaggaagttaaaccctagagaagtagctcatccattgggtgaatttacagaggatgaaaaggaagcactatgacttttaaaattattctttcaatgtgaggaatcacttctgtctgtttatgcttctgaaactactaaaaggttttactctgggaaaactctctagtgaatttccactgacaactttctctttagtaaagacc

SEQ ID NO: 870276 - DNA, 658 bp, Homo sapiens
cccgttaaatccctggaattagaatgtgctttgttgtcattcccgtggatgtacgttttggcttttaaaaagcatgcaaggcatggtaaccatgtggaacataaaagacaattttgctgtatatgaatgcatatttaaatgaaggcaatatctgtctccaactagaacattcctgtgtcatgctccaatagccttctcatgtagaaagactgaacttttcttgttttatattttaagatattattcataatagtttctaggagaattaagaaatatatttcaaaaagcacaatgttgtcctgtaggatttataagcaatgaagtcaytttgttatttcttcaacagttttctttagcctgagttaactcagaatattttcaagctgttgatgaagatgtttagtactgtagacagggtatgtgcataggagtagttgggaagatgctagacaaaggatataaaatttcagttagacaggaggaataggttcaagagatcgatcgtacaccatggtgactacagtgaataacaaaaataataagtatgtgaggtatgatgtaaattactttactacaaaaataataagtatgtgaggtatgatgtaaattagctcaactgagccattccacaatgtatacatatttcaaaacataatgt

SEQ ID NO: 870277 - DNA, 624 bp, Homo sapiens
aggtggccctctgggacagagcttccagaggaaggagcaggcagcaatctttgctgttctgcagcctccacttgtgatactctggcaaacagggtctggagtggacctccagcaaactccagcagacctgcagaagaggggcctcactgttagaaggaaaactaacaaacaagaagcagtagcattgacatcaacaaaaagggcgaccactcaaaaaccccatccaaagttcaccaacatcgaagaccaaaggtagacaaatccataaagatgaggaaaaaacagtgcaaaaagggctgaaaaaccagaatgcctcttctcctccaaagtatcacaactcctcgccagcaaggraacaaaactggatggagaatgagtttgatgaatttacagaagtaggctttcagaaggtgggtaataaaaaactcctccaagctaaaggagcatgttctaacccaatgcaaggaagctaagaatattgataaaaagttacagcaattgctaactagaataaccagtttagagaagaacagaaatgatctaatggagctgaaaaacacagcatgagaacttcctgaagcatacacaagtatcaatagccgaactgacaagcagaagaaagga

SEQ ID NO: 870278 - DNA, 589 bp, Homo sapiens
ataattgattcagacgattttcaaaaatgaaggctaaaataattatgaaatgtttggtggaactaagacatacctatgtgctaaagtttaattggtaattatttataaaaaatgctaatttttgacaactaattaaatttttaatggcccacaggaaatttgtattttccttactttattgaatcagtttggatatgcaaccatatttttctagaaacaggtctttgtggccgggcacactggctcatgcctgtaatcctagcactttgggaggccaaggtgggcagatcacctaaggttgggagtttgagaccagcctggccaacatggagaaaccccatctctactaaaaatacaaaaattagccaggcatggtgcacatgcctgtaatcccagttacatgggaggctgaggcaggagaatcrcttgaatgcaggaggccaacgttgcagtgagctgagatcacgccattgcactccagcctggggaacaaaagcaaaattccatctcaaaaaaaaaaaaaagaaagaaatatgtctttgtatgtctttgtttatttcacacacacaaataatatatatagaattat

SEQ ID NO: 870279 - DNA, 577 bp, Homo sapiens
aaataaaatttaaaaattaagcattatgttgaaggttgatacatttaaataagttacttttttcctactagctttccattacaagtcaaaagtctttgaacttacggtttggctccatagcctgaaggttgtgaatgtttttccagaaggttttcaaaatttttttaatgcctgccttttttactggattcagttcaaaatttctaatgagaagcatactttaaatagccttgatgccacatttttaatatgttattttactttattgctcttcccaactgagaacacttataatcaacatatttttaatagttttatattggtaatatcttgttgattctttgtttcctgttataatgggctttccaggagtaaacaaatttgcagatttcccaaataaacacatccgtgttgggtagtgcggcatgaggaargttcttgaaagtatgtaatatagtacaatataaatgccttctgcaacacccctttgttgcatagaaaatgaggaagattgccgatgagtttattttagggagaaaactaccagtttgaaataaaacacaaatatgttattatg

SEQ ID NO: 870280 - DNA, 658 bp, Homo sapiens
actgatccattccagaagactttgcccatcttcctcatctgggaatgacaagaggcagggctagggtatggagagcccatgcaggcccctagcctggttcccctcccccaggagttttgtggaaatgattctggaaaggttggagccaagatgtgcccctgcctgatccacttggcctcctcccgagggtgcacggggaagaaacagacacttccctctgagccactgaagcatctactcctccaaaggaccaaccagagaggggcagagctgctggccacccccagggtttcctcccaaaactcrgagcttgtccttctcccaggacgggagccaggcagctttattgtccggtgggagacgacacttttccaggagggctccttcctgcactctcctgaaggcgaacctaaccagaatccaagccaatcctaaagccaggacatatgaaaagtccctatgtttcaacatttgcatagaatataaacttaaaggtgaaattttgcccatgtaaagtcctgggctgtctacccaggtggagggcttggtgtccttgttgatgtcattatttttcaagcaacatcatagactctgcaatgcagcaatagagaatccactttgaatcccaatgctacatgagcttcgttctttttttcaa

SEQ ID NO: 870281 - DNA, 638 bp, Homo sapiens
aagtcatgcaaaaataaaaatattttgagaagaatacttgatcatcttgaaaatagcattagttttataggacaatattattgaagcatgtaaaaaaaacagtgagttttaattaacttttagaagattctactcctactccttggcttatcaatagtgcattgcaaggttcacttggctcactataatttttattttaatgatgttgttttccagggctgagtttagactgtgatttccttagatttatgcatgtaacttaatctaaaactgaacctgacaattttttctaactgattgttccatttaactgtattctgtctctttggaaartgtgtgtcctcatattgcagaaatgcctcttaaatttgatttgaagaaggagtcaattttttttttggggggtgggggaacggaatctcactgtcacccaggctggagtgcagtggcgcgatctcagctcactgcaacctgagaggagtcaactttacagaggtacatacatgtcttctacattcttttaaagaatgtagctaattaatctgatttttaaagactaagttaaatattaacaaggaattcagggatctttgcctcattcagactgtagttacaaggacagagtactcattagagat

SEQ ID NO: 870282 - DNA, 638 bp, Homo sapiens
aagtcatgcaaaaataaaaatattttgagaagaatacttgatcatcttgaaaatagcattagttttataggacaatattattgaagcatgtaaaaaaaacagtgagttttaattaacttttagaagattctactcctactccttggcttatcaatagtgcattgcaaggttcacttggctcactataatttttattttaatgatgttgttttccagggctgagtttagactgtgatttccttagatttatgcatgtaacttaatctaaaactgaacctgacaattttttctaactgattgttccatttaactgtattctgtctctttggaaagtgtgtgtcctcatattgcagaaatgcctcttaaatttgatttgaagaaggagtcaattttttttttggggggtgggggracggaatctcactgtcacccaggctggagtgcagtggcgcgatctcagctcactgcaacctgagaggagtcaactttacagaggtacatacatgtcttctacattcttttaaagaatgtagctaattaatctgatttttaaagactaagttaaatattaacaaggaattcagggatctttgcctcattcagactgtagttacaaggacagagtactcattagagat

SEQ ID NO: 870283 - DNA, 640 bp, Homo sapiens
caatatatgatgttgttcctcccttaaccatagtatagagttccaggaacaaaatattagaaaggaaaatgactttattcactcccactatagtagtttttgtttgctcccactatagtagtttgctagagctgtcataacaaagtaccacaactgagtgacttaaacaggagaaatktattgtctcacagttctgagagctagaagttcaagatcaaagtgtcatcagagttgattccttctgagacttctaagggagtgatgtggtttagctctgcgtccccacctaaatctcatgctgaattgtgagcccaagtgttggaggtgggacctggtgggaggtgattggatcatgggggtggcttctaatagtttagcaccattcccctagtgctgtctcatgagtgagttctcacaagatctggctgtgtaggttgtacatgtctaagaatataacaatttccttgagattttccagtgtactggcaagtagttgctcatagtagctgctaatgagctattgaatatctgcagtatcagtcgtaatgtctctttttttatgtctgattttacttatttggatttccttctttttttctcagtttctgtcactgaagttttatcgactttgtttaacttt

SEQ ID NO: 870284 - DNA, 647 bp, Homo sapiens
aactgtacattcgtgtgttaagataattatttatatcttagggttgtgaagatcaaatgagataattcatataaatatgatagaaatagaatttgatcaatgtgaaatcatcatgatcatctttctcgagctgcaaattatttgctgttaccaccgtctcctcaaacccctctccttctacactaatcttttctgggatcatcttaccattatttttaattatttgttcatttctgaatttggagaacaaatctgtacttggygggttagtggtaagtatgtcagctttgagcagagattgaagtggcactgatcatccaaaccacctggttatcttctgttagtctcttattatttcctgcgtatttgtctgctcagaagattgtaactcactaagaataagggccaacatctcactcagatcccctataagccaagtctcttagtcaggaccagtaaatacttgtgtttggagagttacggagtaatgaccagggctttaggaagatggtgctatttgcagggatggctgaaagcctaatgagatggaaagtggatgaaaaccttgaggctcatgaccagctcacaagcttgggggtcataatacataaaggaataagaacttctgtaatcctccaacccctgca

SEQ ID NO: 870285 - DNA, 663 bp, Homo sapiens
ggaaaccctataagccagaagagattgggggccaatattcaacgttcttgaagaaaataatttccagcctagaacttcatatctggtgaaactaagcttcataagtgaaagagaaataagatcctttacagacaagcaaatcctgagggaatttgtcaccctcaggactgccttgtaagagctcctgaaagaatcactgaaaattgaaagaaaaaattgttaccagccactaaaaaaccacactgaaatacacagaccagtgacactatgaagcaaccacatacacaattctgcaaaatgaccagccagcatcatgatgataggatcaaattcacccataacaatactaatcttaaatgtaaatgggyttaatgccccaattaaaagacacagaaaggcaagctggataaatggccaagacccatcactatgctgtcttcaaaagacccatctcacgtgcaaagacacacatagacttaaaataaagggatggaggaaaatttaccaagcaaatagaaatcagagaagaaggggttgcaatcctagtttctgacaaaacagactttaaaccaaaaagatcacaaaagacaaagaagggcattacataattgtaaagggttcaattaagcaagaacagctaactatactaaaatatatatgcac

SEQ ID NO: 870286 - DNA, 618 bp, Homo sapiens
attacattcttaatgatgaaaattaagtattacatgaaaggttaggaatactagttttttttctattattctctctttatagcagtaaaatgcagataggaagaaaaataaattttaaaattatttattgagaaattccgcgtttgaaaaacactggcagtttcctaatttcaaatctcccccttcctttctcaaaaaactataaaaccaataaagaaaataaataaaacacaacataggacccacctctttgcatttctaggagacagagaattatactggcatcagatttctcaaatataacatacaaaggaagccaacagcagagcaacatattcaagaaacttaagkaaagaaaatgcaaacaaaagtgattataccatgccaagctatccttcaagtgttaaggccatagaaaacaattttgaatgtgtaagaactcagagaatattgtacacatatacctttcttcagacattcactagagcagaagttagcaaactatggcccatgggtcaaatccagcctgccacctgtttttgtgaataaaattttgttgaaacacaaccatgctcattcattatgcattgtctatgactgattttgtgttacacagca

SEQ ID NO: 870287 - DNA, 553 bp, Homo sapiens
atatccaaaatagccagtacaatagtaaggataaacaatatggtaacgaatccttagagatatgcaaatgtaaaccttaatgataaaccaactaacactcattttaatgactattatgaaacacacacacaggcatacacacaacagaaaataacaaatattggtaataatgtggtgaaacccttttggactgctgaaaagaatgtaaaacagtgaagaccctatgaaaaccrtatggccaatcctcaaataatgtaacatagaattactatatattaaagcacttttattcctcagtatatatccaaaaggatttaaagcaatgttcaaataaatatttgcacatttatgtttaggacagcattatttacattagccaaaaaacggaagcaaggcaagtgttcattcatagatgaatgaatacacaaaatgtggtataaacataaaagagaatacttgttaatcctaaaaagacaggaaattctgacacataccacaacatagatgaaccttaaatacagtgtgtaagacttagtaaaataagccagtaaca

SEQ ID NO: 870288 - DNA, 553 bp, Homo sapiens
atatccaaaatagccagtacaatagtaaggataaacaatatggtaacgaatccttagagatatgcaaatgtaaaccttaatgataaaccaactaacactcattttaatgactattatgaaacacacacacaggcatacacacaacagaaaataacaaatattggtaataatgtggtgaaacccttttggactgctgaaaagaatgtaaaacagtgaagaccctatgaaaaccgtatggccratcctcaaataatgtaacatagaattactatatattaaagcacttttattcctcagtatatatccaaaaggatttaaagcaatgttcaaataaatatttgcacatttatgtttaggacagcattatttacattagccaaaaaacggaagcaaggcaagtgttcattcatagatgaatgaatacacaaaatgtggtataaacataaaagagaatacttgttaatcctaaaaagacaggaaattctgacacataccacaacatagatgaaccttaaatacagtgtgtaagacttagtaaaataagccagtaaca

SEQ ID NO: 870289 - DNA, 553 bp, Homo sapiens
atatccaaaatagccagtacaatagtaaggataaacaatatggtaacgaatccttagagatatgcaaatgtaaaccttaatgataaaccaactaacactcattttaatgactattatgaaacacacacacaggcatacacacaacagaaaataacaaatattggtaataatgtggtgaaacccttttggactgctgaaaagaatgtaaaacagtgaagaccctatgaaaaccgtatggccaatcctcaaataatgtaacatagaattactatatattaaagcamttttattcctcagtatatatccaaaaggatttaaagcaatgttcaaataaatatttgcacatttatgtttaggacagcattatttacattagccaaaaaacggaagcaaggcaagtgttcattcatagatgaatgaatacacaaaatgtggtataaacataaaagagaatacttgttaatcctaaaaagacaggaaattctgacacataccacaacatagatgaaccttaaatacagtgtgtaagacttagtaaaataagccagtaaca

SEQ ID NO: 870290 - DNA, 595 bp, Homo sapiens
aattcatcagactcattctttgtccagttttgttcccttgctggcaagcaattgtgattctttgaagaagaagagacattctgtttttttgaattttcagcctttttgtgctggtttttcctcatctttgtggatttatctacctttggtttttgatgttggtaactttcaaatggggtttttgtgtggatgycctttttgttgatgttgatgctattcttttctgtttgttagttttccttctaatagttaggcctctctgctgcaggtctgctggagtttgctggagttccactccagaccctgtttgcctgggtatcaccagtggcagctgcagaacagcaaagattgctgcctcttccttcctctggaagcttcatcccagagggccacctgccagatgccagctagcactctcttgtatgaggtgtctgttgacccctgctgggtggtgtctcccagtcaggaggcatggcggtcagggacccactgtaggaggcagtctgtcccttaacagagctcacttactgtgctgggagatctgctgctctcctcggagccagcaggcaggaaagtttaagtctgctgaagctgc

SEQ ID NO: 870291 - DNA, 711 bp, Homo sapiens
acatggtttggctgtgtccccacccaaatctcatcttgaattttcatgtgttgtggtagggacccagtggggggtaattgaatcatgggggtaggtctttcctgtgtagttcttgtgataatgaataagtcacaagggatctgatggttttataaaagggggtttccttgcacaagctttctctctttgcctgctgccatccatgtaagacatgacttgctcctccttgccttctgccataattttgaggcctccctggccacgtggaactctaagtccattaaacctctttcttttgtaaattgcccagtctcaagtatgtccttaacaacagtgtgaaaatgaactaatacagtgaattggtaccagtagtgtggggcactactgtaaagatacccaaaaatgtggaagcaactttgaaactgggtaacaggcagaggctgaaatagtttggagarctcataagaagacaggaaaatgtgaaaaagtttgaaacttcctagagacttgttgaatggctttgatcacaatgttgataatgatatggacaatgaaatccaggctgaggtggtctcagatgaagatgagaaacttgttgggaactggagtaaatgtgacccttgctgttttagcaaagagactgggagtattttgtccctgccccagaaatttgtgcaactttgaacttgagggagatgattttgggtatct

SEQ ID NO: 870292 - DNA, 711 bp, Homo sapiens
acatggtttggctgtgtccccacccaaatctcatcttgaattttcatgtgttgtggtagggacccagtggggggtaattgaatcatgggggtaggtctttcctgtgtagttcttgtgataatgaataagtcacaagggatctgatggttttataaaagggggtttccttgcacaagctttctctctttgcctgctgccatccatgtaagacatgacttgctcctccttgccttctgccataattttgaggcctccctggccacgtggaactctaagtccattaaacctctttcttttgtaaattgcccagtctcaagtatgtccttaacaacagtgtgaaaatgaactaatacagtgaattggtaccagtagtgtggggcactactgtaaagatacccaaaaatgtggaagcaactttgaaactgggtaacaggcagaggctgaaatagtttggagagctcataagaagacaggaaaatgtgaaaaagtttgaaacttcctagagacttgttgaatggctttgaycacaatgttgataatgatatggacaatgaaatccaggctgaggtggtctcagatgaagatgagaaacttgttgggaactggagtaaatgtgacccttgctgttttagcaaagagactgggagtattttgtccctgccccagaaatttgtgcaactttgaacttgagggagatgattttgggtatct

SEQ ID NO: 870293 - DNA, 605 bp, Homo sapiens
gctcctccttgccttctgccataattttgaggcctccctggccacgtggaactctaagtccattaaacctctttcttttgtaaattgcccagtctcaagtatgtccttaacaacagtgtgaaaatgaactaatacagtgaattggtaccagtagtgtggggcactactgtaaagatacccaaaaatgtggaagcaactttgaaactgggtaacaggcagaggctgaaatagtttggagagctcataagaagacaggaaaatgtgaaaaagtttgaaacttcctagagacttgttgaatggctttgatcacaatgttgataatgatatggacaatgaaatccaggctgaggtggtctcagatgaagatgagaaacttgttgggaactggagtaaakgtgacccttgctgttttagcaaagagactgggagtattttgtccctgccccagaaatttgtgcaactttgaacttgagggagatgattttgggtatctggcagaaaaacaaagtattcaagaggtgacttgggtgctggtaaagacattcagttttaaaaggaagacagagcataaaagttcaaaaaatttgcaacctgatgatgtgatg

SEQ ID NO: 870294 - DNA, 605 bp, Homo sapiens
gctcctccttgccttctgccataattttgaggcctccctggccacgtggaactctaagtccattaaacctctttcttttgtaaattgcccagtctcaagtatgtccttaacaacagtgtgaaaatgaactaatacagtgaattggtaccagtagtgtggggcactactgtaaagatacccaaaaatgtggaagcaactttgaaactgggtaacaggcagaggctgaaatagtttggagagctcataagaagacaggaaaatgtgaaaaagtttgaaacttcctagagacttgttgaatggctttgatcacaatgttgataatgatatggacaatgaaatccaggctgaggtggtctcagatgaagatgagaaacttgttgggaactggagtaaatgtgacccttgctgttttagcaaagagactgggagtattttgtccctgccccagaratttgtgcaactttgaacttgagggagatgattttgggtatctggcagaaaaacaaagtattcaagaggtgacttgggtgctggtaaagacattcagttttaaaaggaagacagagcataaaagttcaaaaaatttgcaacctgatgatgtgatg

SEQ ID NO: 870295 - DNA, 638 bp, Homo sapiens
atagttttataatggggagtttcccaaaaggagctctccctctttgcctgctgccatccatgtaaactgtgacttgctcctccttgcctccttgccttctgccatgattgtgaggcctcgccagtcatgtggaactgtaaggctgttaaacatttttcttttgtaaatttcccagtgtcaggtacatctttatcgcagcaagaaaatagactaatacaacattgatgtgaaaatcctcaataaaatacttgcaaacygaatccagcagcacatcaaaaagcttatccaccatgatcaagttagcttcatcccggggatgcaaggctacttcaacatacacaaatcaataaatgtgatttatcacataaacagaactaaagacaaaaaccacatgattatctcaatagatgcagaaaaagcctttgataaaattcaacatcaccacatgttaaaaactctcagtaaactaagtattgatggaacatatttcaaaataataagagccatttataacaaacccacagccaatatcatgctgaataggcaaaagctggaagcattcccccttgaaaactggcacaagacaagaatgccctctctcaccactcctattcaacatagtatttcaagttctggcc

SEQ ID NO: 870296 - DNA, 638 bp, Homo sapiens
atagttttataatggggagtttcccaaaaggagctctccctctttgcctgctgccatccatgtaaactgtgacttgctcctccttgcctccttgccttctgccatgattgtgaggcctcgccagtcatgtggaactgtaaggctgttaaacatttttcttttgtaaatttcccagtgtcaggtacatctttatcgcagcaagaaaatagactaatacaacattgatgtgaaaatcctcaataaaatacttgcaaaccgaatccagcagcacatcaaaaagcttatccaccatgatcaagttagcttcatcccggggatgcaaggctacttcaacatacacaaatcaataaatgtgatttatcacataaacagaactaaagacaaaaaccacatgattatctcaatagatgcagaaaaagcctttgataaaattcaacatcaccacatgttaaaarctctcagtaaactaagtattgatggaacatatttcaaaataataagagccatttataacaaacccacagccaatatcatgctgaataggcaaaagctggaagcattcccccttgaaaactggcacaagacaagaatgccctctctcaccactcctattcaacatagtatttcaagttctggcc

SEQ ID NO: 870297 - DNA, 624 bp, Homo sapiens
caaattcaaaaattgagaaatgggatctaattaaactaaagatttttggacagcaaaataaactctcatcacaatgaacacacaacctatggaatgggagaaaaatttgcaatctatccatctgacaaaggtcttatatccaaaatctacaaggaagttaaacaaatgtacaagtaagaatcaaacaaccccattaaaaagtgggcaaagaacatgaacagacacttctcaaaagaagacacttatctgaccaacaaatatatgaaaaaaagctcaacatcactgatcattagagaatgcaaatcaaaacaacaatgagatgccatctyatgtcagtcagaatggtgattattaaaaagtcaaggaacaacatatgctggtgaggctatgaaaaaatagggatgcttttacaccattgatgggactgtaaattagttcaaccattgtggaagacagtgtggcaattcatcacagcctagaaccagaaataccatttaacccagcagtcccattactggatatattcctaaaagaatataaattattccattataaagatacatgcacacatctgttaattgaagcactgttcacaatagcaaagacatggaatcaacccaaatg

SEQ ID NO: 870298 - DNA, 624 bp, Homo sapiens
caaattcaaaaattgagaaatgggatctaattaaactaaagatttttggacagcaaaataaactctcatcacaatgaacacacaacctatggaatgggagaaaaatttgcaatctatccatctgacaaaggtcttatatccaaaatctacaaggaagttaaacaaatgtacaagtaagaatcaaacaaccccattaaaaagtgggcaaagaacatgaacagacacttctcaaaagaagacacttatctgaccaacaaatatatgaaaaaaagctcaacatcactgatcattagagaatgcaaatcaaaacaacaatgagatgccatcttatgtcagtcagaatggtgattattaaaaagtcaaggaacaacatatgctggtgaggctatgaaaaaatagggatgcttttacaccattgatgggactgtaaattagttcaaccattgtggaagacagtgtggyaattcatcacagcctagaaccagaaataccatttaacccagcagtcccattactggatatattcctaaaagaatataaattattccattataaagatacatgcacacatctgttaattgaagcactgttcacaatagcaaagacatggaatcaacccaaatg

SEQ ID NO: 870299 - DNA, 643 bp, Homo sapiens
atagatgttgatatagatgtgatgaaagaggaatgcttatacactggtggtgggaatgtaaattagtgcaatctgtatagaaaacagtgtggaaattcttaaagaacttaaagtagatctaccatttgatcctgcaatcccgctactgggtatctacccaaaggaaaataagtcattatcaaaaaaaaaaaaaacatgcatgtatawgtttattgcagtccaattcacaattgcaaagatatggaaccaacctaagtggccatcgatcaatgagtggataaaaaaatgtggtatatacgaacaatgaaatactactcaaataaaaaggaataaaataatgtcttttgcagcaacttggatggatctggaggtcattattctaagtgaagtaccttagaaatgggaaaccaaaaaccttatgttctcatttataagtgggagctaaattatgagtacataaaagcatacagagtgatataacagactttggagattcagaagggggaaggtaaagggcaggtgtgagataaaaaaactacatattggctacagagtacactattcaggtgatgggtacattaaatctcagaattcaacactatttaattcatctgtgtaaccaaaaacacttgtaccacaaaag

SEQ ID NO: 870300 - DNA, 662 bp, Homo sapiens
aaatgcaaatttacttgcaagagtttggttaactaacaggtgtaaataaatcctcagagaccatgtatgaaaagtgtgtgtcaggaaatgctacatgggtataaaaatatctcagtaagattaagttcccagtaagactttaaaaaattgatttatgtgtcatgctacaccacatttatatggcctgtggttgtacaaaatgagtagtactactgagaatttgttatctacaacaaayttgagggtcctatatagagttatgagactgtaaaatgaatttattttgttcattgaactcctgaggtctgtgtaagcatcagacatattttggcagaatttgtatactccagcttgaacatccttattaaatgtttggtgtcagtaacatgctaggaattggattttgaaaattaaattgaaatgataaaaaaattctttagaatccctataaatctccaggtttgcagcattcaattgatataagtggattgtccttaaatttaggagaatgtattctgagtaatatctgtccaaaatataaaagatgacttataaatgtgattggaagtctccatttgatactgtatgataggaaagtgtgtttttattacttctgtattttttatttgaatgtattttttatgcttacatacataaaattt

SEQ ID NO: 870301 - DNA, 610 bp, Homo sapiens
catatcctttggacactttctgatggtttttcttcttgtaaatttgtttaagttctttgtagatgctggatattagccctttgtcagatggatagattgcaaaaattttctctcattctgtaggttgcctgttcactgatgatagtttattttgctgtgcagaagctctttagtgtaattaagtcccatttgtcaaatttggctttgtttccattgtttttggtgctttagacatgaagtctttgcccatrcctatgtcctgaatggtattgcctaggttttcttctaggatttttatggttttccatcttacatttaagtctttaatccatcttgagttaatttttgtataaactataaggaaggggtacagcgtcagttttctgcatatggctagccagtttccccaacaccatttattaaatagggaatcctttccccattgcttctttgggtcagatttgtcaaagatcaggtggttgtagatgtgtggtgttatttctgagggctctgttctgttccattgttctatatgtctgttttggtaccagtaccatgctgtttttgttactgtagctttgtagtatagtttgaagtcaggtagcatgat

SEQ ID NO: 870302 - DNA, 649 bp, Homo sapiens
tgtgggagtctttgtctctttgtaggtctcttagaacttgctttatgaatctaggtgctcctgtattgggtgcatatatatttatgatgataagctcttcttgttgcactgatccctttaccactatgtaatgcccttctttgtcttttttgatctttgttggtttaaagtctgttttattagagattaggattgcarctcctgctctttttttttttctttccatttgcttggtaaatattcctccctctctttattttgagcctatgtggttttttccatgtgagatgggtctcctgaatacagcacactgatgggtcttgactctttgtccagttttccagtctgtatcttttaattggggtctttagcctgtttacatttaaggttaatattgttatgcatgaatttgatcctgtcattgtgatgctagctgattattttgcccattagtagatgcagtttcttcctagtgtcgatggtctttacaatttggtatgtttttgcaaaacacccagctagtaccaggtgttcctttccatgtttagtgcttccttcaagagctcctgtaaggcaggcctggtggtgacaaaatctctcagcatttgcttgtctgtaaaggattttatttctccttcagttatgaagc

SEQ ID NO: 870303 - DNA, 649 bp, Homo sapiens
tgtgggagtctttgtctctttgtaggtctcttagaacttgctttatgaatctaggtgctcctgtattgggtgcatatatatttatgatgataagctcttcttgttgcactgatccctttaccactatgtaatgcccttctttgtcttttttgatctttgttggtttaaagtctgttttattagagattaggattgcaactcctgctctttttttttttctttccatttgcttggtaaatattcctccmtctctttattttgagcctatgtggttttttccatgtgagatgggtctcctgaatacagcacactgatgggtcttgactctttgtccagttttccagtctgtatcttttaattggggtctttagcctgtttacatttaaggttaatattgttatgcatgaatttgatcctgtcattgtgatgctagctgattattttgcccattagtagatgcagtttcttcctagtgtcgatggtctttacaatttggtatgtttttgcaaaacacccagctagtaccaggtgttcctttccatgtttagtgcttccttcaagagctcctgtaaggcaggcctggtggtgacaaaatctctcagcatttgcttgtctgtaaaggattttatttctccttcagttatgaagc

SEQ ID NO: 870304 - DNA, 506 bp, Homo sapiens
gttagtctgatgagcttccctttgtggataacatgacctttctctctggctgcccttaacattttttccctcatttcaaccctgttgtatctgacgattatgtgtcttggggttgctctgctcgaggagtatctttgtggtgttctctgtatttcctaaatttgaatgttggcctgtcttgctaggttgggaagttctcctggataatatcctaaagagttttccagcttggwtccattctccctgtcactttcaggtacaccaatcaagtgtagatttggtcttttcacatagtcctggatttcctgcaggcctttttcattccttttcattcttttttctcgctttatttcattaagttgatctttaatctctcatatcctttattccccttgatcgatttggctactaatactcatgtatgcttcacgaagttctcacgctgtgtttttcagctccatcgggtcatttacattcttctctaaactggttattctagttaccaa

SEQ ID NO: 870305 - DNA, 664 bp, Homo sapiens
tctctcagacaacactgcaatcaaattaggactcaggattaagaaacttactcaaaaccacacaattacatagaaactgaataacctgctcctgagtgactactgggtaaataatgaaatgaaggcagaaataaagatggtcttggaaaccaatgagaacaaagacacaatgtaccagaatctctgggacaaattgaaagcagtgtggagagggaaatttatagcactaaatgcccacaagagaaagcaggaaagatctaaaatygacaccctaacatcacaattaaaagaactagagaagcaagagcaaacaaattcaaaagctagcagaagacaagaaataactatgatcaaagcagaactgaaggagatagagacacgaaaaactcttcaaataaatcaatgaatccaggatctggtttttttgaaaagatcagcaaaatagataaactactagccagactaataaagcagaaaagagaagaatcaaatagacacacaaaaaaaattatacaggggatatcaccacggatctcaaagaaatataagttaccatcagagaatactataaacagctctacgcaaataataaagtagaaaatctagaagaaatggataaattgctggacacatacaccctcccaagtctaaactaggaagaagc

SEQ ID NO: 870306 - DNA, 507 bp, Homo sapiens
tcagctttcataaaaagtttgagtcacttttatcaaagaacatttcttagtgaaaataaaagcaaagtatagaaaattcgatttttgaatatgatcagaaaaaaatatagtgcagtttctgaaatcagatgagattttcctgtttctgtctctctagtgataccaactcttgtttaaaaaaatcatagaggaagacactataaccaaccttgtatgaattcatagaagacaatttccttctttacccygttaaaaatctctgactattgttactattattattttgagacagaatcttgcactattgcccaggctggagtgcagtagtgtgatcttggctcactagaacctctgcctcctgggttcaagtgattctcctgcctcagccttcctagtagctgggattataggcatgcgccaccacacctggctaattttcttcttttttttttttctcttgagatggagttttgctcttgttgcctttgggtataacccggtaatggg

SEQ ID NO: 870307 - DNA, 652 bp, Homo sapiens
ctatttttttagtgtctaccatgtgcaagcaacgtgttaagtgcagagtaaataatacctggttcccttcctaatgaagctcacagattagcaaagaataaaagcagttactcaattaacaccattatatgggctcagtgttgtgaagcataagcccaggatatcttgggagcttgtascaaggggactaaacccatgctgaggagttggagaaggtatctctgtgaaaataaggtatttaatagaccaataacaggcactgaaattgatgcaataattaaaagcttaccaaccaaaaaatgtccaggaccagatgaattcacagccaaattctaccacaggtacaaagaggagctggtaccattccttctgaaactattccaatcaatagaaaaagagggaatcttccctaactcattttatgaggccagcattatcctgataccaaagcctggcacagacacaacaaaaaaagagaattttagagcaatatccctgatgaacatagatgcaaaaatcctcaataaaagactggcaaaccgaatccagcaacacatcaaaaagcttatccaccatgatcaagtgggcttcatcccttggaggcaaggctggttcaacatatgcaaatcaataaacgtaatccagcatataa

SEQ ID NO: 870308 - DNA, 652 bp, Homo sapiens
ctatttttttagtgtctaccatgtgcaagcaacgtgttaagtgcagagtaaataatacctggttcccttcctaatgaagctcacagattagcaaagaataaaagcagttactcaattaacaccattatatgggctcagtgttgtgaagcataagcccaggatatcttgggagcttgtagcaaggggactaaacccatgctgaggagttggagaaggtatctctgtgaaaataaggtatttaatagaccaataacaggcactgaaattgatgcaataattaaaagcttaccaaccaaaaaatgtccaggaccagatgaattcacagccaaattctaccacaggtacaaagaggagctggtaccattccttctgaaactattccaatcaatagaaaaagagggaatcttccctaactcattttatgaggccagcattatcctgataccaaagcctggcacagacacamcaaaaaaagagaattttagagcaatatccctgatgaacatagatgcaaaaatcctcaataaaagactggcaaaccgaatccagcaacacatcaaaaagcttatccaccatgatcaagtgggcttcatcccttggaggcaaggctggttcaacatatgcaaatcaataaacgtaatccagcatataa

SEQ ID NO: 870309 - DNA, 652 bp, Homo sapiens
ctatttttttagtgtctaccatgtgcaagcaacgtgttaagtgcagagtaaataatacctggttcccttcctaatgaagctcacagattagcaaagaataaaagcagttactcaattaacaccattatatgggctcagtgttgtgaagcataagcccaggatatcttgggagcttgtagcaaggggactaaacccatgctgaggagttggagaaggtatctctgtgaaaataaggtatttaatagaccaataacaggcactgaaattgatgcaataattaaaagcttaccaaccaaaaaatgtccaggaccagatgaattcacagccaaattctaccacaggtacaaagaggagctggtaccattccttctgaaactattccaatcaatagaaaaagagggaatcttccctaactcattttatgaggccagcattatcctgataccaaagcctggcacagacacaamaaaaaaagagaattttagagcaatatccctgatgaacatagatgcaaaaatcctcaataaaagactggcaaaccgaatccagcaacacatcaaaaagcttatccaccatgatcaagtgggcttcatcccttggaggcaaggctggttcaacatatgcaaatcaataaacgtaatccagcatataa

SEQ ID NO: 870310 - DNA, 695 bp, Homo sapiens
aaaattaggggtttatatagcagggaagaaatgtatgggaaaacaggaactagggaggggcaaggaagcaatcatgatgaatgaggggtctggtgtctcattgtctggatacgatgatctggtgagttttaattttttgatactttttgagaggtctgggagtcctttcctgargaaggaactcagataaaacaaatgaaatttcaaacatgaagacccaaagggtcaatttttatgtttttccaagaaaaaaactgcctatgggactattgggttggtttcatcagcatgattctttcttgttccgaagaagttacttgtgtatgaaatagagttgaatgtcacaatgttattcagaaatacaaagttctcagcgtttgtaaattttgggtttttttttggtaacagctttattaagatgtgattcatattgcatataatttacataccatgtaattcatctacctaaagtgtacaattcaatggtttttaatatactcatagagtttgcaaccatcaccataatcgattgtagaatatttttatcactctgaaaagaaatcctgcatcctttagttatcactctctcatcttcccatttcctctcttgctcccagccttaggcaaccactaatctagtttctgtctctatatatttgcctattatggacatttaatatgaatgaaactttcta

SEQ ID NO: 870311 - DNA, 682 bp, Homo sapiens
aaagcatggagcaggaacagggagggtgggttgaaaggggagctggagagcctggcataagccaggacatggaggagaaatacaacacgtctgaaagcgctttgtaaactctgaagaccttgcacaaatgtgagggccatccattgtttcaggacacttagctttccagctgccatagcccatccttacaaaaaacatgctgaaaccagcgtctttttttttttttcttaaatgatcctcctttctacagacttgcagagtacaatcaagtatgtgagtgttcacgtgttgtcatataatcaaatgattggtgattttctttttaatttccctttctttacccagttgtgtttctactgatttctcatttcaggaacataaacgcggtgtctccgtgtttttaggaataaattgggaagtgctcacttaatttcaccatccaagaaacaaaatcacttctccctccatgcaatcctgcaatccaatcacctgyggcaggagatgaggaaggaaattactctgcttttcttttgcttttttcctaactagtgatatttgagaaaattaagtatgttttattttacactcaggacccagatcctcagacatacttggggactgaaacaggagaatgccagttggttacagaagcaaatatttcattgcatccttccccagcccc

SEQ ID NO: 870312 - DNA, 616 bp, Homo sapiens
actagaatgcccaagaaagctttactctcatgtttcctgttggctgtgcactagagttccttagttttcctccataatatctcatttcccctggtatctagaccagccaccttacagcatggtggctgggttccaagtgtgagaataaggaagcttttacttcattttccttttccttttttttttttttttttgagacggagtcttgctctgttgcccaggctggagtgcagtggcacaatcttggctcactgcaacctctgcctcctgggttcaagcgattctccttcctcagcctccctagtagctgagattacaggtgcacaccaccacacyggctaaattctgtatttttagtagagatggggtttcaccatgttggccaggctggtctcgaactcttgacctcaggtgatccacccaccttggcctcccaaagggctgggattacaggcgtgaaccaccatgcctggccagcttctatttctcttgaagcctagatctagaactggcacatcagtttcatcacatcctattggtcaaaatgagtcacaaggccagcccaaattcaaagggaggggaagtaaatgccccttcttgatgggatagttgggat

SEQ ID NO: 870313 - DNA, 677 bp, Homo sapiens
tttttttgcacgtggatgttcagttgttccagcaccatttgttgaacggactgtctttgccccattgtattgcttttgctccattgtcaaagatcacttaactttgtttatgtgagtttagttttgggttctctgttctattccattcatctatttgtctgttcttctaccgatatcacactctcttgatgactgtagctgtacattaagccgtaaagtcaggtagtggcagtccttaaactttgtcctttaacattgagttggctgttctgggtcttttgcctctatatataaactttagaatcagtttgccagtatccacaaaatagtgtgctgggatttttgttgggattgcattgaatctatgaagttgagaatagctgacattttgacagtgttgagtccatgaacatgggatatytgtttattcaattcttctttggtttctttcaccagttttgtggttttcctcatatagatcttgtacgtattttattagatttatacctaagcattttgatctttgggggggtgctaatgtaaatggtaatgtgtttttaatttttaatttcacttggtcattgctggtatatggggaggtaattgacttttgtatattaaacttttattctgaatcttcttataattgcttattagttccaggaatttcttgttta

SEQ ID NO: 870314 - DNA, 608 bp, Homo sapiens
gaatactaatagagaggctatgagtttcaagcactgtgcctggtcctcaatagatgtttaataaattctagatccttccccaaaatattccccatcattttcctttctatcgtaaagttataaacataaggcaagagaatgaatgctattacttttcagcaaatgtgaatatctttacatttcatttttttttccatttatatctcagctgtgtttctttacgttattgctagtcaggaatgcaatttgcaattacatgggttcatgagttctgaaattcaagggaaacctatcttcacacatgccttcctctttcaccccatttctgtgcacttttgtccaagcctttttctttcctgaacactgtcattttgtcatgtactctggtcctaaaggataagcagatgaattgtagaggagtcccctttgtatcgaaacatttacagcttctattccaagagttaacgtggygaattttcacaatctgtttgttgttctcattctttcaaccttcttttgcactttttgcaaaacagctgctattgttagtttttctgagtactcttgtgaacattgggagctgttctgttgtcaaaatctttgcagct

SEQ ID NO: 870315 - DNA, 624 bp, Homo sapiens
attatgttctcaaaaatacctgactacacatcctaagtgggtgccagttgggcatgccaagatctattctgtgtgtgcatgtgtatgtgtgtgttgcacacattccatgcttatatggttcactctttatttttctctctctctctttcttttcgaaataaaagctggtcttccattctgtgtagtgacaatgcaaagagctatttctgcgagttcctcctaagggcatttgccttgaatacatggaaatcctcagcagcagaatttttctgacatgttaccttgatccctggaagacattgaccttcaactccctgaatttcagcagaatctttatgagttccagaagcattgycagtgctaagagtgaaattccagggactagacttcactgggtgatggcagtgtcttctcactcagcaggtcctggcagtgcctctggcaatggcagccctaagtggaccaaccagtgcatggtggtacaatttgggctgcaaaagtggtggttggtgagggggcaaaatgtaatggtcaggatccaacacaagatagaaataaataggtcttggtgatagctttgaaaataacctgatggttatcatatgttattagttaagtcagcca

SEQ ID NO: 870316 - DNA, 674 bp, Homo sapiens
ttatggccagacagagctggagtcaaattatacctcctcctcttagaattgtgtaacattaagcaatttatttattcccttccaatttcagtctcttactctgtaatatgaagataatcatgtaaatatcttgtgaggatattatgagtatccagtaagaattatttataatgtgtttaacaccagacttgatatggagtatcatagtttcttttgaattattgcataagttttgcctttgatctattaaaatggtgcactataattacagatttcctaatatttaatcatctttttattcttggaccaaagcctacttggccctgatgaaatgttttcttaacttactgctgtattccatatttgtttgagattattgtatcaattttcctaatgatttggtctttagttgaatttttatgctatcttattagttttgatatcaaaawtatgtaaactttatgtaatgattagaaagattttatcattttctgtgttctgcacctatggaaattatattttcatgggcaatttttttttctctgaaattctctgtatcgggattattttttgaaccagataatacttttataacttttaaagatttttgctgttgttgtttctatttgttgttgtcagattgttttctctaatcaattcatctattcagtgtt

SEQ ID NO: 870317 - DNA, 616 bp, Homo sapiens
agactctgtgagagtggagacttggcatatatatatatatatatatatatatatatatatatatatatatatatatatatggagagagagagagagagagtgtgagtcttgttctgtcccccaggctggagtgcagtggcgcgatcccagctcacttcaacctccacctcccaggttcaagtgattctcctgtctcagcctcctgagtagcttggactacaagtgcccaccaccatgcccrgctcatttttgtatttttagtagagacggggtttcaccatgttggccaggctggtctcgaactcctgacctgaggtgatctgaccaccttggcttcctaaagtgctgggattacaggcataagccactgccccagctggcatcaatatatattttaaaacacttcaagttttagaacttttaaccacccagcccaggacaagagcaattgcctagttttaaaacctactgttaacctgagatttttaggaggaaagcaataaagcaatgcgtgtgtaggtgtgagtgtgtgtgtgtattaggtgttatctctttacctaatctataatatgctagggcctagtcacaaatgaagctgtgagtagctaatctcatg

SEQ ID NO: 870318 - DNA, 547 bp, Homo sapiens
tccattggcagtggggagccactctatatgcagtataaagctaaaattttaaaaaaatttcacagcatttctttttaatttctgaagttagctatcacagttctcctaatctcttctctcagttgaatatctcaaattcaagttcacttagccattcgtgtgaaatggattttcaacaccccagtgtctacattaactttcccgggaagctctttattttttcaaatacttctcataaaatatatttccaagaattgaacatgctattgcagatatagctttagtgctgaatatggtgagaggttcccctctcttaactagaaggtgtatgtacctctgtaaccttgccctactgatatagaattaatggaawattagacagactagcccatttccagaaacaatccaattttaagctgtatgttgactcataacccatttgaaatacagagaaagaagcaaaatatttctttacaccttaggttgcctgccagtgcctacatagctttggtggggttaaggaggcctgccttccttggtctctctc

SEQ ID NO: 870319 - DNA, 547 bp, Homo sapiens
tccattggcagtggggagccactctatatgcagtataaagctaaaattttaaaaaaatttcacagcatttctttttaatttctgaagttagctatcacagttctcctaatctcttctctcagttgaatatctcaaattcaagttcacttagccattcgtgtgaaatggattttcaacaccccagtgtctacattaactttcccgggaagctctttattttttcaaatacttctcataaaatatatttccaagaattgaacatgctattgcagatatagctttagtgctgaatatggtgagaggttcccctctcttaactagaaggtgtatgtacctctgtaaccttgccctactgatatagaattaatggaaaattagacagactagcccatttccagaaasaatccaattttaagctgtatgttgactcataacccatttgaaatacagagaaagaagcaaaatatttctttacaccttaggttgcctgccagtgcctacatagctttggtggggttaaggaggcctgccttccttggtctctctc

SEQ ID NO: 870320 - DNA, 606 bp, Homo sapiens
ttgtttgttttttcccattatttctgaagatccaatgcatctgagcctagagacttaaacatatatatgtgcttacttttttttttttggcttaccttcaatcttcttattttttcagtttcctactaaaatgaaccatttaaggtatcttttttgcagtttggagagtattcttcttgatgaaaattacaaaagaaacaaggagagacattgtttctcttcctctttgtctaatgctaacattgcaccatctggctcaagctgtgggtctagcctttcctgttcttcttgcctcgaacataaccaaaaacgcattttgataagctcagcattttctctgcagctttagctcatcttttgctcctgctttattgatgttatcctgatatctgatcatgatgctgacaaacaaattgggctaggaagagttttaaaaacttgccaccasctggtgaaactgaaccttaaacaaacagcaacactgctggtaacactggcaagttccactgagcgcttattcccaaaaggcaaatgggggctaagagacaggcttgatcacttgcaatggaaatacatatgagctctgtgcacaatgttgctatcata

SEQ ID NO: 870321 - DNA, 606 bp, Homo sapiens
ttgtttgttttttcccattatttctgaagatccaatgcatctgagcctagagacttaaacatatatatgtgcttacttttttttttttggcttaccttcaatcttcttattttttcagtttcctactaaaatgaaccatttaaggtatcttttttgcagtttggagagtattcttcttgatgaaaattacaaaagaaacaaggagagacattgtttctcttcctctttgtctaatgctaacattgcaccatctggctcaagctgtgggtctagcctttcctgttcttcttgcctcgaacataaccaaaaacgcattttgataagctcagcattttctctgcagctttagctcatcttttgctcctgctttattgatgttatcctgatatctgatcatgatgctgacaaacaaattgggctaggaagagttttaaaaacttgccaccacmtggtgaaactgaaccttaaacaaacagcaacactgctggtaacactggcaagttccactgagcgcttattcccaaaaggcaaatgggggctaagagacaggcttgatcacttgcaatggaaatacatatgagctctgtgcacaatgttgctatcata

SEQ ID NO: 870322 - DNA, 699 bp, Homo sapiens
cactttgcctttcctttaaagctgcatcaagtcaattgtgagtgacctgttgaatctgcctctttaatcactgccccatgtcatgctgattcaggtggcctggaaccttaattcaggaaactctttaaactcactggtctgtccaaaagtctgtgagttggggaatcaaatgacagaaagagaataaatgcaagtcggagaaaagctatggcccactgaacaaagaggttaaagaatgatcatcacggaataaaaataacttatagggcaaatcatggggaaaaatatctcttactaatttagatcacaaagtacgtacctgctcaggaatgtataataaactcttcttacccagttctttgccttaaagactttcctaataagagaatgcagagagagctgtcagttttgttcagaattgctgcagttggtttaaactttacacatcaacagttccaggaactgttggactagagatataaatagaaagcaataacagaagtaatatatcataagagctaaagcaatggtactttcaaactwttaaaacaatttattatcttggagtagggaaagagagggtggtgggcatagaatcagaggcttgctctgcttgcttttatcttagctgcaacaatcataggaaatgtctggatttccggatgttcctcagaaactccagttttaatgaattgggaa

SEQ ID NO: 870323 - DNA, 716 bp, Homo sapiens
gtttgtctcactcacagcctttaagctgtgttaagtgtaggagtcatgactaccttcttcatcgctatatcctcagtacctagcacagagtcagacacatagcagttgctctacaaagatttgtagaatgggaactaagaaacacataaaagtagcagcactctgggtatgtggatgaggaaagactgagagctggacattggacttgaccccggtaccttgactggtaagaggaaggaaggtttatgcactgaacaaaactaaggaaaattccagacaacaggacaatattggcggcctgacattaaagggccatggtcatgaaaggagagaggagagataccatcgatcacagaaccgtctggaatagcccccaaaaggatcccrgccatcacgcagcttcaacaagatccaccagtgtcagcctcggggatctggagtagttcttccccaatccccaactccaacccaccatatgctgaattggaccggcaataaatggaattatgaaggctcagcaaaaaattcaccttggatttatttgaaagcagaagccacaagagggcagaatgaatgctgaggttggggcttgttgcctgtcctgtctcagctgccttcagtgatggggttgtgagggtagacaaaaagttactggaattttaaattggggggttttagctcaagtgaactttttttcaaatgctaaaaatgaagga

SEQ ID NO: 870324 - DNA, 664 bp, Homo sapiens
tcagcaaagcccacaagctagaaagtcaaaggagaaattatttctgtgatgctatcaagaacattaattataatgatttacaaaaaaagtagcaaggctctggtagatgctagaggatttgggaataagagagggaagggatttttggtttgtttgctttcctaggtcaacaaatctttattaaaacctgcagttactaggaggaggccatgatgctggatgcactttcttttggtttttttttttttttgagaaggagtctcgctctgtcaccaggctggagtgcactggcccgatctcggctcactgcaacctccgccttccgggttcaagtgattctcctgcctcagcctcccgagtagctggaattacaggcaagtgccagcacgcccagctaacttttgtatttttcagtggatacagggtttcaccatgttggccaggatggtctcaatcttttgacctygtgatccacccgcctcagcctcccaaagtgctgggattacaggtgtgagccaccgcacccagccaggatgcactttcaaagtcaatcttctccacaatgttcttgggcttcatgctttcttcttggctacagatgaagatctgccctgactcatcggtgcttcagccatattttctcatccatatcttcagctggctg

SEQ ID NO: 870325 - DNA, 642 bp, Homo sapiens
tgtagatttgttagaatactatacataatcaatcatgtcatctgtgactagatgttagaatactctacataatcaatcatgtcatctgcgactagactttattttctttcttgcctaattgcaaaggctaggttcttcaaaactacattaaacataagtagtgagagtctgcatccttgttttgttcctgaccttagagaataagtactctatctttcaacattaaatatgatgttagctrtgtatttttcatatatggacttttccagattaaggaaattccttttgtttctaatttgatgaaatgttttatcataaatggatattgaattttttcaaactctttttacgtctattgaaatgataattgtttctcctttgttaatatggtgaattagttgattgattcttgaatgttaaatcagctttgcattcctagaacttatttgctaacatttaattaagaatctttgggtctatgttcatgagcattgatgtgtatgcatgtatatatacatttatatctttttttaagtgtatatttttaatgcttctgtctggccttggtatcagggtgttattgatttcatgaaatgagttgaatagggctgtcatcctccactttctgaaagattttgtgta

SEQ ID NO: 870326 - DNA, 617 bp, Homo sapiens
ggaatactctaaatgtaaaaataagtcatatgtctcttcaatgtagaaagagtctgagaagccacggtgtcaaagagcatcagctttgcaaatttcatatgaaagagaggggtcttacacatatgtttccttcaatcctctttctaaaaaaacagtagacgctgaataccatcaccccttctacttgattcatcttccatcarcacttcacaatatgtattcaagggtcctaaaacaacacaggacactgtgaagggtaaggaagagtgtgtgagaggaaaggaagagtgcgtgaaagttgtctgaatcaaaacggagtcacaaatgttaagaaaactctgacaaatagagccagtgaaggccacaaagagaaggtcctcatgcttgtatgcctgataacaaaaactatcataaagactgcaaagactacaatcttgcacaaaggccattgcaacctaacacaaaaaagacttctacaagaacatctgtccagtaactgcctgtccaacctcagactggcatcacccttgatattgatctttgtagccaaggctaattattatttttaaaaatatgtaatcctcctcatttttttcctttagaaacctttgtctttt

SEQ ID NO: 870327 - DNA, 642 bp, Homo sapiens
tacagggcagcagcggtgagaattaccactgacttttcacctgaaacagtgcaagtcagaatgcaatgctatgatatctataatgtgccgaaaggaaaaagctgtcacccgggaattatatatttagtaaaaatatcctttaaaaatgaaggcaaactaaaaatatttcaagatgagcagatgcctagagaatttaccaccaccatcagatttttctctacaagaaatgttaaaagagtatcttcaggctttaagaaaatgatatgggtggaaacttaaatctacataagggaatgaagagcattggaaatgggaaatgtgtgaataactgtaaaagcagggtgaggaggggtccctacaaggggagggcctaccatatgaaatcagagcctaagacgagtgaggaagacattcactcaagaaaagagaraaatgactgattctaggactgggccagagaaaataatagacaaacctagaacttttgttgtaccagagaacaaggaagtacgcaaagaaagatgaggacatgtgaaaaaactcagaagccagctggagggccagcagaataaattcaagcaacaaaatgaagaataatgtcattgattataacctattggctaaaactggaaaccatgagtc

SEQ ID NO: 870328 - DNA, 611 bp, Homo sapiens
catacagattaaatctatttcactttttccatagaaattgagttatttttataaactaaaatgggaagaaatctgaatttaaaaaaaaagtttgactagctcttttgtgactacaagactaatatttggttcaaaaatacccaatcaatgctcataattatcatcctttctttcttaaaacattaacattacattgtagagatgaactttttttaactttttaaattagcttattacacacatatggaaaaatatacaaatcttaagcttacagctcagtgaattatcacaaatgaacacaccagtataaccaggacctaggttaagaaatcraacattatcatcaccctaaaagcccacttatttacttcccccaaccactctgcctgtcttcctccctagagatattccttctcctgacctctaacatgctagataaataaatttttgcctgccttttaattgtatgtcatatacagtgtgtacatgttttgtatcttgctgctttcactgaatgttatgtttttatagagattaacttttcatcttaaatttaaatcattattggattttgtgtgataaaatataatcaaacattacccttgaattca

SEQ ID NO: 870329 - DNA, 637 bp, Homo sapiens
tgcccctgcctgtcacccaccatgcttgaaaggcttgaaattttggaaaccattagtttcaaagagtacaaagacactattcactgtggtgggaatctgaagacttctgtttccaccatgactatcttaaatttgcagagmgtgcttccataagtgagtcttcctttccaaactatttagcttataaggttggctatattttgttgtgcaaatatcgaatggctcctgcacagacacctgtttcatgagtaacattacgtaactgctaccttaatgagttttccaaactgatgctatttactatacatgagcataggccaattatttctttatagtactctgtgcttaaaattccccatctgttagatggaaatactagtaatatgcctacatcatatcatagtgttcttatgcctatatatatatatatgtgtgtgtttaaaatggcacctggtacaggataaatgctgtgtaaatattaccattattgttataattttcattatttatctataagtcttatttctaaaaaagcaagagttcttaggcccaaattagtgttttaaatgaaaaacacatgttttgtattcatgattgtgtatgtgtgctcatgtgtgtgtgcataaatcatctattg

SEQ ID NO: 870330 - DNA, 624 bp, Homo sapiens
tttctttttattcttttttctctaaacttatcttctcacttcatttcattcatttgatcttccatcactgataccctttcttccagttgatcgaatcggctactgaggcttgtgcattcatcacgtagttctcatgctgtggttttcagctccatgaggtcctttaaggacttctctgcattgattactctagttagccattcatctaattttttttcaaggtttttaacttctttgccataggttcgaacttcctcctttagctyggagtagtttgatcatctgaagccttcttctctcaactcatcaaagtcattctccgtccaactttgttccattgctggtgaggagctgcgttcctttggaggaggagaggtgctctgatttttagagtttcctgtttttctgctctgttttttccccatatttgtggttttatctacctttggtctttgatgatggtgacatacagatggggttttggtgtggatgtcctttctttttgttagttttccttctaacagtcaggaccctcagctgcaggtttgttggtgtttgctggaggtccactccaggccctgtgtgcctgggtatcagcagtggaggctgcagaacagtggatat

SEQ ID NO: 870331 - DNA, 591 bp, Homo sapiens
ctggaaaccatacactgggaaaagcatgtgatggaactgcaacactgaacctaaagaaaatgttgagagtagtgtccaaatattcaatttgctatttggaacagggattatgaagtttatgacttcaaaaaatagaactagatctatytatccagcagttatatattgagcacctactaagttcacatgctgttttaggcccccaagacaaatatactagctaactagacagtgaaaggaggtttcagaaaggtgacttccaagtcaataaaaaagacttccttaaaaattagaagctatctgaggccaggagtggtggctgtcacctgtaatcccagcactttgtggaggcaaagtgggaagatcgcttgagcccaggagttacagtttgtactgagctaatatcacacacggcactccagcctggatgacagagcgagaccctgtctgtgaaggaaaaaaacaagctatctgaaggtagactggtctatctcatgaggcgatgaattctcagccattggggttgtacaaaaacagtctagcacatagaataaactggcctggggcattttagaggagaatgtgtatggg

SEQ ID NO: 870332 - DNA, 589 bp, Homo sapiens
cagttagttgagcccctcctatagaccaagccctgtgcatggctataaaaaacagtatgtccatgcccacttccccctctacactcaatctggagccatgagaaattaaataacctttaatttctgaagatcgggtgctcttataaaacatcagtacttataattgtatcctgcagtggaaaattgtgcaataatctttttctgaaggcatggccatgaattgtactrtattactccatctatcttcttttaacactaaacaaaatgaagagaatacattgtgcatggcccctagaaatttaccttcaaatagaaacaaagctgctaactccacacacacatgatatgctgaaaactgaataaatattgaagaatctaaattcaattaattagcaagccaaatcttgcctcaaattatgttgacattatttattcctttgttgattaaatgagttgcctcttaagccaaaagagaagatcttaagctcttgtttcttcattccaggtctcttctctccaaggaatttgggaaggagcaagcacagcagaggccagttttactgcatgctggtgctcagagggaataggg

SEQ ID NO: 870333 - DNA, 579 bp, Homo sapiens
tctgattactttgtgagtcatcaaattgatttgactgtccttgcccttcatataatgtcccaatagacacttaacctgactctacttccttgaatttggcaaagtaagcacgatcattggagttactgcttttgggattatttatttatcacatcacctctgccatcattacttcccactcrtctttgtttggcttactttctactgtgcttctctctatcaaatctttgcacctccttaggaagatctggaagtcacctctctgtaaatctgagaagttattttcattgttgttggatgataatgcttaagccagtgttggaggctgcacaagtaaattacgtggttttagaagcacctcctccttccatctgtgctgtttggttgtattctttattggatctgggatgatatgacttctttgcctggggctgttgctgccattacgcagttttggattcactgttgcttcataccaatgttggtgctgtaaatgtacatgataagagttccacagtgagatggactacaagacttctggacccagagccccctaaaactagatccaagaccagatta

SEQ ID NO: 870334 - DNA, 633 bp, Homo sapiens
ctgttcaagatgctcattaattcattcactcattttatgtaatgactcatttatcaatcctttgttgagtctcaaccactgtcctaggtaatgctgatacaatcttatgttttgaagctcgccacaaaatttgatcaccactagakccaagatttaacacattatttcatttaatagctattttgagtcttcagggtacaatttacagttttgggggggaagatgtagggaaatatgactcgtcagactcaattaagtgcatttactcagggctacccatctattaagtggcatggttctctaaccccatagttcattctctttttctgtgcaccactagtaggttttgcataaggtaattttgtccaagtggttactgtgtgggtcctgttcacaatcttgatcatgattgtattccaacttctatgtcagagtttgcaagcatgtggcttataaactcaagatggctggtacaatgttgttcaatatttaatggaggggtattaccaagatctagttttctaggttttcttgagaaattagaaaatctggcaacactaagtttgtaataataccagggacaactagccaaactgccctattttgttgaatcatgtgctgtctaagtcctca

SEQ ID NO: 870335 - DNA, 621 bp, Homo sapiens
gaagaacattaacgtggcagatgacattttcctgagaataaagctctacttgcaacataaatacaacacrattgctatgttttaggttctttagaatttggcacattttactgctgtatgccttgtgatttctcagttctgttattatttgtctctgtttgaacccatgcaaaaccttcatccacacagcttagactgtcattcagccctctctttctgcaaataaatctaatatatgtctatagtcagcccacttttcttctatgcagatttcattaatgaaagtagtaattcttgtcagtgtgattgcaagcacaaactcaaagataacattacatggcagtccttggttggcaattgaatggtcagtattcagttgaaaggtcatcaaccagaaatatggttagccattttttagaagaaaacaaattagaaaaaagtatggataacaactttggacaccgaagaatatttctataatatttcctgctcagtctgtagtggaaggcagtagagaatagaacttacaaacatagccttggagtgagaaagatctggaaactatttatgatagttctacttactagatgcatctcttggaacaagattcttcgcttctct

SEQ ID NO: 870336 - DNA, 632 bp, Homo sapiens
tgttcaagatgctcattaattcattcactcattttatgtaatgactcatttatcaatcctttgttgagtctcaaccactgtcctaggtaatgctgatacaatcttatgttttgaagctcgccacaaaatttgatcaccactagatccaagatttaacacattatttcatttaatagctattttgagtcttcagggtacaatttacagttttgggggggaagatgtagggaaatatgactcgtcagactcaattaagtgcatttactcagggctacccatctattaagtggcatggttctctaaccccatagttcattctctttttctgtgcaccactagtaggttttgcataaggtaattttgtccaagtggttactgtgtgggtcctgttcacaatcttgatcatgattgtattccaacttctatgtcagagtttgcaagcatgtggcttataaactcaagatggctgrtacaatgttgttcaatatttaatggaggggtattaccaagatctagttttctaggttttcttgagaaattagaaaatctggcaacactaagtttgtaataataccagggacaactagccaaactgccctattttgttgaatcatgtgctgtctaagtcctca

SEQ ID NO: 870337 - DNA, 631 bp, Homo sapiens
agataacattacatggcagtccttggttggcaattgaatggtcagtattcagttgaaaggtcatcaaccagaaatatggttagccattttttagaagaaaacaaattagaaaaaagtatggataacaactttggacaccraagaatatttctataatatttcctgctcagtctgtagtggaaggcagtagagaatagaacttacaaacatagccttggagtgagaaagatctggaaactatttatgatagttctacttactagatgcatctcttggaacaagattcttcgcttctctgtaacttggtttcctcgtgtgtatgatggagatgattattatctatttcataggccaggaataggtatgatatgcaagaagcacctgtggccctatcttagcacatcataaggactaagttatcaggagctattttaactattataatgatgttatcattgttgcatctttattataaatgtgaacattaagtttttattaattaaacctgccacatatttcttccatttgcttcattgtactcttaagatgtttattcatttttctcacttcttgctttaagaacctggttattacagaggtgaaaaatcccatcaaaatgctagagaatttg

SEQ ID NO: 870338 - DNA, 636 bp, Homo sapiens
tggtcagaaggctttgtgtgcactgtgacatctttatgctgcagatgccaagatcacagggtccacacagagcagttcatttcacacagtgggaaatgatgcgtgtgtgtgtgtgggtgggtgtgtgtgtgtgttttaaaaaacctaaacagagcaacactgttctgtgcactcaaactctacagctaaccgccaagggccatcttataaatttggacattgaattgctaaaatttgaaaacacagccactcctattcacactctaccatctggaaataaaccctaagtcactgtgggtgtccatatggaagtcactgttctgcttccttttatcttcatggtagttcaaggttcgatttcctcctagggagactttctgttgttcccattgagccagctctgctgtccccactggtcacgaaccggatcagtacatggagattcctgagcatatgcagggcagcggcatgagagcrtctaaaatagagtcattcccattgccccagcacatccttccttcctacattcctgggagaaaagagcagaaacaaaggcttttctttcttctctcttttggatgtttggtgatttgcatacagaagttaactcacttcatctactggattccaatcatt

SEQ ID NO: 870339 - DNA, 625 bp, Homo sapiens
cgtggtggctcacgcctgcaatcccagcactttgggaggctgaggtgggtggatctcctgaggtcaggagttcgagaccaggctagccaacatggcaaaaccccatctctactaaaaatacaaaaaaaaaaaaacaaaaaaaacaaaaaacacaacaattagctggatgtggtggtggrcacctgtaatcccagctacttgggaagctgaggtaggagaattgcttgaatctgtgaggcagaggttgcagtgagccaagatcacgcctctgcaccccagcctgggcaacagagtgagactctgtctcaaaaaaaaaaaaaattttttacccaaattgtgtctacacagtccaagtcgtccctgcctgtttcaatagttatatccttccattgggagggacaccaagtgtctccttacttgctaaggagaaaagaaatggataccttgcccctcccactgctaggtaggaaactgccactgcctctgaaattctgaaaagtgcctgtgagaagctcccgtaaagttctttatttatttattgagaactacatcagactctgtctgggtttaacacaccattcagaaagaacaggaaaaatcttcaggaaggaacctactgcctgat

SEQ ID NO: 870340 - DNA, 581 bp, Homo sapiens
tttatctgaaaagcaagagggaagacaaattgactgataataaatttaataatggggaatgagggcgggtttgtcttaaagcaaaaaatgtctggttataccatcatgtgaaaatatagtaaaagctaaatcagaggtgtagagtcattgtrgaacacctgaggggaagttaactttatttccctgaaaataatgtttgaaaagaaataataaaatgtattaaaaatttgacaatatttagttaatttcaatggatttattcataagatggagaaaaggctgatgatgtaaaatgttacatgggtgacatatagaaagagtaaacttataacttaattttctttgttaatataacagtgagatcatatcctttaaaaagggagtatggggtggaccagaagtcccttgccctggctgcgctataatagtgaaaaatccaagtatatgttgaatattttgtaaaatatgtttgcccagtggaaatgaaaattagaaaagatggtaaatagatcaatccaaataaattctctgtatcagtgaatgatacagttaagcaagccagcaaacaaacaaacaaaaaa

SEQ ID NO: 870341 - DNA, 625 bp, Homo sapiens
catgcccttaagacacagatcacgcatgctattgtttgtggcttaagaatgcctttggccaggcatgatggctcatacctgtaatcccaccactttgggaggctgaggcgggcagttcacaaggtcaggagatcgagaccatcctgtgaatggtgaaaccctgtctctactaaaaatacaaaaaaaatagccaggcgtggtggcgggcccctgtggtcccagctagttgggaggctgaagtgggagaatggcgtgaacccaggatgtggagcttgcagtragccgagattgtgccattgcactccagcctgggcaacagagcgagactccatctcaaaaaaaaaaaaaaaaaaaaaaaaagaatgcctttaagcagttttctgccctgggggagccaggtgttccttgccatcattccaataaacccacaaccttccagcttgggcgttagagccattttgaacatgtcatagtgctgcagagattttgtttatggccagtcttggggccagtttatggccagattttggggggcttgctcccaacagtcttcaactgacagaagcctttccccactttctctatcccccaccaagattatttgaatgctcataaagaagagtat

SEQ ID NO: 870342 - DNA, 675 bp, Homo sapiens
ggtttttatggttttaggtcttacatttaagtctttaagccaccttgagttaatttttgtataaggtgtaatgaaggggtctagttttagttttctgcatatggctagccagttttcccaacaccgtttattaaatagggaatttgtatagccaagacaattctaagcaaaaagaacaaagctggaggcatcaccctacctgacttcamactatactacaaggccacagtaaccaaaacagcatggtactggtaccaaaaaagatatatagaccaatggaacagaacagaggcttcagaaataatgccacatatctacaaccacctgacctttgacaaacctaacaaaaacaagcgatggggaaaggattctctgcctttttcttactgatctttatagtaacagagaaagaacataaatgaatgccttgtttgcaaatttttacagatatcttctcacactccatggcttgtctttttacactcttagcaatgtgttttaataaacacaagttcataatttcaatgaagaccaacttggcatctatggttagctctttttgtgtctggtttaaatctttgccttatccaagaatccaacttattttcaaagccctatttaaaatcagacagtctggctaagtatccatctcatttgaaagctgctgttccctat

SEQ ID NO: 870343 - DNA, 653 bp, Homo sapiens
cttcagtttcttcaaattggtgatggaacatataaatattctatcataataaaagggcaaagaaagggtatgtttccacctttaatcagtctaaatgtttatatctgatctcaccaatatattatttaggatttctttatctgtattcataactcataagtgaaatttgtctgtaatttttttcttggtctatctttgtcagattttaatgtcaaagtcctaaatacacctgaaagctctatgtcattttctatattttggaaaacattaactaacatcagaattatctgttcctagaggtttgatggaacktaccatctggatgtgaagattattttaggtttcagttttgttaaacttctttttcctaccatattttaataaagtgtgtaactctatttgcgcatggaagctaaatagtcacttgtgatctacagatcttttcccgccagtttattatggcttctcgagcaagttgttacgtatcccctctgacccactggcttatggaactgtctattgctaattaaattgttttatgattcccatacattcagccaaactttccttattatttattttaattatccccactaccacttccaacccaatttgctgaatatttattcttaaaagagaaagtggtagggtat

SEQ ID NO: 870344 - DNA, 670 bp, Homo sapiens
  misc_feature 517: n = A,T,C or G
tgtataaaaattccaaaagccttattctttgtatgaatgaaaaaggcttacgtgactactaatatactatttgcctttgtagatttttctattctggatcttcatatgaatggaataatataatatgtggtcttttgtgatggcttctttggaagtggtaaaatactgaatctaaaggagtggtaagttaagaaagtatattatattccaaagaattgtcatttaaagatactcttaaattctttagctaaaatgccaatataggaattaaagtggcaggctgataatatcatactaatatttacattgaatgtaaatggattaaaaatcaaattaaaaagtgaaattatcagactatataaaagcaaggcctattcgtatgttgtctccaagagacatagtctaaatacaatgacaaagataaattaaaagtaaaaagawaaatgcatctagaaaacactaatcatgaaaaagttgggtggctatattaataacagaaaaatataggtttcaaganaagtaagtgaacactttgtagtgataaagattcagttaatcatgaaactaaaacaacccataaatgtgtaagtacttatttaataacttaaaaatatatgaagtaatattgacatagctaaagcaagatattggccttggtaattgatagggt

SEQ ID NO: 870345 - DNA, 607 bp, Homo sapiens
gacatgggtctcattggctaaaatcaaggtattaaaaggactgcattttctcttgcattctgcaggctctagggaagaatccattttcttggcttttcttgttctagatgccactcacttttcttgtctcatatcccccttcctctgtcctcaaagctagcaacattgcatctttctaaaccttccttctgcaatggcatcaccaactgactacagctagaaaaggttctccactttcaaagacttatggattagatggtccacctgattaattcaaaataacacgtgcaaagtttttggcaatgaaaggaaatgtattcacaagttcctgagattaggacttgagcatcttgaggggtggggtttgaaatttgtctaccacacragtttatgtgttagtacatgtgtttttattattgtgtaagtcaataccaagaggaaggggaaacaaacaaataaacaagcaacataacaataaaaaactactgtcagatacatagtgtttataaagccaaactttattcatttctgataggtcaatattttcactttttttttttaaagaaagcccagggagagtgatgtcagcaagatagcagaataaaag

SEQ ID NO: 870346 - DNA, 633 bp, Homo sapiens
ctttaatgacattctctttgattaatgtttgcattgcatacactttattggtcacttgctcaacagaatcttttcagagaaagattacacgcaacgatgcttcaccagttacatctccataaaacatatctagattacaaattggacaataggagactaattaacagtgatcagcagatgtgtatgctgaggtggtgcacagagacaaacaaatttacaactcagttcctggaaaaggaattcatttgtgactccttacagaatacctggatgggtatttaaaatccatccccaaggccctctttccatattacaacatcaacacatcagtcttcagagttagataaaaggaatctgatgaggaccacgttaacatttatgttgagcttaaataaaacatgaaactaacgtcttgaaagactgagttgagcaaggcagcrttcacaccatggtattcaagaattattcatgaagcttcagtgcttctcaacattttagtttcttatatctgattttacttaaagttcttttttgcagtgattgtttttggatatttcgtccaccgagataggaatttctcaataacaggaagaaacagattgagcacctaatgatatctaaatgctttaattg

SEQ ID NO: 870347 - DNA, 672 bp, Homo sapiens
ttaattcagaatatgttgcacagtactcaaagagaagatttcacatgttgactctgacgtgcagatgaatgatggtgccgtagacaattaggatattagattttagtagaacttaatttatttctaatttttccagtgacacaatggatataaatgaaagttcaaacctagtttgagttgtgcctcccacaggcagtctttccatgtggcttggatttataacaacttggtggctgggttctgagacagagcatctgaaaagcaagcattccaagaaatcaggtggacatcggatagactttcatgacccagccttggaaatcacatagtgtcacttcctcatccttaattaattaaagcaattacaatcccatgtagatttaagaggagggtacrtagatatctctatagaaggaatgtcaaagagtttgtggccactgtttataaaccaccacaccactcaatgcataaatcccttaacaaatggtcatccacatttactacctctactgacaaggagttcattatcacagaatgtaaactattccttttttgggacagtattaagtattaaaaatattttctcaagcggaacaaaaatatgctttcttattacccagtttttgttctcccttctgccctccggaacacagcaagtcagctttccttttt

SEQ ID NO: 870348 - DNA, 596 bp, Homo sapiens
tctggcatggtcagcccctacccaaaataacactgttactatctggccagcccaagacccctggaaaagacacttttatcaggcatgacactccaagggcttagacattgcctcccagaagctcaggacaaggccaggcctctctttgggcaaagttaatgtctttacaaaaatagtcagtgaagggactttgttggctggaggagaggyctctcttgaggaaggctggaagtgggtcctttgatcacttgcatgaatagcagaggagaggaaaatgctactccatgaagtggatgcttccagattctactaatgtcaacaaaatccctgttgaaaacgaagcgatttattccttcccttggctcctctgcatacccgggctgaataacctgttagccagtaaggggaaaatgaggcacaggaaagaggaaaggggtcagcctggatgtatgcttgccatgtgggtgagtgaccttgggcataatggacctttggttagatctcatttgctgccacctccgggtgaccaggacttttcctgtgccttgtttctttgcagacctgatgaatggtcctctgtgtgcccgtgacaactt

SEQ ID NO: 870349 - DNA, 579 bp, Homo sapiens
ctaagacaaggtagatttttattggtctcaatcaaagaatctttttgctactgtttatgggttcctagaaattcctaggataatttcaaggagagaaatagaatgtttcttgtttgctttatgaattaattatttaaatgggcaaagaggtaggggtgtgtgtgtgcatgtggtgggagaaggctgggagggggcatgctcttcccagttggtcctaacctatctctagctccagttagttgcttctgttccatcccagcactatgtgcctgtgcattctccatggcggccactccaactcttatgatttttcagacagtgctctctctccttgggaattcttgcttaccgcctccacactagatgctgctttactctttgcaccaaggagcaacattctcrtacctccatcataacacaaatccccttgcttcataatctgtatatgcatctgtgacagccactagcttgtatgaacaaatgggcatagaccacatcactagcacggggtcagtctacactgcagagtcagatatgtaaggccttgttctgctacataattagctatataacctttgg

SEQ ID NO: 870350 - DNA, 601 bp, Homo sapiens
ggcttaacaagtgatcgctgctgtctaggattttgtttcttttcgggggaaccttgacttcctttcccaggcaatccctcctgtgctgaactccagaggaaccaggagtcttggggtcttctctggggcagccccaacccccacccccaggctccagccgcgaggactctgtgcacccctcgggccaggcaacagaacttgttccgtggatatttggagcctccacctgccaaacccgagtgattccttttaccaccccccgccccccacccaggatcattcttcccctcctccagctgttgcagcttgagggggaaaaacaagccagccggtggattttctttatttttatttttcgccccgccggggaacggtaagtatgatacctttttttttttttttttttttttgkatctttcctctaccttcttattttggctgttaagaaacagtggacatttgagggataaataatatcgggaatgtgacagaagggcatgaatggaaggcggttaaaaataaaccaggaggtgggagaagggaggtgcggatgctgcgcggcgctccggggggccccacagttgttattttcccaaacccc

SEQ ID NO: 870351 - DNA, 674 bp, Homo sapiens
cagggacaagtttcatggaagacaatttttccatggaccggcagagggttgggaggtggttttgggctgaaactgtttcagctgtgatcatcaggcattagattttcataagcagcatacaacctagaaccctcgcacgcacttctatgagaatctaatgctgctgctgaactgacaggaggcagagctcaggcagtaatgctcactggcccactgctcacctcctgccgtgcagcccggtttctaacaggccatggcctggtaccaatctgcagcccagggctggggacccctggcctaaatgactgaactttgtaaggactgtttgcattcccaatacccagcatagtgcctggccatgccttaaaagatagttgctgaaataacctgaaaatcatattatgaccgttgttttctgagattcacaccagtctaatggtycccaaatgcagcgggggcaggctctggaccaggggcaggttatctggttaagaatcacctccagaacttgttaaaaatagatttccttgctacagcctgaaaatcttgaatcagtacctccggggtagggccactgtggttctagttttaaagagctcctcaagtgatttttacatacagccaggtgaggggggtcactggcttagtcaataacctacctgggataactgacg

SEQ ID NO: 870352 - DNA, 633 bp, Homo sapiens
ctagaagaaggtaatgatttaggatatatatattttatatatatataaaaatatatataaaatctacaatcttcttgtaaaaatagccacttgctgattgcattttattgggacttgagatgtgttgggtagctgaaccataaaataaataggccttcaacaaaacaaccctttattgctgcaagattgactttgagctaaccccacccgaaatgcaaccacagaaactcaaaagggataacaaataccattcattgttgtatattacacaccttatccaagtcatctttttaaaaaattgtgacaaataaacatgtaaaaaatttaccattttagccattttaagtgtgcattacagtagtgtcaactgtaagcaayagatctctagaactttctgattttgcaaaatagaaactctatactcattaaacaactcctcttttctccctcccatagcccctggcaactgccattctacattctgtttctaaaaggtttactattttagatacctcatgtaagtggaatcactcagtatttgtctttttgtgcctggcttatttcacttagcatactgtatccaaggttcatctatgttatagcatatgacaggatttgtttcctttttttttt

SEQ ID NO: 870353 - DNA, 633 bp, Homo sapiens
ctagaagaaggtaatgatttaggatatatatattttatatatatataaaaatatatataaaatctacaatcttcttgtaaaaatagccacttgctgattgcattttattgggacttgagatgtgttgggtagctgaaccataaaataaataggccttcaacaaaacaaccctttattgctgcaagattgactttgagctaaccccacccgaaatgcaaccacagaaactcaaaagggataacaaataccattcattgttgtatattacacaccttatccaagtcatctttttaaaaaattgtgacaaataaacatgtaaaaaatttaccattttagccattttaagtgtgcattacagtagtgtcaactgtaagcaatagatctctagaactttctgattttgcaaaatagaaactctatactcattaaacaactcctcttttctccctcccatagcccctggcaactgccattctacattctgtttctaaaagktttactattttagatacctcatgtaagtggaatcactcagtatttgtctttttgtgcctggcttatttcacttagcatactgtatccaaggttcatctatgttatagcatatgacaggatttgtttcctttttttttt

SEQ ID NO: 870354 - DNA, 541 bp, Homo sapiens
ttctctgaagttcttgtttttttgatacctgactgtcacactactgctgtggatgtgcttcataccatcacagtactgcagggttataagattatctgatagccaatagaagcagacgtctactcactgtcattctttygtcttttggagaataaagttagctatttttatctgggttctcaattttttttttttcttttcgagatgaagccttgctctctcacccaggctagagtgcagtggtgcgatcttggctcactgcaacctctgcctcccgggttcaattgattcttctgcctcagcctcctgagtggccaggattacaggcatccatcaccacgcctggctaatttttttatttttagtagagacagggtttcaccatcttggccaggctggtcttgaactcctgacctcgtgttgcacccacctctgattcccaaagtcctgggattacaggcgtgagccaccgcacctagccgggttctcagttttgtataaactttaaaatagattatcaaatcacataccaattaccatc

SEQ ID NO: 870355 - DNA, 621 bp, Homo sapiens
ggctttttgtattgccagagttcttgtgctggtttcttctcatctgagagacttgatgcttcttttgttgaatttgatatcatttggaaggaggtttttttttttttaatttttcattctttctttctcttaagtgtgtgactgtggtgtgtgttgtataggatcaatttgcttcatttctgggtactttcagaggaccaaggctctgtacaagttccttggttgcagataggctcctgtggtggcttgatgtggtgatgtatttttgtttggtggtgtaattcaggcttcagtgcagtagacagtgcttaagagtaacagctggctgcagggtcttctcctctgtgtacttgtcctcgacaggtkcagaagtgacaaagtgccaaaagtgccctgtccccatgtgtactagtcttcagcaggggcagagtcctggagaaacctaagaagcagcctctttcagctcacgttccttgggccccaacagggtgaccactactgggtctgcagcagtgcactaggaaggggacagagggcaagagatgaccacctctctaaatctgttcccaggctttggtgtgcccctttcagcagctgatgtcatgatcgtgtttcctttga

SEQ ID NO: 870356 - DNA, 550 bp, Homo sapiens
cattgatggccaagcttttattttgtcccatatcattgccagggtggtatggctacctgccctgggtccatcctgtccttcagtaggatacctatagccaactcttatagccaattaaacattctaggccagacaggaatggaggtgagcacacagtccttaacccttaaatcaacataagagccaaaaccccgaagccaaraaataaggttaatatgcttgtcatcataaagccagtccgctatggtttgcatacaaagcatatattaagccataaagtaagaacaccacaaatagttttcaaattctggagaaatagggtagagagagagagagagagagagagaaatatgcctcacattttattgataagggtttattttactcaattgttaaaggctatcaatagcccaaaagaaaaagtgttcttgactttgaaaacaaaaacaaaaacaatcggcaatatttcaaataaaagacataataaaaaattatttcagtcctctactagttcagtccatgcaattagtcctgttctgcatgatattgg

SEQ ID NO: 870357 - DNA, 551 bp, Homo sapiens
acttattggtcaagaatcaggcagcactcaaaaccagtagtatgagaagaaggcttgtaaaggcagaacggagagccaaaataaggaaattacttgagagactacaagtagctgtttgccttatttgggtggaaagtctctagttagaggttagttggtggtttccgattggttaagcttaagtttcattttactgtttgcattgaattgagttttgtgttgcttacgtaggaaaccaaggcactggagcagtctcagcccagtggcccccattagttactttaatatcttctaggaaatttgtttgcttttttctaatatactcataaattttattataaaagttaagtaatactattgtatgaatatttttgtaatttgcttttattrttataattattaatgtgctgtgcaaatgtttaaatttcattacatattcttgtctagaatgatataattttacagctgcttagtatctcactgtgtgaataaaaaataagtaacgtcaaaatggtcatttgacatgttgctaataatagtttgtcattgca

SEQ ID NO: 870358 - DNA, 597 bp, Homo sapiens
ttggcatttcttcacatgccttagcagagacctgacaccctctgtctattggtgtccttgacagtcagggaagataaatcaatagcttggcacccttgcagcaaacccttagcatagcctttacacattatgctgaacttacatttctcaayaaaggaattgagtggcaagaatttcttctgaatacctcaaagaaagacaaaacaaaggagcaatttgaagcttctaggcaggtaaataaagacatggctccactgatgtgcagaatgctgatgacagaacctgcagccactgcagacttcctattaagaagaacctaagatgatctgtgtttttttaattcatcatccaattttcacatatagaaatgttcaccgtgttatatgctgcccaaatatgaacatctcaaaaagaaaatgcttcatagtgaaggcaacatttcactaaacttacataagaaaaatgataccaaattctagacaaagaaatttgctcgagccaggactttcaaaattcttcttttcccttgtctaaatctttccacatattcattatttactaattaatttgctagttaaattatggtttgtaatggga

SEQ ID NO: 870359 - DNA, 599 bp, Homo sapiens
agagaaaggtaaaacaatagttcatatcttttatcttttatatgtaatttcattagcactatcctttattagcacagtagttctttacttagtgttcaagattcaaagtgtgtgcttgggataaaatgcaaaactcggatgtacgtttgatccaatctggagtcaaaaatcaaataacagcaatgagttaaatcacttcaaatagttaatgcgatctagtggtaagtccaactgaaacaaaatttaatttacaacaaagagagtttcctaattgtggcatttccactctttatgaaaagatctaatttagttatttaggggctaattatcaagaggattatctaaggcttttgcttttcatccttttctcaaatgctggcaagttttgtagcatttcattgttagtggcagagtgagcgggcatgcggaagaggccgcagggattggttacttgrctgcccccaaaatagggcatacaaggattggccacccctggggaagaggattaaattattgactccgagagttttctaccttttttttgtatatttcacatactcctgattttattcctttcactcatatggaataattaagat

SEQ ID NO: 870360 - DNA, 626 bp, Homo sapiens
cagagcacttaccactcattccatagaccaagcccatggcagacaagaccaatcaattacagcattctttttgaaaagctcgaatgtggtttccaaatctttctcaacacaacactcctcctggcagcaaccattcatgatttagcattggccactgagctcaactgagctaaaatctatttgcattcctcagccatatcacactgctttcatttatggcgatgatgctgtttatrgatctgtacatgggtctgggctgagagtgcctctgttaacaaggatgactgatgcacgcatacttcttgtatttgggagaaggctggctggggttaggacagtactctgtggtcatggacttagtagaattatcttgttcacctggaggtgaaacccgtaactttggcctttacactctatgttttaactttcaattactatctggtgagaaatgggcatggaaaagggaattagtacctctggtctgaaggcaggcattacaaaaaacatcccccttcagtgatcagaaggatcccaaacactttgcaaactctgtatcaaaggatgagaatttaaaatgttcctatgttctacaaaagtatcaaatgtcattacagattccttaagat

SEQ ID NO: 870361 - DNA, 641 bp, Homo sapiens
cataaacactaaatgttgcctgctttaaaaaaatatttattgatagactggataaagaaaatgtagtacatatacaccatagaatactatgcagccataaaaaggaatgagttcgtatcctttgcagggacatggatgaagctggacgctatcatcctcagcaaactaacacaggaacagaaaaccaaacactgcatgttctcactcataagtaggagttgaacattgagaacacatagacacaaaggggaacaacacacaccggggcctattggggggtggggggttgtgaggggaaggaacttagaggatgggtcagtaggtgcagcgaagcaccatagcacatgtatacttattgyaacaaatctgcacattctgcacgtgtatcctgttttttttttagaagaaacaaaatataggtactacatatatatatatctagtacatatatatatattttgtttcttctaaaaaatatatgtatatattatttagagctcttttagtctatagttttgctcctccattgcaatttatttgttgaagaaatcagatcatctcttgtttcccttggctgagattttgctgatttcattcccacactgtagagtcccatctttctctggcctatgtatttttta

SEQ ID NO: 870362 - DNA, 641 bp, Homo sapiens
cataaacactaaatgttgcctgctttaaaaaaatatttattgatagactggataaagaaaatgtagtacatatacaccatagaatactatgcagccataaaaaggaatgagttcgtatcctttgcagggacatggatgaagctggacgctatcatcctcagcaaactaacacaggaacagaaaaccaaacactgcatgttctcactcataagtaggagttgaacattgagaacacatagacacaaaggggaacaacacacaccggggcctattggggggtggggggttgtgaggggaaggaacttagaggatgggtcagtaggtgcagcgaagcaccatagcacatgtatacttattgcaacaaatctgcacattctgcacgtgtatcctgttttttttttagaagaaacaaaatataggtactacatatatatatatctagtacatatatatatattttgtttcttctaaaaaatatatrtatatattatttagagctcttttagtctatagttttgctcctccattgcaatttatttgttgaagaaatcagatcatctcttgtttcccttggctgagattttgctgatttcattcccacactgtagagtcccatctttctctggcctatgtatttttta

SEQ ID NO: 870363 - DNA, 563 bp, Homo sapiens
aagtctttaaaatgttaaaatgttcatttggctatttcgctttctccactttgccatgtggaaattatgtaaggtcatttatttatctgcagccttagagctgtcctgaaaattaccagagcctagagataatatatgatagagctatttcatctatttcaaatagatatgatggagacagttaaacagttacaggaaagaatgacagkgttcttgcaccagtgtgtgagtttatagagagaagctgaaacaaaaatatcaaatctcagtgttttgttttttaaacgttttgtacttaagaatttcctttgctgtcttaattagcctgtggttttcaagagagttgggaggagaaagaatgggtagttttctcttcccccaaaataaagatgtgtctgaattatctcccttattctctttgtgggtgtttggggtgttagtacctagaagaaaaataaaagtttaacctcatttgaatactgaagtttggcctcctcacattaggaaatgacattttaagttatcccaatgccttcttctccctaactctggcagcttggctg

SEQ ID NO: 870364 - DNA, 513 bp, Homo sapiens
tgggtgtgcaattcttccctctcaggccatttgctgaattttaccctgtgcagggaaagagggtgagaagttcagcagataacttggatataagaagagaagatgtcagaactttctgggttcttacagggttggaagaaaatatagaaggttgagacttttaaagccaccagcccttttgggtcaygaccttggagacaaaggaggtgcgaaaaagggagccagctattccaccctggtttttttctccaaagcatttgccaattcaagaacagtgaaagattagagaataagaagccaagaagaaagtgactaacaaattgattagaactggtgggagcgctggtgtgcttggaaaacaaatactgaatttcaacatccatgaagaagcatggacctcatgttcttacagaagcgtatggaagtattggtgaatcagagagatcaaacctagcaaagactgccacctccctggcatcagctcagtcgctgattggacttgtgagatctacc

SEQ ID NO: 870365 - DNA, 651 bp, Homo sapiens
ataattgtttaatagaatatatagacagctaaaatttactagaacattatctcattctaaccttaagcccaattttctatataactatctcaaaatatttaaagtattcattaaaaaggaagcttaaaattttagaatgttatatgcatttttgaatagcattttgtgtattgaatattttatatgtaaaactaattctggaaataaaactctgctctgggtttataaaatagttgccacttgaatattcgtctgaagcccttccagacttcacctacagaccacagcaccctcgcccactagtaatgaactgcctccaaaaattatctcaacataatccacattatctcattctaaccttaaacccaatcttctatatgactagctcaaaatctttaaagtattcattaaaacggaagcttaaaattttagaatgctatgtgtattcttgratagcattttaatgctattagattgaatatattatatgtaaaaataattctggaagtaaaacctctgctctgggtttataaattagtcagcacttgaatatttgtctgaagtccttccagacctcacctatagaccacagcaccttctcccactaacagtgaactgccttcaaaaattatctcagcataatccatgaaa

SEQ ID NO: 870366 - DNA, 611 bp, Homo sapiens
cgtaaaggaatgtggtggctaatttgatcttctttccagcaaactgttactgtcggggcaaactgggtaagaggtatatataaatatataattatctcaaaataaaaatttaaatcaggctgggtgtggtggctcgggcctgtaatcctagcactttgggaggctgaggaaggaagattgcttgagccaggagtttgggaccagcctgggcaagatggtgagacttcgtctctcaaaaagaaaaaaaaaaaaaatttaaatcacaaatcmaaaatccaagaaaccagaggtttctctggagctgaattttccaaataacttcacattacttttcagttagacactggaatccccttgtactagaaagaactttggaatcattcccaaggcctagttttttatccaggccgttctacactcactttctaaatctcatcaatcactgaagttcttggaagcagcaacttaaatggacacaatttttacaactaaaaggcattccatggactgtactatgactcattgtgttatgaaaagcaagtaaaaatctgtccagttactttccatgagatgaatggttatctttggttatgtctaataaaagtctgaaa

SEQ ID NO: 870367 - DNA, 611 bp, Homo sapiens
cgtaaaggaatgtggtggctaatttgatcttctttccagcaaactgttactgtcggggcaaactgggtaagaggtatatataaatatataattatctcaaaataaaaatttaaatcaggctgggtgtggtggctcgggcctgtaatcctagcactttgggaggctgaggaaggaagattgcttgagccaggagtttgggaccagcctgggcaagatggtgagacttcgtctctcaaaaagaaaaaaaaaaaaaatttaaatcacaaatcaaaaatycaagaaaccagaggtttctctggagctgaattttccaaataacttcacattacttttcagttagacactggaatccccttgtactagaaagaactttggaatcattcccaaggcctagttttttatccaggccgttctacactcactttctaaatctcatcaatcactgaagttcttggaagcagcaacttaaatggacacaatttttacaactaaaaggcattccatggactgtactatgactcattgtgttatgaaaagcaagtaaaaatctgtccagttactttccatgagatgaatggttatctttggttatgtctaataaaagtctgaaa

SEQ ID NO: 870368 - DNA, 642 bp, Homo sapiens
attttggcttttgttgccattgcttctggtgttttagacatgaagtccttgcccatgcctatgtcctgaatggtattttctaggttttcttctagggtttttatggttttaggtctaacatttaagtctttaatccatcttgaattaatttttgcataaggtgtaaggaagggatccagtttcagctttctccatatggctagccagttttcccagcaccatttattaaatagggaatcctttccccattgctgtttttctcaggtttgtcaaagatcagatagttgtagatacgcggcattatttctgagggctctgttctgttccattggtctatatgtctgttttggtaccagtaccatgctgttttggttactgtagccttgtagtatagtttgaagtcaggtagcgtgatgcctccagctttgttcttttggcttaggattgacttggcaatgcgggctcttttytggttccatatgaactttaaagtagttttttccaattctgtgaagaaagtcattggtagtttgatggggatggcattgaactgtaaattaccgtgggcagtatggccattttcacaatattgattaggaagaatcaatatcgtgagaatttcagttttacaagatgaaaaga

SEQ ID NO: 870369 - DNA, 516 bp, Homo sapiens
tttttatgtccttggatggcaaacaaaaacactaaacagaaaagcttgagggaaagagctccaagtgagacagctctggggtagtcagtaccttactcctgatttcttagaaagcagagcctgaagaaagaatgaaagggttgaccctttagttgggaaatgaaaggctagaagaatgagggtkagaggagaaagaagcaacacaagggccaggatgcaaccatgtctgcccagctctcaggacttcttaagaaaatgtgcaaatgaaatctcaccttggagtagtccttgaaagaaagaaggaagcgaggactcctgtctttcatttttcttttatcaagttttacatgcagggagctaatcactcctcacacacacttctggattgtgtcatttaatcccctgagtaccacttgaaaaagcaggtcctaaactccagaatgtggcctttcacccacatccagaaggagacaggctaatcagcatagctattacaccaatatgtaaagagaaagg

SEQ ID NO: 870370 - DNA, 656 bp, Homo sapiens
aatccatttgaaaaattaaaagttaaaaacgaggggattaaaagcagatatatattttctaaataatataagatataaatgcagataatttatggtccagacagccaaaacattaaaaagtgaagaagtaaaaatttttttaggacaagggaaaagcttactatttaaagcatgttgaaagaagtaagattaaaaaaaaaaaaaaaacctcaacagtatgaatctaatttcattttaaaaatatgttgtttatggaagtatatatgcrtatatttatatacacatatgtgtttggaagaaaagaaaccaactgttagtctcaaattggtggaattatggataagttttatttaattttttcctattttctagtaaaagtgtgtattgcatttataattcaaaaaaaatgactgtagagcttttaaattacaaaggctatggtcagaactagtattcaaaggatattgggtaaacataggttctgctctgtgctgaactaggatgaatacagatttggtgttatggactgaatgtctgtgtcctctcaaaattcatatgttgaaaccctaacccccaatgggatggtatttggaggtggggcttctgggaggtaatcatggttagatgggctcatgatggaatcagggcccttgtaa

SEQ ID NO: 870371 - DNA, 627 bp, Homo sapiens
tggggaaagtcacactcacaggccagagctaatactcttttctgctgatcccagacttttagacaaagctgtgcctccttatccaattgcaaatcagaaaatccctgaatccatttatgacctgtgggttgccactttgagatgtcccatctttttaggtcaagccaatatatagcctccattcattgatttatgactttgcctgtaacctctgcctccctgcctttaaaaacacctgtaagccatggaggagtttgggtcttaagcatgagctgcctagttccccttgcttggcaccctgtggtaaatgcctcactttctcttctcagtgtttggctttgctgtgctgggcaagtggacccaagttctgtttgataacaatctcacacagagtagaaacttaaatccttaaaaargtacacaaggccctgtagttggaatctggcttaccttattaatctgcaatttcctctctgaactgaggccctcctactctccttgggatcatgctgctacagccacatgagcctcctttgatgctccccaacttgctaggcatgttcctacctcagggtcttgtacctgctgttcctccacctagaatgctcctccccagataccctcagg

SEQ ID NO: 870372 - DNA, 510 bp, Homo sapiens
aagagagtgagggaaggcaggtgtctgactcttaaccaaccagatctcacatgaactaagagggagaattcactggattccatgagaatggcaggaagccattcatgagggatcctccccaatgaatgggaggccccaaacacctcccactaggcctcacctccaacatgagagatcaaatttcaacatgagatttggaggggacaaatgataacagaccatttagcaaataatgctcagaggccctttctcctcttgcttttatgtagatgaagactttcsagtacatactgtccttgcctttcacttacttgccatcctgcctgtgtccatgaagacgacagtgctccacaagacagagagtctcagaaattagacatttctatcatttaaagagaatggaagtgctgtctccccacctgaccggcttcatagtggggttctccttaaagacaaacaagaagtttaccagtagcataaatggaaacctacctgagcatttgacttttc

SEQ ID NO: 870373 - DNA, 639 bp, Homo sapiens
acatttaagaggaaatttacagccctctttaaataccttataataatatttcggactaataaacacgactacttgagcccagaaacaataccaaaaaagctgacattaaaaatctcaactttataagaacacactgccaacttcctcttaagaggaaacagtagcaattttctcccttcagaacttaatcaaacatttccattaaaaggtaggtaaatctcgccatcatcacgttaccaaaaaaataataataatccaatttccataacacatacataaaccgctaaatcctaaccaaataaaacaactggaaccactagaaaacaaatcataaatttcctaaagaaaaaacacaaacttttaatccattaatctattgatgaayagattccaggaaagcacacacaaacagatccaaaatacatttaataaaacacaaggtactacccaaagcaacaataactatttgtgtctacttacagcctgtatagcttcgcagtcccaagaaacagcaactcaagaaacagctgaaggtgatttctgtttaaacgccttttgagaaaacaaaaacaaagcttatgttacatagaaaatacccaacaatgagactgtgatttggtagtgtcatgcctcatcctg

SEQ ID NO: 870374 - DNA, 664 bp, Homo sapiens
ccccatatctcccataggcaaaatatactcagcctctccccaaagaagtcagtccaaaagttctgttttgctatggcattaagctcaaagcccaggctttccagctgtgataatggagtacactccacataaaatctgattatgatttgttttgctctagtcaagcatgagcttaaaagattagtttttcatgctccccaaatatacagcagtagaacaggatcagaatgactgcattcattaaacacttccatatgaagagaatcatagaatagacatggcagacaccaatgtgattcacaacagttctgaaatctcaccaggtaaaggtggtgaggaccctctaccctgggagatgagaatgggataggaacrttccttgaataggccctgatcttgctctgtagcagaggcacctcaaatccattgtttttttcccatggtctttggctctcccctgtttgtgaagtctgcagtgggcattaaataaaagtgcatcatcattacaggctgtgtagctttttgtgccccatgcttataaacagaagagaaggaaggaccattttaagtctctcaaagtctcagacatttataatttctggcttatattttctctagatgtaaagtaatattctaggacttttaatctatttgattcagtggg

SEQ ID NO: 870375 - DNA, 612 bp, Homo sapiens
cccagtgatcccattactgggtatgtacccaaagaattataaatcattctactataaggacacatgcacatgtatgtttattgcggcactattcacaatagcagagacttggaaccaacccaaataccgatcaataatagactggataaagaaaatgtggcgcatatacaccatggaataccatgcaaccataaaaaaggatgagttcatgtcctttgcaggaacatggaggaagctggaaaccatcattctcagcaaactaacacaagaatagaaaaccaaacaccacatgttctcactcgtaagtgggagctgaaccatgagaatgcrtggacacagggaggggaacatcatacaccagggcctgtcagagggtgggggctgggggagggatagcgttaggagaaatgcctaatgtagatgactggttgatgggtgcagcaaaccaccatggcacgtgtatacctatgtaacaaacctgcacgttctgcacatgtgcccttgaacttagagtataattttaaaaaatttaaaaaaaaggaaaaaaaaaaaagcaatgcatgttgccatgaacctcaaaaaataggctaagtgaaaaagtcagacaaaaaa

SEQ ID NO: 870376 - DNA, 607 bp, Homo sapiens
ggggcctgtcgtggggtgggggacagggggagggattgcatggagaagtacctaatgtaaatgacgagttaatgggtgcagcaaaccaacatggcacatgtatacccatgtaacaaacctgcatgttgtgcacatgtaccctagaacttaaagtgtgtgtgtatatatatatatatatatatgctttatatatatatttaatatataatatatattawatattaaatatatataaagcatatatatacatatttaaaaaaaagacaatggtcaaatgatgggcagcacttttacagtgtgtgggggcaggagctacagtgtgtgagcagagcagtacaagtgtatcccagggagcagcattctcagctgctttcaagtggcctctgagtttggttattttagtttatttggtttcattgtttttggaaaacgctttttttaaattataaaaatctaacatgctcaccaaaaaccttagaaaatacaatgcattttagcaaaataaaaataaagattgatcctaccaccctgacataaattctatgaatacttgctatacatccatctcaacatctgtttgtttcttagtttagcattgctttcaggg

SEQ ID NO: 870377 - DNA, 607 bp, Homo sapiens
ggggcctgtcgtggggtgggggacagggggagggattgcatggagaagtacctaatgtaaatgacgagttaatgggtgcagcaaaccaacatggcacatgtatacccatgtaacaaacctgcatgttgtgcacatgtaccctagaacttaaagtgtgtgtgtatatatatatatatatatatgctttatatatatatttaatatataatatatattaaatattaaatatatataaagcatatatatacatatttaaaaaaaagacaatggtcaaatgatgggcagcacttttacagtgtgtgggggcaggagctacagtgtgtgagcagagcagtacaagtgtatcccagggagcagcattctcagctgctttcaagtggcctctgagtttggttattttagtttatttggtttcattgtttttggaaaacsctttttttaaattataaaaatctaacatgctcaccaaaaaccttagaaaatacaatgcattttagcaaaataaaaataaagattgatcctaccaccctgacataaattctatgaatacttgctatacatccatctcaacatctgtttgtttcttagtttagcattgctttcaggg

SEQ ID NO: 870378 - DNA, 662 bp, Homo sapiens
agcgtaaggcatggggtttgaagccagagggcctgggtttgaatttgcctgtgttactccaggcaaatcattaaagtccaagactcatgtgtagagtcttccttcatgtgtagaatgggaataaaaataaagctgtcttatcagttagtatgaaaattaacaagatgatcaatgcaaattgcatagcacagtgcttggtattatatagcccttgataaatattaaccactatcatcacataataaacagcaaaataaagaaatgtagtaagaaatatcaatgaaatttctgaaaaatataaccactcattccaatctaatactgtaaaaaaatgatcgtttttattccagcaaggactcaggaaaaaaacctatcaaartgaaaacagcaaagggaacttagttgttttctgcaaaagaaatcctgcccttgttgacatgtaccctggtttccaaaatgcaaagttgtatagttttcatgaccttgtgttaagttacacatagggaaaatgcaaagtaggtatcattatttctgcagtgtgttaactgatgataaaaaatatttgatgtagtcagtagctacagatcctatcagtacttgaaaggcttcactgcccagagttgatgaataaaaccgcagttctttttggctggcttcataag

SEQ ID NO: 870379 - DNA, 665 bp, Homo sapiens
agcaagtcattttgcagatattgataaactgattctagagtttataaggaggggcaaaagacccagaatagccaaaccaatgctgaaggagaagaacaaagttggaggactaacactgcttggcttcaagatttactataaagctacatgctatgaactgaatgcattcccttcaaatgtatatgtagaaatcttaatccccaatgtatggtatttaaaggtgaggcctttggaaggtaacttgattgtgtgtagagccctcccaatgagattagtgcccttattagaagatacacaagaaagatgatctttctctctagcatgtgaggacatagcaaaaaggtggccgcttgcaaaccagaaagagggcctcactagatattacatctgcagatgtcgaattttggacttctaagcctccaaaagtgtgrgaaacaaatgttttttgtttaagccactcagtctatggtaatttgttataccagccccagctgactaaggcactgcagtaatgaaggcagtgtagtattgacaaatagatcaatagaacaggatagaaagcccagaaatagacccacatagatatagtcaattgacctttaataaagaagcaaagacaatacaatggagaaaatatagtcttttcaacaaatcgtgctagaaca

SEQ ID NO: 870380 - DNA, 671 bp, Homo sapiens
cagtgggagttaacacttcaagtagtgaaaggaggtacaaaggcctcagccatgtttgcactggctcagagctggagaaactgtacataaatcaacctagaacacacatgcaaccctggaaataggttgttagagtgagttaccattttagagacgtgaacattgattactatcaatttcagaaaaaaagtgtctcccagaatgcttgcttgtgtgggttctctgcagcaactttatagacttcatgtcacccaatcctcttatcacaactatgtgataggcactttgatctctacttcacattcaagaaaactgaggctcagaaaatttaggttaattgctaggggtcaaacagctagtgagtgactgatacaaggtcaagcttttttctttccacacarcttgttcccttcctggcattaagtgtccatatgtgcaggcctggaagatgtaaatacgctgaaactaactgggcattgccctttaaattttgaatgaaccttttctttataaaggttctacatgctatgatttgtgtaaatcttcagtgttagtaataataccaataatgataatcatcctttcaaaactgatttctcatattcatgtattagcttaaaggtaaaggcttcctaatccttgtcatgtaaatagaaaatctctgcctaaat

SEQ ID NO: 870381 - DNA, 636 bp, Homo sapiens
cttgactcttcttccacccacagatgcactgaataaacattaacatgctgataaattccctctgagagaaagtcagaaatgagttcagagattctatgcactgggcaactgagaaaatacccacatcgaacagatagaaacagctgaggcacacatgggctcaaatccctccctggatactgtgccatatgatsaggaaggcatttccaacatccaacttctccctgagatttacagtcaattgatttttgaggaaggttccaagtacccacaatgaagaaaggatggtctcttcaatagatgccattgggaaaactgaatattcacatggcaaagaataaatttggaaacttatctaagcctatacacaagaatcaactcaaaatgaattacatacttaaacataaggcttgaaatcataaaactattagaagaaaagataggggaaaagaattattatgttggtttggccaatgatttcttagatatgacccaaaaccacatgtatcaaagaaaaatagacaaatgggattacatcaaactaaaaagcttctgcacagcaaaggaaacaatgagcagagtgaagagaaacccacagattggaagaaagtatttgcaaatcatagatctgaaaag

SEQ ID NO: 870382 - DNA, 636 bp, Homo sapiens
cttgactcttcttccacccacagatgcactgaataaacattaacatgctgataaattccctctgagagaaagtcagaaatgagttcagagattctatgcactgggcaactgagaaaatacccacatcgaacagatagaaacagctgaggcacacatgggctcaaatccctccctggatactgtgccatatgatgaggaaggcatttccaacatccaacttctccctgagatttacagtcaattgatttttgaggaaggttccaagtacccacaatgaagaaaggatggtctcttcaatagatgccattgggaaaactgaatattcacatggcaaagaatamatttggaaacttatctaagcctatacacaagaatcaactcaaaatgaattacatacttaaacataaggcttgaaatcataaaactattagaagaaaagataggggaaaagaattattatgttggtttggccaatgatttcttagatatgacccaaaaccacatgtatcaaagaaaaatagacaaatgggattacatcaaactaaaaagcttctgcacagcaaaggaaacaatgagcagagtgaagagaaacccacagattggaagaaagtatttgcaaatcatagatctgaaaag

SEQ ID NO: 870383 - DNA, 608 bp, Homo sapiens
cactacccacacctttgaggtgatgctggtgtaaacaaacctactgcactgccaattgtttaaaagaatatggtaatgtgcttggcctttatattcactcacttcacttctcttactcatggctcacccagatcaagttccaatcctgcaagctccattcrtgggaagtatcctatacagatatactgcttttaatcttttgtaacatagaaaaggaggtacagtatatacagcaggagtcccataagattataataccatatttttactgtacctattctatgtttggatacacaaatacttaccattgtattataattgcctacagtattcagtacagtaacatgctgtacagattcgtagcctaggagcaataggctgtcctatatagcctaggtgtgcagcagactataccatctaggtttgtgtaagtacattctatgatgtttgcaaaatgatgaaattgtctaattacacatttgtctgaatgtatcctcattgttaagtgatacatgactgtattctttttgatgttattttaaatgaaattgctttattgatttatttttcagcaaggtcattattcgtgtataaaaataccactgatt

SEQ ID NO: 870384 - DNA, 557 bp, Homo sapiens
gaattcatattttgatgccttaacccccaatgtgactatattcagagataggggctttaaggagatacttaaatgaggacataagggtgagactctaatgmaataagacctttttttttttttgagacagagtcttgctctgttgcccaggctggagtgcagtggcatgatctcagctcaatttctgcctcctgggttcaagctattctcatccctcagcctcccaagtagctgagactacaggcatgcaccaccatgcctgggtaatttttatatttttattagagattagggttttgctatgttggccaggctggtctcaaacttctggcctcaggtgatctgcctgcctcggccttccaaaatgctgggattacaggagtgagccatcgtgcccggcctgcaatggaccttttaagaagagaaagagataccaaatctctctctctctctctctcttcacaaataaaaggatatgtgaggacatagagaaaagacagccatctgaaaaccaaggagagagacatcaccagaaaccaaccttgctgccaccttga

SEQ ID NO: 870385 - DNA, 557 bp, Homo sapiens
gaattcatattttgatgccttaacccccaatgtgactatattcagagataggggctttaaggagatacttaaatgaggacataagggtgagactctaatgaaataagacctttttttttttttgagacagagtcttgctctgttgcccaggctggagtgcagtggcatgatctcagctcaatttctgcctcctgggttcaagctattctcatccctcagcctcccaagtagctgagactacaggcatgcaccaccatgcctgggtaatttttatatttttattagagattagggttttgcyatgttggccaggctggtctcaaacttctggcctcaggtgatctgcctgcctcggccttccaaaatgctgggattacaggagtgagccatcgtgcccggcctgcaatggaccttttaagaagagaaagagataccaaatctctctctctctctctctcttcacaaataaaaggatatgtgaggacatagagaaaagacagccatctgaaaaccaaggagagagacatcaccagaaaccaaccttgctgccaccttga

SEQ ID NO: 870386 - DNA, 571 bp, Homo sapiens
tttcataacgtccaagagaagttttataagactattctgtcagcttttcaaattaaggccaatattacccaagtgtatactctttagccgtagatgaaaagaaacccctaggaacaaatgaaagtttaaatgaaactgctcatttaaattaagaatgttagtggcactttgattacatgtgttgctcaatcaaaatggaaggctatttttttttagcttcatttaaaaaactgccaggacaatatagctgcctttaattacactcttcttttgatgggcttttatatatttaattctacttctctattaccagtgcttaaaagaagaaaaaagctttaaaacctttctgatgaaagacagctaagayaaaagatttcatcaacaatcaactataaaaattattaacatgagcccattcagttatgaaataatgaaaatacatagatcacagtttgtttcatggctcatgtcagtgagtgaatacattgcacagacaggaatattaagaaactcagacagaggctctgataacactcattaattaaatgaaaggtctctgcttcaactcggt

SEQ ID NO: 870387 - DNA, 597 bp, Homo sapiens
agaatctgtgaatgtgaccttatttgaaaaaaagactctatatttaactaagttaaatatgttgagatgagatcatcctgggttatccagatgagtcctaaacccaatggcaaatatactcacatgataaaaacagagggagatttgagatacacacacactggagaaggtgatgtgaatataaggcggagacaaactggagccacgtggaagccagagaagccaagaaatgccaacagccactagcagctggaaggggcaaagaaggattctcccccggaacccctacagggagcayggcctcaatcttaatttcagtttgctaacctccaaaatcatgagagaataaatttctgtgttttaagccacccaattgatgttaactttgaaaggagttagccagcttgctttaggcagacagtaaggaagggtccccagagaacctccaacccatgttttgtgcagataagggaacttgcatagaggacttacctaaacatgccttcagaggactaaggacccacatgcacactggaagaatggggtggagctaccaggaatttgtgccttatacaaatagggaactcagccttatca

SEQ ID NO: 870388 - DNA, 650 bp, Homo sapiens
tacattggccttgggaacaatagcatttgttgtcagtgatttctcatcagatccttcattagaatcctatagcattattgagcacagttggatgagtatgagatcacactcactggatctttattccttcccaatcctggcttgtcttgactttttagtacaaaaattcctatctcatttaaccattagttggcactcttggttttgtccagatgccatatgttttaaaggattttatttcctaaatggcatttktagatggtaacttttttgaaaatgtatttactcagtgttaccagtatcaggttttatactcataatatagatggccctttttagacctcagataaattaaagtggagaaaagttccattagccagaataatctttaccgatgagtggtgctgaggactaagaaattaatggttggaggtgctgggagtcaaactcagggccttgtacatgagaggcacctgtctaccagtgagctacactcacttaccaagcttgaataatctttagaaatgtattggtcacatagtgtctgtcatgcttgagcatttggcagtattccatcatgagactgactcatagagggaaactttttgaaacattttgtaattgagtattgcatcaacttctctagtttc

SEQ ID NO: 870389 - DNA, 633 bp, Homo sapiens
agaagcctacaaatattgattccacttaaatgtataaaaagaaaaatttacaaagaaagcagaatagtaattacttagggtttcagtgagagcaggaaataaaatgggggtgatagaaatgttctaaatttgaattatggtgactgcataactataaatttactaaaaatcattgaattgaagacttacaatgggrgaatcttataggtatgaaatttattaatcagtaaaggtttttaaaggaataggtatagaatttttacttagtttcactctaacagaagtttttattaacatgagtaacttctgattagactatgatatttgaaggtagtcaaaacctggcaataaacctgtatgggaagcagaggctgtgtctgtcttatgttacttggagaaagatttattgtaatatattaagctttgctatacaagcatatagtatttctttccaattctttcttatgtctccaatttttacaaaataattgttctcataattccaattaaggatttaattggggagtgaggatcttccatttggctatcccatagctttcaatgtgccgactactttacaaatattaattccaagcacaactgtatgagaaagtcattatcatttttatttta

SEQ ID NO: 870390 - DNA, 633 bp, Homo sapiens
agaagcctacaaatattgattccacttaaatgtataaaaagaaaaatttacaaagaaagcagaatagtaattacttagggtttcagtgagagcaggaaataaaatgggggtgatagaaatgttctaaatttgaattatggtgactgcataactataaatttactaaaaatcattgaattgaagacttacaatgggagaatcttataggtatgaaatttattaatcagtaaaggtttttaaaggaataggtatagaatttttacttagtttcactctaacagaagtttttattaacatgrgtaacttctgattagactatgatatttgaaggtagtcaaaacctggcaataaacctgtatgggaagcagaggctgtgtctgtcttatgttacttggagaaagatttattgtaatatattaagctttgctatacaagcatatagtatttctttccaattctttcttatgtctccaatttttacaaaataattgttctcataattccaattaaggatttaattggggagtgaggatcttccatttggctatcccatagctttcaatgtgccgactactttacaaatattaattccaagcacaactgtatgagaaagtcattatcatttttatttta

SEQ ID NO: 870391 - DNA, 670 bp, Homo sapiens
agaataattccttttctgggaaagcaacaaagaaggtaatctgtaggaaagttgaaggaatttacactggatgtcttagttatcacatgagattttaattgcttcaactttagtagatgaagtagagataaaatagttaagatataaatagtttatagggactaaagtaaggagtcaaccagagattaataasactttcagtagcagtaaaacccaatgagtattagcatctatttgtactatatttcaataaatcaagacaaaaaaattcattgtaaaatactgcttcaataggagaaaacaaaattcctaagataggttcatataaggctgagtcaccaaacactgtctttagcgtaaggctaaacaaagtgtaaacccacccacatggaaagttacatgcctcaaccttggcagtagatgtagggagaggtaaaaaattatttgagaatttgaactacaggttaatactcgtgcagatctaccatctaaattcacacctcaagtataggccaaaacatgtcaagcagaaaattcggcactgtgaagttgacagtgagcaacatgactgacagaagtgtatacagattctgccaggaagaactctttcaattcaggtctacagaaatcgtaagattcctttgtaagatgcattctaattttagaatgt

SEQ ID NO: 870392 - DNA, 599 bp, Homo sapiens
tccttgtggttcacttcccctcagtccgactctttatcaagtgtcaatgtgccctacaaaatggatctaggggagagaaatggatggattccattgatactactcatatctcacccctgttcctaagctcctctcctttcaaaccttcatatctgctcttcctgagagtcctaaatgtctcatgtcaccagttgtccaggaatttttagggtaggcattactctatcagaactctaagaccttttyctggcaccttactttgacatgaccgaatattatacaagatatcagtagaacatgagtgattgattatgcaggaaactgatgattagaactggagtttaagctggaattagggttagggttagagaagaaaatagctatgctttgtaagacaggaaggaggactccataggtacatttcttgtattgtgaaaggaaggaagatgacaaattaggcttacagatctagtggttgaaactttaagaaattccattcagatggtttctatcaaataatagttgacgttgttaagctctttcaatgtaggaaatattgggctaaacaattgtacatgtacttggttatttttatggca

SEQ ID NO: 870393 - DNA, 599 bp, Homo sapiens
tccttgtggttcacttcccctcagtccgactctttatcaagtgtcaatgtgccctacaaaatggatctaggggagagaaatggatggattccattgatactactcatatctcacccctgttcctaagctcctctcctttcaaaccttcatatctgctcttcctgagagtcctaaatgtctcatgtcaccagttgtccaggaatttttagggtaggcattactctatcagaactctaagacctttttctggcaccttactttgacatgaccgaatattatacaagatrtcagtagaacatgagtgattgattatgcaggaaactgatgattagaactggagtttaagctggaattagggttagggttagagaagaaaatagctatgctttgtaagacaggaaggaggactccataggtacatttcttgtattgtgaaaggaaggaagatgacaaattaggcttacagatctagtggttgaaactttaagaaattccattcagatggtttctatcaaataatagttgacgttgttaagctctttcaatgtaggaaatattgggctaaacaattgtacatgtacttggttatttttatggca

SEQ ID NO: 870394 - DNA, 608 bp, Homo sapiens
gattccactcttgctcctcttggtactccatgattgccacatggacaaatctagagtaaaagacactacatgcagtgaagcccctgttccaggttaggttgtcatattccaactagttatagtcaacttgcaggctaatggatatrtgagtctagctattagtctgctgcaggctagaagaatcacctagcttctcagctgttagtcattgaatctctgcagtgaaaagtcacttagattattgacagctgactcaatgaatgaatgatccaagctggacttaacaggctcaaattggctgcaggtagcccaaattgcagatctgcaaaatcatggggcacataaatgactgttacataagtcactaaattttaggatagtttgttatacaaaaaaggctaactgatacagacattggttcttagagtagggtgctaccataacaaaaacctagaacatgcggcgttacctttaggagactggagaaatggtgaataaatcataataaattcttaaaaattacaatatgtactgaaatgaatccttaagagtaagacatctacagtatacaatttatggcggtaatacaagcacaacattgagtgtga

SEQ ID NO: 870395 - DNA, 678 bp, Homo sapiens
ctttaagatgcagttctttgcctgctgttctcactttctcttcctttacttcttctccagcttcttcacctagctaacttctatttgatgattcaaatataactttctctaggaaggctttcctggtcactgttaacatcttcccccyaccttacctcctgtttgattctctttcccattatttttgtgatagttgaaagctgtactttcccacatacaccacactacattataatttctcctcatcttcaacttctttatattgaaaatcactcaaaaccatacagttatatggaaattacattacctgctcctgaatgacttctgggtaaataatgaaattaagacagatatcaagaaatgttttgaaactaatgagaacaaatatgccacatactagattctctaggacaaaccaacagcagtgttagaatgaaagttgacagtactcaatgcccacgttaaaaaattagaaagatctcaaattaacaacctaacatcacatttagtggagctagaaaaacaagagaaaatcaaccccaagggtagcagaatacaataaataaccaaaataagagctttactgaaggaaattgagatgtgaaaaattatgcaaaagatcaatgaatctaggagctgtttctctgaaagaattaataagacagatatactgctagc

SEQ ID NO: 870396 - DNA, 630 bp, Homo sapiens
tccatgatgttatgggagcaggcttcatctgtcttgctgcttgccatgcgtggtctccatacccaaggatcacatggtctcacatggctgtttcaactctagccataaaaactagttctgacaataagaaagagagcaagaaagggatgggccatatccctgacctttaaagatatttccaagaagatgtgacctatttatgtgtacataccatttccagaacttcgttatctacacacacttagctgaatggtcagacagaaagtgtaatttttgcgtgatgctgccagatgcccagctaagatttggggttcctattactgagaaagaagggaacacaatcttgaaaggacaaccagcagcctctgtcccaatcatctgagmcactagcatttggttttccaaacaattttataattttgagcaatatatttgcattgtaatttttaaaacttaatatcaattttttttattttgttgttcatttaacccacttactgagcagtacagaattaaaattataatttcatatagatattgacatttcatttcttctgtgagcctaaaaatcatggattttccattccttcagcagtagtctctcattgtagtgatgcctaagttatgatt

SEQ ID NO: 870397 - DNA, 676 bp, Homo sapiens
aaatgaaatacaggagcatttctaacactatcattatgccgtatgaaggcagtgtcaggagggtcatggtcacattgagcttagaataatacaaaataagatgaaaggggatttttttttttttttttttttttttgcagagcaggaagagaaagggtgaagaaacgacaaagaagaacagaacaaaaaaaagacagaaaataagaaccctttacgacacttttctgtcaagaaaagtgatgttcagatttctaaaggcagaacaaagtttactaagagagaatcaatgcctgtaatacgcaaaaaaatattgcaagaaagcacttacatattagggactctgacacatgggcaaaggtagtaacagaaggaaatggggcaaggaaactgggacaagtcagagtaaacagttatgcgaaaatttaaaagatgggatgaattgaagggaatgtctaatatttgcaagtaaatggaaattccaggagtayaaggcccttgaaaactgacagtaaatacagctgctctgcaaggaggctgccttaaaactgctctggcaaaagagctgcagggccctctcagcccaactaaggcttcaaaaatctctaattcatcaaactagtcgtccagcaaactgatttgtttgtaatatgacctgcttcctttcaagtctttaccg

SEQ ID NO: 870398 - DNA, 640 bp, Homo sapiens
attgggcacttgaataagtggctagaacaaatttggatatggtgtaagtacaagtaagtacaagatctttaatttcacaaacttagtattaaacaaaggtaaaatatctcattaataaatatttatattgattgcattttgaaagtatatttatgatgtattgtacatattggattaaataaaacatattataaatcaattatgacttttattttactcctttaatgtggctatcacaaaaattttaaaattatttacaagtctctcatgctctaaacatgtggatgatgcaataattctctcttgctttgtggatactataatatgttagtctctatagataagagtgttataagaaattatgtttaaaagtcttaagataggaagcctttagaaaatcatatacgtaatatacygtcatgagctgtttaatgacagtttagtcaatgactaactgcatatatgaggttaatcccataagattatgatgggactagcctcactgtatttttactgtaccttttctaggtttaggtaggtttaggtacacaaatacttatcattgtgttacaattccctgcgatattcagtttggtaacatgctgtacagattggtgtctaccagcaaaaggctatgcca

SEQ ID NO: 870399 - DNA, 690 bp, Homo sapiens
gatcttttgtatttcggtggtgtcagtgtagtatctcctgtttcatttcttaatgaggttattcggattttctctcttcttttcttgttgtggctaatggtctgtcagtaatatttatattttcaaagaacccgctttttgtttcatttatcttttctattttttgtttgtttgtttgtttgtttcaattttatttagttctgctctgatcttggtaatttcctttcttctgcagggtttgggtttggtttgttcttgtttctttagttcctggaagtgtgactttagaatgtcagtttgtgytctttcagtcttttttgatgtaggtgcttagggctgtgaactttcctcttatcaccacctttgctgtatcccagaggctttgataggttgtgtctttactgtcattcagttcggagaacttttaaatttccatcttgatttcatttttgacccaatgctcatttagaagcaggttatttaatttccatgtatttgcatggttttgaaggttccttttgaagttgatttccagttttattccaccgtggtctgagagagtgcttgatataatttcaattttcttaaatttattgagggtcattttatggcctatcatatggtctatcttggagaaagttccatgtgctatgtgaatcgaatgtgtattctatggttatttgatgaaat

SEQ ID NO: 870400 - DNA, 602 bp, Homo sapiens
tagcctgtctaccattgtagcttcatggatgtctctcttccccaggaccctgtggtccatccaagctgaattaaaagcaattcctgaatcccactttgctttctcctgtttccttgcctttgcatacttgtatacctttgaattatgactctccatccccttctccttcatcagctaagttcctatattttttagcataatttttatctcttctacttaagtcttccctcaaactgcctgggttttcacaacattgtcttcatgactgtgttatatgacataattctctctagtaccttattcagctgtccttataattaaaattacattgaactcccatagggctaggaattgaggattatatagcaaaatccccggcaacttttatattacctgcwtagaatggatgctatgaggtaatcgccatgagtatattttagttcatagctaggatgatgaattctgttactaacttccaaaatggctgccactgtttctgatactgaccaaagacaggcttttccttaagtgaccctacaaaatgaaatgtagtacatataatctccatccaatctcattcttttaatataaaattgatgttt

SEQ ID NO: 870401 - DNA, 602 bp, Homo sapiens
tagcctgtctaccattgtagcttcatggatgtctctcttccccaggaccctgtggtccatccaagctgaattaaaagcaattcctgaatcccactttgctttctcctgtttccttgcctttgcatacttgtatacctttgaattatgactctccatccccttctccttcatcagctaagttcctatattttttagcataatttttatctcttctacttaagtcttccctcaaactgcctgggttttcacaacattgtcttcatgactgtgttatatgacataattctctctagtaccttattcagctgtccttataattaaaattacattgaactcccatagggctaggaattgaggattatatagcaaaatccccggcaacttttatattacctgcatagaatggatgctatgaggtaatcgycatgagtatattttagttcatagctaggatgatgaattctgttactaacttccaaaatggctgccactgtttctgatactgaccaaagacaggcttttccttaagtgaccctacaaaatgaaatgtagtacatataatctccatccaatctcattcttttaatataaaattgatgttt

SEQ ID NO: 870402 - DNA, 694 bp, Homo sapiens
gccacccaagaaccaggcccgactgctcagaggagaagggatgccccatccctgaaatgtcagaacccctccccagacattgctgcactctcccgttgggcctcagttctggcgggctgggaagctggtggctggcttgccttctggaggaggtggcatcctacctcctgtcccttctctcagctacagccgcggccaaggaggaactcctgagtccggggagcccccacctcaaaaaggccccagctgctggcctgggggccagggcmcccgcatgacctaccagcacaggtcatagagtcctagaatgttcaacgcccagagttccaggaaagaggctggccctgggaggggagggccctgtccaggcctcccaggacagcagatgggagcagtggcctcgcaactccacagttagagacactgccctgccttgttctatccaaagtctccctccctcctttctcctggagtcaagcatagctgacttttttttttttttttttttaatttgagatggagtcctgctgtcgcccaggctggagtgcaatggcacaatctcggctcactgcaacctccaccttctgggttcaagtgattctcctgcctcagcctcccaagtagcaggggttacaggtgcccgccatcacgcccggctaatgaagcatagctgacttctaatcctaccccttgc

SEQ ID NO: 870403 - DNA, 729 bp, Homo sapiens
ctgttgtctagccttgatcaattttcagaccatttcaaaatgcctctggtgatatccttctcatcatcttataaagttttgcaagttgttaggaagagaacattaaatcaccgggtcagtagagccgttttcttccctataattcatatgaatccactaggtacaggaaatgttcatttaatcaatgtgatgccattgtcgtagaaaaagctcagtcatttttttttagagttacattacaaatgttgcagaatctgtttattcattagagcaaaaatgtcacaaaacacaactcctatctttgtagagagtttatacctgtatatgaatggaaacacacacacatgcatgcatattcacacacgtgcccagattgaagattttccctatcactcttccggtaaccattctcctagcaagagatatcaagtgcaatagccaaaaaattattctacrcttttcatattgatctacttcattcaattattcattaccaaagtcttaggcagattgatcttcaaaatgtaaatgcaatcatttatcaccaccctaaagccatacaatgcttttccattttagttaggctaaagcaaaaactccttaacaatgtatacaactccttagattttctatattaggagtctgaaaattataacacaaaagccaaatatatttacgactttatttgtaagtgaaattttattggagtatagacatacatattcattt

SEQ ID NO: 870404 - DNA, 564 bp, Homo sapiens
attttattgttattattattttttgagatggagccttgctctgcacctaggctggagtgcagtggtgcaatcttggctcactgcaacctctaccccctaggttcaaggtattctcctgcctcagcctcctgagtagctgggattacaggcgcccaccagcgtgcctggctaatttttgtatttttagtagagacggggttttgccatgttggccaggctggtctcgaacttttgacctcaggtgatccacccgcctcagcctcctgaagtgttgggattacaggtgttagccactgggcctggctgccatatatatatatatatatgtttttttttgagacagggtctcactgtatcacccaggaggagtgcagtggctccatstcagctcactacaactctccaccctcaccccctaggctcaagcttcccaccccagcctccccagtagctgggaccacagatgcagaccaccatactctgcttttttgttttgttttgttttggaatttttggtagagatagagtcttgccatattgcccaggctggtcttgaactccaca

SEQ ID NO: 870405 - DNA, 618 bp, Homo sapiens
ctttgaaaagtaaagagttgtatgcacgactcttagcttaaaggcaacttccccatctctctctgtcctagcaccctgtttatttccttcatagaaccaatcagtgattatttaatttggtttcctcacttgcttgcttctgtctacctccccaacaaatccatagtgtgctggaagcagcccatcttcctaactccattttgttgctgggtagcttgaagaggctgctgastatgggggcacccctttggttttacatccaaagcctcactcgcctcaccctcgtctcagccctgagagaggcacaataaattcaggtccgctccttatgccttgccagccccctccctgcccactgtctactctgcaggcacctcccttcaaagcccctttccctggtttttcagagctcagcgccccctgggcataacctcccttctttctagataagcttctccttcagcactgtgacggtgactctactatatcaaccccaaggtcaattttgtgtgttgggagaatcactggctgattcatgataggaatatttacaccatggcaactggcagatgctagaaatcagggcctcctgcctcttcatcataccactaagcatct

SEQ ID NO: 870406 - DNA, 607 bp, Homo sapiens
ttatgataagtttcattctccctctgctttacatagcaacaagacttttgatgaactacaggagttattgacatttcacttctccccagtaccgtcagtcattgtttagaatttaagtattacaaatgaaatcccgagattagtgaaggcattgccattttttgttccactcagatgttttgttttttctcaactttgagactttggggattttatggatgacatgatacagaatgactatgtacttgtagttgtgtacaaagtactaaaataatgccttttgattgattcaaatttacattcacaatggcctgataaaaggaactagttattaaagctttatctacacatcacaaaaactaaggtagcaactaaamattgtcaataatatatagagagaggcaaaggagggtttactaagtgaaaagggcagaaaaagggttcatgtttattgagtcttttgaagtgccagcacttttatatctgttatataatagcattcaaagttcataaaatcacttgagatagatattattagttctactttgaaagtgaagcaagtgagactgacaaaatggaaacatttgcttattatcaaatgcctagg

SEQ ID NO: 870407 - DNA, 705 bp, Homo sapiens
tgaaatagtgttttcagaatgatttatatctgagtctatacccagccaaaatatcaattaagttagagggcagaatagggatatttttagacatgaatggaatttaaaaattattccaagggttccttggatccttactcagaaagctacagaaggatatgtcctagtaaaacaaggaaataagccaaggaagaaaacaacataggatctagaaacagggaactcaacacaagaaagatgtaaatgaactcctggggcagcagtgaagcaaggtcccaggatgacaaatgtataaaatgcaacggaacaaccagtcctgattagaaaagacaaagccaaaagggagatctctgatttaaaatgaacaaaatggaactgatatattatcttatatgttgaccgtgttttgaaagatttcatagatctgtcagtgaattagaaaagaatcagctagagatatacacacacaaagaaacaaagaaaattaaaatgtaaggcaattaactcgtgggaaaaaaagttgaccaaaaaaataaaygaaattacagctgctcatcaatgaacaatatttacattgttaaatagtgtaaacagtgaattatcaaaaaattgggttatataactgttgaaaggatgggagaaaaatgatgtgggaatgttaagacagcatgatttttacctaccataatagaagataatacaatc

SEQ ID NO: 870408 - DNA, 603 bp, Homo sapiens
tgctacctcaattagttcatgcaaccttgtgagataaagacttaagtttgaatttccctggctacaagtccatggtttttctattaagccatgttggatggtgtcaattggtgacatcatccatgtgaacattcctcatgtttagatctagcaggacaatgtggcatagagaggggtggtcaggagaactgagttcttagcctggtcccaaggccacctcttgggaagtcctttcaccactctggggtccartttccaaatccagagtctcctctatctaacattttcagatgaaataaaatccagtgaaagacataataacggaataaatattttcagctattatcttaaatggattacttcaatattcatcttttgtttaaatctacatctcatttctctttaggtagtatctttttgaaaagctgtcatttcaaagtactgaaaacctaaaatctaggcaatgaaagtagagtaaatgactgaggttttcctaaaattaccctggaaagatgagaggattcaactactgttctgggaaatggaaatagctgttcccagcactcactcctcccctgatgctcccaattaacttttaaggac

SEQ ID NO: 870409 - DNA, 571 bp, Homo sapiens
acttcatttatttttattttccttttaataactttaagcattacaaaaacactagatacttattcaaattcaagttttgtcacttggtcaagtctctgaacatttgttgtcacagttcattaatctctaaaacaaaattattagaaaagtgatgtttaatgtgtctcctagttataacagtccataagtctatgaatgctccatgttgctaacaagactgtatttctctggccacaaytgtttgtccagttttgggcacatgatccaagctgaacaaatgattaccttctctgcagtttttggacttggaaccagagatagcagcagttagtaatgttttctctttggaggttaaattgaaaggtgtacaactttaaaactgcttgtagtcaactttactgctaagttgagaaagtttgaaaaggaagggaaaaacaatgtgagcattcaagaagcagcagagatgaaagcccaagtccctgatgtcatgtgagttctagtgttcactacctgtcactagatccagtgtccctggggtacaaatatagccctctcttttttctggtttggt

SEQ ID NO: 870410 - DNA, 670 bp, Homo sapiens
tcccactgaagacctggagaaggcctcatctttcaaaattcaattcaagtatcatttcgtttatgaagtgttatataacaataagaggataaattaataacaggataaataaagaataagaaagcacactaaaaactcttttttttttgaaacaaattcttactctgttgtccaggtagagtgtagtggtgcaatcatggttcattgcagcctcaacatcccgggttcaagtgatcttcctgctttggcctgccaataactgagactataggtgttcactaccacacctgtctaatttttgtgtgtgtgtgtggagatgaggtcttgccatgttgcctaggctggtcctcaaattcctaggctcaagcaatcctcctgccttggccttccaaagtgttaggatttacaatccagagtcactgctcccagactaaaagcatttttttttttaacaactctggaagtgaattccagcagaaccagcaaaragaatggaattaattacctctggggaaagtgcctaagggtaaggagaactggggcaggaaactattataagtcttgtaccactattaagcttctaaaatcatgtacatgccattttaatttttaaaaagataaatttttaaaactctatatgcttacattaaaagtatactagttattctgt

SEQ ID NO: 870411 - DNA, 614 bp, Homo sapiens
cttttttataataaaacacttgatataggtctactctcttaataattgtcaagtgtacaatacaatattattaactgtaagtgctatgttttacagcagatctctggaatatgcttatattgcacaactgaaactttataccatttaaccaactccccatttcccctccctcactctagaccctgataattaccattctattctctgattctatgagtttcaccttcttaggtaactcatgtaagtagaatcatgctgtattcatccttctgtgactgatttatttcactaagcataacatactctaggcttatccaggttgtcacaaatggcagaatttccttcttttaggctgagtaatattacattgtatgtatttaccatattttaactccattcttctgtctatggtcaatttaggttgtttccatatcttggctgttgtaaataatgctgygattaatcttaatcttaggttaaacatcacttgaccattaaattcttcccccacctttgccatacacttctaaaacatcctgtggttcttgcccactgattatacttgcagttactggtctgtatgtagcaacacagatagggaaagaacttcagag

SEQ ID NO: 870412 - DNA, 583 bp, Homo sapiens
aacagtccctcaaagtcttaactccttccagcattaactcaaacgtccatgtccacaatctcatctgagacaaggcaagtcccttccatctatgagcctgtaaaatcaaaaacaaattagttacttccaaaatataatgggggtacaggcattgggtaaatgctccctttccaaatgggagactttggccaaaacaaaagggctataggccccattcaagtccaaaacccagcagggcagttatgaaatcttaaagctccaaaataatctcctktgactacatgtctccagggcacactgatgcaaagggtgggctcccaaggtcttgagcagttccacccctgtcactctgcagggttaccccccacagatgatttcatgggctgtcgttgagtgcctgtggtttttccaggtgcatgatgcatgctgtcagtggatctaccattttgaggtctggaagatggtggccttctactcacagttccactgggcagtgccccagtggtgactctgtgtgggagctccaaccccacatttcccttctgcagttccctagtagaggttctccatgggggctccaccc

SEQ ID NO: 870413 - DNA, 667 bp, Homo sapiens
aatatatggctaggagcagtggctccacacaaatctcatcttgtagctcccataatccccatgtgttgtgggagggatccagtgggagataattgaatcaatgggagcaggtctttctcatgctgttctcatgatagtgaatgagtctcacatgacctgatggttttaaaaatgggagcttctctgcacaagctctctctttgtctgcttccatccatgtaagatgttacttacttctcgttgccttctgccatgattgtgaggcctcctcagccatgtggaactgtaagtccaataaacttctttcttttgtatattgcccagtctcgggtatgtctttatcatcagcatgaaaatggctaatacagtaaattggtaccagtagagtgtggcattgctgaaaagatacacgaaaatgtggaagtgactttggaactgggtaacaggaagagattrgaacagtttgcagggctcagaataagacaggagaatgtgggaaagtttgaaacttcctagaaacttgtagaaagtttttgaccaatacactgatagtgatatgaacaataaggtccaggttgaggtggtatcagatggagatgagtaacttgttggaaactggagcaaaagtgattcttgttatgttttagcaaagagactggcagcattt

SEQ ID NO: 870414 - DNA, 667 bp, Homo sapiens
aatatatggctaggagcagtggctccacacaaatctcatcttgtagctcccataatccccatgtgttgtgggagggatccagtgggagataattgaatcaatgggagcaggtctttctcatgctgttctcatgatagtgaatgagtctcacatgacctgatggttttaaaaatgggagcttctctgcacaagctctctctttgtctgcttccatccatgtaagatgttacttacttctcgttgccttctgccatgattgtgaggcctcctcagccatgtggaactgtaagtccaataaacttctttcttttgtatattgcccagtctcgggtatgtctttatcatcagcatgaaaatggctaatacagtaaattggtaccagtagagtgtggcattgctgaaaagatacacgaaaatgtggaagtgactttggaactgggtaacaggaagagattggaacagtttgcagggctcagaataagacaggagaatgtgggaaagtttgraacttcctagaaacttgtagaaagtttttgaccaatacactgatagtgatatgaacaataaggtccaggttgaggtggtatcagatggagatgagtaacttgttggaaactggagcaaaagtgattcttgttatgttttagcaaagagactggcagcattt

SEQ ID NO: 870415 - DNA, 564 bp, Homo sapiens
acttgagcttcagcgaaaaaggcaggagattctcaaatacatttgttcttggtataatataagtcataatataaattataggtcataattctgatttatatcttatcttttaattttccattgactagattttaaaaagaaatacaatctggtagaaaggaaagaaaagactttttacagctcagtccaaactaaagtagaaactcaggttcyttttaagtgatgaaattgaagcagtttcatattggatgagagatgagccaaatgatgaacattttacctccagaatattcttcactaaaaacgtacttaataagcaaatgaaaagaaaataatttctaatatatttttattgtgcacacagaaaatttacaatcttaaccatttttaagtgcacagttcagcagtgttaagtatattcacattgttgtgaaacagatctccagaacttttccatcctgcaaaactgaaactctatacgattaaacttcaatgaaaacaagtgggttccaatgtagattctataaatactgaaatgcgtgcccttaagtttctaactgcttt

SEQ ID NO: 870416 - DNA, 564 bp, Homo sapiens
acttgagcttcagcgaaaaaggcaggagattctcaaatacatttgttcttggtataatataagtcataatataaattataggtcataattctgatttatatcttatcttttaattttccattgactagattttaaaaagaaatacaatctggtagaaaggaaagaaaagactttttacagctcagtccaaactaaagtagaaactcaggttccttttaagtgatgaaattgaagcagtttcatattggatgagagatgagccaaatgatgaacattttacytccagaatattcttcactaaaaacgtacttaataagcaaatgaaaagaaaataatttctaatatatttttattgtgcacacagaaaatttacaatcttaaccatttttaagtgcacagttcagcagtgttaagtatattcacattgttgtgaaacagatctccagaacttttccatcctgcaaaactgaaactctatacgattaaacttcaatgaaaacaagtgggttccaatgtagattctataaatactgaaatgcgtgcccttaagtttctaactgcttt

SEQ ID NO: 870417 - DNA, 585 bp, Homo sapiens
caaatgagattctttaggccgggtgtggtggctcatccctgtaatcccagcactttgggaggccaaggcaggtggatcgcttgatgccaggagttcaagaccagcctggccaacatggcgaaaccccgtctctactaaaaatacaaaaattatctgggcgtggtgacaggtgcctgtaatcccagatactcaggaggctgaggcacgagaatcacttgtgcctgggaggtggaggttgcagggagccaagattgcaccactgcacttccactgaagttgccagcctgagcaacatagagagaycctgtctctaaaaaaaaaattttaaggggttttgtacatgtgattatgattactaatcagtagactacaaaggaagccaaaattagaagtggaatgaaggaatgtgttgcaagacaccaacagcttttgttatgctaaaaatagaactcgttattggcagtgttttttcttgatttctgctttcagtacttatgccactaagcataaaataatcattttagtatgctcatggattctatggatcagaaatttctacatggtataatgagaatagtttgcctt

SEQ ID NO: 870418 - DNA, 605 bp, Homo sapiens
gcaatttggagatttctcaaagaacttaaaacagaactgccattcaacccagcaatcccattatgggtataatccaaaagaaaacaaatctttctaccaaaaagacaaatgcactcgcatgctcattgcagcactattcacaatagcaaagacatggaatcaacctaggtgcccaccaacagtggactggataaacaaattgtggcatatatacagcatggaatactatgcagccataaaaaagaatgaaatcacctgtgtgtggtggctcacgcctgtaattccagtacttagggaggctgaggtgggcagatcacaaggtcaggagtttgagaccaacctggccaacatggtgaaaccctgtctctactaaaaatacaaaaaattatccaggtgtggtggcacatgcctgtaatctcagctacctgggaggctgaggcaggagaatygcttgaacctgggaggtggaggttgcagtgagccgataccgtaccaccgcactccagcctgggtgacagagaaagactccatctcaaaaaaaaaaaaaaaaaaaggaattacattgtgtcttttacagcaacatggatgcaactagaggcctgagt

SEQ ID NO: 870419 - DNA, 541 bp, Homo sapiens
acaaaggctgggacaaaataaatgagacacttcactcagacctcttcattgttttcccagttgtcatcctttgcacctagttctgtaattaagagagtcttctcagctttttcttaaatcatgtattttcctctagtayggcaactttataatatgtttcccccacttgaaaatgtttcctcctttttcccacagtccaatccccccattaacccaaccatctctcacatacataccaattttaggtcccaaatctctcagatctcaccctattcacaaaccaaaactttatcagaaagatctaaaacacttcccccaaaggcatttttaatcaccaataaggtgttctcactttcaaggatagtataatgtgaatggacatcaaagtcttaagatcaagaatatactctactattaaagagttctaaccataagctagtggttaatacagttttagagggaagaggataaggaaagcagacattgtctttcctctttcctaaacttttcccaggtctagatctacctcctatcaattttg

SEQ ID NO: 870420 - DNA, 643 bp, Homo sapiens
tcccagttgtcatcctttgcacctagttctgtaattaagagagtcttctcagctttttcttaaatcatgtattttcctctagtatggcaactttataatatgtttcccccacttgaaaatgtttcctcctttttcccacagtccaatccccccattaacccaaccatctctcacatacataccaattttargtcccaaatctctcagatctcaccctattcacaaaccaaaactttatcagaaagatctaaaacacttcccccaaaggcatttttaatcaccaataaggtgttctcactttcaaggatagtataatgtgaatggacatcaaagtcttaagatcaagaatatactctactattaaagagttctaaccataagctagtggttaatacagttttagagggaagaggataaggaaagcagacattgtctttcctctttcctaaacttttcccaggtctagatctacctcctatcaattttgctactttggtaaacaaactcttggcataaattctaccaaagcacactttggtctttaactttcatagtagaagggatagaacaagtatctctcacctaacagaaatccacttaatggaatttaaaatcaaagaatgtgattgatccaccaattatt

SEQ ID NO: 870421 - DNA, 658 bp, Homo sapiens
atcttatatatggagtggtatatggaattagagatttatgaactcagttttaaatacatataaaataaatgtagatatgagcatatataaatttgatacataaatgtaatacttatacataaatatgtatacaaatattcatattttcctagctccgtttgctgaaaggcctgagaaatcatgaygcagcagtagctatgagcccacttagtacttggatcttggtttctaaatattaccattcaccaaaaagtaccaggacctcttaaagaaaagcctgcttccaaagctggggcagggaaaagtacaagaagagctaggaatatctcgttgtgggaggaaaaaaaagaaagttcttaaagaatgacatgaatactcaaaaggacacaagatttaacttgagaggaatctctcttaaccaaatccaggaaaatttgacttccaaaataatgatagaaattgattatagcccattgaataaagtaaaaatctataagttgatattggtatatatgaatgaatgcatgcatgagtcactgaacagtaaattaataaattaaaaagggaaaacctttatttatagaatatcaactaataaaaggaaaagagaaaacttcccacaacattctaaaagagcaactggtctcacataaaacga

SEQ ID NO: 870422 - DNA, 614 bp, Homo sapiens
ctatttgactttccacaacagagacatttgaaactgtgagggtgaaccgtgactgaaaagttacttattttactttgttctaattttcctcagcactactaaggagtgacttcttgcccttacatatgacagttccaaattaaatgaggaagatatttacagttctgtaaatatcactttggcattttacatttcgtargaaagggcttttacgttgcagttcatagcatagtttatggtttttaaatgccaacttgagaagttgaaaagagacctttcctggagaaaaagaccaagcttcagattcaacgttgaaaaatgtgcagaatttttagggattgctgtgaagagtgaagacgttacttgatgaaaagaacataaggctctggctcatttatttattggctcacagcagaaggggtgggacattagaatcagagagaagacgatggttctgtgctttacttcctttatattctatttacgtgaccacttggaagagtagtagacagtgggcaggaatcaaataggtaccccgggaaacagcaatgtctgtatatcttggtaaattgtgaagaatggaagtatccaattgcagatgtaaacattttaaa

SEQ ID NO: 870423 - DNA, 630 bp, Homo sapiens
atggataaagaaattgtggtatatgcatacaatgaaattttattcattcttaaaagaggagagtctgctgtttgcagcaacgtggataaacctagaaagcattatgctaagttaaataagccagacacagaaaaagaatcaaacgtggaatctttacaaaaaaaaattgaatacatgraaacagaatcaagctgaggctactaggatcaggagaaatagcaagacgcaggacaaaaggtaccaagttgcaattttgtagaagaaatgtctagagatctaacaaataccatgagaagtatagttaataatattgtgattgtaacgataattggccaagagagcagatttttaggtactcttaccacacaaaaaaaggaaagaaaaacaaaagtagttatgtgagatcatgggtatgttaatttgcttgacagtggcaatcgcttgactatacatacgtatatcaacgaaagaatatcaaaacatcatgttgtatacattaaacatatacagtaagaattatttaactagttaattaaaatataatacagaatttcctgcatatacctagatatacagttctgtaaaattaagatagttggaaaattctgagtcaagtagcactttgaagtg

SEQ ID NO: 870424 - DNA, 600 bp, Homo sapiens
cgcctgctatctaaagagcccttgaggtctgaataatcagcagtggtagccaggcagtacttgctgcaagccttgggtgagacagagctgtactggcttcaggtgtgagccagcacattcccagctgtggtggctagcggamgaaagaagagggaagagtaaagaggagtttgttttacagctcgggtactagttcagccacagctgggtagagcattaagtgggctgctggggtccccaatttcaggctttatttcctggatggcatttctggacctgccctgggccaaataggagcccattgtcctgaagggacaagctcaggaatggcagcattcaccacaagctgactgaagagcccttggaccttgagtgagcatcagcggtagcaatgcagtggtcattgtgggctttgggcaagacgcagtgctgtgctgattttgtatctgacccagtgaagtcctagtggtgatggccacaagggtacttgtaatctgtccttccagctctaggcagctcagcagagagagatactccatttgtttgggagaaagtaagggaaaataacaagagtctctgcctggtaatctagggaattct

SEQ ID NO: 870425 - DNA, 604 bp, Homo sapiens
tagctgggattacaggcatgcgccaccatgcccggctaattttgtatttttagtagagatggggtttctccatgttggtcaggctggtcttgaactcctgacctcacatgatccacctgcctgggcctcccaaagtgctgggattacaggcatgagccaccatgcctggccaaagcccaaaggttttcaccacccattctgagctctcaaaactcattgccattgcatctgtaaacacatttactaaacttccctcatccsagaactataacataatttgcacattggtttgtatccatactaaaatgccacacttccgtattcgggtatctgccctctaggatgaggcataagaaataagtcaagctacttagcctcagtgtaccttccggccctgtcttcctcagctaccctgcttggcttggtggtcatctctatgttgatgagtcctccaccaagcttcagaactgtctttccaactgcctataggacagctttctcagatgtacctcaggcaccttcaaccaaaaaggtccaagattgcatttgtttatttatgccctgaaaattgttccttttgctatactttatatcccaatttatg

SEQ ID NO: 870426 - DNA, 578 bp, Homo sapiens
acatttatttcatttttatgccataataataatcatagttatttttctcagatttaagataagtaaatatatttatatatttattgctcttttggcaagttatttagttgcatgctttgtaaatgtttgtcactataatattatttgtcaaaatctatgtaaaataacatggccaggccaatragcttaaaaagcctttcatccccccaggcattaacaaatatttccctcctctcatgaaaaaacacaactattgtataaatcacattgtttgccattatagcgctttgctgatgagagcaaataatattaacatatgtctatagatggtgagagagatatgggtttataagtacctaaatataatgtatcattaccacaaccaattgaatgagtgaatgccttattttccatgcaggtgctctgagtttttggtgaatagagttgtgttatttgacttttttttttgtatgatctgataaattgctagtgatgcaataacaaaatgcactgctattctaagattaatgattatgttgagtgttgagattatttattttcttaaaaaaatcagtaaa

SEQ ID NO: 870427 - DNA, 651 bp, Homo sapiens
catgttctttagttcaatgaaattttcttcgataatttgttttcttttattttctccatctgtgctttctgggacttctaaagtcagaaattgtccttcctagattcgattttctaagtaaattttgtttcatattttctagcgttatgtttttttgttccactttctaaaagatattctcaaatttatctttaaaactttaagttggatatttttgcaatattttaaatttgaagggattttttctgatttttgtttccatggcatttttgatttttacatgaattaactcctcgttgtggagagtaattatttaaagtttttaattttattgctttccagagttctctttcctcaagactgaaatattactttttatctattttttctgcctttaattttgacgtttcttttcaagtatcagtaaactttaattgtccctttaaaaggaggctttaaaattatcagtttggaagtcctttgtgtactaatgggctgaagaataggaggcyagatccactaactgggtggacagctagctttttgttagggcactctcttctaaaatattaataggcagatgttatttttttgaagatcttcagtttatctagagatgatgtttccaaaaaccttcccagggaagtatct

SEQ ID NO: 870428 - DNA, 633 bp, Homo sapiens
ctttgaatatgaatgctatgatgccacctcagagataaataagatgttgccaataattgagacctaatacagtgtctatgtgtacttacgtacacacacacatgttggagtgcacctatcaactaactacagtacagtctggcttttttatgctcttcagtgctgcctgagttgaaatacatccacaaaaacctcagagtcactgttgaaaccatgaaccaaccccgatagaacattctctacatattacctttcctgaatgctcttgacaactatcaggaaagctaatagcaaagtaagctctgttctgtttcttccacagcctcagttatgtagccagatgttmtaagctaagccattttaaggaagaagaaatgaagtagaaggctgatcaattatacagtaaacttaggctaaagatttgtgtaagttttcttcaccagtcaaatttaggtactgaactctctagattatactcattatccaaattccacttaagtttttccaaaataatcttgggctaggttctacctaaaatgtaagataagcagaggataattaataactataaggcctcaattatactccatgtcttttgcttaaacaactttgtgtttctcatttaatacctaa

SEQ ID NO: 870429 - DNA, 617 bp, Homo sapiens
aactctatatagtctcatcaattttttcatcttttttttgtattctcccatttactttactataaacatttcagttagtctttgttatctaatatcaatatctagatcatctctgattcttcaactattttctgtttttttttattattttaaatcacatgacattttttggtatatttaagttttgattgcagggcagacatcgttaaaaaaattacataggcttctaatgatgtttttattatcctgagagggtgtgtcttaccttaaaaaggccaatagartgataggtgctcatcttaatctagtcagatactgtactgggctggggcttggcttcaggtttcttaagacaccagtatatctctggctgtcttccagctttatagctaagaatgtgctgtgctctccatggctattcctcctccccttgccagtggactccacattctaacctttggtgttcaatactgtcaaaacttttgccctgcttaataaagattttccactagttttaaagtcttccacatacgttatcacaaaatattacaaatgacctagaggcaaatcaggttgtaggtaggagaattcctaagtttctatcaaaataattattg

SEQ ID NO: 870430 - DNA, 539 bp, Homo sapiens
cgatgactttttagactgtgttccagtatgacaacgaaagaacacacagccatcctttttctttatttctatttctatgtattggataatttttcttttctttttttttgttgacagagtctcactctgtcgcccaggctggagtgcattggcgtgatctcggctcactgcaacctccgtctcccgggttcaagtgattcycctgcctcagcctctcgagtagctgggattacaggcacccaacaccacacccggctaatttttgtatttttagtagagatgaggtttcaccatgttggctaggctggtcttgaactcctgacctcaggtgatccacctacctcggcctcccaaagtgttgggattacgggcgtgagccatcatgcccggcttgataaatttttttctaacaaaggcgtttaactaaaacaagacacaaaccccctcctaattgcaatgaatgttttggaaataaaataagataaaattgaatattttattaaagaagaaagaggtaattaggttgcctcctttcccag

SEQ ID NO: 870431 - DNA, 641 bp, Homo sapiens
cactggggaaatttaggaagatattccaggttcagcttgtccacgataagcagaaaatcaggctcagtgtctctcctctctgacttaaagtcttcactcctctctaacttaaagtcttcactgagcacacagtctgaaattgaacctgttaaagcaatcagttggtcaatatgtaccttcttttaaaaatgcaaatatccaggcaattcctataccccttaacatctattcatttacttaaattgcttttcctcctaacacataacagaaactactccactgaagaaatggaaactttgtgtgcccaggaagaatggaaggtttagtagtatgggtacatttcaaaagcttcccaaatcattgtaataagcagccatatttgaaaatcactattcctcagtgcttctcaaccttattttgcagatcacctgaagaggctactgaaagtgcagccacagattcagtaggtctgaggcggagcccgagactgcatttttgcacattctcagtggctgctgctgttgttggtccatggaccacgcattgaataccaaggatctagtcattctcctgatgcagacctctgacttacttacttyaagggattaatcagaggtgagaaaaggggtactggcaagggt

SEQ ID NO: 870432 - DNA, 636 bp, Homo sapiens
tgatattagaagtcaggatagttgttgttctgggagtaataaagtgacaaggaggtgcttttagagcgctggtactgctctgtttcttacaggtgctggctacagggccattgttcagttaaagttaagtttattgaactgtatacttatgctttatgcaatttatgtacatatgttatagtatttctgtaacttttttytttaaaggcaaatgggcatttttcaagagacagggaactaatactcatcatttagatagaaattccctgctttcatcttttgttaggaaaaataagaattttggaagtgctcctcttttgtaaaatcttaatcaagtaatgaacgaaaatagtcaatacaacaggaaaagagaggaacagaagcctcaaaagatgaattcctatcaagcagtaaacagttcttttccagaactctttgtgacttataattctagaaggtccatcagaggcctcccatttctattcagaaatgcacttctaaagttagacagttgtcacagtcttagggagcaatgagttcacaatttcaatttattatcaaaatatttccatctgatgacaaacctgaaaagacaggagatgcagagctacataggtgcagatttgcccttttatc

SEQ ID NO: 870433 - DNA, 654 bp, Homo sapiens
tgaaatttttgtgaagttgtttatgagttccaggagccctttggcagagtcttcaggattttctaggtatagaatcatatcattagtgaaaagagagagtttgacttcttttcctatttggatgccttctctttcgttcttttgcctgattgattgatctaggtaggacttccagtactgtgytgaataggagtggggagaatggacgtctttgtcgtgtttctgttctcaaggggaatgcttccacattttgcctatccagtatgatgttggctgtgggtttgttatggatagttcttattattttgaggtatgtttctgcaatgcctagtttactaagggtttttattatgaaaggacattgggttttattgagacttttcccacatctattgagatagcccaatggtatttgtttttaattctgttgatgtggtgaaattgattaggatcttaatgcagattcacagatgaaaaattgttctattgagtagcaaatccatggatagcaatcacagctagatagtcacagcattacagagtatccatgaaaagaactgtttacttagcatttagtaaaagtcatagaataccagtatataaacctctggacttacaaattgataataattttgtacatttttcttaagttct

SEQ ID NO: 870434 - DNA, 514 bp, Homo sapiens
cttttaatcattttccaggttactcattggttttcataatcatcatttttaaaggactgaatgatcttaacaaaatagccaatgatttcaactactttttttatggttgttatatttgctgtttgcaatttccttttcttctttcctttcttccttccttctatttttatttaaacataatttttaggaaatagcctcatactgaacatcttgtcagactgcttttttctctgtattttatacaagtgtgttytttcagctcacatttcctttggacttgtgcatgctgcctttagacagtcttctctgttttgggcaagattcacattacagagcctgaatgttaacacattgaattctctgacagcagaattgacattgaataattccagaggtgccaaagaatgattctcctgggatttcctttacccatagctgatttttgaaatttcaaggttagagcttcacaactgccctccttcaaaatgtacataccactgcaatactaaaatct

SEQ ID NO: 870435 - DNA, 658 bp, Homo sapiens
caaaaataattagaccagggtgtccaagggagacaatacggtcatgagttctgtttctgattgggccagtaaagcccctttctcatccctcttttccacttatcactagagatagaaactaaaaacaatggcttcaggctgctaaaagcctaaaacaaaacaaaacagaacaacaacaacaaaataaggcaggttagacctcattgaccactgaatgaatgccaggatctttgctaaattgtggcttccactgcaaaatttaagtaaacttactgaagatgttatccaaagtcagatataaatcagaatgtaaagaagaattcaggtttggaaggtagctttcaagtttaraaaaatgtaaaaatacagattttttttaatattgaaaaaatagtcaatattgtgaggcaaatgaaaaaataacattttaaataacgaaaatattatattttaattccctacatttcacaaaaagagcaacaagacctttaaattggaagtcatcttgggccaccattttcagtttctcatccactgcaaaaatcctccttaccatcttaacagaaagcctattttacttcacttacattgctgtgaatgtcattgttttcagccacagtcggccttagtgccaaatgctactttgcgtcccattttt

SEQ ID NO: 870436 - DNA, 658 bp, Homo sapiens
caaaaataattagaccagggtgtccaagggagacaatacggtcatgagttctgtttctgattgggccagtaaagcccctttctcatccctcttttccacttatcactagagatagaaactaaaaacaatggcttcaggctgctaaaagcctaaaacaaaacaaaacagaacaacaacaacaaaataaggcaggttagacctcattgaccactgaatgaatgccaggatctttgctaaattgtggcttccactgcaaaatttaagtaaacttactgaagatgttatccaaagtcagatataaatcagaatgtaaagaagaattcaggtttggaaggtagctttcaagtttaaaaaaatgtaaaaatacagattttttttaatattgaaaaaatagtcaatattgygaggcaaatgaaaaaataacattttaaataacgaaaatattatattttaattccctacatttcacaaaaagagcaacaagacctttaaattggaagtcatcttgggccaccattttcagtttctcatccactgcaaaaatcctccttaccatcttaacagaaagcctattttacttcacttacattgctgtgaatgtcattgttttcagccacagtcggccttagtgccaaatgctactttgcgtcccattttt

SEQ ID NO: 870437 - DNA, 632 bp, Homo sapiens
atgaagcttttaagttcagagtaaaagattctctcaaatgaaattcacaatttttctaatgttcttggcaactatacatttctatcatttttgttaccatatttctaatagttcaagctaaaaactaatattcaaacttaatattcaaccaccagtatttaaatgatcaggcccgatgtggtggctcatgcctgtaaacccagcagtttgggaagccaaagtggtggatcacttgaggtcaggagtttgagaccaacctgaccaacatggtgaaaccccgtctctrctaaaaatacaaaaattggctgggcatggtggcacatgcctgtaatcccagctactctagagtcttagacaggagaatcacttgaacccaagaggcggaggttgcagtgagcagagatcacgccattgcaccccggcctgggcaacaagagcgaacctccgtctcaaaagtaaataaataaataaataaataaataaataaataaaataaataaattataggtggacgttttctctgactactttgaggtttctttctcctctttttatctttatctattctagtatttgaatgaccattgttagaatgggctaaaagaagacaagacttgaagtctcagaaggga

SEQ ID NO: 870438 - DNA, 610 bp, Homo sapiens
tcccagtaagttcctcatctccatctgagaccacctcagcttggacttcattgtccacatcactatcagcattttggtcaaaaccattcaacaagtctctaggaagttccaaactttcccacatcttcctgttttcttctgaggcctccaaactgttccaacctctgcctgttacccagttccaaagttgcttccacattttctgcatctttatagcagtacctcattgcctcagtaccaatttactgtattagtctattttaacactgctataaagaactacgaattttaaagaaaagatrtttattggactcacagttccacatggctggggaggcctcagaaaacgtataatcatggtggaaggggaaacaggcatgtcttacatggcagcaggcaagagaatgtgtgaaggaagtgaaggggtaagagcaccttataaaactattggatctcatgagaacactcactatcacaagaacagtatgggggaaccacccccatgatcctatcatctcccaccacgtccctccctcaacacctggtgattactatttgaaatgatatttgggtgggaacacaaagccaatccatatcaggccatgtaata

SEQ ID NO: 870439 - DNA, 621 bp, Homo sapiens
ggacacattgtgaaaccctgtcactactaaaaatactaaaattagtcaggtgtggcagcgggtgcctgtaattccagctactcgggaggctgaggcagaagaatcccttgaacccaggaggtagagattgcagggagctcasatcacatccagcctgggcaacagagtgagactgtgtctcaaaataaataaataaatatgtaaataaataaataaaatccagagtaattattttaaagacataatctgggccaggcatggtggctcacacctgtaatcccagcactttgggagggagaggcagatggattgcctgaggtcaagagtttgagaccagcctggccaacatggtgaagccccatctctattgaaaatacaaaaattagccaggcatggtggtgcatgcctgtagtcccagctactcaagaggctgaggcaggagaatcgcttgaacctgggaggcagaggttgcagtgagccaagatcactccactgcaccactccagcctgggtgagagagagagactccatctccacccccaaaaaaaaaaaaaaaaaaaaaaaccacatattctgggtgataagactgtcatataaagtccttggtaagaattgataatt

SEQ ID NO: 870440 - DNA, 621 bp, Homo sapiens
ggacacattgtgaaaccctgtcactactaaaaatactaaaattagtcaggtgtggcagcgggtgcctgtaattccagctactcgggaggctgaggcagaagaatcccttgaacccaggaggtagagattgcagggagctcagatcacatccagcctgggcaacagagtgagactstgtctcaaaataaataaataaatatgtaaataaataaataaaatccagagtaattattttaaagacataatctgggccaggcatggtggctcacacctgtaatcccagcactttgggagggagaggcagatggattgcctgaggtcaagagtttgagaccagcctggccaacatggtgaagccccatctctattgaaaatacaaaaattagccaggcatggtggtgcatgcctgtagtcccagctactcaagaggctgaggcaggagaatcgcttgaacctgggaggcagaggttgcagtgagccaagatcactccactgcaccactccagcctgggtgagagagagagactccatctccacccccaaaaaaaaaaaaaaaaaaaaaaaccacatattctgggtgataagactgtcatataaagtccttggtaagaattgataatt

SEQ ID NO: 870441 - DNA, 493 bp, Homo sapiens
gtcaacaagagactttagatttaaggacacaaatagttagaaactgaagcaatgaaaaaacatatttcatgcaaatgatagccaaaagaaaacacaggtggctatcatggcagaaatcaggatccctaaaaaatgttggcactcttttattcattgcagcacaattcataataagagagaggtggagacaacatgaatgtcccttatcaaatgaataaagaaaatattatgtgtgtgtgtatatatatatatatatatatatatatatatatatatatataatggaatattatgtcttaaaaatatgaaaatcctgccaaatgcaacagcatgaatgaaccttaatattataawaattgaaataagccagtcactgatacacaaatagtgtatgattctactcatatgagatgtctaaaaaagtcaaacatttataagcagagagtagaatggcagttgccagggggtgggggaaagggaaaattgggagtta

SEQ ID NO: 870442 - DNA, 676 bp, Homo sapiens
ttggtagagaccgtttgaattgcatctctacgctctttctacccaggacccctccatgagcaaagctgccccttgcccagtttttcccatatcactcaaaattcactgcatcagtctcttacttgcagcttttttagggggaggacaattccagtaggctcctaaatcgtttgcctgtttctacaccccacatggcagccggagtatacgtttataaatataaatgttcactcctttgcttaagacttgccataggatttccaataaaacaggaataaaattcaactgttttcttcacttcggtctcaattgtctcaattctccaagcttatttcctgttactctcatcctcatgctgtgttctagccacctgcastcgctagctatttctccatcttgcccaacttgctccctctcttgcggctcttgtaggtgcttcctgagtttctgaaacattcttccctagatcctcaagaaacgtctcatattttaaaactttgaacaattgccatctaatagagaggagttttagacaacaatatctagcatgtccatccgagtgagacaagttttactgtgctcttcattgaattattcgggttaattttttcctaaaagttatcacttttgagaatccttaattttaaatagttattaatttatttgctagcttttt

SEQ ID NO: 870443 - DNA, 599 bp, Homo sapiens
ttattattttgacatatgtcccatcaatacctagtttattgagagtttttagcatgaagggctattgaattttgtcgaaggcctttcctacatctattgatataatgtggtttttgtctttggttctgtttatatgatggattacgtttattgatttgcatatgttgaaccagccttgcatcccagggctgaagccaatttgatcgtggtggataagstttttgatgtgctgctggatttggtttgccagtattttattgaggatttttgcattgatgttcatcagggatattggtctaaaattctctttttttgttgtgtctcttccagctttggtatcaggatgatgctggcctcataaaatgagttagggaggattccctctttttctatcaattggaatactttcagaaggaatggtaccagctcctctttgtacccctggtagaattcggctgtgaatccatctggttctggacttttttggttggtaggctattaattactgcctcaatttcagagcctgttattggtctactctgggattcagcttcttcctggtttagtctcgggagggtgtgtgtgtccaggaatttatc

SEQ ID NO: 870444 - DNA, 599 bp, Homo sapiens
ttattattttgacatatgtcccatcaatacctagtttattgagagtttttagcatgaagggctattgaattttgtcgaaggcctttcctacatctattgatataatgtggtttttgtctttggttctgtttatatgatggattacgtttattgatttgcatatgttgaaccagccttgcatcccagggctgaagccaatttgatcgtggtggataaggtttttgatgtgctgctggatttggtttgccagtattttattgaggatttttgcatygatgttcatcagggatattggtctaaaattctctttttttgttgtgtctcttccagctttggtatcaggatgatgctggcctcataaaatgagttagggaggattccctctttttctatcaattggaatactttcagaaggaatggtaccagctcctctttgtacccctggtagaattcggctgtgaatccatctggttctggacttttttggttggtaggctattaattactgcctcaatttcagagcctgttattggtctactctgggattcagcttcttcctggtttagtctcgggagggtgtgtgtgtccaggaatttatc

SEQ ID NO: 870445 - DNA, 599 bp, Homo sapiens
ttattattttgacatatgtcccatcaatacctagtttattgagagtttttagcatgaagggctattgaattttgtcgaaggcctttcctacatctattgatataatgtggtttttgtctttggttctgtttatatgatggattacgtttattgatttgcatatgttgaaccagccttgcatcccagggctgaagccaatttgatcgtggtggataaggtttttgatgtgctgctggatttggtttgccagtattttattgaggatttttgcattgatgttcatcagggatattggtctaaaattctctttttttgttgtgtctcttccagctttggtatcaggatgatgctggcctcataaaatgagttagggaggattccctctttttctatcaattggaatactttcagaaggaatggtacyagctcctctttgtacccctggtagaattcggctgtgaatccatctggttctggacttttttggttggtaggctattaattactgcctcaatttcagagcctgttattggtctactctgggattcagcttcttcctggtttagtctcgggagggtgtgtgtgtccaggaatttatc

SEQ ID NO: 870446 - DNA, 624 bp, Homo sapiens
atgtctatgccttatagctgatatttaaccatataagtaggaagacagcatccatagagtcattaatcagcaaagcaatagacaagtgcaggaaatccatccccagtggtaatggaactatttgggtttttttgtttgtttgttttgtttttttaattctgtgttccaaaccagcacaatgaagagagccctgtcttgatccataccacttcccaccaagttctttttcctattgtcctatgtagattgctaatgtttgggctgtgtgccatacgtggtaacccgcccactaaaatccaccggtttctctcttgctatcttcttttagagrgcctggaaatgcaaacatttaattttgcttttacagtcagggtagtcatatgatagtcctgtacaattcttcaagtaagtgaatatctctggaaggagctttccttcttgaataaaataataactcctcaagaaaagaatgacttcagcttttctactttccacctttgcggaatcttaacgtgaaatttgcaggtacatcatccatttaaaaccataaagataaaggtcaaaaagaatatctaggtggaaagatagaaaatagcaagttatctcatggcattttaaacactg

SEQ ID NO: 870447 - DNA, 583 bp, Homo sapiens
cagtttggagggctcagaaggagataggaaaatgtgggaaagtttggaacttcctagggacttgttgaatggctttgccaaaatgctggtagtgatacagacaataaagtccaggctgaggtaccctcatatggaaatgaggaacttsagaactggagcaaaagtgacccttgttatgtttcagcaaagagactggcagcattttgcccctgccctagagatatgtggaactttgaacttaagagagatgatttagggtatctggcagaagaaatttctaagcagcaaaggattcaagatgtgacttgggtgctgttaaaggcattcagttttaaaagggaaacagagcgtaaaagttcagaaaaattgcagcctaacaatgcaatagaaaagaaaatcccattttctgaggagaaattcaagctggctgcagaaatttgcataagtaaccaaggagctgaatgttaatcaccaagacaatggggaaaatgtctccagggtatgtcagagacttttgcatcagcccctcccatcacaggcatggagacctaggaggaaaaattggtttaatgggctgagctca

SEQ ID NO: 870448 - DNA, 628 bp, Homo sapiens
aagacctggatgtgagacatggagtcaaaggagatcactttggagctttaagatttgattgccccactggattttggacttgcaggggtttgtgcccccctttgttttggccaatttctcccattttgaatggctgtatttacctaatacctgtatccccattatatgtaggaactaactaacttgcttttgagttgtttttttgtttttttttttttctttgagatagagtcttgctctgtcactcaggctggcatgcagtggcattacctcggctcactgcaacctccgcctcctgggttcaagcgattctcctgtctcagcctcctgagtatctgagatyacaggcatgtgccatcatgcccagctaatttttgtatttttagtagagatgaggttttgccatgttggccaggctggtcatgaattcctgacctccgttgatccacccacctcagcctcccaaagtgctgggattacaggtgtgattttacaggctcataggtggaagggacttgccttgtctcaaatgagcctttgggctatagacttttgagctaatgttgaaatgagttaagactttgggggactgctgagaggcatgattgatttttaaatgtgaagacat

SEQ ID NO: 870449 - DNA, 632 bp, Homo sapiens
tatggttgctgtcctggttgtctcacatgatctgttatcttaggcaggtcatataattgtctaggcttcagtttcttttttgtttgtttgttttctttttttttatttatactttaagttctagggtacatgtgcacaacgtgcaggtttgttacatatgtatacatgtgccatgttggtgtgctgcacccattaactcatcatttacattaggtatatctcttaatgctatccctaccccttccctccaccccacaacaggccccggtgtgtgatgttccccttcctgtgtccaagtgttctcattgttcagttcccacctatgagtgagaacatgcggtgtttkgttatttgtccttgcgatagtttgctgagaatgatggttcccagcttcatccatgtccctacaaaggacatgaactcatcattttttatggctgcataatattccatggtgtatatgtgccacattttcttaatccagtctatcattgatggacatctgggttggttccaagtctttactattgtgaatagtgccacaataaacatacgtgcgcatgtgtctttatagcagcatgatttataatcctttgggtgtacacccagtaatgggatgactgggtcaaatg

SEQ ID NO: 870450 - DNA, 596 bp, Homo sapiens
attttcttttctgaaaatgactctgctggtatgaaagttcattacaggtctctagtaatgttcataatgatattatcattggctaatatctactgaatacttacaatggagtggacactattctaagcacattacatttatttatttaactttcacaaaacacctttgtgataggcactattattatccctacatagatgaggaaactgaagcatatttaccaagtgcctagggcaatccagatattgtgcctcatgtgtatattttatttaatgttcatttcaaaattactgtagctttaaagatgaaaaactaagggtctgggagattaaataacatacccccaaatcacttggcaaggctggaatctgaacccaggcaatatgacttcagatcyggcgctcctaactctattgtcttataagaatttgctacctgattgctttacatacattaaaagatgctgcggtcatgagctaacacctgaacataatgcagatcaacaatccctatgtgtaatttcaaaattcaaaaggctctgaaaatcaaaagttttacataacacatttgttagcaaaatacggaatagcctgaac

SEQ ID NO: 870451 - DNA, 664 bp, Homo sapiens
caaagcatgctgaataagaggcatttgataaataattattgaatgcaaaaatggatacatatattaatacatacttaggtatttgaaacttttttggcaacacaaatttttaatcacggtaaaaatttagaaaaagaatacatataaagaggtgaaaatagaaatcggcttttaccgcaggtaataacatataactgttaatatttagtagttctatcaagaatttttttgaatgtccatatgtgtgtctgctacaaacatgagatcataatgtaatgctacttttataatctgttctctcactagaataaatacacatgtactgtctcatttttgatgactgcacagtataytagcacacacaagccacaatttactgcagtcatccgctattgttggacatttaaatactttctggtttctgaaaattatttcaaaaaacagaacattttagtgctaaattctttgaaaacactcttaaatatttccttaggatatatttctagaagaagtgctgctatgtcaaagggtaggcatattttaaagacttttgattcattctaacaaatctcaagagaagttccaccatttcctcgcacattacttattgataagaatgcccacattctttggtctaccatgttcaatgcaaatttataaatgg

SEQ ID NO: 870452 - DNA, 636 bp, Homo sapiens
tactggcaagactggtgtatattccactgtatggctctgttacagcaaagcaaaaaaaaaaaaaaaaaaaatatatatatatatatatatatatatatagaaggcttgactcccatgactcccagccttaaggagcttagaatctaataggaggaaagttcatttctcacaacacaatccaggagcaagcagctggagaaaggtgaggttaaagggggctaggattggggtagggaggtaacgtttcagccttttgttggaacgcatccataaagaaagaagaccagagtgttggagagaagagaagagagatgccttaaaaatgcagtgaggtcacgcctgtaatcccagcactttgggaggccgaggmgggtggatcacaaggtcaggagatcgagaccatcttggctaacacggtgaatccccgtctctactaaaaatacaaaaaattagccgggcgcggtggcgggcgcctgtagtcccagctactcgggaggctgaggcaggagaatggcgtgaacctgggaggcggagcttgcactgagccaagattgtgccactgcaatccggcctgggctaaagagcggaactccgtctcaaaaaaaaaaaaaaaaaaaaaagcagtgaggacacttt

SEQ ID NO: 870453 - DNA, 636 bp, Homo sapiens
tactggcaagactggtgtatattccactgtatggctctgttacagcaaagcaaaaaaaaaaaaaaaaaaaatatatatatatatatatatatatatatagaaggcttgactcccatgactcccagccttaaggagcttagaatctaataggaggaaagttcatttctcacaacacaatccaggagcaagcagctggagaaaggtgaggttaaagggggctaggattggggtagggaggtaacgtttcagccttttgttggaacgcatccataaagaaagaagaccagagtgttggagagaagagaagagagatgccttaaaaatgcagtgaggtcacgcctgtaatcccagcactttgggaggccgaggagggyggatcacaaggtcaggagatcgagaccatcttggctaacacggtgaatccccgtctctactaaaaatacaaaaaattagccgggcgcggtggcgggcgcctgtagtcccagctactcgggaggctgaggcaggagaatggcgtgaacctgggaggcggagcttgcactgagccaagattgtgccactgcaatccggcctgggctaaagagcggaactccgtctcaaaaaaaaaaaaaaaaaaaaaagcagtgaggacacttt

SEQ ID NO: 870454 - DNA, 549 bp, Homo sapiens
aagtggcaaatctgaaatttgaacccaaagcttttgtttccaaaacctatgcttttaacctttccactaagccacttccaaaataaaccataaatacacagataaatgaagttggtgagtattttctgaatattagattagtgcaaaagtaattgtgtgtgtgtgtgtttgccatcattgttaacggcaataaccggaattacctttgcaccaacctaatacaaaagattaattcatttcactcactcattcatttaaaaatgygtactgagtgtctactatgggcaagtactgggctaggtgatggaaataaaattgaagaaaagctcaaggagggtcggacgcagtggctcacacctgtaatcccagcactttgggaggccgaggtgggcgaatcgcaaggtcagatcaagaccatcctggctaacacggtgaaaccccgtctctactaaaaacgtgaaaaattagctgggcgtggtggcgggtgccggtagtcccagctactcaggaggctgaggcaggagaatggcgtgaacccgggaggcggag

SEQ ID NO: 870455 - DNA, 494 bp, Homo sapiens
tatcagaggtacaaagaggtgctggtaccattcctgctgaaactattccaatcaatataaaaagaggaaatcctccctaactcattttatggggccagcatcatcctgataccaaagcctggcagagacacaacaamaaaaaagagaattttagaccaatatccctgatgaacatcgatgcaaaaatcctcaataaaatactggcaaaacgaatccagcagcatatcaaaaagcttatccaccatgatcaagttggcttcatccctgggatgcaaggctggttcaacatatgcaaatcaataaacgtaatccagcatataaacagaaccaaagacaaaaaccacatgattatctcaatagatgcagaaaaggcctttgacaaaatttaacagcgcttcatgctaaaaactctcaataaactaggtattgatggaacatatctcaaaataataagagctatttatgacaaactcacagccaatatcatactgaat

SEQ ID NO: 870456 - DNA, 610 bp, Homo sapiens
atcttcttttacatgttttacagatttagtggcacaccaagacacagtttaggaagaaagtgttgctatagataactaatgaattatgttcagggttacaagacgaaccaaaaaactgcaagtggaaacctaggcctgatgaatctataagaatacaagattcagaagctgttttatgagatgcttttaaaaggattactaaggctcatgcctgtcttctcactcatatcaacctctagtgttcaaatgcacataactgctgggtaaagtggctcaygcctgtaatcccaggactgtgagaggccaagatgaaaggatctcttgagcccaggagttagagaccagcctgggtaacatagtgagaccttgcctttacaaaaaaaaaaaaaaaaaaaaattagccaggtgtgttggcttgtacctgtggtcccagatacttggtagactgaggttggaggatcacttaagtctagtaagtctaggaagtctagcttgcagtgacctgtgattgcaccactgcactctagcctaggcaacagagcaagaccctgtctcaaaaagaactcaaacaaaacaataaatgtacataatcttggaattttagattgca

SEQ ID NO: 870457 - DNA, 597 bp, Homo sapiens
ttgtgccaccccctccctaccccagggtcacacagagatccatgaatactggattattggcatgagagttcacataagggctgtgtactttgttttatggaagatcgtatgacatatttttgtgtgcactctgctatttttgcataacaatacaacatggaaatcctttccagttataaatcagtccccttctttccagtggctgagactgtgtggcactccacgctatgactgcaccatcaccccgccgtgtctgccaaggtctctacgccagtgtgaggtgaggcgatctactgccaaatgggtgaagagggttcaaagggattacttatgatcatgcgatagtaatcagaaaaaattaaaaccacaaaaagaactgttacctttcaaattgagaaatcawacaagctctggaagatatttgtgtatgagagagctcattttctgactgtataaagacctcttagagatcctaagtggtagcttcaatttgcttatggtgctcttcaatacataaaaattatattttgtatggtcctgtccattttgtaatgggttctgtcctttgatttcatgtttgcaaagtcttccatatat

SEQ ID NO: 870458 - DNA, 636 bp, Homo sapiens
gggtatcctactttcacaattcccatcacctgtacaccattctcctctcttttcattgaatcagtcattgactttgccactttgggcacgtactcaagggagataactcagactgcatgaagtgactagtgggaagacatccctcgccaaatttacaccattcacttttttctctaagtcagtttctaatgaactgtgaacttctctttcaaaatggccctgacctttattttattgttcgttttaaatgcttctacagttcctaatataatcagctttcctcccctgaaactgagtcttcargcttattttctaaaatagaagatagcctgatctgatacagacttgttcagcatgacactggattataaaacaagatgtgggaaaagatggaattttgtaaattccattatcccctctttagctgatggagggctatacttggtaggtagagtagcaaaaagttttatgtaaggtgatcaggcaggaagaggaagtttgagaaaggctcctctcatggcattagagagaaggcagataaaaagaggcaaaagaagagagacctaaaattattttcctgtatccctgctaatatccaggacttggatagattgtgatacagtgaaaggaaccaca

SEQ ID NO: 870459 - DNA, 625 bp, Homo sapiens
cctgtgaagcctccacagacacatggaactataagtccattaaacctctttcttttgtaaattgcccagtctcagatatgtctttatcagaagcatgaaaacggactaatacagtatattggtaccagtagagtgaggggcagctaaaaagatacctcaaaatgtggaagcaaatttggaactgggtaacaggcagaggttggaacagtttggagggctcagaagaagacaggaaaatgtgggaaagtttggaacttcctagagacttgtgaattactttgactaaaatgctgataatgatatggacaatgaaatccaggctgaggtggtctcagatggagatgagcttgtcgggaactgaagcaaaagtgactcctgttatatttttggacagagactagtggcattttgcccctgccctagagatttgtggaaccttgaacttgagagagatgatttagggtatctggcggaagaaatttmtaagcagcaaaacattcaagaggtgactttggtgccgttaaaggcattcagttttaaaagggacatagagcataaacgtttggaaaatttgtagcctgacaatgcaatagaaaagaaaatcccatttactgagaagaaattc

SEQ ID NO: 870460 - DNA, 622 bp, Homo sapiens
cattttaaacacaaaggttatctcatccaattttcaaataaagcatttaagattgccatcagatgatgctgaggactaagcctctgggccctacacagacatgagtcaggaatattcctctaccatgttgtaactgggcaaacttggatagggtagttacatcctcatcttctcaatttcctctgttgtaaagtgtgaaaaatcgtgcctacttcccaggtacttgtgaatatttattgaggaaatatttatattactagtagtatatactgtgtagtargccatgtattaatatatttttttcttttttgtttcaatcagttcaggatgctataacaaattaccatagactgagtggcttaagcaacaaacatttatttctcacagttctggaggctgagcagtccaacatcatggtggcagcagacctggtgtctgatgagggcttgcctccgggtttgcagaaggcaggtcttctcattgtatcctcacatggcagagaggaaagagagatcacctcttcaatatctcctcttataaagacactaatctcattcatgaagcctctgctctactaacaaaattatctcccaagggtcccacctgctaataccatcacact

SEQ ID NO: 870461 - DNA, 654 bp, Homo sapiens
acccagatgggttttttaactcagaattttgaaaagacttcaagtatcaggtaaaaatgacaaaatacccattttagaaagaaaacaaaacacaatttccctgtacaattacctacgtgggtataaagacatatctaaactaatgcaagataacgttagatgaaattctgatgtaaacttcaaagcttttctcactaaggaatatctgaaaacaataaccctgttgtggctaagagtacaaactgtgattttggtttggacttctcttggtttttccaagttgtgctgaatctcctatgtttgttctgcagtgttctcctctgtcatacttttttttattgcattgaggtccttattcccaattgcagaaaattatatatatatatatatatatacatatatatctatatatatacatatatatatacacacacatatatatayacatatatatatacacacacatatatatatatacacatatatatatgtttcatgaaattttagggaattttttaatttcaaagtaatgcatattttgcatatctagggaaataattcaagatacagcgggaaaatgttaataatctccctcaatacactacacaggtcttcaagagctctctgaaataactaatattaatagtaaggtgt

SEQ ID NO: 870462 - DNA, 654 bp, Homo sapiens
acccagatgggttttttaactcagaattttgaaaagacttcaagtatcaggtaaaaatgacaaaatacccattttagaaagaaaacaaaacacaatttccctgtacaattacctacgtgggtataaagacatatctaaactaatgcaagataacgttagatgaaattctgatgtaaacttcaaagcttttctcactaaggaatatctgaaaacaataaccctgttgtggctaagagtacaaactgtgattttggtttggacttctcttggtttttccaagttgtgctgaatctcctatgtttgttctgcagtgttctcctctgtcatacttttttttattgcattgaggtccttattcccaattgcagaaaattatatatatatatatatatatacatatatatctatatatatacatatatatatacacacacatatatatatayatatatatatacacacacatatatatatatacacatatatatatgtttcatgaaattttagggaattttttaatttcaaagtaatgcatattttgcatatctagggaaataattcaagatacagcgggaaaatgttaataatctccctcaatacactacacaggtcttcaagagctctctgaaataactaatattaatagtaaggtgt

SEQ ID NO: 870463 - DNA, 630 bp, Homo sapiens
tgccagggtagtaatccctttgtctctgacaacaaaaatggatctacccaacttagatacgttgaccagcctcacccacacacatactgtagccagggtgacattgataattgatggttattatgcccaccacaattttgggattttcctagtgttccaggagrcaccttgagtttacctgagcatgaaatcaaaatagcttgcctattgttgatccttgaagttgtttccagatttccattttaccagaattgaactgatgatacttatgcacatgctctttaagcaaagtgattttccagaggaaattgcttagggaaagtttgtgctttattttaaaactacctgaaggaagttatcaaaatagtaaactgcatagattcagagtttgggtcccactgactcagctgtcacagaatagtcagaaggaagaatgaacatcaacagaccagggagcattcgttacttgttctaaaaacacatgaagaaacaatggcacatgtgtcttcacactcccatgcccatctgttgcttgacatatcttttcttttagacctttagaaaatctctgttctgaaaatcgcacagtatggatatttgattttgcatgtacggcatctagtgttcctt

SEQ ID NO: 870464 - DNA, 619 bp, Homo sapiens
ctttgggcgtatttgtatcataatgtactgacacgttaaattcttacaataacttataaggtgggcactatgatgtattttgtcattttgctggtatttggcagtgatcatcacagcacaaacaagattaagagggaaattatagaaataaaagaattgaaagatagaatcctagggaatatgcagtggtggggggggcggtggtggyggtggtgagaatttgtcacagagatggaagaagcagaaatgagtattattatagcaaagggaatatgaaatttcatgccaaaaggaattgttagggatttcatatattggaaagagtttaaggtgtctgaagactgagggaaaaaatgcattgcatttaataatttgaggtcattgttgatcttcaggaaaatagtttcagctggagggcaggtgaagaagggggtgaaaactcagaagtgagaactagaggcattagtagtgcagccaacttttttaaaaaagtttgagatttaaaattagaaaaggggcagctactaatgtgggataacataattaagggaatgggtttgtgaaagagggaggcttgagcatatttgtgatctgagtcgaaggaggaggtggcagtgaa

SEQ ID NO: 870465 - DNA, 619 bp, Homo sapiens
ctttgggcgtatttgtatcataatgtactgacacgttaaattcttacaataacttataaggtgggcactatgatgtattttgtcattttgctggtatttggcagtgatcatcacagcacaaacaagattaagagggaaattatagaaataaaagaattgaaagatagaatcctagggaatatgcagtggtggggggggcggtggtggcggtggtgagaatttgtcasagagatggaagaagcagaaatgagtattattatagcaaagggaatatgaaatttcatgccaaaaggaattgttagggatttcatatattggaaagagtttaaggtgtctgaagactgagggaaaaaatgcattgcatttaataatttgaggtcattgttgatcttcaggaaaatagtttcagctggagggcaggtgaagaagggggtgaaaactcagaagtgagaactagaggcattagtagtgcagccaacttttttaaaaaagtttgagatttaaaattagaaaaggggcagctactaatgtgggataacataattaagggaatgggtttgtgaaagagggaggcttgagcatatttgtgatctgagtcgaaggaggaggtggcagtgaa

SEQ ID NO: 870466 - DNA, 686 bp, Homo sapiens
cctcacatttaaaagtgtaagaagaacccatcacctttcacatccattggctgtaaagttgacacatgacatctcatgtccattggctagaatatagtcacatggtgatatttaatcacaaagaggaaatgataaatcgtgtttttctcttgatgatcatgtgccaactaaaattgtaaccctatgtaaaaagtgagcagatattggggcaaccagtaacctgtcaygaagtgttcatgcttcatatttttcctcaaattctttcaagagccatttcttctctaaatagttttacaccaggtttgagttacaaaagaaccctgagagtaatcagatacaacagatgcatcctcattttgtctttctgtattttcatacctccatctctgcagaacatggacatgtggaatcatttgggtggaatatttaatgatgtatgggttttttttttccagcttaaaacaacatcacaagagaacagatgttcccataatgcctacaagcacaacctacttctgtgacaatgagttagcctgtgattttgctcaagtcaggaacagaagcataggcaggcatatgttttcttagggaggtaaaaacagagaccagaggcttgacaagctgataatatttagaggaaacctttggcctttcactcttaatgggacactaatttttcacttctt

SEQ ID NO: 870467 - DNA, 665 bp, Homo sapiens
ttcaaattctctccagcaggatgttctccactcacttttgtctttaagaactagccagattgaggcagtgatactgaagcaatctatgtccagttgctttcaggatatcatgctgtaaaccaagcccaagtttttaaccttggccaaacttttcataggaacttcccatgaagccttaagtagagagtgagagagaggagacaaagtagcaggagtaggtgctagaggaatcacttactcacaaaacctacttcttccttcaggacctgctccaaatccatctctaatatctcatttgcacttagtggatcacaggtgcatatgcccaaacttctggtttgataggctaaatgaaacgtaggcagctcaagaygcatggtcacttggtgtaccacggtcaagtgtacagtatccatgagatcccggtagtaatctaggagctgtttctcaaaaagagaatactctgtaaataggataagcctttgtcctaaacctgaaaagtatacactgtggctgttctattaatggataatagcaggttatgaaacacccatatgtgccacaaatcctgtgaacccatgggatctgatgggtcataaggcccaaatgatacagcagctttcattgcactctgaatctatagcagaatcttctctttctctagg

SEQ ID NO: 870468 - DNA, 615 bp, Homo sapiens
ttcccacctccaagtcttgttaatagctaattatttttttctagaatgtcatgtaaatgaaagtataaaataagtagcattttgaatctggattctttcatttgtgatatatttgaaatttatctatgttattgtatgtatcagtagttcattcctttttagtgctgggtaatattctattgcatgggtgtaccacagttgttttttttttaattaatttttgagttgaggaatatctgaattgttactacctttttagaattgcaaataaggctgtttaaaacatgtttgtataggcttttatataaatataattttttatttcccttgtgtaaatgcccaggagtgggattgctagaaagcatggttgagtatgttttactttacaagaaaaaaktaccaaattgttttccagagtagctggacaattttgcattttcaccagcaatgtatgaaagtttctggtgctctgacttctcaccaacaactggtattgcttcctgtctctgtctttctctctctctctctctctctctctctctcatttgtaatttttttccaacctcccacactctcaagcaatcttcctgcctcagccccctgagtagctgggac

SEQ ID NO: 870469 - DNA, 567 bp, Homo sapiens
aaagtcagtggatagaaatcagtggactcatattggagggtagctgcactgtagaaatgccagttctctctagttattcctgtctgtcacagatgcaggcaggatacaaagccacagttatactgtctccaacagatgggaaactatgctaatgagttttggattatcaacaattacaagcagttctcttattggtcactggccagatgcttaaatttttgggtgggagtgggagagaatgaaaagtagcagctcctttatgccgtcttgatggtgttctgagctgtttctttccttgtcraatctttttcaccagccatttctagagtctcctgagttttcccggggcataagaaatcctattctttatttatggtgatataactgatccatggtaagcaggtcatagcttgaatcattctctggtcttggtagattgatttgcagtggtcctttcatgggctcacatctgttctcacttgtggccagatactagaattaacagagggttggctctggctaagggtttggccattgaccatgaaccaaattgaaattgactgactc

SEQ ID NO: 870470 - DNA, 618 bp, Homo sapiens
gatggactggttggaacatctgtgtggcagtgtgtgaactgtaagatcctgagatcacagacacgcatgagccaaattgaccttataagtaggatgcttcttttttccttcacttctgtcattttctctaaatggtgacaatacatacatgtcccatgaagcttcacttttttttctgaattgatccccaacaaaataargctctaaaaaataagtggtgtcctagacattgtaagccccctaaaatgacctagttaagtgaagatatagctgagatgcctgtggccagatactatggaattattggagtgatttatgctcgcatcttgggtgtctgttcttttttaaggaattcacttactctgatagaccatccaggatgtttgttagtaggcacaccctccaattttgaagtgctggggaggagatatggtcattacaaaagctgcttagagcaaagagtggtaattgtgtgtgtgttgaatgtgggtgtcttttgaacactgaaagactacctaatgtcatgaaaagacaagtgacttgttaaaggaatggagctctcttcccctggggtactactagcctgtattaaacctttgtgaacattagggaaaggta

SEQ ID NO: 870471 - DNA, 655 bp, Homo sapiens
tcatcattttattagttgtctataaggaacacttacatgttaatcatattaacactttgaatggcatataagaagcaatattttccatgaattcaaataaattcttatacattagcataaggccacacctcagagggaagttgtctcgtaaaaagtgagacattggttggcaagtaaatagaatttgcagggtggctaatgttggactgtttttcagcaggggaagagaaagaatagagatgcccttaaaataaaccatatgggtctcaaactattcatgccacgaatcaggtcagtsatatttcaacctcctccctcaagcttatctcagtgcaacttaaggaagaaatggaaagtacatttccaccagaatgcatgtcttatggaggggcaggggagaaggcaatttcataacagtttcaaactaaagtagtaccccaaagccagtgatgtattctggcccagacttgacaggttattttacctgaccaagccttattgttcctctggaacaataagcatattttcacacattctatttttatttctcaccaaatgtgtcaagacttggtttctattaattaaatttgtatataattgtagatatgcatgcagttgtaagaaacaatacagggagatccaatataccctttgc

SEQ ID NO: 870472 - DNA, 590 bp, Homo sapiens
cgtcctagaacttgaaggaacagacagatccagagagttccagccaggatctgctgacatggaacaaaacctgcttttgtcctaaactggtaggaacatctaaattgtaattttgttgggaggccgaggcaggtggatcatctgaggtcaggagttcaagaccagcctggccaacatggtgaaaccccatctctactaaaaatataaaaactagccaggcgtggtggcacrcgcctgtaatcccagctactcgggaggctgaggcaggataattgcttgaatccaggaggcagaggttgcagtgagccgagatcacgccactgcactccagcctgggcagcagggcgagactgtctcaaaaaaaaaattgtaattttgatgagctgcgagaggctgtgtatggagtggcctgagaatgagaaagtcaggagagtgtgttcctaggggagggccacactttcacattttgccttcaggagcctcaccacgttctcatcgtgagtcccgaaggttccctcctggctctggccctgggaggggaaacgtaaccattatgaaatatggcagagcattctctacaacaaaggcct

SEQ ID NO: 870473 - DNA, 634 bp, Homo sapiens
caaactcacaaagatggccaacagtggcagatgggacctgacacttgaacttggggagctttcctccaacaggatgaatccatggaagataccaggcacattctcaaaagaacagaagtttagctggtggaaatgagagtagggtggatgtaagttaaaattgttgataagtaaataccctgattgggtattcctgtcacgtgctgctgtaaaaaayctcttaaaacactgggtgaagtggataaatggattccatttaacagagcatttactggggtctattagctgactattaccttaatgattatattataggcggcaatggggctgtcatcataaaaggtgaaaatgatcaaggagaaagaagtatgagctcagaagaggatgcagcaatgtgatgagacagagttgtgcctgttggcctccttcagtgagaaggctgcatctgaaattatcactgaagcaggaaaaacagtgtccttattctttttgtttattcaaaaatgcaatagcgcactgatgcatatggaacctggggctatgagaattgtaaaaattgacctgggatagttgtgttggggttatcaaacagaatgctggtattgggaggatcctgggacacatggaggtgtta

SEQ ID NO: 870474 - DNA, 634 bp, Homo sapiens
caaactcacaaagatggccaacagtggcagatgggacctgacacttgaacttggggagctttcctccaacaggatgaatccatggaagataccaggcacattctcaaaagaacagaagtttagctggtggaaatgagagtagggtggatgtaagttaaaattgttgataagtaaataccctgattgggtattcctgtcacgtgctgctgtaaaaaacctcttaaaacactgggtgaagtggataaatggattccatttaacagagcatttactggggtctattagctgactattaccttaatgattatattataggcggcaatggggctgtcatcataaaaggtgaaaatgatcaaggagaaagaagtatgagctcagaagaggatgcagcaatgtgatgagacagagttgtgcctgttggcctccttcagtgagaaggctgcatctgaaattatcactgaagcaggaaaaacagtgtccttattctttttgtttatycaaaaatgcaatagcgcactgatgcatatggaacctggggctatgagaattgtaaaaattgacctgggatagttgtgttggggttatcaaacagaatgctggtattgggaggatcctgggacacatggaggtgtta

SEQ ID NO: 870475 - DNA, 549 bp, Homo sapiens
catagtctatccaaatgagaaggaaccagaaaaataattcaggcaatatgataaaacaagttctttaacacacccaagagatcatactagctcaccagcaatagatccaaaccaagaataaatccctgaattgccagaaagagaattcagaaggttgactgttaagctaatcaaggaggcaccagagaaaaggtaagtccaacttaatgaaaaaaaaaaatgatacaggatataaatgaaaaaatcttcagtgaaatacatagcataaataaaaggcaatcataacttctggaaatgaaggacacatttagagaartgcaaaatgaactggaaagtatcagcaatagcatcgaacaagtagaagaaagattttaagagctcaaagacaaggctttcaaattaacccgatctgacaaagacaaagaaaaaataattttaaaaatgaacaaagcctccaagaagtttgggatcatgttaaacaaccaaacctaagaataattggtgttcccaaggaagaagagaaatctaaaagtttggaaaacatattga

SEQ ID NO: 870476 - DNA, 608 bp, Homo sapiens
tatacgtttaaagaaacaaaatctgagatttaatatatggactagagaaaaagagattattaaaaacaagtcttgaaaaataaaaacataaaactttttcatttttaattttttttttgagacaaagtctcactctgttgccctggctggagtgcagtggcacgatctcagctcactgaaaccttcacctcccaggttaaagcgattctcttccttcagccttctgagcagctgggactacaggtgtgcgccaccacgcmcagctactttttgtatttttagtagagatgggtttcaccatattggccaggctggtctcgaactcctgacctcatgatccacccgcctcagactcccaaagtgctaggattacagccatgagccaccgcgcccagccttatattttttatttcaataggtttttagagaacaggtggtgtttggttacacaaataagttctttagtggtgatttctaacatttcggtgcacccatcacctgaacagtgtacaccatacccagtgggtagtattttatccctcatcctcatcctatcctttacctgaagttcccaaagtccattgtataattactatgcctttcagtcc

SEQ ID NO: 870477 - DNA, 568 bp, Homo sapiens
ttgtaaattccttatttactcttgttatgagagctttgtcggctatgtgctttgcaaatatttcctctcagcaagagaattgtcctctcattttcttaatagtgagagtgcaaacattttaaattttgttggagaccaatttatcaattttttgttttatggattatatttttagtgccatgtttaagaactttttgcctaaccctagataatgatarttttctcttatgttgtcttctaaacgttttatagttttatgttttacatctagatttttgttcacttttaagttttgagttaatttttgtataagatgtgaggtttaggtgaaggtttaactttttccccctgttgatgttcagtttttccaacatcatttgctgaaaggacaaaattgcttttgtaccattgtcaaaaaataattggtcatatttatgtgagtttatttctggattcttgttgaggtctattggtaattgtctatttcaataccacatggtcttgattagtgtagctatatagtaagtcttaaaatcagaaagtatgattcctttaagtttattctttt

SEQ ID NO: 870478 - DNA, 612 bp, Homo sapiens
ctagactggtattaatctgtcattgcttggtggtatagcgaatggtgtgggggaaggactaacttcttaacccaaatactttccacagccttttgtgttattgttgcaaccaaggcaattctcttcctaaggaaaattatagtgccagctgttcaaataaaaacaaattttccttctkgtgacacttgaatgaacaaatatgaataaaaaatggatgaatgagttaatagcatggtattctctctttatctactggtcacattatctcttacacctctacctttctggagtacacatctaaaaaccgatagatgtgcatggatatctactgtgtgtgcacatgcaccgctgcaaccaaattcttccagcccattaatatttaatctttacagatacagaatcttagccctctcattcattcatttgttgaatgaagatttattctttgcttactatgtgccagggagatatagcagtaaacgaaacaacatggtccctgacctcatggagtttaaaatctagcaagagaggcatagactatttaatcaaacattaattaaccaagtaatctaaagtactaaagtgtaattttaaaactgtggtaagtaacta

SEQ ID NO: 870479 - DNA, 712 bp, Homo sapiens
ttttcctctaggatatttatattttgaggtcctgcatttaaatccttaaatctttaatctatcttgagttagtttttatatatggtgaaaggtatgggtccgattttattcttctgcacatgactagccagctatcccagcaccatttattgaatggggagtccttttcctattgcttagtttagtcaactttgtcaaagatcaggtggctgtaagtgtacagctttatttatgggttctccattgtgttccattgccctatgtgtctgtttttttttttttttataccagtaccatgctgttttggttactgtggccttatactataatttgaagtccagtaatgtgatgcctscagctttgttctttttgcttaggattgctttggctgttcaggatcttttttggttccacatgaattttagaatagtgttttctctttctgtgaaaaaatgacattggtgatttgataggaatagcattgaatctgtagattgctttgggtagtatgataacaacattgattcttccaatccatgagcatggaatgttttccatttgtttgtgtaatctgtgatttctttcagtagtgttttgtagttctccttttagaaaactttcttctccttggttaaatgaatttctaggtattttaaatttttgtgaccattgtacatgggattgtattcttgatttggctcttggcctggct

SEQ ID NO: 870480 - DNA, 640 bp, Homo sapiens
aaaaactgttaaaactgataaatgaattcaacaacattgcaagatacaaaatcaatatattaatacaaacttggtaacatttatatatgccagcagtgaacaatctgaaaaagaaatcaagaaaggaatcctgtttacaatagctacaaaaaatataaaatacctaagaatcaatctaaccaaggaggaatcaatctaacaaaggaagtgaaaaatctctacaaggaaaaccataaaactctgatgaaggaaatagaagaggacacacatgcacgatagaaagatatttaatgctcatggattggaagaaataacattatttaaatgaccatactacccaaaccaatttacagattcagtgtaatccctgtcaaaacatcaatgatattcttcacagaaacaaaaaaaaatcctaaaatgtatatagaacccmaaagaccctgaatagctaaagcaattgatatggtttcgctctgtgtccccatccaaatctcatctcatattgtaatccccataatccccacgtgtgggagggtgggacctcataggaggtgactggatcatgggggccatttcccccatgctgttctcatgatagtgagcgagttctcataggatctgatggttttgtgtttgacag

SEQ ID NO: 870481 - DNA, 627 bp, Homo sapiens
atcctgtagtctctgccaaaaggctactagaaatgataaacaacttcagcaagtttcaggatacaaaatcaatggacaaaaattagtagcatttctatacatcaataatgtccaaacgaagggccaaatcaagaatacaataccattcacaatagccacacacacamaaaaaaactacctaggaatacagctaaccatggaggtaaaagatctctacaacaagaattacgaaacactgctgaaagaaatcaaagatgatacaaaaaatggaaaacatctcatgctcatgaataggaagaatcaatattggtaaaatggccatactgcccacagcaatgtacagattcaatgttctttctatcaactacgaatgacatttttttcacagaactagaaaaaactattctaaaattcatatggaaccacaaaacagcccaagtagccaaagcaattctaaacaaaaagaacaaagctagaggcatcaaactacctgccttcaaactatactacaggaccacagtaaccaaaacggcatggtactagtacaaaaacagacacataggccaatgtaacaggttagaaagcccagaaataaggacacacacctacaacaatctgattttcaac

SEQ ID NO: 870482 - DNA, 674 bp, Homo sapiens
cttttattttaaggtctggggtatacatgcaggatgtgcaggtttgtcgcataggtaaacagctattcttcctgatgctctccctcatgaaatcttcgcccatacctatgtcctgaatgttattgcctagattttattctaaggtttttatagctttgggttttacctttaagtttctaatccatcttgagttaatttttgtataaggcataaggaaggggtccagtttcaaatttctacatatggctagctagttctcccagcaccatttattaaatagggactcgtttccccattgcgtgtttttgtcaggtttgtcgaagatcagatggttgtaggtgtgcggtcttatttctgagttctcgattctgttccatttgtctatgtgtctgtttttgtaccagtatcatactttttggttactgtagccttgtartatagtttgaagttgtaataccaattctttacaaatgcacatgtaactttcactaagattgacaagttgatcattctaaacacattgagatcttgtagagaatcttcccaggtgacaatattaaattagaaatcagctactgaaaaatgttttgaacttaccagtattttgaaactaaacaaaaaactcctaaataaatcataggtcaaggaagaaatcacaagacaaactagagaat

SEQ ID NO: 870483 - DNA, 456 bp, Homo sapiens
gattagttactacctcttattctcatgggaatgatatttcccactgtttctaaaaagatgtaacataagaatgctataaaatagttatgtcacagtctatacaaatataagataaaattattattttctcctccccctttgttctgttctgtatagactgatgaacctactcctaaacatcagtggtttttatttttttttgtgttttttttttttgagacggagtcttgctgtgtcacccaggctggagtgcagtggcgccatcttggctcagtacaagctccacctcccgggttcmcgccattctcctgcctcagcctcccgagtagctgggactacaggtgcccgccatcacgcccggctaattttttgtatttttttagtagagacggcgtttcactgtgttagccaggatcgtctcgatctcctgaactcgtgatcagttttaaagaaact

SEQ ID NO: 870484 - DNA, 587 bp, Homo sapiens
cagaagaggaaaagtaaatttaaaagacccctcattaatgaggcgagcatttcaatgagcagtattctggtcttgccttcctgagctctgatggaaagtttctattttaaaggagtggcagccgttcttctcatacttctgtctagctcatccaagcagagtggcagaataagtgggcgttcatcagcagatcttctcatgagaatgtttagagcttcttatggaagtcaaggatcttcagtaatacaagactagctcattctctagacatgttttttacacttccaactaaaagtcactgtcatgaataaaaagatcaattattggaaaggcataacaatcctaaaggtatatgtacttagtagaagaccttgaaaacacatgagaaaaaaactgatagaagttaaaggagmaatacacaagcccgcaatcacagggagaagttttacaatatctttctcagtattgtatacgacaagtagaccaaatgtgaatagagatatagatttcaataaaactattaaccaaattgatctaattaacattatagaacactacatttaaaaatagcagtatacattattttc

SEQ ID NO: 870485 - DNA, 566 bp, Homo sapiens
caaaagaagacatttatgcagccaacaaacatataaaaaaatgctcttcatcactagtcattagagaaatgcaaatcaaaactctagtgagatagcatttcacatcagttagattggcaatcattaaaaagtcaggaaacaacagatgctggagaggatatggagaaataggaatacttttacactgttggtgggwatgtaaattagttcaaccattgtggaagacagtgtggtgattcctcaaggatctagaactagaaatgccatttgacccagcaatcccatcactgggtatatacccaaaggattataaatcattctactataaagacacatgcacatgcatgtttattgcggtactatttacaatagcaaagacttggaactaacccaaatgcccatcaatgataaactggataaagaaaatgtggcacacatacaccatggaatactatacagccataaataaggatgagttcatgtcctttgtagggacatggatgaaggtggaaatcatcattctcagcaaactatcacaagaacagaaaaacaaacaccacatgttc

SEQ ID NO: 870486 - DNA, 514 bp, Homo sapiens
gagaaaatgactggctcattgtttactaatcaacgacttagataaaaatgccacctctgaggcacaatttaaagggacttttatcttccagagcagaagagaaacaggtgatgattaagcctataattattagagtagcagattcatagaaggatcacttcatataccacaaccagggtcytaatagagaagaaatggaaacctgaaacttgggaaggcttatcgcatctggattgatgcacttgagaatgttatatctcttgattctatgagactctcttggcaggcaaaagtatcctgaaccctatttttaagaagagagattccaactctcttggtgggagaatattcatagattccaaatgaaataaataccttatcagtaaatgttcaccttccccaggatatgccatcactttcccttttggtcactagacctttaactgcaaacagtgtcaaatatcacacccagactgaataagtgttaggcccctaagaaataaaatataagcca

SEQ ID NO: 870487 - DNA, 639 bp, Homo sapiens
taagtaattgtacttacggctatatgatctattatgcttctcattgtgtgaaactctgcctacttaaagctatattttatttttcttccatcgtgaagatcagatctagagatgatccagagaacagctttagttaacaagaargactcttattttttccacccatgaccaggcaattttttttacttgttctttctgtacgctgtgtaacctcacatcaaagcatgtttccaactctgctaagtgacactttattgtatctaaatctgaatagggcttactctctgcccttatttgtaacccttacctgaccttttccatgttagcttgcagttgcattatcaccaccacgatgacagctccattttgtttttttagctgtcattttcccaacattccattagttcttcagattgccttgtgcttccaacgaatcattacaacatatttattgattagacttctctccagatacaagttgtttgaacatgagttatcaagataaaacaatacatattttatgtttattttgatacaaaaaaatctattttccaaattaagtaatactctcacatgaatttactattacctattcagccaaatattccagcaagtcaacttataggttacagaaacttt

SEQ ID NO: 870488 - DNA, 479 bp, Homo sapiens
agccaattggcctgtaattcatcccctttttgaaaaccctaatagcctttgcccatctccaatcagcggtgcctctttcttcaggaatttagacatttagtccttgttgaggaccctctgaagaaatctgcttggcctcagtgtccggaataggactytcaggcatgctttttttttttttttttttttttttgagacagagtctcgctctgttgccaggttggaagtgcagtggtgcgatctcgactcactgcaacctccgcctcccgggttcaagcgattctcctgtctcagcctcccaagtagctgggaatacaggtgtgtgccaccacacctggctaatttttgtatttttagtagagacggggtttcaccatgttggccaggatggtcttgatctcctggtctcgtaatctgctcgcctcagcctcccaaagtgctgggtttacagaggtgagccactacgccttgctgcactt

SEQ ID NO: 870489 - DNA, 611 bp, Homo sapiens
attgcatacaaggccaagcatgctggctcacatctgtaatcccagtactttgggaggctgaggcaggcagatcactagagtttgggagttcaagaccagcctggccaacatggtaaaaccctgtctctactaaaaatacaaaacgtagccagcatggtggtgctcacctctaatcctagctactcgggaggctgaggtgcacaagactccatctcaacaaaagaaattacgcacaaatttctcaccacatctgtcctttarggatttttttttttagatgtttagtacagtaaaaaaagtgtaggggaaagaatggtgctggaacaactggctagttacatgaagaatgaagttgaaccccttccttacaccctgttcaagggttcactccaaataggtcatatacctaaatgtaaaacctgaaactaagacttacatggaaacaggagcaaatctccatgacctcgggttaggcaaaggcgtcatagacaccaaaaaggagtgacaaaattggtcagttggacttccaaatttaagatgttagtgttcaaaggacattattaaaaagtgggaaaaacaaaaaacataggaagtgatgaaatatttaaggg

SEQ ID NO: 870490 - DNA, 612 bp, Homo sapiens
tcactggcagatttcaccacaaaatttaaaaaaagtcctttaagggttatgaaaataacaccagatggtaacaggaatctctacaaaggatgaagagtattggaaatgggtgtgtgtgtacttatgtgtatgtatacacatatacatatatatatacacatatgtgtgtgcatgttttacttctaacttaaaaatctctttaaaacacaattaactatttaaataaaaataataacataatgtagagtttataaaatctgtagaggttaaatgttttccaataatttcaaaaaagattgggaggggaaaaatcaaaatatactattccaagattattayactatatgtgagcataaaatcacttgaaggtaaactgtgataaactaaatgtatgtactataagtcctaaagtaacaattaaaataacaaaacaaaaattataacttataagccaacaaaggacacaaaaagaaattgtaaaaattattcatttaatctaaaatcaggcaggaaaagagaaaaaaaaaaagaagagatgggacaaaaccctcccacaaaattagcatataaaccttatcacatcacatatcacattaaatataaatggtctaa

SEQ ID NO: 870491 - DNA, 300 bp, Homo sapiens
aaatcatgagtgaattccagttcacaattgctacaaagagaataaaaaacctaggaatacaacttrcaagggatgtgaaggacctcttcaaggagaactacaaaccactgctcaaggaaataaaagaggacacaaacaaatggaaaatcattccatgctcatggataagaagaaacaatatcgtgaaaatgtccatcctgcccaaaataatttatagatttaatgctatctccatcaaactaccattgactttcttcacagaattggaaaaaaactactttaaacttcatatggaaccaa

SEQ ID NO: 870492 - DNA, 615 bp, Homo sapiens
tattagagtttaccctgagagaggccacaagatgcacacacggataacctcttcagggtacaatggcattagtgtgttaggagaggtaagggacaaagttcaacagaaggctgggtgtggtggctcatgcctgtaatcgtagcactttgggagaccgaggcgggtggattacttgaggtcaggagctagagaccagcctggccaacatggtgaaaccccgtctctactaaaaatacacaattagctgggygtggtggtgggcgcctgtaatcccagctacttgggaggctgcagcacaagaatcgtttgaacctgggaagtggagattgcaatgagccaagatcacgccactgcactacagcctgggcaacagagtgagtgagactccatctcaaaaagttcaacagaggaaaacttcaggacctcagggctggcccattcggaaaggccctcagaggagcttgccatttgagctgaatcttggtcttgaactcctggcctcaagcagtcctcccgcctcagcctcccaaaagtgctgggattacaggaatgagccaccactcccagccaaaattttttttttttttaattagctgggtttcaagttcttctgct

SEQ ID NO: 870493 - DNA, 602 bp, Homo sapiens
gggcttttctgggagatatattttttaagcaattccaaaagaaatattcagaaaatgcaaacctttctaaaataaaagacattttacacaaaatggaaaatctcctgggtataagtattataatttggtatatgaagacaagcttttgacaggaacagcaaggctcattgtgtattcataattcaagagttgcacccaaagacacacaagagagggaaagagaggacaagtactcacaggaatttatcaacaaaactataaatcgattacattttgacgggaaatcatctatgtatagcacacacaygtgtcttctcttcttggctatcttacatttccatttaggtacttaagggggaaaaaagagcagaaaatggtgattgcaaatagtctgattatcctgacaactgttgtacagcctcttaggcgtgacactcctgcaagcctcttcggcagccccatgaaatttggaacatcgcttcgttccactacctacagggaaataaattctcgtcaggagttacctgcggctgatgcagctgacaaatgttatctaatcaaatctataagcatcccagacaggtgcgcctctccgccagcct

SEQ ID NO: 870494 - DNA, 588 bp, Homo sapiens
tggaaggagtcatgtgtgtagcatttgctaattttccattatgtaaatactttcaccatggctgatttcaaggtaccagtgtaacatcactgactgcggagttgggagagatgtattaagcagtgcagttgaccttctgtatccgtgggttccacatccgtaaattcaaccaactgaaaatcaaatatatatatatacacacacacacacacaaacacacacacacacacacacacacacacacacacacacacacatacatctgaaacgccaaaaaaggccaggcatggtggctcacatctgtaatcctagcactttgggaggccaaggcaggcagattgcctgagctcargagttccagaccagccttggcaacatggtgaaatcccatctctactaaaaatacaaaaaattagccaggcatgagggcgcacgcctgtaatcccagctacttgggaggctgaggcaggacaattgtttgaacctgggaggcataggttgcagtcagccaagatcacgccacttcactccagtctgggcaacagagcaagactctgtctcaaaaaaataaataaaactcaaaaaata

SEQ ID NO: 870495 - DNA, 582 bp, Homo sapiens
ccccactctccccacgaattttccaagatcaaatgtacctgattaatggtagcactgaagaaatgttatttgttctggtttctccaatttttcctccctgccttagcacaagggagttcacaatttgtagggttttataaattatattgaaataccatagacaaataatagtagcttgcttgaaaacacactaacagctgtgcagggcacacaacaagcactcaataagcatctgacttatccaacttaaaaaatgagacattaaatattgaaaaattatttcatggcacagaaagcacatcagccaacattaaaaaatcaagtacacagttataaagatgggcacactaargtgttggtatattatccctgactattttttatgattcccctagacaaaggatgtcgagcaaagagggaaccatatttgtccattgtaaacatttagtctagagatttaaaggctgttttgcacactgagtctatagagagacaggcgattgctctctgtcacaatttcaaagtccatcttctttacctcatcaatttgcagcttagtaggggtgaggatgagggaagagt

SEQ ID NO: 870496 - DNA, 615 bp, Homo sapiens
gtatattcccaggccactttttgctcttctctagctccacatctgggaggctgacctctattgactgcatcatctggacttccttatgcactggagggcaccagcaagagatgggagggtaggaggaaatctgggtgtttattcttcctacttcatccctgttttgcccttgttctgctgctgtgacaggggacaggttgtccatggctgaagctctcatctaacagcctttcttctatggctcagctttcaagaggccgwggtaaacaccattccaccctttgtcccttcaggctcaggcatgggtggtgatggctttcactgttgctagtctctgggtacctcactatttcttcttgcttcctttaaccctgcccacacagctatatctagtccatttattatgttatttttagataagtccctgtttcctgctctactctgataaaggtgataagtataaaatacatttaaatgagaaatgagcaaatgcgagtttaagttcatttaagcaaaaacaaaactaaaaacaaaaaaacccttaaaaccacaatatcctatcttttcaggagtaaagattactatctattttaatgaattacagtctaaaaggaa

SEQ ID NO: 870497 - DNA, 626 bp, Homo sapiens
gtatatacctaaggaaggggatttctgggtcacatggtaatcctatgtttaactttttgaaaactttttgtgtctctttttgaagcagttttctcaggctcagggtgcagacattcatgacaggctctttcaatcaacaaatatttattaagtgtctaccaagggacaggccctttgctcagaagttgggggattcaaaggtgagcaagatagtctcttcattgaagggcctcagggtctggcaaaaagaagtagatggggaaaaaataaaacacaaactgggtcatgtgtttccaacaacaaaaaccctccagagacttaccatggcaaccataagaaaacctaaattccttactagagtctycaaggctctgtctatgcaggtgaccttatgcagtcttcatgtgggaaaaactctgcttgctcactgctgtaccttagaacctagaagagtagccccttcatgaatatttgtaaaacataaatcaatacagaaataggtgaatgcccctctgttctcccccttggcctctaagctctagcctttgttctgtgccttgaatgtgccaactcattcctttctcagggcctttgcacacgttagtccttctacttggaatgctggt

SEQ ID NO: 870498 - DNA, 710 bp, Homo sapiens
atcttccctagcccgtgatcatcctgcctgcatccgagagatttgtgaggctctgcaaaggaggctggatgtggactttggcatcctttggagagactgggtgtcttccttgctggtgacaggtttttgtttgcttttggcatgggaacaggacctgctgttcatttaccatgtcaagagagttcaagatgccccatgaatgtgaccagtgtgttactaaatctccgtactggtacagagaacaatggcaggccaaacacacatgaagaccctgtctaggctcattgatgtttatgcagtttgtgtccagggctggttctcagggagaaaaatagataagatctgcaaaatagataagagaggactgctggtcagtggtgttccctgacatttttccctgaatgataccaggttaatcaaaagataaggatctaaaatatttttgtgctctgcttataatttgaatgtgacttcatatgtgtgtcatctgttggactaaattggattgcagttgctcttcaaattgtcattcctttattttctatttctacctacctccygatgttagctcaggttcctgctaccaaggtgtcttgcaaaaaaatttggtgactattactctaagtgaagcctttgatactttctcttaatacaatggttaaacctctaacaacgtagactaatgaggaagattagtttgaattagtaaa

SEQ ID NO: 870499 - DNA, 596 bp, Homo sapiens
tcactcactgtattccctctggagagaaggtacttctccattctcctgatttcactcactgcattccctctggagagaaggtacttctccattctcctgatttcactcactgtattccctctggagagaaggtacttctccttctcctgattcacattctcacgttgtcttgtggatggaggcttgggcctccactgaggagaggctgtggccaagcgttcagagtcaggtagaccttcactttcacacctgccccaagcagggctgggcccacagtgccctaaggccaactggtaatgggatcattgccctccttgtgggcagcagtaactggctcctccctaggagggcagagaaggtcctcctcctaggaggaccacgatcagggtggtgggtgsgactctcctccccaggtgtcagccaagggacctccctccctgtgaggctgtggggcagtgggctcccgcatcttagattgtacgtgtatttgtgtacgtgaactggcatctgtcttcccagctgcgttgtgggcatcacaaggccaggtttcatgtgtgtttttgctcacacctggcacctggccctatctgagccag

SEQ ID NO: 870500 - DNA, 596 bp, Homo sapiens
tcactcactgtattccctctggagagaaggtacttctccattctcctgatttcactcactgcattccctctggagagaaggtacttctccattctcctgatttcactcactgtattccctctggagagaaggtacttctccttctcctgattcacattctcacgttgtcttgtggatggaggcttgggcctccactgaggagaggctgtggccaagcgttcagagtcaggtagaccttcactttcacacctgccccaagcagggctgggcccacagtgccctaaggccaactggtaatgggatcattgccctccttgtgggcagcagtaactggctcctccctaggagggcagagaaggtcctcctcctaggaggaccacgatcagggtggtgggtgggactctcctccccaggtrtcagccaagggacctccctccctgtgaggctgtggggcagtgggctcccgcatcttagattgtacgtgtatttgtgtacgtgaactggcatctgtcttcccagctgcgttgtgggcatcacaaggccaggtttcatgtgtgtttttgctcacacctggcacctggccctatctgagccag

SEQ ID NO: 870501 - DNA, 622 bp, Homo sapiens
gacctgcagcatcttggtgtatgtatcagtgtaaggtccaagtggggacagctcactatgacagccgctgtgaacctagtcttcaagcacctcttggtccatgagaatcagcccttgagaaaagtcttagcaactgtactcattcagggagagagagagatccatgcctgcactggagcaggtggggagtggccacactcaggattcttggaacaggtgagtggcccctgcgtggtacacatggcacctgggcctgcctgtatgaccttccacaatgtctccactatctggccccttgttatccctttggttgaattttccatttacacttccctctgctcaacccacattagccacttgaccrcttcctgccccactacgggctctggcaccgctgcttccgtttccccagaggactctgcccctcacctcctcgcctcctaccatcggccctttgctcagaggccaccttgtcagtgaggccatcctgaccgcctgtttaaattggccccaacctcttttcgtcttctttcatctccgtagcacttaccccaggaccaagccaaatccctccttggctttctttgtgtggtctccgcacccagaaccacacttcacccgg

SEQ ID NO: 870502 - DNA, 622 bp, Homo sapiens
gacctgcagcatcttggtgtatgtatcagtgtaaggtccaagtggggacagctcactatgacagccgctgtgaacctagtcttcaagcacctcttggtccatgagaatcagcccttgagaaaagtcttagcaactgtactcattcagggagagagagagatccatgcctgcactggagcaggtggggagtggccacactcaggattcttggaacaggtgagtggcccctgcgtggtacacatggcacctgggcctgcctgtatgaccttccacaatgtctccactatctggccccttgttatccctttggttgaattttccatttacacttccctctgctcaacccacattagccacttgaccgcttcctgccccactacgggctctggcaccgctgcttccgtttccccagaggactytgcccctcacctcctcgcctcctaccatcggccctttgctcagaggccaccttgtcagtgaggccatcctgaccgcctgtttaaattggccccaacctcttttcgtcttctttcatctccgtagcacttaccccaggaccaagccaaatccctccttggctttctttgtgtggtctccgcacccagaaccacacttcacccgg

SEQ ID NO: 870503 - DNA, 572 bp, Homo sapiens
ttacactgttggtgggagcataaattagttcacccattgtggaagtcagtgtggcgattcctcagggatctagaactagaaataccatatgacccagccatcccattactgggtatatatccaaaggattataaatcatgctactataaagatacctgcacatgtatgcttattgtggcactgttcacaatggcaaagacttggaaccaacccaaatgtccatcaatgatagactggattaagaaaatgtgrcacatatacaccatggaatactatgcagtcataaaaaaggatgagttcatgtcatttgcagggacatggatgaagccaaaaaccatcattctcagcaaactatcacaaggacagaaaaccaaacaccgcatgttctcactcataagtgggaattgaacaatgaggacacatggacacagggcagggaacatcacacaccggggcctgtaggggggtgggggctggtggaggaatagtattaggagaaatacctaatgtaaatgacaagttgatgggtgcagcaaaccaccatggcacatatatacctatgtaacaaacct

SEQ ID NO: 870504 - DNA, 784 bp, Homo sapiens
tgtggcttaatctaatttatgaaaatgtgttataaatacaaatgtaaatgcacaaaaattatctcaatagatatttactgaattaataatgatgattacccctggctagaggaaggagaggtgaaggggaacattagcttaaattacattattctacattaattcttaaaactaataagatactatattatttgaattctatattatttaatttttataatgagcatgatataaacatgtaagagtttaaaaaatttcatgaaaatggtatgagatcaaaaataaagcctttttatagaagtgaattatgtcctaaaacttttgggaaacactttgttaacaaaagtagtgtctgttaatgaatttgtgggcctagcttttatattctcttcagacatagataaatgaaaaaagtgagttttcagtatgtaactcactcattgatgaagcaatakagtatgtctttaaactgctcaaataaagctgacaccctccttgctccaataacaagcccatgccaaagtaactattgtttgttagtgtaagatatttccttgcagatttacaagtaagtacatgaacatggaaatacgtgtagtttagctgtatgttttgattcctcaggcgagttttcaagacctgctttctgggccctcaaactccaggaaacacgtatcagcctttccaagtggtcctcacatagcctctctcacatcaaagaaataatgtccttaatttttaactgtaaacttttaattcttttacactctgagttacatcaaaa

SEQ ID NO: 870505 - DNA, 595 bp, Homo sapiens
gtctttgttctcattggtttcaaagaacatctttatttctgccttcatttcgttagtatacccagtagtcattcaggagcaggttgttcagtttccatttagttgtgcaattttcagtgagtttcttagccctgagttctaatttgattgcactgtggtctcagagacactttgctgtgatttctgttcttttacatttgctgaggagtgctttacttccaactatgtggtcaattttggaataagtgwgatgtggtgctgagaagaaggtatattcagttgatttggggtggagggttctgtagatgtctattaggtccgctttgtgcagagctgagtttacctcctggatattcttgttaaccttctgtctcattgatctgtctaatattgacagtggggtgttaaagtctcccattattattgtgtgggagtctaagtctctttgtaggtctctaaggacttgctttatgaatctgggtggtcctgtattgggtgcatatatatttaggaaagttagctcttccggttgaattgacccctttaccattacgtaatggggccttctttgtctcttttgatcttcgttggttta

SEQ ID NO: 870506 - DNA, 595 bp, Homo sapiens
gtctttgttctcattggtttcaaagaacatctttatttctgccttcatttcgttagtatacccagtagtcattcaggagcaggttgttcagtttccatttagttgtgcaattttcagtgagtttcttagccctgagttctaatttgattgcactgtggtctcagagacactttgctgtgatttctgttcttttacatttgctgaggagtgctttacttccaactatgtggtcaattttggaataagtgagatgtggtgctgagaagaaggtatattcwgttgatttggggtggagggttctgtagatgtctattaggtccgctttgtgcagagctgagtttacctcctggatattcttgttaaccttctgtctcattgatctgtctaatattgacagtggggtgttaaagtctcccattattattgtgtgggagtctaagtctctttgtaggtctctaaggacttgctttatgaatctgggtggtcctgtattgggtgcatatatatttaggaaagttagctcttccggttgaattgacccctttaccattacgtaatggggccttctttgtctcttttgatcttcgttggttta

SEQ ID NO: 870507 - DNA, 676 bp, Homo sapiens
accaaagcaatcctaagcaaaaagaacaaagctggtgaaatcgcattacctgactataaaccttactataaggctacagtaatcaaaacagcatgatactggtacaaaaatagacccatagaccaatggaacataatagagaacccagaaataaggccacacacctacaacaatctgctcttcaacaaaactgacaaaaataggcaatgagcaaaggactccctatttaataaatgatgctgggataactggctaaccatatgtagaagaaattggaccccttccttataccatatacaaaaagcaactcaagatggattaaagttttaaatgtaaagcctcgaactaagaaaatcctagaagaaaagctagggactactattgtagatattggccytgataaagaatttatggctatgtcctctaaagtaattgtgacaaaaaaaattgatgagtgaaacctaactgaactagagcttcttcacagcaaaaaaacaagcaaacaaaaaaactatcaagtaaacacacactacagaaatggaggagaaaattatagatgaaaaggagacttaagagacattcaagcaattacactgtatactacaattttaatttattcaagctgttttgctgaatacctagttggtccaaatttttgttttaataactaagacta

SEQ ID NO: 870508 - DNA, 627 bp, Homo sapiens
atggcagccccaggagactataatattcaccctgggtgagccactgagctctggatacttgaaccactcaggaaggtggagaatcccacctttaagctggtaaaatcagactgtgtcctagcaaggaatttagcaggggataagaaaacctcctttggccagcctctgtccactgacatctgccaagttccatctcatgatgattaaaaagaatgaaagcaacataaagacaggcttgcctaattctgacaggccctggacctgcccactgacctggccattatgggccatcagggagctttaagcaaccctgcaaccctgggcyctgtagcctagattgggcacagggccccaagcaccctgctcactgcactgagcacatagtaaggtcacaagctgtctcctggtcactctctcccctgagcttgtgagtcctagggggcagagagctgtcccagtcagctccatcctcagcacccaggactgacgaggacccaccatttacaccctggtaacagatggtgctgactgatgggggagagagggctctgggggctcccccagggctgcgtggaccatggtgtcagatcaagcatgaggctcttccttttttcctttcttctactg

SEQ ID NO: 870509 - DNA, 644 bp, Homo sapiens
tccatttggtaatatgtcatctccattgggtggccttctctcagtgttattctctggttttccttcattacacttactaaaacatgagattatatatttttgtacttgtttgtttaactatcttagtgaaatgtgaggacaacagtccttaagcaagacattgatcatcatttaagattaaacttagtctaaattaatcatactaagycatacttaaatgaaagtgtgtccaccttttaaactggataatatggacattgtttttctaccatgcctattcaaatcttccctttacccagatgattcaagccactgaaacctcttgtatctctgatctatataaatttaaaaagtatttttaatatccagactttgttaaatcccatttaatccaagtagtaaattttaagtacagtatatactttgtagaaaatatataggataactatcaatattatcaatattaagatcaacaaacaataacagattatttcacttaattgtagccctcctttgagttattaatattccaatgtaatagacgagaaaagtatagttcagagaggttaagtgacttggccaaagtcatacaactaataaatgaccagttcctataactgactagctatcattccattatacta

SEQ ID NO: 870510 - DNA, 550 bp, Homo sapiens
ggaacacaggagaacatacacagttaccacccctcccctaagaggagatggctgctgcagggctctacgtaactgactgatgtagtacctggcacataggaggtactcaggaaatattttttggcttaattgaacagtcttagattatcagaccttctaaatttttttcaagaagggtaagacatttacatttttatgtaaaatctgctggattataaatttgggaccaaaatttaaaaaaaaaaaacacstttgcagagcaacaagacacttctgtgccaaatgtgcatcacaggcaactaattttcaagttttgtataacagttaccaaggagctttccaaaaatgctccaaatattttcaagttagttagtttattcaagggataaataataaattataaagagtagtaataatattggttcatttaaaacatttttcctaagaatgtacaatcataatcatggttagaagagtttagaacatggttagaagagtttcttctagatgtgaatacttgcttaggtataaatttagattctgatgagga

SEQ ID NO: 870511 - DNA, 676 bp, Homo sapiens
aatgaaaaggaaataatgactttctgggcaaattctctattgccagttccaaattcacctaagtctccatcccgccagacaattctttaacaagagtagcctctcctatcacttcactgctgatttcaaattgtgtgccttcctcatggcccatcctctactcagtcctttctggattctttgaagatctagtattctacttgattgataaattgaaagaggaattttagaaatttggctctttcatttcgtgtctayaactccctctcccttccaatttctttctagatcaatatcaaaatgagagcaagcaaggtggccagcaaagggtgtgcctgaggtcctccagagttctccagggaagagagcaacaagaaaccccaggggcgaggtgacagactaaagcctagtggctaagggaagggggcgcctcgctgagggcctgggatggagtggctccttgaaatgtctcagtcatcaaaacctgtgaatccctcagaagtggggtgtgctcctcaccttgctgtggaaggtcctaggaggacctgcccagttctcctaatcccaaggagcctgcaaggagaccagcagaatggtaaggctgactatgggagagggctgttctaaccccaacactccattcaggacttctaaacacaaaagctggaaggaaaaa

SEQ ID NO: 870512 - DNA, 590 bp, Homo sapiens
ggctgcaagtactcaacaaatagtggtgattgtgattcatcccccccttaattcctctattagaatgcccagtcctgcatgcccataaaccaccactctaaaaatagcccctgtctctgcacaagctccttttgcactcatggccaaattaaatctctcttgtataattgctgtcactttcagtttgtatttaggtgggaagatttctgacagcytaataagtcttgggaacaaactgcagagggtagagggaaaaaaaatttctctgataatttggaagaaaacaagatcaggaaaagcacaacagataaaccctgcaaggattgagaccccacatctttcaatggaaaatccccaaatggtatgtttataaagaaatgcatgaacaagtgtttataggactgcatggaattttcgtactcaccaacaaaataaaatgataaagaaagagggttacccaaaaatgagtgatggcatttacaagaaaggatttttccaccatgtgatctggaatatcgaggaagggctttcccgtgactaagtcagcattgttaacgaggatggtcacgtcaccaaattctttcctgacc

SEQ ID NO: 870513 - DNA, 685 bp, Homo sapiens
aaatttttacaaaattaaagaaatatatttcttcatattaaagaagcaccttaagtcctgagcaagcaaataaaacaaactgcagaataccaagttacagaaaagtccaatcgccactagagaaaaaagattcacagtaatgataattttctcaatggatacaggatatctgagtctcctgtttcttgctttgttttgttttgttttgtttaagatggagtctcgctctgtcgccaggctggagtgcagtggcacgatctcagctcactgcaacctcctccaactccctggttcaagcaattttcctgcctcaycctcccaagtagctgggactataggcatgtgccaccatgcccagctaatttttgtatttttagtagagactgggtttcaccatgttggccaggatggtctcgatctcttgaccttgtgatccacctgccttagcctcccaaagtgctgggattacaggcatgagccaccgcacccagcctgagtctcctgttttattgtcttcttcctatatacctgttaaaaactgtgctaacataagtcaggctccttttttctctcttgctaataagagaaaatctctgccgaaatctaagagttgttcacactctaagtatttctctttctcttttgactgatgttcaactctgatgaaaatcctaatataatattt

SEQ ID NO: 870514 - DNA, 685 bp, Homo sapiens
aaatttttacaaaattaaagaaatatatttcttcatattaaagaagcaccttaagtcctgagcaagcaaataaaacaaactgcagaataccaagttacagaaaagtccaatcgccactagagaaaaaagattcacagtaatgataattttctcaatggatacaggatatctgagtctcctgtttcttgctttgttttgttttgttttgtttaagatggagtctcgctctgtcgccaggctggagtgcagtggcacgatctcagctcactgcaacctcctccaactccctggttcaagcaattttcctgcctcaccctcccaagtagctgggactataggcatgtgccaccatgcccagctaatttttgtatttttagtagagactgggtttcaccatgttggccaggatggtctcratctcttgaccttgtgatccacctgccttagcctcccaaagtgctgggattacaggcatgagccaccgcacccagcctgagtctcctgttttattgtcttcttcctatatacctgttaaaaactgtgctaacataagtcaggctccttttttctctcttgctaataagagaaaatctctgccgaaatctaagagttgttcacactctaagtatttctctttctcttttgactgatgttcaactctgatgaaaatcctaatataatattt

SEQ ID NO: 870515 - DNA, 618 bp, Homo sapiens
atagtttagagattgaaatgtaaaaaatgaaaccacacaaatatgaaaagaaaacagagatgaatttcttaattacctgaaaacgcataagtattcctaatcatgattcaaaacacagaggcaacaaggagaaatagtgataaatttagctctgtgaaattaaaacacatttacagtagcaaagtataaaacaaatgacaatctagagaagtatatttgccacatgtaacaaacacaaagagctaactaatatccttaatttacaaaggcttctaaaagtggagaaaagaccaacaacctgatagaaaaraatgggcgagaggtaacaataaaaaattattttaaaaagaaacacaaatgacacttaaacatataacaagatgctcaatcttgctcataaaaagtaaatgtaaagtaaaatttactcttctaacaaactggcaaaaatccaaatattctaccagtagctacaacatgtacaaggagaaataaacaggtacaaaaatccatagaaattttttccagttctttacatgccagatggagttgcctgctctcacttaaccagaaagacaagaaagctgtaaaacccaagatagtaaaaaagtttggctcagc

SEQ ID NO: 870516 - DNA, 494 bp, Homo sapiens
tcagcatcttacctttgtctacatttatacatctcagattcatcattttattcctttgcattagaatggatctatcaatgacaaagcatttctgtcaccattgcctagatgtgtccaacattcaggcctcaaattacagaagttttaccaccccaaattgtatttctgaatgtttttagtgccctgtctaggtatttccagtcctttcttgctgtgtcagattctgggcaacatagaacatgtmtgctattttgctttcctcgaatgtgataatgatgtacaaaaagcctgcagtttatgaacacctgtaaaaggctgatgcagttgcagaggaaaaatattggttgttgtcatttcctagactaagtgttcactggacaatttctctgtttccctctattaagtgatccctctgctgctgcagctggtgttaaaatctattcctttgcaaacaaatgctgctttcccatggtattgttgtttatctaatttgg

SEQ ID NO: 870517 - DNA, 682 bp, Homo sapiens
ttcacagctagtaagtggcagagatagattgaacacagcccatggtccaaattccatattcttgaccactgcactatatttccccagatgaagtctttgaaactcggtccttggaagcagtctgaagaaatatgatggcaatatgatggcaaaataaattagagaaatactgtgagatacaacaagttctcctatcccttggtgatccaccacattaggtgattgacaaacgtgccatacatttatcaattraagcatggtaaattctaaagttacaaagtttattatatacttttaagaaatctaaaattttctcaggataattgatgataagattcttcctttctctattacaccaagcttcagcacactcattttgctatactttggagaacgattccccattttaacaatgatgtttcaagcacctgtaaaatcaaagacactgtgctaggctttgtttataaatttagtctctgcccttaaagagcatatgatcaagtgaggggttcagggtacggaacacagtgcactaaaatccataatgacgactgtaattggatagagagaggctaacagctatgggagaaataataaaggggcagttcagtgattttgaagaactgttatcaactgttgatagtgggtggcaaataatttgcagaaagactgtcattccagt

SEQ ID NO: 870518 - DNA, 621 bp, Homo sapiens
ggtaccaaataatcagctgccagcaaatgtaaagcaggcagaaaaatgttaaaaggcgagactggcctagcctcccctcctggatgcttcctgcccttgaacgtcaaactctaaagttcttcagttttgagacttggactggttctccttgctcttcaagcttgcagacagcctgttgtaggaccttgtgatcctgcaagttaatacttaataaacttccatatacatgtgtgtgtgtatgtgtgtgtrtatcctattagttctgtctctctagagaaccttgactaatgcagattttggtgccgggagtggttctagaggaacagaatattaaggatggagctctttcattggttttggggtttctggagttggttgcttaatatgattagaccccaaaatgctaaggactctacttctattagtatggaaaacactgatagtccttggcatgaactgttcagagagtcatgcaaaataaatgcatttgacattcctgattcaccactctgcttgtgagaggcaaggtgtttagtggctctatacataatatctttgatcatatgtggagaaccaaggaacataatgaaggtggttggtttctcctaaattcagtggaca

SEQ ID NO: 870519 - DNA, 531 bp, Homo sapiens
ccatgcctatgtcctgaatggtattgcctagttttcttctaggatttttatggttttgggttttacagttaagtctttaatacatcttgagttaatttttgtatacggtgtaaggaagggatccagtttcagttttctgcttatggctagccagttttcccagcaccatttgctgaataggagatcatttccccattgcttgtttttgtcagctttgtcaaagatcagatggtcgtagatgtgtggtgttatttctgaggtctctgttctgctccattggtctatatgtctgttttggtaccagtgccatgctgttttggttattgtagccttctggtatagtttgaagtcaggtagggtgatgtctacggctttgttcttttcrcttaggattgtcttgactatacagggtcttttttgattccgtacgaaatttaaaatgtttttttctaatcctgtgaaggatgtcaatggcagttttgtgggaatagcattgaatgtataaattactatgggcagtatggccatttt

SEQ ID NO: 870520 - DNA, 611 bp, Homo sapiens
tttgtggtaatttcttatgcagcaataggctattcttacattcagtaaatcattcccaattctatgtctcttcaaccctgataccaattatagtccataatgctggctggcatcacagagtttaatttttatctatctttttaattgacaattaaaaattgcattaaagttttttttctttttatactcaattttcctgtattgctaactggagtaggggtttgcttgggagagaataagaatctttagaaggtgaagtgaagtaatcatatatccataatttgatggtttgcrcccaaagtgaatttatgatcatattggctggcaccatccttggattttcttttgacattctattgatctttagtttagttaccatttgttttagaacaaggcagttttacttcatctctctgctctcttttttatttagttgttctgcattgcagatttcttttagtttttgttacccagcatatttttctctcctttctgctttatagaaaccaccagtctataaaccaaaacagcccataaatcaaacagcacacccaaacatgtcatcattagtcaatcaataagtaaatactcaatgatgataccatgcaaaa

SEQ ID NO: 870521 - DNA, 611 bp, Homo sapiens
tttgtggtaatttcttatgcagcaataggctattcttacattcagtaaatcattcccaattctatgtctcttcaaccctgataccaattatagtccataatgctggctggcatcacagagtttaatttttatctatctttttaattgacaattaaaaattgcattaaagttttttttctttttatactcaattttcctgtattgctaactggagtaggggtttgcttgggagagaataagaatctttagaaggtgaagtgaagtaatcatatatccataatttgatggtttgcacccaaagtgaatttatgatcatattggctggcaccatccttggattttcttttgacattctattgatctttagtttagttaccatttgttttagaacaaggcagttttacttcatctctctgctctcttttttatttagttgttytgcattgcagatttcttttagtttttgttacccagcatatttttctctcctttctgctttatagaaaccaccagtctataaaccaaaacagcccataaatcaaacagcacacccaaacatgtcatcattagtcaatcaataagtaaatactcaatgatgataccatgcaaaa

SEQ ID NO: 870522 - DNA, 724 bp, Homo sapiens
cactctatcccagctcatctcccatctttctcagtatctattcccaatgtttttggagggaagggttctccgcctccattcacccatccaatatggtatttttcaaggtaacctcatcaactacctaaatggtaatgaccttctcatatcacctgaatttcagaggcaactatccatcttactaaggaacgtctgaaatttttattctttctgctaaccctgcttctatcctgtatttcagtaaatagttggtagctacaacgttggggaattactacraaattatgatttaaaaaaatctgtaactgttccctctggagtagatagtaggacatagaaatcacccagattcctaaaatataatatatctgcatttatgaaaatagtttttttccatttttttttaaatgtgggagagacatgcttctagttcatttaacacagtaacaagtccattacatgatgctaaaattacggtggacaaattttcatctgattcatcaaaagtctggtttcaccaacccttcgtctttctgtaggctggagtatttttggacaaatgctgtttaaacatcatcaactgaggttttatatttagttcaagtagcttacccctataactaatttctgcttgcagtcgatccgcagaaatatcagtaagaaacacacacacagatttcaccagaaaatgatcgtgagtagcttggtagaatttgaagaggaa

SEQ ID NO: 870523 - DNA, 724 bp, Homo sapiens
cactctatcccagctcatctcccatctttctcagtatctattcccaatgtttttggagggaagggttctccgcctccattcacccatccaatatggtatttttcaaggtaacctcatcaactacctaaatggtaatgaccttctcatatcacctgaatttcagaggcaactatccatcttactaaggaacgtctgaaatttttattctttctgctaaccctgcttctatcctgtatttcagtaaatagttggtagctacaacgttggggaattactacgaaattatgatttaaaaaawtctgtaactgttccctctggagtagatagtaggacatagaaatcacccagattcctaaaatataatatatctgcatttatgaaaatagtttttttccatttttttttaaatgtgggagagacatgcttctagttcatttaacacagtaacaagtccattacatgatgctaaaattacggtggacaaattttcatctgattcatcaaaagtctggtttcaccaacccttcgtctttctgtaggctggagtatttttggacaaatgctgtttaaacatcatcaactgaggttttatatttagttcaagtagcttacccctataactaatttctgcttgcagtcgatccgcagaaatatcagtaagaaacacacacacagatttcaccagaaaatgatcgtgagtagcttggtagaatttgaagaggaa

SEQ ID NO: 870524 - DNA, 619 bp, Homo sapiens
cttttaaaacttttaaaatggttattccattattacatgccaatactacatacttttcatatatccttttattttgtcctagaaacaacctactgttctaggtattgtttccattgtatagataggaaattgaacctcagggaggttaaaaaacttgattacaatcacacagctagtatataaagatatttgtttttcaacccagatgtctctgattccaaaggtcactgatattttcactatgctacattgcyaccacttgttacagtctattatttacctaaattgattattttatactattcctacttctatcatttaaaacttctattatgtccctcctggtatttcttttcccaagtcactgtctttggtcatgcttcacaatatttctagaaattaaagattataaacctagaattaatctctcttccccatactagataatttgcatataaacaaaagaacaagtggatttccaaatgcaatgtaatgaaaacatattaataaataaatattaataaatcatataaatactaacactatgagacaatataaaaaaaagaagaatgttttaaaagtcatttatccaaatgtgtcaattataggaaaatgtcaa

SEQ ID NO: 870525 - DNA, 579 bp, Homo sapiens
ttggtcatttactacactctgtaatttctagtaacttaaatacaaacattttgcattgttaactaaatacaatatctgtttcctttcagttaattatgtacacataataattttgggtctcaaagaactgtctcctaaaatcagtagaactaaaaaaaactgctttgtaaattctccttcaagctgtagttttatgtgaaggattctaagctttaagtttgttgttccaaaagagcttagaaatcctgatttggcattaaaatgtgtaatatttgtgtaaaytggcttctcttacattgtcctactttatactcgtgctaaattgtatttgcttctaagcccaccttctattagcatatctttgtatgtattaaaactatgtagctaaaagtggatctatatgattatgcaacatagggccagacacatgctagatacttaaaagaggattgtctaaatggaatggctatttcatacatactttacatacatatatatgaaatgttcaaagttctcagctcatgtaaactttaatcactgagattgtcaatgcaatatgaacaattttgaaatatcatt

SEQ ID NO: 870526 - DNA, 634 bp, Homo sapiens
aattgtaatctcatatgacctaagagaataatatattgagctaacgtttttcattagaaatgtttcctaatttttacatgtaacccataaattattatgtgcacacctctgggcctcagaaaacaatagcccaaagtgaaggcctcagaagcaaaaggttttctcttaccttctcctgcgctatttctcagtgccattctccccgaaggctagccatagaaactagaatccctcttccccaaggtgagtcatagaaaccagaatcccttttcccaaaatccagccataaaacctaaaaatattacacgaactttccrtcctcctttaaggagaacttgtgcttgatgccaaaatgaactggaaatttctcagggaattagaggatcaatgtgagctaccacataataaaggaaaaaacattctgataaggtacctaagatgtatttacaaagtctactctcaatatcttactgcttcaaatttccttctgatgtccccatatttattaagggcatcagcagctaggtttgagattttgatatcatatctcctcaagtttcttctcaaatttcttagaatctaattctcctctttgtttcctgattggcatctaaatttactgctcttggctaaa

SEQ ID NO: 870527 - DNA, 652 bp, Homo sapiens
tacccaattagacgaaatgggcacctcagctggaaatgcagaaatcacccaccttctgcgttggtctcgctgggagctgcagaccacagctgtttctacttggccatcttggcccctccctaaatattttaagatttttagagatgaggacaaatgaaaagaagaagatgagcaacatctattatgctttaaggcataataagagatacaacacttgtgctttcaaactgaataccagatcttgtgcagtaatgttatagggtcaggatggaaagtattttctgaaaaaaagaagttatacttgaaggtggatgttgaaggatccagttttagaataatagtggcctctaatcttcccatggtccactcttcctcatgattacctttacggagtctgtcttcatagccagaaaacattactgtctggcccaaacaagaacaatagtcccaccttatccacaggggatacattccaagacccccagtgaatgcctgaaacgtgcacatgatacarattctataaacactatgtttttttgatttgataaaggaggtagccactaagtggttaacgggcagatcatttatatatcgtgaatatgttggacaaagggatgattcacatcccagttggaagaaaggtgtgagattt

SEQ ID NO: 870528 - DNA, 534 bp, Homo sapiens
caaagtgctaggattacacacatgagccacactgcccaacttatatgtcttcttaaaataaccttttcccaatttttgccctggaagagactaatgattgctgtatatcaatctgccaaacactgattttgaaagactgccaaggtctttaatgtaataaagttggggagggaacaatattaatatcttatatacctctgtacatcaaagagttccctaaatatcaactcatgaaatgtaatagtaaattatacagttcccagcatattagcatctatatcttttgcccctttgcaaacactgaatgttccctaattaatgatagttctagtacacctgctgtatttcatttacattgtgcaaaaataacactttagatttaaatgatgcctaaatytttgccatggcaacattcttttttctagttctttaaacttaatcttatgccacctgtctctgtgtacccaaccatccctcatatctaaatcagaattctcttttctaaggtcacttttgattatgcatatttttctc

SEQ ID NO: 870529 - DNA, 651 bp, Homo sapiens
ggttattaaaatgggttcaacttggtttttacattttctgtgtccctcaagcctgcaaattttcacatatacctttctgtattttcagaaaattctatcccttattaaaagtgttggttttgttcaatggttcgacatcttcccctaaaagtacatttcccctagcctaagtcacgcagtctaggataaatcctcaagtgctccggaaaggcaatccaaggtgagtgttggtactccaagtcttgtagaacaagatcgtttcaaaatgtgttcaccagcatgaattgctgatttgtcaagaaagaagctgttaatttgggcactgctatctctctgtttctctgactcacacacacacacacacacacacacacaaacacacacacactttccattactcaagggaaaacatwaattttccaaactagtacataaattttccaaactagtataatcaaagccacaattgataatattctattttttcacgtgcatcttcaaaatcagtatagctgtactcattagagtcatttttgagtcacctaacacagatttccagaatacaacatattccttgctttccaatatgtttgaatataccatttttcaaaaatctgagcttgatgtgttttttcaatgaaaatgttctca

SEQ ID NO: 870530 - DNA, 641 bp, Homo sapiens
aagtattaatcaataagcatcgtatttaagctgaaaagtcactatgtatcagtgactaaaacattttgtccttgctgacaaaaacttcctttatggtagactgtattaaggtcactttgatcctcaccgaaactgttaatatacaagaaaaatcacagatacgtgtatctcttttgagcaacaacaaaaaacattaaatggagaaatgattaaagttagacagcatcccctttaaaatatgtaggttttaaaaataacattataaagaagttctcagtattgtacactggtacttgcaaatagttttgaaattaaaattatgctgtaatttacagtttcaaaatagctgtattcaaawgtctttctatggttacacccagaaaggaaatcatttaaaaaatcactataaatgggaatatgatgacaatggagtgaatttggctatactttactaatttgtcagaatgttggtagcccaaagagatactaagttgaatattttgtaaagattttgaagcactaacagaagtttcatgatttaaggggaaaaaaaagccatagacagttccttcagattatcaaatagtgcatttctcagtcttctacttggacttacatctggatgattctatatgtcattc

SEQ ID NO: 870531 - DNA, 627 bp, Homo sapiens
tcattttcccatcttctgctccctcctacttcccctattcctgcttgttttcttttctctcttgctcttgctcatacactcatgttcacacacacttacatagacatacagtacataaagacacagtctgaaacaattcttttcatatctatggttctaaaatagcttcctcacatgtgatttcctttttggttgttgttttaaggatgactgcattacttataattgggaaatgtttgttttggtaaggtaaaccagagrcctagtctgctgtctggaggacttcagtttttaaaaaagaaacaaaacatatctgctgtgtttactcatttatctataaataattcaactagcatttatcaggtacatatgatgaccctaaaactatacatttttcccatttgcacaaagaaaagagagtgatggattttgacatcaaaaatttcataatcttagtctataaaagcacaaacattactatagtgggccaaagtaaacactaagttagggatactgtatttcttattgtcaccaattactgttctgtggaatctaattgtacatatatgaaatacttttataatgttaaaggacaatatacgtataaacaaacatttacaaatgtta

SEQ ID NO: 870532 - DNA, 624 bp, Homo sapiens
acttcttgacaccgtctacctcacaccccatagctgggtgtggtgtctcatttaggtatgcatgtacagatatatcctttgtatgtgtgtatatacatatatatcacttattacaatgtatactaatcatagcactattacaaagtatcactgtttttactgtgtctttcaatcggctgaaagctatttcagggcaaagatcatttaacagtcaattttatatccctaacatctaacataatgcttcacttatagtcattgcttttaaatgtttagtaaatgaatagctagataaacaaatagtcaagggcagggacaggttgtcctgttcctaaagtacatyatggaagtggccacctcctgctgcaaaaagtgagccattcctgattttcactacattctgtacttgtagtcaagagaagtaaccattcagagatagagatagatgggtcaatggatggaaggatggatggatggatggatggatggatggatggatggatggatggatggatagatagatagatagatagatagatagatagatagatagatagacagacagacagatagatagacacagattctttgtagcctaggaacaaacagcctaaaatatctttt

SEQ ID NO: 870533 - DNA, 605 bp, Homo sapiens
ctctacattctgaaaccaacatgagttatccctttttctggatctctgaataaataactctaacagatgctatttcagctacttcctaattccaatttcccaacagatcatataatacctagaacagctacagttaaagatctcaaacataatgctaatagaattttatcacaaaggcttaatttcaaaagaaatgaatattgtggctcacgcctgtaatcccagcattttgggacgcctcgggcggatcacctgacatctggagctcaagaccagcctggccaacatgatgaaaccccgtctctactaaaaaaatacaaaaattagccaggcatggtggcaggcacctgtaatcccagctactcgagaggctgaggcaggagaatagcttgaacctgggaggcrggggtttcagtgagccaagattgcaccattgcgctccagcctgggggacaagagcgagacttcgtctcaaaaaaaaaaaaaaaaaaacaaaagaaaagaaaaagaaaaaagaagtatttccctttatttctttagagttctctactaaaatgtctagtcaaaacccatcatttttactgatagcacagctgaattccaaa

SEQ ID NO: 870534 - DNA, 661 bp, Homo sapiens
taggtattcacagtatgtgatttttttttcagtgcatagcagacaaaataattcctgaaggaaatatctagtaactcaaaacaatatattggcttaaataaagttcccaggagataacaaaaagggaactgctgtcacaaagcgtacacaatctgtggatattaaattgttctctattaacataaaagaatgcttggcattactgcatatataggttaaagctgcctctctttaaattaccttttctttatcataagtgtgttaatctgcttgacgtgtgatagcaaaataccacaggctgggtggcttaaacaatagacatttattttctcagtctggagactagaagttcaagatcagggtgccagcatggtcctkttctggtgagacctctcttcttggcttgtaagtagcctccatctcactgtgtgctcacatgacctcttctttgtgtgcacagagagagagggagagccagcctctctggcatctcttcttataaggacactaatcctttcataacagggccccactctcatgacctccttaaccctaattaggtccttatagaccctatctccaaatagagtcacattgggggttagggctttaacatgtgaattttgggagacataattcagtccatagcaataagcttgac

SEQ ID NO: 870535 - DNA, 684 bp, Homo sapiens
ctgggagcataataaatgtatttaccttatttggaagcccttagaaaattttacattctagcaaaaacttggctttgagtaatcaggataattgtctccactcttcacttccctgggcctttataaacagagattgaatatgcaaactgtggttgtattttaaaatcattaatatttcatttaactgtgagcacctgagtacaagaactactgaaaaatgctctatggttcttaatataaatgtttattratattcagtgtttatgcagaattatactaaattttgattgcagtcttcactctctgtaacaccttcatagctagagaaacttaattgaaaatcaaagataaaaagaaaagtggagccacacatttaaaagacagaatataaagttgaaattaggcattagataaaaaggttgtaaatggcatgaaggtggcataaatattttgtgggaaactgtcaaaagtttgtcaccagtgtgaaaattggaagcattttaattagctcggacttacgtggttctgatagaatgtatcagttaattagcaattttatagcctttggggcaatgattaagttcaatgttcttttgaggtccacgtgttctgttaaataaatccattttgtgttgtccatggatttgaattggtcagaagaaaaagatctatttagtttgattt

SEQ ID NO: 870536 - DNA, 706 bp, Homo sapiens
atagccaaaatttggaatcaacctaagtatccatcaagagatgaatgaataaagaaaatatagtacatatacaaaatggaataccattcagccataaaaaacaatgagttcctgtcatctgctacaatgtggatagaactggaggtcattatgttaagtgaaacaagccaggcgcagaaagacaaacttcggatgctctcacttatttgtgggagctaaggcttaaaacaattgaactcatggagataaacagtataaaggttaacaggctgagaagggtagtgagggtttgggaggaaagcggggcagactaataggtacaaaaacatagttagaaagaatgaataagacctagcatttgctagcacaacagggtgactatagtcaaaaataatttaatcgtacatttagagataactagatgtgtataatcagatcggtgtaacacaaaggataactgtgtgaggtgatggatatctaatctaccctgatgtgattattatgcatgtatcaaaacatctcatgtactccataaattttcaaaagaagtatgtatagcataaygcttaaaataatatactgtaatagtctacaacttggcaagaaattaagctttcgtttatttttgtcacaacaggtatactacatgcagattaaaatatatattttatatatatatatatatatatatatataccatctattt

SEQ ID NO: 870537 - DNA, 600 bp, Homo sapiens
cctggaccccagacttggaggccctagagagacagataatcaggccaagggggtcccaggaaaggcttgagcagagagcatccagctgcccctgtcctttctcattcgcttacccttgatatcttcctgaactggtatgttaggttctcagagtactaactctcaaacttcactgtacattagaattactggggaactttttaaaatccagaaattcaggctgtaccccaaacaattaaattaggcatgaattaaaacaacaaaagtaaccccyccaggtgattccagtgtgcagccacatttgagaaccaatgtgttagttgatggaatgaaaaatcgagtgcagttacttactgggttgacttttgtgcggtcaccaactcttatcatctgaggatcacacaggacacaatgtcacccctatggggccacactgcctgttctggtcactagtgaggtctcagtggcatatagccattttaacagctctttttcctttttaccgtgaaacattgacagagatagagtagtatatgcccccaccccatgtactcatcacccagctgtcattcatgtctcctccgccccacacacacactt

SEQ ID NO: 870538 - DNA, 598 bp, Homo sapiens
tgatgaatgtaggaatttattaacaggaaatgaaaactgataggtatttaatatttaatgtgaaataatctactataacataaaaaactcaaaataatactaactgttttaattgtccatgataattaaactgtcactatgctcattaaaaagataggtgaatagtaagttattgacacaagctcttcaaataaaatggactcattttaaacctaaatttaacttaaattgaaagattgcctgcctctctctctctcctctctctctctctttaatttttcttagtgtcagcatcaaaatctgtttttatctgtgtttaacagggatacgcctaaagtcactgagtcagcatgcagtaataaaaattcctgctaataaaatctttaatttcactacagggaaasgtttatcaaatacgggacatagtgagagacctgtaagttagctatttgggaagtgcatgtgtgggtgtgtatgagcttgtttatttgtctcacatcatacacttaaataaattttggatggattcaaattaaaatttgtagtcaaacacagacagaatgttaaaaataaatatgtatcaaatatcttaaggaga

SEQ ID NO: 870539 - DNA, 611 bp, Homo sapiens
atatacacatatttcaggttgctgaagaagaaaatgttgaagttataactaaatacttaaaaatataattttaaaaacttccccaaaatgaaagaagacttgtatctacataagaaagagcacactatattctagggaaattggctcagaagagccaactgagacatatcataggaaagttactggacttcaaaacaacaactaaacaacattttttttggcatctgggcagagtcatttataaaagaaaaaagtggcctgtaatcctagcactttgggaggccaaagcaggtggatcacgaagtccggagatcgagaccatcccggctaacacggtgaaaccccgactytactaaaaatacaaaaaattagccgggcgtggtggcaggcgcctgtagtcccagctacttgggaggctgaggcaggacaatggcatgaacccgggaggtggagcttgcagtgagcgagatcgcaccactgcactccagcctgggcaacagagcaaggctctatctgaaaaaaaaaaaaaaaaaaaaaaaaaagacaaaagtgtgctggccccagagtgctccatagcagtaatcaatgcctaagtcagtgaagtaacacct

SEQ ID NO: 870540 - DNA, 581 bp, Homo sapiens
gcaggaaaggcaccctttccttttcacctctgcctgcccatgcttacctgcccctgaaggccatcctgcatgctacagaatttgggacagtatggattttaaaatttaaccttttctgtcatagacaagtatgcaaatgattagtccagattttgcatttattccaacatctatttaagtttcatagagatatttctatacagaaagagatgtttatatgtatatataggcagatatagatatatgtgtgtgtgtgtgtgtgtgtgtgtrtatatatatatatatatatacttaaacatatacatatatgtatatacatatgtagaatgcccattgtacatttgcagatgttgacctggtcccccgcttccatttactccttatggccttgttctggtcactgagtctcctcctctagacaagtgagtggtttggactcgttggtctttaagggtccttcatccttctctgccactctgcaattcatctttaacatttttcaaatcattgtaatgcttcagaaagtaaaactttcttgcagactgtgtgagttcccacacttttcttaatatttaattacg

SEQ ID NO: 870541 - DNA, 649 bp, Homo sapiens
ttatgtacatcatcctcgaggtcagaagtgtttaagggggagggaagttctaacttaaagaggacagataagaactctcaccaccagacacagcctcacgctcccactcccgaccttggttctatacctcactctgggagtggcacttcataggaacttagtaaaaggtgattaaatgctggtgtgtttatcttccatgtccctttatgcctttcatctgtacacatacattaggttcacgttattcttaggggaagtgaagacactccttaaggtctcacttgtttagctaaagaagacagacatccacagagccttggtctgtataataagaaaatgagcaggattcagcaccttgcatccatttacatattcatttgttcgcttgtttgttgatttgttcattcattcacatgtgggtctcctcagtgccaaggcccatgggcaaataatacacacaagcraaggaaaaccaggtggatttcttctaatatagtcaaatcatagaaccaaagagtggaaaggtggttgccaggcgatgaggggaagagggaaatgggagttgctgttgaaggggtacaaagttccactgatgcaggatgaataagctctagagatccgctgcacaggctgtgctcagagtgacaac

SEQ ID NO: 870542 - DNA, 630 bp, Homo sapiens
gtttgccaaatcacaccagaaagaatacatccaccccactgcctgaggtcaggagttcgagaccagtctggccaacatggtgaaaccctgtctctactaaaaatacaaaaaaaaaaaaaaaaattgtcgggggtggtggcacgcacctgtaatcccagctactcaggaggctgaggcaggggaattgcttgaaccagggtggtggaggttgcagtgagccgagatcgtgccatygcactccagcctgggtgacagagcgagatgtctcaaaaaaaaaaaaaaaaaaaaatacatccaccccagtcatctgtgaaatatgaaacctggggattctgaaccttacatgttcctgtatagtcttaatttcaaaagtgaatcttcctgtcgagaacaagctatgcttttatttggtcactgtaataaagcagtgccgacccctgtgtgtaaggggcatgtttgctggaagcagtatcccggctggtgtcatcctggcagatggaggaggaaaattctaatttaagtgacatgtcgccatttcaatcccaaatccgaaacaagaaaagagttctcccagggactgcacaaaccacacatcataggcctgtacccaaggtataggaagtttttact

SEQ ID NO: 870543 - DNA, 607 bp, Homo sapiens
cacccggccagagttgggtctttgcagttgattcttctcaaagcctcctctggaggtgaccctaggcaggcaggcatcagtgacatgggagactcagggttagcagggctgaattttcctctcgcccaggaactgaagtgacacacccagatggggagcagaacaggccttgggaggagagcccagggcagtggggctagaatgtgcctttttctttgaattaaaaatgtcctgtcattttccagtagaggagaaacttaggaggttgatttagggtctctctctgtgtggctctctctgttacrcacacaccagggaatattcccaaaccctctaagatggcagggtggatcacaaagccactccgcctccacaccagtgtgccagcctggggggtatgaggtattgcggctattactattattattattatcactcatgcccattttacaggtgggaaactgaggctggcgattaagtgccctccccagggcctatggctgagaagccagaatgggtggttccagaaccaaggagtctttcctgagttacagctgctgtgagccctgtagtttacaacatctcaaatgaggcaccaggagaggcg

SEQ ID NO: 870544 - DNA, 649 bp, Homo sapiens
gtcactgcactccagcctaggtgacagactgagaccatgtctcaaaaaaaaattataattcatttaggtttaatttctactaacaaaggtctggcacatctatgagtggtatacataaagatatttttatgtatgaagtagttgttctcttgaagaacattatccaaatactaaagaaaatggagacacaatcatcttcccccatgcaaaatctggtaaaataaagtatgtacgtttcgaagtgtgcatgtttgcccactttctcttccaatttctccaggaaactcaagtctgtagcaggaccaggccgaatgcattcttcatccttcaaaagaaaaagagaagcctcaatccacagcaccacactccatcaatgccaagtttaaatgctttcaccagctggaacagaaagtactggactaaaagactgtcaattcatgtaagtgcaggtgaacattctggggggaagaagggcttaatccatgtgtytggcttctaagatttgataaggggaccatggaaccagagggcctgaatatcccatgaaaaggcaacactctgaccatctgactcaaagtcttcccaaggatactccacacagctactatgaccaacctcgttttctctaaaccagtcatcactgaccatg

SEQ ID NO: 870545 - DNA, 648 bp, Homo sapiens
tacagacggggaaactgagacacagaggggttaaataacttgccacatagctagtacatgtcaactgagatggacactaaacagcctgactccagaatccatattctttttaacacactccagaaggacacaaaagatgacttatagaaatggaaaaacaggccaattcaggatagattcaacaaaaatgtttaattcagtcatgctgtgtacaactgcggaagtgaatccatcacgtgctgatcaacgtggttcaatctcaaagaacagcattgttcaaagaaagccagtcacataagagtatatgtagtttaattctattataacaagggccccaaataagcaaaattaagcaatctattgctttctttgagacagagtctcactctgtcgcccaggctggagtgcagtggtgtgatctcagctcactgcagcctccacctcccakgttcaagtgattctcctgcctcagcctcccgagtagctgggattacaggtatgtgccaccactctggctagagaatacttttacaggtggtaaaacaacaaagaaaaccaagggtgggttttgtatctttcactgggtggaggcatatgagtgtttgttattctttaagttatacatatttatatatactcttctgtgtg

SEQ ID NO: 870546 - DNA, 547 bp, Homo sapiens
ttccaaataaggttaaataaggagtttaggaattgaacatatcttttttggaagacacaattgtatccactacaatagccagcatggtactgaaaaagaacaaaattaaaacatgactactatccaacttcaaaacttactacatagctacattaataaagatagcatggtattagtgtaaaaaatagacacatcaaccaatggaacagactagagagcccagaaataaagccacacacctaccaccatctgatcttcgacaaagttgacaaaaayatgcaatgggaaaaggattccctattcaataaatggtgctgggataactggctagccatatgcagaagattgaaactagaccccttctgtataacatatataaaaatcaactcaaaatagactaaagacttaaatgtaaaacctgaaactataaaagccctagaagataacctaggaaatacctttctggacataggctctggcaaagatttcatgatgaagacaccaaaagcaattgtaacaaaaacaaaaattgacagtgggaactaat

SEQ ID NO: 870547 - DNA, 570 bp, Homo sapiens
acatgtaataagtaacatgaaatcaccagcaagtgtatcccaggcttaaaatgagaacacacattgatctctgaagacacaaagcacaaaggttattgcttcatctaaattttgatgaaataatttcagaattcaggaaacaagacttgataggaatatctggagctgtaggtgaagtacaggcagtataagtgaggtaaagcaaatgtgagcaatgtrtaaatagaaatctttccattgaaaaacaagactgataatttcaatatttccctaaaaatatgctctatgagtttatgaatatatacttgaaaaagatcagtattctcttaggcatgcttttcttcaattacctttgcatgtctgaaacaagctgttttattggcagtttttatcttaaaaaaatttttaagaagatttagataaataacagaaatgacagttcagtcataaataagtaatacaataaaaagttatctccttacataaatgtaccaaacaaatgagattttttgaatcattagaaattattctttataacatgcctaatgaattatcattgttctctttttt

SEQ ID NO: 870548 - DNA, 570 bp, Homo sapiens
acatgtaataagtaacatgaaatcaccagcaagtgtatcccaggcttaaaatgagaacacacattgatctctgaagacacaaagcacaaaggttattgcttcatctaaattttgatgaaataatttcagaattcaggaaacaagacttgataggaatatctggagctgtaggtgaagtacaggcagtataagtgaggtaaagcaaatgtgagcaatgtataaatagaaatctttccattgaaaaacaagactgataatttcaatatttccctaaaaatatgctctatgagtttatgaatatatacttgaaaaagatcagtattctcttrggcatgcttttcttcaattacctttgcatgtctgaaacaagctgttttattggcagtttttatcttaaaaaaatttttaagaagatttagataaataacagaaatgacagttcagtcataaataagtaatacaataaaaagttatctccttacataaatgtaccaaacaaatgagattttttgaatcattagaaattattctttataacatgcctaatgaattatcattgttctctttttt

SEQ ID NO: 870549 - DNA, 652 bp, Homo sapiens
tttactaagttgaagtttaatactagcttctcaatctttatataaagataatatataaataatatttctttgaaagtctttctttattgcaaaagtatcattacaagcatctaataataaactcttttgagattttcgtactaaaataaagttaatattgcctagtaaatttgtgcgtttccttcattagtcaatgagaacaaagattctcaggtgaaataatattttgttgaggaaactaattcatgccagatgccagctatattgatttctctgcaaactttaggaaattttttaatattataaaaaactttaagatcattttttaaaaaaacttaaggataattaagtacaatcaattatggatccrtttacattttaatctgaatttaaaatattgagaatctttacaaatgatatgaatgatatactgcttttctgtgatgtgaggcttaactggaatgtttatttgtaggtttgttgttgaaatattcatattttgtccagtggcttactcgtagttcattatatttttattgggaaagcctgtgtttgatctttgctcctgttttctctggagcttgaaatgaataaaacaacaaataatttactgccctgaagccaaacagctgagggctgtgatcttctcagg

SEQ ID NO: 870550 - DNA, 652 bp, Homo sapiens
tttactaagttgaagtttaatactagcttctcaatctttatataaagataatatataaataatatttctttgaaagtctttctttattgcaaaagtatcattacaagcatctaataataaactcttttgagattttcgtactaaaataaagttaatattgcctagtaaatttgtgcgtttccttcattagtcaatgagaacaaagattctcaggtgaaataatattttgttgaggaaactaattcatgccagatgccagctatattgatttctctgcaaactttaggaaattttttaatattataaaaaactttaagatcattttttaaaaaaacttaaggataattaagtacaatcaattatggatccgtttacattttaatctgaatttaaaatattgagaatctttacaratgatatgaatgatatactgcttttctgtgatgtgaggcttaactggaatgtttatttgtaggtttgttgttgaaatattcatattttgtccagtggcttactcgtagttcattatatttttattgggaaagcctgtgtttgatctttgctcctgttttctctggagcttgaaatgaataaaacaacaaataatttactgccctgaagccaaacagctgagggctgtgatcttctcagg

SEQ ID NO: 870551 - DNA, 649 bp, Homo sapiens
tagtaacaaaaccctccatatacctgtagaagaatgatgggctggtgaatgagtggagaaaatgagagatgaaagaggagaaatcaccaagagtcattggatatcataatgtatgctaaacactgtcatgggtgtttgcaaaaatattatgcaattttgtttacctcagtcataatactatgctgtcattatctgactctcaatagggtgcctgtttcagctatgaatcctggtacatcaagggtgctcaacgtgttaaattaaatattgtactcatttcacagttgagggaacagggactcagaacagcagacagaaattgccttttcttctgcttgtatctgaaaggatgtgttgttactaaacttmttacgaaagggagaattgggagaactgcgaaatgtttgtcagattttgggttggggagtggataaatagagaagccttcatagatacataaacttggatgtaatgtcaaactgtggattacattttcttcatatcccaaattatccactgaatacaaggtttagaaaagaaagcagaattctcctaaatccgtcttatacagaaactgactacttcattcccaatctgtttccctctcctttgtggcttacagtgaaaccacgtgaccacagttaggtgt

SEQ ID NO: 870552 - DNA, 449 bp, Homo sapiens
acaccactctggggcctggccacaggacccacacatccttctgttttctctctttccccacctgcttgttggatgttaacacccaaggcaacttgagaagcacatactgaagatggcagaggctccatcatcctgggtctstgaatgatgcatggaatcatcagctccacctcctgccactaccaggattttgagagcaagaagttaacttctattgagtcaaaactctattttattgagatttcaggttttatctgcgatagcaatcaatattgtcttacgaaagccactcatccaccccagccttcacccagtctacttcaatatcaacaccataaacatttgcctagttcatctattggtatgaataaatatagctctttcatttggaaaagggtaaaaagtagaagtagagaattttatcttggcaagaggctgacccttgcttg

SEQ ID NO: 870553 - DNA, 625 bp, Homo sapiens
ctataaagctactctaatcaagaatgtgtggggttttgttgaaaagatagatagatagatcgatggaacaaaatagacaattcagagatagacccacactttttcagttgattgatttttaacaatggtgcaaaggcaaatcaatggataaagtacactctcttcaacaaatggcattagaataattatatttttattaaattaaaacaaacttcactctataccttaaattatatacaaatattaactaaayataggtaataggtataaatattaaacctaaaaataaagtctaaaatattatattgaagaaactatctgaaattttggaaaagggaaagatttatgagaaacaataccaagagcatgttccataaaagaaaactggctgtgttgaattccatcaaaatggagaactgctcttgtaagacaatgtgaagagaataaagagacaaaccacaaactggtagaaaatatttgcaaatcatatatttcttttttttttttttaatttccataggtttttggggaacaggtagtatttggttacacgagtaagttcattagtggtgatttgtgaaactttggtgcacctatcacccgagcagtatacactgaacctgat

SEQ ID NO: 870554 - DNA, 625 bp, Homo sapiens
ctataaagctactctaatcaagaatgtgtggggttttgttgaaaagatagatagatagatcgatggaacaaaatagacaattcagagatagacccacactttttcagttgattgatttttaacaatggtgcaaaggcaaatcaatggataaagtacactctcttcaacaaatggcattagaataattatatttttattaaattaaaacaaacttcactctataccttaaattatatacaaatattaactaaacataggtaataggtataaatattaaacctaaaaataaagtctaaaataytatattgaagaaactatctgaaattttggaaaagggaaagatttatgagaaacaataccaagagcatgttccataaaagaaaactggctgtgttgaattccatcaaaatggagaactgctcttgtaagacaatgtgaagagaataaagagacaaaccacaaactggtagaaaatatttgcaaatcatatatttcttttttttttttttaatttccataggtttttggggaacaggtagtatttggttacacgagtaagttcattagtggtgatttgtgaaactttggtgcacctatcacccgagcagtatacactgaacctgat

SEQ ID NO: 870555 - DNA, 649 bp, Homo sapiens
ttaccattttgaaaatcccagggtccttaagaattatgctaaatgtaccctgcctgttctatatcaatggaatcacaaagtgtggatgacagcaaatctttttactgagtagtttactgaataatttaagcccactgttgagccctagttctcagaccaaaggattcctttcaaaatattgctgcttggtgacaatgcacctagtcacccaagagttctgatggagatgtacgaggagatgaatgctgttttcatgcctgcttccacagcatcccttctgcagcccatggatcaaggagtaatttgactttcaactttgactatttaagaaatacgtttcatcatatatgtgccatggtagtgatttatccaatggatctgggcaaagtaaactaaaaaccttttgggaaggattcagcattctagatgccattaagaacatttgtgattcatggcagaaggtcagaagakctacataaacaggagtttggaaggagttccaactctcattgataactttgaggggttcaagatgttgtcactagaggaagtaactacagatgtggtagaaatattaatagaaagcaaactagaattagaaatggagcctgaagatgtgactgaattgctgcaatctcatgataaacct

SEQ ID NO: 870556 - DNA, 627 bp, Homo sapiens
tattcttcaatatatggaagcaggaaagagaaagaggaaagggaaaagaaagcaagaatatccatggggaaagtcatggaaccgaggcatttttcctggtgaacctagggtgtaaatttatagttctctgtagaattcatcatccattctaccttgtattttgcttatatgaaattattcctccaccccaccttggtgcttctagatattctactttaatctgagttcctcagyactagcatgactgagagtggcaccaagagactatgggtgtatccccttcctttagttttgtaacgataaatgaaaagccgaatgtataactccctgagaacttggcaagcacagtggtattgcagaaatcacacagtcaacatgtgcacgtgggagagtttttcctctcttggggaaatagagtttccccagtgctgaagaactggaggcataggtatattcagaaatacttgcacactgaatctgtgttcacacctcagctctagataaagccttgctgcctttggatgtgttcaaagaaatgtaagaatccaatgtttaaaaacatttctttagatgtagtgaataaatgtatttcataatttcttctggatggagatgcaaacctcaagt

SEQ ID NO: 870557 - DNA, 615 bp, Homo sapiens
tccataaaaaaaggatgaattcatgttctttgcagggacatggatgaagctggaaaccattattctcagcaaactaacacaggaacagaaaaccaaacaccgcatgttctcactcataagtggaagctgaacaaggagaacacatggacacagggaggggaatatcrtacactggggctttttgtggggtgggggcctaggggagggacagcattaggagaaatacataatgtaaatgacgggttactgggtgcagcaaaccaccatggcatatgtatacctatgtaacgaaactgcacgttctgaacatgttcctcaaaacttaaagtataataataaaaaaaaaaaagaattataagtcatctcagtgctctccttttagtgttttacttgagtgcgtgcatcgttagtatcatcttcaacagtgagggactttcagaatccaagagggtagatttctggagcactgctgtgtgtggcatgctacctagtgtactcagtcatgaaccagaatggtcactacaagtaattttctccacactgtacagttttctcttattctaaatacctggaagtttgcttctatctttgggttttacaaaacattaaaaaaat

SEQ ID NO: 870558 - DNA, 669 bp, Homo sapiens
ggttttgataccctgctggagttttagctatggagtgtatattactttgccaacctgatatagtgttcaaataaaataattgaagttgatatattggggcataataggcatgacaaaggaagaagagtcacaaagaatgaaatcctcagccattctcaggagaaaacaatagggttgagaataatgcttagataccaacacttccccaaatggtattttataggatgctagcaggtctaacgtgaaaaaaaagtatttaatggcaaagtttaggaaatcacaaaaaatgtcattgctgtaggatttatctttaatataacaatgtatattttgaattctaaaaggatrtgatattccatgctttctgaacctttagcccaccacatgaatgtcatttcacccagaatatctctgggctttttccagggaaaatattttagataaagctgttgtaagttaatacacaatatgtaagtactaaaataatcgtgaagttttattgagtagtcagatgtgtttattaaattggttttaaggtttatgacaggggtaaaatacaatagagttactctaatggtggaaatataacaaccagatattcaaaatggaaattatcttgtatgacataaaaatatgcgaccactagggggcagaagaggattagaggga

SEQ ID NO: 870559 - DNA, 455 bp, Homo sapiens
gtttaaaagtgtatagcacttcctgcttcactctctcccactccaccatgtgaagaaggtgcctttgcccttccgccacgactgtgtttcctgaggcctccccagccatgcctcctgtacagcctgcggaactgtcagttaaacctcttttcttcattaattacccactctcaggtggttttttatggcagtgtgagaacggactaatacagaaaattggtacsagagaagtgggatattgctataaaatacctgaaaatgtggaagtgactttggaactgggtaatgggcagaggttggaacagtttggagggctcagaagaagacaggaagatgagggaaagtttgcagcttcctagagacttgttgaatggttgtgaccaaagtgctgatagtgatatggacagtgaagtccaggctgagttggtctcagatgggagatgagaatcttattc

SEQ ID NO: 870560 - DNA, 698 bp, Homo sapiens
gatgattatactcacccaccctcattgcaaagctcccattgttattgtcttggttctggattccctcaaaaatagactatgaaacaaatatctggggtcagatactttaatcagaaattgagtgagaaagcacagaagtggagaaaatgaaacagagcacgaagccagtgtgaatgagtagttamtgctatgtgctcagtaatgatggaggtatggagattgtgtcaaaataactttacaaagagatggggatgctggaatccccatctcttattgcttaaggattgccttagaatcattaactctctacccctaactctttctttgttcctatgtgtggttgagaggcactggttagcctcaagaagcttgcaggcaggcccaaaatcagaaagacaggcatgatgtggggagctctcagttagctggaaacaggtgaattttaggtgaacacattgagtccaggacatagaagacaagtcatcagcaatatctgctacagccagtattctttttcgttttaagaatatatatactttctattgggggtgcccaagtccctctttggtttaatgattcacataactcaagaaagctgatttttactgtggtgatagtttctaacagtgaaagaaaccagattaaaataatcagaagcataaaagcacataaagttgagtccaggacaaaccagatgt

SEQ ID NO: 870561 - DNA, 616 bp, Homo sapiens
atctgcaagtggacatttggcgggcttagcggcctatggtagaaagagaaatatcctcacatacaatctagacagaagcaatctgagagaattctctgtgatgtgtgcattcatttcaaggagttaaaactttcttttgattgaacagttttgaaattctctttttctaaaatctgcaagtggacattctgtgtgctttgaggcatacggtgggaaaggaaatatcttcacataaaaactagacagaagaattctgggaaacttacctgtgatgtgtgtgttcatctcccagagttgaacctttcttttgtaggaccagttttgaaatactctttttatagaatcagctagtggacatttmgaacgccttggggtctatggtgaagaaggaaatatcaccacataaaaactagacagaaggattcttagaaactcctttgtgatgtttgcgttcatctcacagagttgaacctttcttttgattgaacagttttgaaacactctttttgtagaatctgcaagtggacatttggagtgctttgcagcctatggtagaaaaggaaatatcttcacataaaatgtagacagaagcaattagagaaacttctttgtgatg

SEQ ID NO: 870562 - DNA, 420 bp, Homo sapiens
ctagacagaagcaatctgagaaacctctttctgatgtgtgcattcatctcacagagttaaacctttcttttgattgaccagtttcaaaactctctttttggagaatctgcaagtaaacatttggagagctttgaggtctatggtggaaaaggaaatrtcttcacataaaaactagatagaagctttctgagaaagttctttgtgatgtgtgcattcatctcccatagttgaaaatttcttttcatggaccagttttggaatactctttttgcggaatctgcaagtggacttttggagcgccttgtggcctatggtggaaaatggaatatcttcacataaaaactagacagaagaattctgacaaatttctttgtgatgcttgagttaatctcccagagttgaaccttccttttgattgag

SEQ ID NO: 870563 - DNA, 642 bp, Homo sapiens
agtcagtgtggcgattcctcagggatctagaactagaacatttgtttttatagagcagttttgaaaatctctttttgtggagtctggaagtggatatttggttccccatgaggcctatgttggaaaaggaaatatcttcacataaaaactagaccgaagcattctgtgaaacttctttgtgatgtgtgcattyaactaacagagttgatccattcttctgatagagcacatttgaaacactccttttttagaatctgcaagtggatattgggaacgatttgagcaccatggggtaaaagaaatatcttcacataaaaactagacaggaacattctcagaaactactttgtgatgcgggaattcaacactcagagctgaaccattgtttggatagagcagttttgaaactctccttttgaggaaaatgcaagtggatatttggagcactttgaggcctatggtggaaaaggaaatatcttctcataaacaatagaaggaagtactctgagaaacttctttgtgatgtgttcattcaacttacagggatgatccattcttaggatggagcagttttgaaacactctttttgtagaatctacaagtggatgtttggactgctttgagaccttcgttggaaacagg

SEQ ID NO: 870564 - DNA, 642 bp, Homo sapiens
agtcagtgtggcgattcctcagggatctagaactagaacatttgtttttatagagcagttttgaaaatctctttttgtggagtctggaagtggatatttggttccccatgaggcctatgttggaaaaggaaatatcttcacataaaaactagaccgaagcattctgtgaaacttctttgtgatgtgtgcatttaactaacagagttgatccattcttctgatagagcacatttgaaacactccttttttagaatctgcaagtggatattgggaacgatttgagcaccatggggtaaaagaaatatcttcacataaaaactagacaggaacattctcagaaactactttgtgatgcgggaattcaacactcagagctgaaccattgtttkgatagagcagttttgaaactctccttttgaggaaaatgcaagtggatatttggagcactttgaggcctatggtggaaaaggaaatatcttctcataaacaatagaaggaagtactctgagaaacttctttgtgatgtgttcattcaacttacagggatgatccattcttaggatggagcagttttgaaacactctttttgtagaatctacaagtggatgtttggactgctttgagaccttcgttggaaacagg

SEQ ID NO: 870565 - DNA, 561 bp, Homo sapiens
ttttccaccacaggtcgcaaagggctacaaatatccacttgcatattctacaaaaagagtgcttcaaaactcctctatcaaaagaaaggatcaacactgtgattttaatgcacacataacaaagcagtttctcagaatgcttcygtctagttttatatgaagataattcattttccaacagaggcctaaaaggaaaaaaaatccacttgcagattctccaaaaagagtgtttcaaaactgctgtatccaaagaaaagttcaaatctgtgagttgagtgcacatatcacaaagaaatttcggagaattcttctgtctaatttttatgtgaagatatttccttttccacctaaggtctcaaaaccctcaaaatatccacttgcagattctgcaaaaagagtgtttcaaaactgttctatcaaaaaaaaaaattactgtagccttgtagtatagtttgaagtcaggtagtgtgatgcctccagctttgttcttttggcttaggattgacttggcgatgcgggctctttttggttccatatgaactttaaagtagttttttccaa

SEQ ID NO: 870566 - DNA, 582 bp, Homo sapiens
agtttcaacactgctctatcaaaagaattgttcaactctgtgagttgaatgcacacatcacaaagtagtttctgagaatgcttctgtctagtttttatgtgaagatatttccttttccaccatagtgctcatagcactcccaatatccactttcagattctgcaaaaagagtgtttcaaagctgctcaatcaaaagataagttcaactctgtgagttgaatgcacacatcacaaagaagtttctcagaattcttctgagaatttttatgtgaagatatttccttttctaccataggccacaaagcgcttcaaatgtccactagcagattctaaaaaaaggrgtttccaaacttctcaaacaaaaggaagtttcaactctgggatatgaatgcctaagtcacaaagtagtttctcagaattcttctctctagtttttatgtgaagacattttcttttccaccataggcctcaaaacgctccaaatttccacttgcagattctacaaaaatagagtttcaaagttgctcaatcaaaagaagtttgaactctgtgagatgaatgcacagatcactaagaattttc

SEQ ID NO: 870567 - DNA, 638 bp, Homo sapiens
  misc_feature 598, 599, 600, 601, 602, 603, 604, 605, 606, 607, 608, 609,610, 611, 612, 613, 614, 615, 616, 617, 618, 619, 620, 621,622, 623, 624, 625, 626, 627, 628, 629, 630, 631, 632, 633,634, 635, 636, 637, 638: n = A,T,C or G
atgtgaagatatttccttttccaccataggtctcaaatcgctccaaatatccacttgcagaatctgccaaaagagtgtttcaaaacggctctctcgaaaggaaggttcgactctgagagttcaatgcacacatcacaagggagtttctgggaatgcttctgtctagtttttatgtgaagatatttccttttccaccataggcctcaaggcgctcccaatgaacacttgmagattctacaaaaagactttcataactgctctatcaatagaaaggttcaactctgtgagttgaatgcacacatcacaaagaagtttctgggaatgcttctgtctattttttatgtgaagatattttctttccaccgtaggcctcaaatcactccaaatatccacttgtagattctacaaaaagactgtttcaaaactgctctgtcaaaaggaaggttcaacactgtgatttgaaggcacacatcacgaagaaatttctgagaatgcttctgtcttcttttgtctgaatatatttccttttccaccataggactcaaagggctgtaaatgaacacttgcagtttctccaaaattagtgtttcaaactccnnnnnnnnnnnnnnnnnnnnnnnnnnnnnnnnnnnnnnnnn

SEQ ID NO: 870568 - DNA, 556 bp, Homo sapiens
tgtgatgtttgcattcaactcacaatgttgaaccttccctttgatagagcagttttcaaacactctttttgtagattctgagaggggacatttggagtgcattgagggctaaggtggaaacgagaatatcttmacataaaaactagacagaagcattctcataaacttctttgcgatgtgtgcagtcaactcagagagttgaaacttccgattgatacagcagttgtgaaacactctttttgtaggatctgcaagtggagatttggattgctttgagccctatggtagaaaaggaaatatattcatataaaaaccagacagaagcattatcagaaactactttgtgatgtttgcattcgtctcacagagttgaacattccttttgatagagcagttttgaaaccctctttttgtagaatctgaaagtggatatttggagggatttgaggacttcattggaatcggtaatatcttcacataaaaactagacataagcattctcagaaacttctttgtgatgtgtgcattcaaatcacagaattgaaactttcttttg

SEQ ID NO: 870569 - DNA, 556 bp, Homo sapiens
tgtgatgtttgcattcaactcacaatgttgaaccttccctttgatagagcagttttcaaacactctttttgtagattctgagaggggacatttggagtgcattgagggctaaggtggaaacgagaatatcttaacataaaaactagacagaagcattctcataaacttctttgcgatgtgtgcagtcaactcagagagttgaaacttccgattgatacagcagttgtgaaacactctttttgtaggatctgcaagtggagatttggaktgctttgagccctatggtagaaaaggaaatatattcatataaaaaccagacagaagcattatcagaaactactttgtgatgtttgcattcgtctcacagagttgaacattccttttgatagagcagttttgaaaccctctttttgtagaatctgaaagtggatatttggagggatttgaggacttcattggaatcggtaatatcttcacataaaaactagacataagcattctcagaaacttctttgtgatgtgtgcattcaaatcacagaattgaaactttcttttg

SEQ ID NO: 870570 - DNA, 585 bp, Homo sapiens
tcttcacataaaaactagacagaagcattctcataaacttgtttatgatgcgtgctttcaactcacagagttgaaacttcctattgataaagcagttttgaaacactctttttgtagaatttgcaagtggatatttggagcacgttgaggcctgtggtagcaaaggaaacatcttcataaaaaaactagacagaagcattctcagaaactactttgtgatgtttgcattcaactcacagagttgaactttgcttttgatagagcagttttcaaactctccttttgtagaatctgcaagtggatatctggactgctttgaggcctttgttggaaacgggaatagcttcacataaaaactagacagaagcrttctcagaaacttcttcgtgatgtgtgcattcaactcaatagttgaagttttcttttgatagagcagttttaaaacactgtttttgtagaatctgccagtggatatttggatcgctttgaggcctgtggtggaaaagaaaatatcgtcatataaaaactagacactatcatcctcagagacttctttctgatgttttcattcaactcacagagttg

SEQ ID NO: 870571 - DNA, 623 bp, Homo sapiens
ccaaatctcatcttgaattctcacacgttgtgggaggggctgggtgggaggtagttgaatcatggggcaggtctttcccgtgctgttcttgtgatggtgagtgggtctcacaagatctgatggttttaaaaaatgggaattttcctgcacaagtgctctctctttgcctgttgccatccatgtaagacgtggtttagttctccttgtctttcaccatgattrtgaggcctccccagcagtgtggaactgtaagtccattaaacccctttattttgtaaattgcccagtcttgggtatgtctttatcagcagcatgaaaacaaactaatacagtaaattggtaccagtagagtggggtactgctgaaaagatacctgaaaatgtggaagcgactttggaactaggtaacaggcagaggttggaacagcttggagggctcagaagaagacaggaaaatgtgtaaaagtttggaacttcacagagacttgtcgaatggatttttccaaaatgctgataatgataaggacaatgaaacaacaacaaaaaaacttcctgagccagatgtagtcacagccaaactccaccagatattaaaggaattgataccaaccacactgaaactat

SEQ ID NO: 870572 - DNA, 644 bp, Homo sapiens
cagatgcatatgttcgggttgcatttaattgcttaaatagcctcttactattttttattcaaattcagaaatgagatatatattttgttctatacttattttgtttttatgctaaagtcataaaaatgataatactaagttaagagttaggaagcaattcttcaaatccatgcctgtcacagattgctttttctcaaatcaggtttgaatttctgaaagagattgatataacgttagagtatggataagaatagtcaacaaaaagtttttattttaatatcctacccaattctgttttttttagcctttcatatgttatatcagtgcactaagctaataattactgatacaattacaaaagcataacttttttagctaaagtttgagttgagagcatatagtatagtagtcaaagataaaagcccaatttatttgtaataataacaaattcagagcaagtccatatactaggattaaatgcatkttaggatgtaaaacaggctaaaatatgtctctcatttctataaatagacctgaaatcttttagagctccaagaaaagaatgctaaaacttcatgggagaaaaagagagctatatgaacaacaggaatacacacttaaaccatgtggacacagctttatat

SEQ ID NO: 870573 - DNA, 605 bp, Homo sapiens
ttgtagcaattgtgaatgggagttcactcattatttggctctctgttcgtctgttattggtgtataggaatgcttgtgatttttgcaccctgattttgtatcctgataaatcatgctactataaagacagatgcacatgtatgtttactgcggcactattcacaatagcaaagacttggaayggacccaaatgtccataaatgatagactggattaagacaatgaggaacatatataccacggaatactatgcagccataaaaaggatgggttcatgtcctttgcagggacatagaagaagctggaaaccatcattctgacaaactatcacaagtacagaaaaccaaacaccacatattctcactcataggtggcaatgaaacaatgagaacgcttggacacagcgcggggaacatcacacaccatgacctgtcatagggtggggatctgggggagagaaaacattaggagaaatacctaatgtaaatggtgacttaatggatgcagcataccaccgtggcacatatatacctatgtaacaaacctgcatgttgtgcacatgtaccctagaacttaaagtataaaaaaaaaaaatagaagatggc

SEQ ID NO: 870574 - DNA, 597 bp, Homo sapiens
tctgttccattggtctatatatctgttttggtaccagtaccatgccgttttggttactgtagtcttgtagtatagtttgaagtcaggtagcatgatgcctccagctttgctctttttgcttaggattgtcttgactatacgggctcttttttggttccatatgaaatttaaagtagttttttctaattctgtgaagaaagtcratggtagcttgatggggatagcattgaatcaataaattactttggacagtatgcacatttccacaatattgattcttcttatccaggagcctgaaatgcgtttccattagtttgtgtcctctctcatttccctaagcagcagtttgtagttccccttgaagaggtccttcacatctcttgtaagttatattcctaggtgttttattctctttgtagcaattgtgaattcaaccactgtggaaaacaatatggtgattcctcagagatctagacccagaaataccatttgagccagcaaccccattagtgggtatatacccccccaaattataaattattctgctataaagacgaatgcacatgtatgtttattgcagcactattcacaatagca

SEQ ID NO: 870575 - DNA, 597 bp, Homo sapiens
tctgttccattggtctatatatctgttttggtaccagtaccatgccgttttggttactgtagtcttgtagtatagtttgaagtcaggtagcatgatgcctccagctttgctctttttgcttaggattgtcttgactatacgggctcttttttggttccatatgaaatttaaagtagttttttctaattctgtgaagaaagtcgatggtagcttgatggggatascattgaatcaataaattactttggacagtatgcacatttccacaatattgattcttcttatccaggagcctgaaatgcgtttccattagtttgtgtcctctctcatttccctaagcagcagtttgtagttccccttgaagaggtccttcacatctcttgtaagttatattcctaggtgttttattctctttgtagcaattgtgaattcaaccactgtggaaaacaatatggtgattcctcagagatctagacccagaaataccatttgagccagcaaccccattagtgggtatatacccccccaaattataaattattctgctataaagacgaatgcacatgtatgtttattgcagcactattcacaatagca

SEQ ID NO: 870576 - DNA, 597 bp, Homo sapiens
tctgttccattggtctatatatctgttttggtaccagtaccatgccgttttggttactgtagtcttgtagtatagtttgaagtcaggtagcatgatgcctccagctttgctctttttgcttaggattgtcttgactatacgggctcttttttggttccatatgaaatttaaagtagttttttctaattctgtgaagaaagtcgatggtagcttgatggggatagcattgaatcaataaattactttggacagtatgcacatttccacaatattgattcttcttatccaggagcctgaaatgcrtttccattagtttgtgtcctctctcatttccctaagcagcagtttgtagttccccttgaagaggtccttcacatctcttgtaagttatattcctaggtgttttattctctttgtagcaattgtgaattcaaccactgtggaaaacaatatggtgattcctcagagatctagacccagaaataccatttgagccagcaaccccattagtgggtatatacccccccaaattataaattattctgctataaagacgaatgcacatgtatgtttattgcagcactattcacaatagca

SEQ ID NO: 870577 - DNA, 508 bp, Homo sapiens
tatttaaaccaaaaagactgaataaaaatatctagggagtaaatgtagcaacagaagagaggaagttgaaggactgagccttagaaaattagaacattaaaaatcagtaacttagaagaagaaactagtaaaagaggctgagaaggascacctggtgagataagagaaagtaagaagctagtcaagtggaccaaatggtgggatgggtgatacaacaggcaagacaagagctgagaattggaatttggattttataaactacgtagatgtcatggataatggtcctgaagtatcagctaaagtttgattcgtgtggtaaaagagagacttggaaaagagaaataagatccagtaagtttagagacctctccacggtggcatttacaattgttgacgaaataataaattgtcaaataaacagtgctaaaacaattagtttaccactccaataataataataataaatcgctgaaaggaaggaaggacagaaggaaaaagggaaggaagg

SEQ ID NO: 870578 - DNA, 584 bp, Homo sapiens
cagcccctctccactacctccttaccaggaggtaagacacaatttaagcaggtcttggatgaaatttattagcaagcctgcacagtcatgtgagcagtttttgtagctcagggaagtccccatcttggccctctgacacctcagcccacacccaacatctgaggaggctgcaatattccaggattataggggactcaggcaccagaggtcttccctgaagcagggtccttgagaccctcaggcagttggcctagagcacagtactgaacccagggaatggggttgctgattcttgtatctccttcatgcagggrgtgtggcctagacaatcgttctaaccaatcactgatcttgaacatcactcgtcacaccaatgaaaattcatttctcacataccttatgctaatttacaaaccctctggtatagatttcaagcatacttagaatgctgaataactacctctggaatgttgattcctgattaggatatttcaaatgctaagcgcttaccccttgtggactggagttcagttatgcccacatccctgctgcactttttaatgtggaaatattttaaagtaaag

SEQ ID NO: 870579 - DNA, 611 bp, Homo sapiens
atttctcaaattacattgtctatggaatcatatttctatagaatacctttaggaactatattctgagaaatataatttaagaaacacactataaaaatgtgtgagataaagctggatcataccagctaggaaatactgagctgttgactggagagaaaaaagaaatttacttactggcctaaggtttgcaatatcaaaataatgggtcctttccataggatggagggaacacaagcatgaagtgtccactagagatgagaaaagaaagctattctcataaagcccttgcaatgagctgccacggaaggcaagaggtatgacaaaggaagaagactaagagtacagaatgtgcccagtgacccacagcaagaaaaagataggaaatggtgagaaattccagggcttgaaagcctatggacatcacacacagagtctcaataggaagcaaaatagtcataaattgataytatactgcagcaaacaggatctccaagaaagagccaggtgaagcttgcagtactggagaggtgcatcctattcaaaagacccaggtggagctgaccatgcatctgggaagacacagctcagtggacaaccacctgcaggaggac

SEQ ID NO: 870580 - DNA, 501 bp, Homo sapiens
gaaaatgcaaactaatctacagtgatggaaaacaaattagtggttgcctagggatggaaagggattacaaagaggaatgatgaatattttgaggatgatgaatatgttcttttttttttcttttgagacagaatcttgctctgttgcccaggctggagtgcagtggcgtgatctaagctcactgcaatctccatcccccaggttcaagtgattctcctgcctcagcctcccaagtagctgarattacaggcaagcaccaccatgcccagctaatttttatatttttttagtagagacgggagtctcaccatgttggccaggctggtcttgaactcctgacctcgagtgatccgcctgcctcaccctcccaaagtactgggattacaagcttgagctaccactcctgacctaatatgttcattatttttattggtgatggggtgtgtgtgtgtgtgtgtgtgtgtgtgtgtgtgtgtgtaaacttaccaaaatagcacacta

SEQ ID NO: 870581 - DNA, 608 bp, Homo sapiens
gtctgccctttgcagctggttggtatgactcctaaaggtgccttgtaatctataggtttccctcacatctctcttttttcctggaaatagacatgtggaaagaatggggtcatttctccagtatgcatgccgatggcatgcatctgccatggtgtccattagtaccctctgaccttgtatttcccatgactcggttattggatctgaggcttcatttaatttagagttttttggtaaaaacacatagatagttctatttccactcagtgatccatcatttctctttctgttatattaatagcaattaaagattattaactataagatggagcacaattgcttcttaaatctttttttcttttttttttttttttttttttgagatggwgtttcactcttgttgcccaggctggagtgcagtggcacaatctcggctcactgcaacctccgcctcctgggtccaagtgattctcctgccttagcctccagagtagctgggactaaaggcacccaccaccatgcccagctaattttgtatttttaatagagatggggtttcaccatgttggccaggctggtctcgaaatcctgacctcaggtaatccacc

SEQ ID NO: 870582 - DNA, 629 bp, Homo sapiens
ggttctggttgagtgggtctggggtagaacttgagaatgcaagtttctagccaattttaaggtcatgcagatgccgttgtcctacatactatactttgttgttactgttgttgtttttgaaacagagtctcactctatcgcccaggccagcatgcagtggcaggatcttggctcactrcagcctccacctcccaggttcaagtgattctcctgcctcagcctcctgagtagctgggattacaggcactcaccactatgtcccgctaatttttgcatttttagtagagatagggtttcaccatgctggccaggctggtcttaaactcctgacctctggtgatctgcctgtctcagcctcccagagttctgggattacaggcacaagccaccacacccagcccctaggtactatactttgaaattcactcttctaccaaatgcacatccttaaagatgttgtctaagtccattagggctaccataacaaaataccttagacaaggtgacttataaacaacagaaatttgttgtttataaggctgagaagttcaggatctgagaaggctgagaagttcaggatcaagccaccagcaaagtaaatgtctggtgaggatccagtttctggttaa

SEQ ID NO: 870583 - DNA, 629 bp, Homo sapiens
ggttctggttgagtgggtctggggtagaacttgagaatgcaagtttctagccaattttaaggtcatgcagatgccgttgtcctacatactatactttgttgttactgttgttgtttttgaaacagagtctcactctatcgcccaggccagcatgcagtggcaggatcttggctcactgcagccyccacctcccaggttcaagtgattctcctgcctcagcctcctgagtagctgggattacaggcactcaccactatgtcccgctaatttttgcatttttagtagagatagggtttcaccatgctggccaggctggtcttaaactcctgacctctggtgatctgcctgtctcagcctcccagagttctgggattacaggcacaagccaccacacccagcccctaggtactatactttgaaattcactcttctaccaaatgcacatccttaaagatgttgtctaagtccattagggctaccataacaaaataccttagacaaggtgacttataaacaacagaaatttgttgtttataaggctgagaagttcaggatctgagaaggctgagaagttcaggatcaagccaccagcaaagtaaatgtctggtgaggatccagtttctggttaa

SEQ ID NO: 870584 - DNA, 629 bp, Homo sapiens
ggttctggttgagtgggtctggggtagaacttgagaatgcaagtttctagccaattttaaggtcatgcagatgccgttgtcctacatactatactttgttgttactgttgttgtttttgaaacagagtctcactctatcgcccaggccagcatgcagtggcaggatcttggctcactgcagcctccacctcccaggttcaagtgattctcctgcctcagcctcctgagtagctgggattacaggcactcaccactatgwcccgctaatttttgcatttttagtagagatagggtttcaccatgctggccaggctggtcttaaactcctgacctctggtgatctgcctgtctcagcctcccagagttctgggattacaggcacaagccaccacacccagcccctaggtactatactttgaaattcactcttctaccaaatgcacatccttaaagatgttgtctaagtccattagggctaccataacaaaataccttagacaaggtgacttataaacaacagaaatttgttgtttataaggctgagaagttcaggatctgagaaggctgagaagttcaggatcaagccaccagcaaagtaaatgtctggtgaggatccagtttctggttaa

SEQ ID NO: 870585 - DNA, 509 bp, Homo sapiens
gagtcgttactctaatatatatgcttaaatatatcaacagcaacactgaaaggagaagataatgtagaaaacctgtagaattctaggaaaatgttttgttttgcctagaatttgaaacctagccaaattattagttgagtatgatggctgagaaagacatcatcagacatttagtgactcaaaaatggtcaagaaatatttcttaggagagacaggaagatggaatatagaaagcaaagaaaagaaatagagaaaatctagaaaacaaaaggcacaagttatytaatctgtaaagcagaatctttgaagctagccatgctgcagacctaggtagaactcagtccagattggagaggaggctggagggctgtgagagagaaaatttccggatgacataatgtggttctcaaaaatgctctgtggctagcaaatcatccaagtgaagaaatttgagaaaacccaagaaaagcaaaatactatgtagaaaaggaaatgtaattttagttcgc

SEQ ID NO: 870586 - DNA, 634 bp, Homo sapiens
gtactagataattgtgtccttacctatcctcagagttcactcaaaaaaatatgcaataggtggaaaatcaaagaagtcaaaatacgcggaaagtgaatgtggcagtgctgaggcagccctcaggtcgtcagagaatgcccaacaccaaaagcttccctgggacaacatggtgccgaggactgagcccctgtgtcctgatgccagcaccagttgctgctctgattgggtttcttacaacccataacaaagccccagtaatcccttccttagggtgccaaagagtttttaattattttataacctgaaagggcagcctctttgcacgggcaaatgcaaactccacagacataactgtttctgggcacaagataatgtgaatgaagccagtcaccagtgccaagggtctcataccctttactgtaggggttccagatgtatgccactccctcaacyacaggagtcattacacgcacatgccagttcctggggatggtaacaagtgaaatggaggcagctccttaaacaatggaacacctaatgctgcatcattagtctgctaacttttgcaacccgttcttcctctaagcctttgcaaggtgtctttctgaagccaggcttcattgtgggtatcgag

SEQ ID NO: 870587 - DNA, 634 bp, Homo sapiens
tgtcccagagattctgatatgttgtgtctttgttctcactggtttcaaataacttatttttttgccttaatttcattatttacccagtagtcattcaggagcatgttattcagtttccatgtagttgtgtggttttgagtgagtttcttaatcctgarttctaatttgattgcactgtggtccgagagaccgttatgatttctgttcttttccatttgctgaggagtattttacttccaattatgtggtcaattttagaataagtgccatgtggtactttttgtaggtctctaagaacatgctttataaatctgggtgcttctgtattgggtgcatatatatatatatatatatatatatatatatatatatatatatgatagttagctcttcttgttgcattgatccctttaccatcatgtaatgcccttctttgtcttttttttttatctttgttagtttaaagtctgttttatcagagactggggttgcaaactctgctgttttttgctttccatttgcttggtaaatcttcctctatccatttattttgagtctttgtgtttctttgcacatgagatgggtctcccaaatacagcacactgatgggtcttgactgtttattcaatttgcc

SEQ ID NO: 870588 - DNA, 466 bp, Homo sapiens
gttgatgtttcctgataagcagagaagatgtttaacagatttcatcactgccaagttcatatctgactcagaaatctttctttcagcaagctgtcatgagtctgagttaagcatctcacccagagtgtgctgtgccacattcagcaagggatctttgtgttcaccagaaaaactaaagctctctaaatggtattttccatctggaggcaacatagcttccttataaagaagaaataagaaataaaattcatttttaatttaaaataggcaaacatttcattgtrtgttatacaaataaattaacacaaatgtcaactgaaaaatgtcactcagcttaaggaaaaaatttccatgtcatttgtgtttgggtaggaaagcagttcttcaaaagcttgttgctggcaaatgtcatctgagcagagacccattccttatactattgcatagctatgcaattaaaggctac

SEQ ID NO: 870589 - DNA, 610 bp, Homo sapiens
tgctttttcaattatagctccatgttttgtcttgactttcttagactgatagatatatgtttaagaatatttttgaaaatcttaaaagtaatcattaaaagaattaaaaccatatgtgtgcctattaaagtttggggagatataaaagcaaagacctccaacttgaaaaaagtaaaagaaatatgaaaaatacatcccaaatataaagtacacacacagaaaaaaaggtgacagaagaataayacaaattaattgttaaataaagacaaatgagtttaacattcttattacaatacagcctcctttggggaacaaaaataatattagtaaaacaaatgtctgctctttataagggtaaatcttgaaacaaaatgacagaagaatagatcagaatagtaagatgggcaaagatttttccagtaaatgcaaacagaagagcttaatgttgggtaaattgattgcatcttgcaattctaatttgtgttctgtcagttataaatgaagttggacatctttcataaattttccagttcaatttttttcttataaacttcctgctcacaattcttcctcaattttctattgtattttttgactttgtaactgattt

SEQ ID NO: 870590 - DNA, 518 bp, Homo sapiens
gcctagagctccttttgggtatctttgttgtttttcagcctcacctctgcaagagcctttgtaactgagtagctgaatgatagtaacaccctgttgatttttttagctgtccccagagtagtctttgttcacacgcagggtgggcagcactcattgaactcgatacatgtgagccactytgttcagctttgacaacatcccaaaattttccgctatgtgttcttctaaaagttgataatatttttgacatgattcctaaatatattgatcattgatactgattgttaccactcatagaacattagtgtcagtgaaaaatcatactttattttattttattagcatattagcagtgtaagcatttttattaagacagtagtctttccctagagcacatcatgaaacagtcaatacttcctttgaccaaggctagtacttgaaaacataactctttaggcttaacatgtctagttatctagcagctaggtaaacaatgatcagtttgggttgaatatata

SEQ ID NO: 870591 - DNA, 606 bp, Homo sapiens
tttttttatggatggataaattgagggtcccagagggctggaaatttgtacagagtcacatggtaaggatgaggccaggcagggacacaaagtgggatagaaatggctgagaagcaggctggctattgccaagagactcagcagtgctgccgtggaatccacactgctcctcatggggtgtgttcactggaaggtgaggattcccagagtgcaaacaaccaaacaggtgtgtgtgctrtccttacaggttcttgagactccccttacctggaccactctccatgaatactcagagatgagaagaaagttcccatgatatagtttagaaactgaacttgaaaaaatggaacattgtttaaacccctacattatcaactgtgtgaagcttgcaggagagaaagatcctgagattcatgcctagtgactcaggctgctccaagatttacaaactccaccaccaaaccagcagtctgtgcttgcaatagtggaataagagctaacatttagtgggtattcaccatgcactggtcattattttaggcaatttccattgttaactaatttagttctcatgaataccctatgaggtagatactagtattattc

SEQ ID NO: 870592 - DNA, 647 bp, Homo sapiens
gaagcaagtttgaagactggcaccataacttatgagctatgtaagcttggccaaatcacctaacctcactaagcctcagtttattcatctgtaaaatgggcaaaatagctacttcatcaggcttttggaaagcacttctttcccattaattttctattccttgtccaacatttaaaaaattggccgggagtggtggctcacacctgtaatcccagcactttgggaggctgaggcgggcagatcacgaggtcaagagatcgagaccatcctggcyaatctctcagatatactgtgaccatcactcagatatactatgaaaataataccacctttgctaacttttcaccggggaattaaaagaaccaagagagattatatttagagaaaattgtctataccacaaacccctgtctgtatggtgaaacactgtacaaaaaatacgaaaattagctgggtgtggtggcacacgcctgtagtcccagctactcgggaggctgaggcaggagaatggcttgaacctgggaagcagaggttgcagggagccgagatcgagccattgcactccagcctgagtgacagagtgagactctgtctcaaaaaaaaaattataaagtgataaatcattgataattgtcagttaatcattt

SEQ ID NO: 870593 - DNA, 583 bp, Homo sapiens
agatcccacatataagtaaaacatgtgatatttgtctttctgtgcttagtttattttgtgtaacataatgacttccagtttcacccatgttgctgcatatgacaggattttattcttttttcatggctgaatgatattccattgtgtatatataccacattttctttatccattaatctgttgatgagcacttaggttgattccatattttggctgttcagcatagtgctgaaataaacatgggagtgcagatgtctttttgatatattgatttcctttcttttgtatacatactcagtagtggaattgctgggtcatacagttctatttttagrtttttgagaaatctccatactgttttccattttggctgtactaatttatattcttttcagcagtgtatgaggtttcccctttctctgtatcctcaccagtggccattattgcctttctttttgatacaagccactgtaactaggatgagatgatatcttgttgtagttttgattcacatttctctggtgattactaatgttgagcatttttttgatatatctgttggctatttgtatttcttttgaga

SEQ ID NO: 870594 - DNA, 657 bp, Homo sapiens
tgttaacaaatatttgtatagactgtattcttagaagttgaattgtttaatcaaaatctttgaaattttttaaaaaaggtgctgaaaaattgccttccaaagagattataacaatttcagctcctatagtatgagagaacactcttttcttaaaattttttgtrgttttgcatattatcaaactttaatgttttgccactctgataggtgaaaaatgatatggagctgttgtttaaatttgcatttcctaaatcactagagaagatgagctttatttatgtttattaaagtttatttgtatttttttctgtaaattgcctgttcttacattttgactattttctacctgtttttcttattgatttttataattcattttttattaggtcatttttagaccctagtaggcatccaagttaatatgctataggataccctagagtggtgacggtctaactttaccagtatcactctgggatcttgttaagatggagtatctgatgcactgatcagtatctgtattagtatcactttgggatcttgttaagatggagtatttgatgcagtgggtcagggaatggggttgagagccttcatttctaacaaattcccaggaacttccagtgctactcctccacacaccctactttgagcagc

SEQ ID NO: 870595 - DNA, 671 bp, Homo sapiens
gaaatttcattttttgagtggtctgcccttgaccttatttctccaaatccctgctgcttttgatgtgagcttttacaaaatgtgaggtatattgggaacatatatatgacattacaactgataattcttaatttgaatttcaagttctagtcagttcccctcacagtaacagatgccatccaagcaacaattgctaactttgtttctcccgaaaacctccatcaaatggggacacttgcctccaggagaatgggagagcatgtgcaaaattggggaggacttagaaaagttttgtataggtaatgtttgagctaattaaaaaaatgaataggcattattttggtaagaaaagatgggaggaagatttagaaaggagactaaatctcaatgaacatctgttggattygttcataaatttcttagaaagcatgcaagtttgatggtttatatgtaacaaaatggttttgttgttaaacttgtttattgtattctgcttagcatcttgttgagatggacattagagatctctaggatcacagaaatttcatttccttgggaaaagtgtgcaccaggatcctgattaggcctgtgttttcccatcccaacctggctgtctggcactcacctgctaagagatcaggattgatttagaaaaagccatcactcatagg

SEQ ID NO: 870596 - DNA, 580 bp, Homo sapiens
agtgagaaccaatgactcacgaagacaggattaggaccagtgtttcctaaatttaggcctcccaactcctaatcactccagtagattgaaaatacttctaatttaaaatgggggcagcatgtcatgtgaggagtggggtctgcattcctttaagagaatcatcaaaatacattttctagaatccagtgacatttattgacaaaggcaattgatagttccattcaaagtgtcacgaaaacatcacctrattactatgagataggtaaatgtaggtatctttgcttcactcagggaacactgggaaatagttttattgttctaaatttctagaattatttctaccaataactagatgtgtgagctggcataattctcacaaaagctatgcccctaaatttcttcaattttaaaataaaaacagtaaagatgattgtaaagctaccttttaaataaaaatatatgttttaaaaagttccagtaggggtcttctaatgtccgtttccatttctaaccagcgcctatggatgtgatgatatcaggcattgctgtttaacaaaccactccagaacttagaggctta

SEQ ID NO: 870597 - DNA, 669 bp, Homo sapiens
atatgtaaacatgtgccatgttggtgcgctgcacccactaactcgtcatctagcattaggtatatctcccaatgctatcctccccactccccccactctaccacaggccccagagtgtgatattccccttcctgtgtccatgtgatctcattgttcaattcccacctatgagtgagaatatgcggtgtttgkttttttttgttcttgcgatagtttactgagaatgatgatttccagtttcatccatgtccctacaaaggacatgaactcatcattttttatggctacatagtattccatggtgtatatgtgccacattttcttaatccagtctatcattgttggacatttgggttggttccaagtctttgctattgtgaataatgccgcaataaacatacgtgtgcatgtgtctttatagcagcatgatttatagtcctttgggtatatacccagtaataagtttctacctagaatattcctgaacagtctcctaggaaatacagaaggatattcttgtaagcagaagccaatcaaaaaactttaatggtgctgaaaccttagagtattcgcaaaattgtaaatcttatctgggttcaaatagatcatgttatagctttttttttttcactttctggtctcaaaaatggtgatagttgatgaattctt

SEQ ID NO: 870598 - DNA, 575 bp, Homo sapiens
aattaaggtccaggagaaaatcattatctccttgggtaaataataatacagtctattttaaaattaaataaaaatattcagtagcctgtgcccagagtgaatggaataactgctatgggaagatggataagggtgagtcaggtcagtttcaaggtcttcattgaagaagaatagcagcaactgagcattggcatctcagcctccctgagcacaggaamggaaatagctgtactgctgggtttgttcaaaaattataagatattgaaattagtatctcctgttttgacaaattctaaaagacagcaatcatttctcttgctctcaacattttctgtaagttgtccaatgtgattcacctgaggcccagcatatgtcattccacaagacagattgcagacgcagtggccacaggcactgggcattgatgcaccaagtcagttccacatgagaagatgccagctctctttccagtgagccagtcttggaatcagaggctgaaattagagtttgaagttgatcttggagtcattaaaccttctacttacactggtgggagttaaaggatttctattaaa

SEQ ID NO: 870599 - DNA, 582 bp, Homo sapiens
aaaaactttcctttctgtattttatttttgttttgtttgttttgtttagagcattagaaaaaaatagagtacctctttgtatacttcagtgaaattcttatcattaacttattgtttagtgactggagacaaaagaagagtaagaccgtaccacacaatggaagccatctcaatcaaatgatttttttttacaactttgttttttctaaatgtaatagtagaacgaaacttggaagataatttaacacatacattttaagaagcaaaaagcaaagtgtaaaaacaaaaatcacctacatttgtttgtcaatttattcaaaaaccctttaytaactgtctacaaaaggccaggcaacaatgtgcagcagggtatagagtagaaaacaaagtagaccttcatcgttgtcctcatgaaagatacattcttgtgggaaacagcaaatagaaatttttgataatacaaaaaaaaaattagtgaatctatgctatggccgctaataagaaggaagcagctacaagagagagaaaagtgctaagatgtgaatttttaaaagaataatcatagaaagactcattgtggtg

SEQ ID NO: 870600 - DNA, 640 bp, Homo sapiens
agctagggatccaggtttacttatttatttttttattttatttttctgcatggccactgagttgaataagtctccccttccatgggtttgatatgccacctgcttcaagccctatatttttatacatacttggattcttttccagacatttatttatgttctattctttttttctgtttatccttgtgccagacacactcttctaactactgtaacttttctatttgtatagtagggttatttctccctttttatattccttttaagacattttctggctgttttcacatgttccctccatcccaaagtgaactttagaattagctcagaactttagaatgatgttcattagaaccttgggattgcattggagtcacagattcatagagagagacctgatgtattcattgtaagagtcttgcrgccgggcacagtggctgacgcctgtaatcccagcactttgggaggccgaggcgggtgaatcacctgaggtcgggagttcaagaccagcctgaacaacatggagaaaccctgtctctactaaaaatataaaattagccgggcgtggtgccacatgcctgtaatctcagctactcaggaggctgaggcaggagaatcacttgaacccaggaggcagagg

SEQ ID NO: 870601 - DNA, 694 bp, Homo sapiens
atgaaatgcctgtctcaatactgatggtgaattgttttctagctattttgagtattgacattctctcttcctactgggaacatgaaccacctcatctttctcttacccacttccacccactcagtgcatcaagtacacaggaaaccataaacacttgctgatatttgttaagcaagttacatctttatagtggccattttatcaaacaatagccacaagtgtatattgtggtgagaagcaaaaccggatagaaagaaaaaaatatgtatttggaaggggagaccacaaggagaagctgaatattagcagtgaaacaaagaggtaataaaccttartagtttcctaaaagagtaggcatgattgctttaattgaaacagaagacacgaacactggagatgtgctcctttaacaccaggaagatgaattagaaaagctgcccaaatattttttcttgagtgatgtattatgtgatgagaagcttgtaatacgttatggttgcacctttgacatatgatttaacccgttgatgcaaagtctggatttcttggtttgcctctgtctgcctttagctattagaaaagatattctaaaatgagagcagaaatggatccttataagggtttgatgtggagggtgaagtctttctgcagatttatgctgcgaatttagagtagcttaggaagaattgcaaaa

SEQ ID NO: 870602 - DNA, 654 bp, Homo sapiens
taaaatattatgaagattcatagattgaaagtttatactttcacttctatttcacaccacacacaaaaattaactcaaaatagatcaaagccctaaatgtaagagctaaaactataagactcttagaagaaactatagggataagtctttatgatcttggacttggcaatggattcttagatatgatatcaaaarcaaaagcaattatagaaacaacatagataaattggacttcgtcaaaatttaaaactttgtctgggcacagtggcttattcttataatcccagcactttgggaggccgaggtgggtggatcgcttgaggtcaggagttccagaccagcctggccaacattatgaaaccccatctctactaaaaatacaaaattcagccggggtgtggtggtgctacttgggagctgtaatcccagctacttgggaggctgaggtgggagaattgcttgaacccaggaggcgaaggttgcagtgagccgagatcgctccactgcactccagcctggatgacaaagtaagactgtctcaaaaaaaataaaaaataaaattaaattaaaattaaaacttgtatgcaccaaaggacacaatcagacagtaaaaagataacccacagaaagggagaaaatatttaccaatcatat

SEQ ID NO: 870603 - DNA, 638 bp, Homo sapiens
ggaagcagagggacagagacaaagagatctgaagatgccctgctgctggctttgaagatagagaagggggcacaagccaaaggatggaggtggcttctggaagctggaaagcctgaggaaatgaatgctccccagaacccccagaaggaatgcagccatgcagaactattgcagacttctgagctccagaactcagataataagcgtgtgctgttttaagccactaaattgtggtaacttgttacagcagccacaggaagccaagacagtgtccttcaaataattctctttttcctcatccccctgagtgtctgtggtctcctaggctctgtgctctaccctcttctcactggatatgctgcccctggacaatttcatcaactcttgtggttttaactgtcacctgtcgactagatatgccccaattttcagcactttggttcaaaaatcagcactgctagagaccaaggccagtggaacggcccaargcatggggctcagccccaggtagggacaggctctgagagcagaggcagccagctggtgttccccgaggtctgtgcttcctgagtgcagtccttggagtccagcagatggggctgcccagggccagcagggatggtgtcctggggccagca

SEQ ID NO: 870604 - DNA, 685 bp, Homo sapiens
gatgtgtccgctattcaaggtaaaaaagcaatcaacaaaagtgaaagtttttaatatagttggtttaagagcttgctgctttgattcttctcttctcgcccttgaatgagttttcaacaatgcttctttcagaatcaaatccactcwttttctgaaacacctaagactgggtcttagtaggtttcttatctgtgctaataaaagaaaaaaccctgcttcaaaaagcatcaagctgcttgtaatcttagcactttggcaggctaaggtgggggatcatttgaggccaggagttcaagaccagcctgggcagcatagcaagactctgtctctacaaaaaataatgaaaattagccaggcatgctggtgcacccatactcccagctactctggaggctgaggcaggaggatggcttgaacccaagaggtcgaggctgcagcaagccatgataacatcactgcattccagcctgggtaacagagcaagacccccaattctaaaaaaaaaaaaaaaaaaaaaaaaaaaaagcatcaagctaagtggacaatgatatatcactttgtacccagaacactcatccttcaaaaacggacttcattctgcaatatttctttgttcacactccacacaagataatagaaacccagcaagacctgattcaaatccagcttcatcatcaagtgtatg

SEQ ID NO: 870605 - DNA, 671 bp, Homo sapiens
tgattcttcctctttttattatttccactctgaatggagaaaaaatagacccctgtcacttctgggaacacagtgaaattgacacctctcttttcagaaaaccttgttaaaggctcagtacataggactggtgggagaaggttgttgaatcatactacttggttcatagcaggattgagaataggtttacgaactgcaagcatatgagaagatatttataggaagggttgtgacatgttattctccaccattgccaataatagcacaagaataaattaaataagttataagaggaaagagccaggttagatacaaagaagagagtayagaaataggccaaagagacccagaccagaaggtacaaaaattgggattgtcctagggatccttgaaggtacatttaaggcatagaatgcagtgacattaacacaggcaaacacccattctgagtccatctagtctgtgtagtttcatagggaagtaataattatcatggtttttttttctgacagtgactttatttctttcttctttgccttgcattgtgttcactttcacttcaccataacctctattctctttttcaccctgcttctggatgatgagagttagtgtccaattaagttgaaaattaatacgctctctccttttaaattgtcattaaaatattt

SEQ ID NO: 870606 - DNA, 655 bp, Homo sapiens
gctggtcaccagaaaaaccaatggtcaattagagagtggggactttgcaaccctgctcctttgccaaaatgcacttcaaaacattttgcatttataactaacatttgggatttatttaatgcaaatctaatagtattcaggattagccagttataatcagactggtaagataattttcagctctttttttatatatactttaagttctgggttacgtgtgcagaacatgcagttttgttacataggtatacacgtgccatmgtggtttgctgcacccatcaatccgtcacctacattaggtatttctcctaattttatccctcccctagctccccaccccctataggtccctgtgtgtgatgtccccctccctgtgtccatgtgttctcattgttcaactcctacttatgagtgagaacatgcggtgtttgattttctgatcttgtggtagtttgctgagaatgatggtttccagcttcatccatgtccctgcaaaggacatgaactcctcctttttatggctgcatagtattccatggtgtatatgtgccacattttcttaatccagtctatcattgatggacatttaggttggtttcaagtctctgctattgtgaatagtgctgcaataaacaaacatgatttacaatccttt

SEQ ID NO: 870607 - DNA, 570 bp, Homo sapiens
ggaaaaatgttgtaaagcagacaagaaacagctatgactttcccagcatcaggctttatgggttgatttactaattttatatcatggacattgtgtgattgatcagatttcctcttttgcacttgcttccagggagttsaagtctaaaactttgaccctttgaaacaacatttacagctttatggtattcatttttgatttagccagatctctggccctttctctattttgcttcttatactcctatccatttctaatttaggttttattgtggtactttacatatctttatatatctcctatttatagatttacatatgctttaagtcacttttggggggaacaaggaaagttatgcaaagtacttcagagcacgctattcctgggctgacccaggattcagcctataagctaaagagtgctggtactaggtctcctttgggacacaggggtcttcccctgtctaggttgtggccatacagacccccggcagcctggtccacatgctgcaggctgtgtgctgccaggctgtgcactgggttgttatcccctgacttgaatgggtctggt

SEQ ID NO: 870608 - DNA, 618 bp, Homo sapiens
aatcatacaatatttgtcctttggtgtctggcttatttcacttagcataatgctttcaaggtccagccaagctgtagcatgtgccagaatttcattcctttctaaggctgaataatataccattatatgtacataccacattttatctactcacctgtttttttttgttttattattattatttttttgagatggagtctcgctctgtcgcccaggctggagtgcagtggtacgatctcggctcactgcaagctccgcctcctgggttcacaccattctcctgcctcagcctcccaagtagctgggattataggcacccaccaccatgcctggctaatttttttgtatttttagtagagatggggtttcaccatgttatccaggatggtctyaatctcctgacctcatgatccgcctaccttggcctcccaaagtgctgggattacaggcgtgagccaccatgcccggccctactcacctgttgatagacatttgagttgttgccacctttttgctgttgtgaataatgatgctgtaaacattggtgtaagaatatctgttcaagtttctgctttcaggtttttggagtatatacctaggagtggaattactgaatca

SEQ ID NO: 870609 - DNA, 582 bp, Homo sapiens
agtgtgagagacttccagtggcccacaggcccaccatagaatcatacagtcctagtcacaggggagcccattgacactcccaaaccctgaaactaacacagagagctgccaggagaccatgggatggaacagctatagggagggagcttgtgctgggtcccacaccctttctgagacctaagcagctacagggctagagcaaggtgccattctcaaacctagcctttggaagacttcacactgtcctggggtctggtggcactggatctragttattagggaaactcaggctgtcactgctgtgactggggtgtgtactgagagttctacatccaggactgagaagcatgcaaggagtgagctgcagctgctggggctgggaagtgaatactgccaggactgagaagggatgtgaacagagcacaggttgccattgggactgagttgcaagctgcatgggggctcctgcagccagggctgggacacaagctaggtgtaggctatggccatcaaagctggggaacaagcctatggggactgggacatgagagggacctgcagtccctagcgaacaggcaaggc

SEQ ID NO: 870610 - DNA, 582 bp, Homo sapiens
agtgtgagagacttccagtggcccacaggcccaccatagaatcatacagtcctagtcacaggggagcccattgacactcccaaaccctgaaactaacacagagagctgccaggagaccatgggatggaacagctatagggagggagcttgtgctgggtcccacaccctttctgagacctaagcagctacagggctagagcaaggtgccattctcaaacctagcctttggaagacttcacactgtcctggggtctggtggcactggatctaagttattagggaaactcaggctgtcactgctgtgactgggktgtgtactgagagttctacatccaggactgagaagcatgcaaggagtgagctgcagctgctggggctgggaagtgaatactgccaggactgagaagggatgtgaacagagcacaggttgccattgggactgagttgcaagctgcatgggggctcctgcagccagggctgggacacaagctaggtgtaggctatggccatcaaagctggggaacaagcctatggggactgggacatgagagggacctgcagtccctagcgaacaggcaaggc

SEQ ID NO: 870611 - DNA, 631 bp, Homo sapiens
gccctttgccttctttgagtcaagatatggaataaaacatccaataaagtaaatgtgaccttatcctgactcctataacactcaaccaggcatcttcacacaacagactcattctttgtctatggctaagaaatattgcccaaatcagttgaagtcagattttaaatgatacacatcatcccatatcaaaaaatgccgcagggccaggtgcagtggctcatgcctataatcccagcactttgtgaggctgaggagggcggatcacttgargtcaggagttcgagatagggctggctaacatggtgacacgctgtctctactaaaaatacaaagattagtcaggcatggtggtgtgcacctgtagtcccagcaactcaggaggctgaggcagaagaatcgcttgaacctgggaggcggagaccgcagtgagcccagatcacgccactgcactccagcctgggcaacagagcaagactctgtctcaaaacaacaaaaaagcctcacagcccagataagcaaaatctacattaccttcttttgttcaacaattttagggagaaaattatttagtatagttgacacaatccactttttataaaagacaacatggcttgcaattccattccattta

SEQ ID NO: 870612 - DNA, 622 bp, Homo sapiens
gctctcattgttcaattcccacctatgagtgagaacatgcggtgtttggttttttgtccttgtgatagtttgctgagaatgatggtttccggcttcatccatgtccctacaagtttcagtagctgattcgatcagctggaagaaagggtatcagtgattgaagatcaaatgaatgaaatgaagcgagaagagaagtttagagaaaaaagaataaaaagaaactaacaaagcctccaagaaatatgggactatgtgaaaagaccaaatctacatctgattggtgtaccagatgtacaccagatgtgtaccaactggggagaatggaaccaagttggaaaacactctgcaggatattatccaggagaacttccccaacctagaaaggaaggccaacattcaaattcaggaagcacagagaaygccacaaagatactcctcgagaagagcaactccaagatacataattgtcagattcaccgaagttgaaatgaaggagaaaatgttaagggcagccagagagaaaggtcgggttacccacaaagggaagcccatcagactaacagctaatctctcggcagaaactctccaagccagaagagagtgggggccaatattcaacatt

SEQ ID NO: 870613 - DNA, 482 bp, Homo sapiens
gctctcattgttcaattcccacctatgagtgagaacatgcggtgtttggttttttgtccttgtgatagtttgctgagaatgatggtttccggcttcatccatgtccctacaagtttcagtagctgattcgatcagctggaagaaagggtatcagtgattgaagatcaaatgaatgaaatgaagcgagaagagaagtttagagaaaaaagaataaaaagaaactaacaaagcctccaagaaatatgggactatgtgaaaagaccaaatctacatctgattggtgtaccagatgtacaccagatgtgtaccaactggggagaatggaaccaagttggaaaacactctgcaggatattatccaggagaacttccccaacctagaaaggaaggccaacattcaaattcaggaagcacagagaacgccacaaagatactcctcgagaagagcaactccaagayacataattgtcagattcaccgaag

SEQ ID NO: 870614 - DNA, 634 bp, Homo sapiens
atactgatgattctttaattttaactacaactgctatgcaacccaagcttatgcaggtggttaacaaaggggttgagagaaatggcaatacgaaggcagcttgtgtccttttggaatcactgagaagtttaccttacagaatatcttacagaatgccaacagcattcagttgcagtggagtcaaaatggcagcatgatgtatttaggcagagggagggtctgggtcagaagccccaaattttcagcagctcctgtttgacattgaagagatgcagaggtttactagcatccgctaygagggtgagaggaaagaatgttacttggggtagaaaagaagtatcaagtgactttttttgcacgtaagagatgcagcgtgtaaattgttaactccaatctacagagaatatttggtaataataattttgaaaatagtaacaaaatagacaaacttctaggtagtctgatcaaaatcaaaatggaaaaaacagcaatataaggaattgtaaatacaatagttttataaaaataatttaaaattatagttaattttatgccaataaatttgaaaatttcagtgaaatggtcagttttctagaaaaaaaagttaccaaataactcttcaaaagtatcagaa

SEQ ID NO: 870615 - DNA, 571 bp, Homo sapiens
tagcgcatttactcattgtttcattctttagcacttacagtcaccatgatagtttctgaggacaaagattagatcgctatgttggccggtgctgcaagtccccaaaatgggaccatgggagggagtggaattgtagggagtggaagtaggagggtaggacatgagttcttgggcgatggcattagttaccaataaaaaaggcagtatgattctttctcctaatgagaggaactgagaccaggcagctgagagaaccttgtcagtctctagatacgagaggaatagtttctttgaaaggaaaagttcaaaattgaattctgagaaccatgatcaggatggaaggcagaagtcagaagggagggtgcagtttcagaccgtggatctgggaagagatttcctcactgcaccgtgatctccttaamttaaggacagaaagttccaaagagccctaatataccttcaaggcctcatctgcctggatcagtctccttcttgctttctgcattccaagcacactgccttcttactacatctggaatgctccctgtttacccagggcataaatcccact

SEQ ID NO: 870616 - DNA, 587 bp, Homo sapiens
catcttatttgaattaaatttgaaataaacagtcgcactatatttgaaaaatatccaaaacactgatgcctgtagcaactgatttatataacatttatcaagcagatacttaactcaaacatccaagatatttctttaagataggcaggtaaataataggttaggaataaaaagtttagttatattctaaagtgtgatactgatttcttagtgcttcatgattactgaagcagacattttacaagtcatgcaaaattacaattatgactttgagtagtttgcagtcctcaattatgacacaggtgtttatattcctcttgtaaaaactaaattgatgtaagcyatcaaatctgtcatctattcattaataacatctatggataagttggctctttgaatataatacagctgatgctcagatattttcttttagtgccttttgtatatatctctgttattgcattgtattaaaataccttgtttaaaatgatttctgttatattgactacatgattaattatgggaaggcagaaatatactttactctgctctttgtccacatttcctcatctaattcttggtacaaa

SEQ ID NO: 870617 - DNA, 621 bp, Homo sapiens
aacaagagtgacctttactccagtacccagcaagttcctcatctccatcctagaccgcctcaacctagatttcttgtccatatcactatcagcattttggtcaaagccattcaaaaagtctctaggacgttccaaactttcccacatgttcccgtcctcttctgagcttccaaactgttccarcctctgcctgttacccagttccaaagtggcttccacaattttggctgtctttacagcagcaccccactctattggtaacaattcactgtattagtctgttcttatgctgctaataaagacatacctgagactatgtaatttataaagaaaagtggtttaattgattcacagttccacatagctggggaggcctcacaatcatgctagagggcaaaagaggaacaaagtcacatcttatatggcagcaggcaagagagcttgtgaaggggaactcccatttataaaaccatcaggtttcatgagacttattcactaccacatattcaccatatatttctaggtactgaaaatatttaaaacattgatgtagacttacagtgttaattccattatgaattatggcttcagatatgtttggttttatcagtgtgatatttt

SEQ ID NO: 870618 - DNA, 636 bp, Homo sapiens
gttgcagtgagccgagaatgcgccactgcactctagcctgggtgacactaagactctaaaaaaaaaaagaaaaaaagtaaagaaaaaactgtgctattcactggaactttgatttgggagaggaaataaggcttgcaggaaacagctatctttcgkccaattctcaactgcctgtgtaagagcataatcacaacccactctcacacctgaatgctttctgcatgttttccttaaatttcccagcatacttgctggttctgagatgttcttgacattgcaaaagtccaggtcatggacatagtttacattctagttccaaaggagggaattcatcacccttactcatgacctgtttctaactcacctaaacttgccaagatttttataatttgatactgtagcaaaaatatttctcatatggtatcaaccttaactaggttcatgaaagaaatttatgtaactttccttcaagtaccaccagaatgtcaatgaaaacctcatatataaaggcaaaatccaggctttgtcttaagtaatgtaacttgcataaagatcatgaatgataccacatactttggttcatagcggatgccttctatgtcatgtaaaatgcccaagccagcacgtagtctttca

SEQ ID NO: 870619 - DNA, 590 bp, Homo sapiens
ttcatacacatcaccccagcatgtaacacccatgaaccatatgacaaataccctcgtctcttcttttcacttagtgtagctcctaatttaaaggattatagattatatgtcactaaacaatttattggtacctatattccaaaccccattttaagtgctttgcatgtattaactcatataattttcaagataataatttctatgtgtagttatcatacttctccccaataattagatgaagcaygtgagacaggcaggtcaagtgactagctcaaggtcacacagagtgtaagtggtagagctggaatacaaactcaggcaatttggctccagcatccattatccaaactgcttcatgacactaagggtatatagggagttgtaaaggggactcctgtctcagaggggaggctggactagaactgttaggttccttccagtttgaaacttctgtgattccaagaagaaacatatttttcttatacaaatgatcttttccaacaatgcatattatatgctaacatacaatttataaaattataattcatttagaaattatttttggctcaattgctcaggtattcaatttt

SEQ ID NO: 870620 - DNA, 590 bp, Homo sapiens
ttcatacacatcaccccagcatgtaacacccatgaaccatatgacaaataccctcgtctcttcttttcacttagtgtagctcctaatttaaaggattatagattatatgtcactaaacaatttattggtacctatattccaaaccccattttaagtgctttgcatgtattaactcatataattttcaagataataatttctatgtgtagttatcatacttctccccaataattagatgaagcacgtgagacagrcaggtcaagtgactagctcaaggtcacacagagtgtaagtggtagagctggaatacaaactcaggcaatttggctccagcatccattatccaaactgcttcatgacactaagggtatatagggagttgtaaaggggactcctgtctcagaggggaggctggactagaactgttaggttccttccagtttgaaacttctgtgattccaagaagaaacatatttttcttatacaaatgatcttttccaacaatgcatattatatgctaacatacaatttataaaattataattcatttagaaattatttttggctcaattgctcaggtattcaatttt

SEQ ID NO: 870621 - DNA, 527 bp, Homo sapiens
cagccatgtggaactgtgagtccattaaccctctttttctttataaattacccagtctgggggcatgactttattagcagcgtgagaacggactaacacaggcatataccttgttttcaagtttggtcccaaaacccaaaatgtgttcccaggaacamtattcattcttcacgaggctttgagaagagagaagggtcctgcagtcaaataacttggaattcctgcctgtcccacaggacttctgagttgactttagcatattaagggctctgagaaactcagtagtagcctgtttaaaaattcattccaatcagctgtggacaaagtaatttaagcagagatctcttttttggagcatcgcttgttaacatagtcaatcagcaaacccaagatggggaaaagctgatagaattcctttctccgtcatatggagctgtggccactagccctggagtgcaggtgccgtctgccagaaaggcttatctgatgcttcacccagcttttctctggagctcaagcctcatcct

SEQ ID NO: 870622 - DNA, 551 bp, Homo sapiens
gagttaaactacattattaaaatttcatctctttcttttcactttaaggatgtagccactagaaaattctaaactatgtagtttgcattatatttttattggactgcattgaaatagagaaactgttaaattgtaaatgttgacayatgaatgcctgttttggtttggatacttttttagaaactccgagactctctgaaactaggatgagactgcaaatagtttaatttggagttagtcaaagaaatgccaataggagagtagagaagtgaggcagagaagggaagatagctgatacagacagcgttatcaagcaagttaccactgtgggcaactggacctcagttccactcgggaactctggaagacagtgtcaatgaaacaccctatagataccctaactgaaaggcgaggaagctgaggcgtttatccaatatctcctgtcagctatgtttctagagctgctcctaggggacattaattccccaatatatctatatagaagcagagagggctccagaaaccagagaagccctcaggcaaagagttgc

SEQ ID NO: 870623 - DNA, 612 bp, Homo sapiens
agctctcatggagaacctctactagggcagtgccaagaagaaatatgggattggactccttacacagatgccccactggggaactgcctagtggagctgtgagaagagggccacagtcctccagaccccacaatggcagatccactgacagcttgtaccctgcacctgcaaaagctgcaggcactcaacaccagccgatgaaagcagtctcaggaactgtgccctgcagagccacagaggcagagctgcccaaggccttgggagcccaccccttgtgtcagtgtcgcctgaatatgagacatggggtcaagggagattattttggaccyttcagatttaatgactgccttgctgggtttcagacttgcatggggcccatagcccctttttttgatcaatttatcccttttggaatggatatatttacccaatgcctgtatctctattgtatcttggaagtaattaacttgttttctatttttacaggctcataggtggaagggtcttgctttgtctcagataagactttgaactgtggacttttgagttaatgctgaaatgagttaagacttgggggactgttgagaagaaattattgtattttaaaatgtg

SEQ ID NO: 870624 - DNA, 612 bp, Homo sapiens
agctctcatggagaacctctactagggcagtgccaagaagaaatatgggattggactccttacacagatgccccactggggaactgcctagtggagctgtgagaagagggccacagtcctccagaccccacaatggcagatccactgacagcttgtaccctgcacctgcaaaagctgcaggcactcaacaccagccgatgaaagcagtctcaggaactgtgccctgcagagccacagaggcagagctgcccaaggccttgggagcccaccccttgtgtcagtgtcgcctgaatatgagacatggggtcaagggagattattttggacccttcagatttaatgactgccttgctgggtttcagacttgcatggggcccrtagcccctttttttgatcaatttatcccttttggaatggatatatttacccaatgcctgtatctctattgtatcttggaagtaattaacttgttttctatttttacaggctcataggtggaagggtcttgctttgtctcagataagactttgaactgtggacttttgagttaatgctgaaatgagttaagacttgggggactgttgagaagaaattattgtattttaaaatgtg

SEQ ID NO: 870625 - DNA, 598 bp, Homo sapiens
cattctggaagacagtgtggcaattcctcaaggatctagaaccagaaataccatttgatgcagcaatcccattactgggtatatacccaaaggattataactcattctacaataaagacacatgcacacgtatgtttattgcagtgctattcacaacagcaaagacttggaaccaacccaaatgcccatcaatgatagactggataaagaaaatgtggcacatatacaccatggaatactatgaagccataaaaaaggatgagttcatgtcctttgcagggacatggatgaagctggaaaccaacattctcagccaactaacacaggaacagaaaactgaacacctcatgttctcactcataagtgggrgctgaacaatgaaaacatggacacggagtggaacatcacacaccggggcctgtcggggggtggggggctaggggagggatagccttaggagaaatacctaatgcagatgatgcgttgatgggtgcggcaaaccaccatggcacacgtatacctatgtaacaaacctgcacattctgcacatgcatcccagaacttaaaatataataaaaaaattattagttgcctttct

SEQ ID NO: 870626 - DNA, 658 bp, Homo sapiens
tgcaaataccttcccccacggcccatggacccagggatgtgagtggagagccaaagggatgctaaggaaagaggagagaggaaaagagaaacagaaagaatgagggagagaaacatccgtggctgcacatcccaggtaggctgcctatgaaatgttaagcaacaaactgttagaaaattggaaaagtaaagaaatgtctgcatgacactcaggaattaacatgggtgcaagagcaactgaaatgcacttccttttaaattcctaaattcctttgtaatttagaatatggagtggacatacactgtcctcagtgttgaaggccaaactaaaggattacataactagttggaaaaacaaaagataaaaagtgtamatttaaataattcactctcaaagaaaattatccaggaaaccagaaaacttcatacagacttaatatgccaagtacattttgaatctccaagaggaagatgcagaatgcagtgttctccaatttttcttttctgacaagagaacccttttgtcaaaaatgagtatcctgcaagactaatctgtaccaaatggacttggagggaactctgggccacaccatagagatccagaccccaggaccccctgcacttcagaaacagagctccttggcctggctggcataagg

SEQ ID NO: 870627 - DNA, 545 bp, Homo sapiens
accatttatggagtatcaattatgttaaacgtacaatgaatattaggtattactattattacaactagtattcctactgtcactatgttaaggcattctcaaaaattgttttatgagaaaagactttgttatttccacaatacagaagaggacactgaagcccagagatgtcacataacttggccaaggttataaagttgataaatgacagacacaggyttcaactcagatttgtctccttgaactcaaagccatgatatgaaagtcaggaaatgactatcacaccaggctgcctcaccagaggactttttatcccagctgtgtgactttggggaactagacctccctgaatttcaattcccccagttatatgagttggcaatgtaaagtgcttcacagaatttcaggcaaatagcaggtactcaagaatgtcatcttcacatttctctcactagcacattccaggtctcttgacacagtctgctatttgtcaccaatctctaccctttcttccttcctactaactgaacctcccattttagctc

SEQ ID NO: 870628 - DNA, 599 bp, Homo sapiens
gtagctgtcattatatgaaattaactttgtgggaaattaaccaataagtcaatatatatttaaatatctgtttaatccaaagaaaagttgttgattttattataaagttaattcgagatcaaacacacataaatacttataattgagatattttataattatttatagattattctarggttgttgctaaagaaagcttaaactaaatgataaagaaattctgattaattatgaatttcctttgatgtctgagcacattgtcatgagatgaaaagaataaaacattcacctctgccctctaagaacttataatttaattcaataattgcattcaaattcaaatctattggatttgtatttaattttattgagggaaaatgtgtcagcatatcacgggagtcaaataacattaacaactaccactttctccaaactactaagtttataaaatgcttgtttatttcagagaagaaaagaaagacgaatctaaaaagctaaaaggagacaaatatgaaagaaaaaacttatctacagaaggtaaaaatcaattttttgaaactatgaggaaaacacaaactgatgtcttggaagaatgctat

SEQ ID NO: 870629 - DNA, 551 bp, Homo sapiens
ttgggtagtttctctctttcgttccaatctttatgtctttcattattttttcttgtcttatttcagtggctagaactgccagtactccattgaataggggtgatgagagtgaccacacttgccttgttaccaatcttatgaggaaagcatttagtctttcacaatgaagtatgatttcataatagtattagatttgttgtagatgctctttatcaagatgataraattcctgtggtgaaaaaccaactcaaactgttttttttttaaattctgttctcatgacaatcaactcacaagacttctgtgaccaaatgtgtggggatttcttgccacacaccaagccagcaatcaattctgcagtggacgccagctaggtgtcctctaattcaattcaattctgacgtgatctaactggagctagcctcagacaccacaggttgaggtgtcagtcccataagattgtcctctctttctcaccagacacaagttcaggcctccaaaatttctgaacagctggcttcaagttgggggttgccatgaacccctctttg

SEQ ID NO: 870630 - DNA, 620 bp, Homo sapiens
tcacctcccaccaggtccccactccgacactggggattattatttcccacaagatttgggaggggacagaattaaaaaccatatcagttactttttatagagaaggtaaactttgatatcatagctgtggttagaatatacaggttgttcagttgttttgctctaatccatgatgttatatctctgtkttgctgaaaaaatttcttcagatcttgacatgtaacaagtctttctttccacttgtgacatcaaggttatgttttcagtttactttgactctaaacatgtcattaatcccagcctgtaaatggaatatggaatagggaagaaaaaagtatttaactgggtgcatcactattatttctccaagctgtaggcatgaccttgggatgatgacacccaagaagaagaggatgaaaagcttcctccataaaatgtgcaataatagaagtttttggtgaatgggtacttggggcttttaggaaatcgataaataatgtcctttttttttctcctgagtttggaaaaataagacagaagccaaacaagtgaagaataaaaaattactttcattattcataaagattgaatcagagaatacaatttaatatgtagcaaag

SEQ ID NO: 870631 - DNA, 632 bp, Homo sapiens
cttagttaattcttgtcttctggtagtttttggatttgtttgttcttgcttctctagttcttttaattgtgaggctaatgtgtcaatttgagatctttcctgctttctcctgtgggcatttagtgctataatttcyctctaaccactgttttatctgcatgccagagattctggtatgttgtctctttgttctcattggtttgaaagaacttcttgatttctgccttaatttcattgtttacccaggagtcattcaggagcaggttgttcaatttccatgtaattgtgcagttttgagtgagtttcttaatgttgagttctaatttgattgtactatggtctaagaggctgtttgttattatttccattctgtttgatttgctgagaagcattttacttccaattatgtggtcaattttagagtaagtgccatgtggcactgagaagaatgtatattctgttattttggggtgaagagtcctgtagatatctattaggttaatttgatccagagctgcattcacatccggaatatccttgttaaattttctgtcttgttgaactatctaatattgatagtggggtgttaaagtctcccactattattgtgtgggagtcttttagtctctttt

SEQ ID NO: 870632 - DNA, 632 bp, Homo sapiens
cttagttaattcttgtcttctggtagtttttggatttgtttgttcttgcttctctagttcttttaattgtgaggctaatgtgtcaatttgagatctttcctgctttctcctgtgggcatttagtgctataatttctctctaaccactgttttatctgcatgccagagattctggtatgttgtctctttgttctcattggtttgaaagaacttcttgatttctgccttaatttcrttgtttacccaggagtcattcaggagcaggttgttcaatttccatgtaattgtgcagttttgagtgagtttcttaatgttgagttctaatttgattgtactatggtctaagaggctgtttgttattatttccattctgtttgatttgctgagaagcattttacttccaattatgtggtcaattttagagtaagtgccatgtggcactgagaagaatgtatattctgttattttggggtgaagagtcctgtagatatctattaggttaatttgatccagagctgcattcacatccggaatatccttgttaaattttctgtcttgttgaactatctaatattgatagtggggtgttaaagtctcccactattattgtgtgggagtcttttagtctctttt

SEQ ID NO: 870633 - DNA, 632 bp, Homo sapiens
cttagttaattcttgtcttctggtagtttttggatttgtttgttcttgcttctctagttcttttaattgtgaggctaatgtgtcaatttgagatctttcctgctttctcctgtgggcatttagtgctataatttctctctaaccactgttttatctgcatgccagagattctggtatgttgtctctttgttctcattggtttgaaagaacttcttgatttctgccttaatttcattgtttacccaggagtcattcaggagcaggttgttcaatttccatgtaattgtgcagttttgagtgagtttcttaatgttgagttctaatttgattgtactatggtctaagaggctgtttgttattatttccattctgtttgatttgctgagaagcattttacttccaattatgtggtcaattttagagtaagtgccatgtggcactgagaagaatgtatattctgttattttggggtgaagagtyctgtagatatctattaggttaatttgatccagagctgcattcacatccggaatatccttgttaaattttctgtcttgttgaactatctaatattgatagtggggtgttaaagtctcccactattattgtgtgggagtcttttagtctctttt

SEQ ID NO: 870634 - DNA, 632 bp, Homo sapiens
cttagttaattcttgtcttctggtagtttttggatttgtttgttcttgcttctctagttcttttaattgtgaggctaatgtgtcaatttgagatctttcctgctttctcctgtgggcatttagtgctataatttctctctaaccactgttttatctgcatgccagagattctggtatgttgtctctttgttctcattggtttgaaagaacttcttgatttctgccttaatttcattgtttacccaggagtcattcaggagcaggttgttcaatttccatgtaattgtgcagttttgagtgagtttcttaatgttgagttctaatttgattgtactatggtctaagaggctgtttgttattatttccattctgtttgatttgctgagaagcattttacttccaattatgtggtcaattttagagtaagtgccatgtggcactgagaagaatgtatattctgttattttggggtgaagagtcctgtagatatstattaggttaatttgatccagagctgcattcacatccggaatatccttgttaaattttctgtcttgttgaactatctaatattgatagtggggtgttaaagtctcccactattattgtgtgggagtcttttagtctctttt

SEQ ID NO: 870635 - DNA, 587 bp, Homo sapiens
caggaataattatttaattatatataaagatttgtgaataaaaatagaacctaaaacaatatgacagaactaaaatttaaaaacgtatactttaaaatacatgtctaattaaaatacatgacaacaggctgggcatgttggctcacacctgtgatcccagcaccttgggaggccaaagcaggtgtatcacctgaggtcaggaatttgagaccagcctgtccaggagtttgagaccagcctggctaacatggtgaaactgcatctctactaaaaatacaaaaattagctgggtgtggtggcacacgcctgtgatcccagctactcgggaggctgtgacaagagaatcacttgaatccaggaggtgraggttgcagtgagctgagatcatgccactgcactccagcatgggtgacaagagtgaaagttcatctcaaaaaaaataaataaaccatgacaacaataatataaaaggagggagagtagtaaataaaactaaaatagcataacattgtttcattgtgtgggaagggattaaaattggaactgaaaatatactacctccttgcagtccagacaagatggtgtgg

SEQ ID NO: 870636 - DNA, 693 bp, Homo sapiens
agggatgttggatattatgtaatgctttttctgcatctattgagatgaccataggtttttgttcttaattctgttcgggtgatggattatactcattgatttgtatatgctgaaccatccttgcatccctggaataaagcctacttgattatggtcaattatcttttggatgtgctgtttaatttggtttgcttgtattttgttgaatttttttgcatctatgttcataatggatattgatctgtagtttccttttttgttgtgttcttggctaattttgtatcagagtgatactggattcatagaatgagtttagaagggattccttctcratattttggaatagtttcagtaggataggtaacagcttttctatgcacatctgtgcaaattccactgtgaattcatcttatactgggattttttgttggaagatttttaaattaatgatttgattttattattcattattgatatatttaaggtttcatttcctctaggttttctagttggtcctcatagagatattaatagtattctctgacaatcttttctatttctctgatataacctgtgatgtcatttttatcatttctgactgtacttattacaatcgtctctcattttttcttagtctaactgtcagtctggaaattttgtttatcttttcaaaacatcaaccttttattacac

SEQ ID NO: 870637 - DNA, 616 bp, Homo sapiens
agaaaaacgaatcatgcatctcacaataagatgatttgtaaaacctcaaagaccagatgcaattcagtaccacttctcaataggcagacagtaattatacatcactgcatctactggaacacctacttgatacagcacacaggtttaaaccactaaactactttcayataaattaaacagcaaaacctagaagagctcaaatctgtggactaatacaacaacatctataattctaaaaccagttatttacttagaaaacattaaatgtgtacataaaaaataggaactagaaaaataggaaaaccatatactgacaatactctaaggaaataaaagttatctgaaatcttagaagtgtatataaactatacactaaggctgggcacagtgtttcacgcctgtaatcccagcactttgggaggccaagacaggagaaatgcttgagcccaggagtttaagaccagcctgggcaacactgcaagtccccgcctctacaaaaaaataaaaagaaagagccaggagtcctggtgcacgcctacagtcctagctacttgggaggctgagatgggaggatgacttgagtccaggagtttgaggctacagtgagctatgattg

SEQ ID NO: 870638 - DNA, 589 bp, Homo sapiens
ttattaagcaggtgacaggtgagcgtcccaacaagtaggcaggcagacacagtgttaaaaaaaaagtctagtagcaggcactgaacggaggtctagataggtacccagtagatttcaggaaagtctgataacagtaagagcaattagctcattctagactgagaatgaacaagggaatggcctagttttatagaaaatgaaggtaagaacctagaaaggcaatgactaagctcactcaatccagaatgaatttgaccactagcacctttcgagaacaatggaacacacccctaaagtgtgtaattgctaaataatcgaaatgtttaaatttaaaataatatatttgctaaaaaaaaaaaagggtccaatcattttttaaagcccaarcatgagaataatagaggtcactatttatttaaattatggtctggatttggaattcagatcatttttaatttgttatttcacatgtaaccatgagtaaaattttcttagtcttttttatgcagtgtaatacaggtttgacattttaaaaaagtgatgatgtgtgacagcagcaagagtacttttgaatgtgactatatgacct

SEQ ID NO: 870639 - DNA, 630 bp, Homo sapiens
tttcattgtgattttgatttgcatttctctgatgatctgtgatgctgagcattttttccacatatctgttggccatttgtcttcttatgggaaatgcctatttatgtctttagtccacttttaaatgggattatttgttttttgttgagttgrgttccttctatattttggatattagtcccttattaggtgaatagtttgcaaatattttctcccattcaacaggttgtctctttattctgttgatgaacaattttttgtggtatagaagctttttagtttaatatagtcccatttgtctatttataaaaatagttatctgtacttttgaggtcttagccacaaaatctttgcctagactgaggtcttgaagtatttcctctatgttttttttctactagttttatagttctgtgtattatgtttaagtctttaatccatcttgagttgatttttgtagatggtgagagataggggtccagtttccttcttttgcatacagatatccaattttttctagcaccatttattgaagagggtgtcctttcctgaatatatattctcggcactgttgtcaaaaaccagttggttgtaaatacatggactaatttcggactctctattctgttt

SEQ ID NO: 870640 - DNA, 575 bp, Homo sapiens
  misc_feature 270, 272: n = A,T,C or G
gctgcactacccacaaaatttaaatttaaatgagttggaaacctaagcattaaagctaaatatttatgcttgtaaaaaagagaaagcagtatcattgcaacttggaagtatgcaaaggtattttagacaggatgcaaaaaggtatamccataaaagaaaaaataaaagctaaattagttcacacatttagaaaatgaataagcattcatagatgggagtaaatattttacaaacataattttaaaatatatatatatatgaaatctacangnaaatatatttttcttctttttttttaaaggccctatctatctttaaaacacatttttcatatatctacttttaatattccataattcagcaataaaaggacaaagacaaattgtttaaatgggcaaaagaatagaatgatcacttcacaaaaggagatatacaaatggccaataaggtcatgaaatgatttcaacatcattactgattagggagacaacatttaccagaatttctaaagcaaacaaacaagtttctgataataatactaaatactgatgaagatgcagagtaatcagaacact

SEQ ID NO: 870641 - DNA, 657 bp, Homo sapiens
tcaaaggcaatatctaatttccaattagattgaaacaaaggaaagttctgttgtgtaaactttaagctattgtcttcactctagttatacttcctagtggtttaggtgcagagacagagatgctggggtttggctgtattgccaaatctcatcttgaattgtagctcccatgattaccacgtgccatgggaggggcctggtggcaggtaattgaatcgtgggagtggctctttcctgtgctgttctcatgatagtctcaggagatctgatagttttataaaggggtgtttgcctacacaagctctcttgcttgatgtcatgtaagatgtgccttgcttcccctttgccttctgccatgattgtccaggcctccccagccatatggaactgtgagtcaattaaccctctttcctttataaattactaagtctcaagtatgtcttaattagcagcatgagaacagaccawtacagatgctcttacaaaatggagatttcctttaaagatgtaaattttctttataaagagttttgttaaagtcacttagtttgataggtggtattttcagtttagcttgattcgattactggcttttgggtggagccgtttaaggaacagggcaaagaaatcatgcacaattttcttatctaaatgtgc

SEQ ID NO: 870642 - DNA, 636 bp, Homo sapiens
tcctcttcttgtaaggaccccagtcatattggattaggacacacccacatcccacatgacctcattttaccttaagtacctcttcaaaggccctgtctccaaatacagtcatattctgatgtcctgggaattagaaattcaataaatgaattggtggggattggggggcacaattcccctcataatagtagcattgctgaaaatatttcagacttgaggcatttggtaagcttagcagataaaatattttggaagaaatgtcattgggagatgttgtgaggtggrggtgaaaggagaaacagtattttggcatgtagcttagcgttttccggatttgtttctagccttcttaatttggagcatgtagaaggagggttgccagataaaatacaggacacttaagtacatttgaatttcagataaaccataaatcaattttaagtatgcatatgacacaaatagtgaaaatatttattgctgatctgaaattcaagtttaactgtgggtgtcctctatttttatttgctaaaactggtgatcctacctacattgcttactttatgctcatatataaggcatatcatgatttcattgaaaaaaatacactaattcaggccattaataatacaaacagtg

SEQ ID NO: 870643 - DNA, 699 bp, Homo sapiens
tcttttaattgtgatgttaggatgttgattttagatctttctgctttctcttgtgggcacctagtgctataaatttccctctaaacactgctttacctgtgtcccagagatcctggtacattgtgtctttgttctcattggtttcaaagagcttatttatttctgccttaatttcgttatttacccaatagtcattcaggagtaggttgttcagtttccatgtaattgtgcggttttgggtgaattttttaatcctgagttctaatttgattgcactgtggtctgagaggctgtttgttttgatttcagtccttttgcatttgctgaggagtgttttacttccaattatgtggtgagttttataagaagtgtgatgtggtgctgagaagaatgtatattctgttgatttgggatggagagttctgtagatgtctattaagtctgcttggtccagagctgagttcaagtcccgaatgtccttgttaattttctgtctcgttgatctgtctaatattgacagtggagtgttaaagtctcccactattattgtgtgggagtytacatctctttgtatgtctctaagaacttgctttatgaatttggatgctcctgtattgggtgcatatatatttaggatagttagctcttcttgttgcattggttcgtttaccattatgtaatgcccttctttgcctatgc

SEQ ID NO: 870644 - DNA, 651 bp, Homo sapiens
ctctacacaaataaactagaaaatctagaagaaatggataaattcctggacatatacaccatcccaagactaaaccaggaagaagccaaatccctgaatagaccaatgacaagttctgaaattgaggctgtaattaatagcctaccaaccaaaaaataaagcccaggaccagatggattcatagctgaattctaccagagctacaaagaggcactggaaccattccttccaaaactattccaaacaactgaaaaggagggactcctccctaactcatttgatgaggctaacatcattctgataccaaaacctggcagagacacaacaaaaaaagaaaacttcaggccaatatttctgatgaacatcaacacraaaatcctcaataaaatactagcaatccaaatccagcagcacatcaaaaaatttactcatgataattaagtaggcttcatccctgggatgcaaggctggttcaacctatgcaaataaataaatgtaatccatcccataaactgaaccaatgacaaaaaccacatgattatctcaatagatgcagaaaaggcctttgataaaattcaacatccctttatgttaaaaactctcaataaactaggtttgatggaacatatctcaaaataataggagctgttt

SEQ ID NO: 870645 - DNA, 551 bp, Homo sapiens
gaaccattccttccaaaactattccaaacaactgaaaaggagggactcctccctaactcatttgatgaggctaacatcattctgataccaaaacctggcagagacacaacaaaaaaagaaaacttcaggccaatatttctgatgaacatcaacacgaaaatcctcaataaaatactagcaatccaaatccagcagcacatcaaaaawtttactcatgataattaagtaggcttcatccctgggatgcaaggctggttcaacctatgcaaataaataaatgtaatccatcccataaactgaaccaatgacaaaaaccacatgattatctcaatagatgcagaaaaggcctttgataaaattcaacatccctttatgttaaaaactctcaataaactaggtttgatggaacatatctcaaaataataggagctgtttatgacaaatccacagccaatatcatactgaattggcaaaacctggaagcattccctctgaaaactggcacaagacaagaatgccctctctcaccactcctgttcaacatactattg

SEQ ID NO: 870646 - DNA, 601 bp, Homo sapiens
tattattctgaatacaggcagttctcacttttcatggcaatgcaggattgtaaaaatgaccgtgcaacctgaaacctgggaaagcaatctccatatccaattggaaaaacaatgatcattctgtgacttttacaattttttgtcaaaatattagaaacaaagttacaaatgtakgaggcaataaaaatgtaatgaaataaatatttattagtgcactgtaattcaaagcattagaaacattgagagttcaagtgttttattgatttgtaaaaatgtatcaagagtagttggatcagtgcttgccaccttcttgtgcatttctgatatggagcaagcattgtttctaccttggtgtttcatcatcttcctaattttgaatttgtttccaacatcttatcctttgcaatttgtttgtttgtttgttttttaaattatactttaagttctaggatacatgtgcagaatgtgcaggtttgttacataggcatacatgtgccatggtggtttgctgcacccatcaacccatcatctacattatgtatttctcctaatgctattcctccccttgccccccaccccccaacaggccccggtgtgtaat

SEQ ID NO: 870647 - DNA, 651 bp, Homo sapiens
tgagcctttcctggtttcaatgacaggtggtgatggtttcctttatgatacacacatcataaaacagtcgccttcagcttttgttttttaatagcttgcttacataagttttacagagctatgaaagaatcaaatagcaatcaaaatattcttcataatcaccgttaatttctagttgattcccagtgttaactttttcaatctgagttcaaatttggkgtgcctgcattttagttcaggatcagatatttcccagtgttcgattgtttcaaatccagaaaaacagaagaagagtctggcattttacattccagatttcaaaagaacaatctatttccaaagaaaaaatatcttaaaaatattttttataaacaaaggtagttttctcatttctgtttttccacttgccacattcttcaggtttttgtattgactcctcttcgggggagagtaagtctttttgtgacatatttgcaagtgtatattttaatttacatggtgcattaggccattcttgaattactataaagaaataccggagactgagtaatttataaagaaaagaagtttaattggctcacggttctgcaggctgtacaagcatggtgcttgcgtctacacggcttctggggagggctcagggagctctca

SEQ ID NO: 870648 - DNA, 651 bp, Homo sapiens
tgagcctttcctggtttcaatgacaggtggtgatggtttcctttatgatacacacatcataaaacagtcgccttcagcttttgttttttaatagcttgcttacataagttttacagagctatgaaagaatcaaatagcaatcaaaatattcttcataatcaccgttaatttctagttgattcccagtgttaactttttcaatctgagttcaaatttggtgkgcctgcattttagttcaggatcagatatttcccagtgttcgattgtttcaaatccagaaaaacagaagaagagtctggcattttacattccagatttcaaaagaacaatctatttccaaagaaaaaatatcttaaaaatattttttataaacaaaggtagttttctcatttctgtttttccacttgccacattcttcaggtttttgtattgactcctcttcgggggagagtaagtctttttgtgacatatttgcaagtgtatattttaatttacatggtgcattaggccattcttgaattactataaagaaataccggagactgagtaatttataaagaaaagaagtttaattggctcacggttctgcaggctgtacaagcatggtgcttgcgtctacacggcttctggggagggctcagggagctctca

SEQ ID NO: 870649 - DNA, 623 bp, Homo sapiens
atgtgggttctagaaagactacaagggtggctccctgcaggatggccaggagaggagggagactggtgttctagagtctgcgggaatccacagcagtcaaacgagagagacttctgtccagagacacattatccctgcagtccacacatggggcgaatgcctgggaaacaactgaatttagggagaggaaagagaaacacattgtttatttcttaattaggagctgattcgtaattacttccaccccatttctttttattttcacctattgactttgtttgatccctaaatcaaccctgcaagacaaccagcatgttccccttttagaggaggggaagctaaacctcagagaagttcaagtttgtttaaggctttgcataaagtgagttgtggacatggaaacagaactcaygtctttctcacttcagaaacaggacttccttccttccatcctcccttcctcccttcctctcttcctctctcgctcaaccccagcactttgggaggccgaggtgagtggatcacctgaggtcaggagttcaagaccagtctggccaacatggcaaaagcccatctctactacaaatacaaaaaattagccgggcgtggtggcaggtgcctgt

SEQ ID NO: 870650 - DNA, 591 bp, Homo sapiens
ttgatatggctttgctctgtccccatcctaatctcatctttgtagctcccataatccccacatgccaggggaggaatctagtgggaattaattgaatcatggggcaggtctttcccatgctgttctcttggtagcgagtaagtctcacaagatccratggttttataaaggggagttcccctgcacatgtgctcttgcctgccaccatgtaagatgtgcctttctcctcctttgccttctgccatgattgtgaggcctccccagccatgtggaactgtgagtgcattaaatctcttttccttataaattacccagtcttgagtatgtctttagtagcagtgtgagaacagactaatacagtaaattggtactggtagagtggggtgctgctgtaaagatacccaaaaatgtggaaatgactttgcaactggttaacagacagaggttggaagagtttggagggctcagaaaaagacaggaagatgtgggaaagtttggaacttcttagagacttgttgaatggctttgcccaaaatgctgatagtgatgtggacaataaggtccaggatgaagtggtctcagatggagatg

SEQ ID NO: 870651 - DNA, 622 bp, Homo sapiens
ttgggaccttcctagacctcgccctataagtcttttcatttgactggttctgatttttacactttataatacaactgaaatcataagtatagtgctttcctgagttctgcgagtcattctagcaaattatcaaacatgaggggatagtaggaacccctgaatttatagccagttgattaaaactgcaagtggcctggggaccccatactgtgactgacatctgaagtgagggcagttttgttgaggactgtgtccttttttttttttttttttttgagatggagtcttgctctgccgcccaggctggagtgcagtggcacgatctcagctcactgcaagctccgcctcccaggttcacaccattctcctgcctcagcctccyaattagctgggactacaggcacccgccaccacacctggctaattttttgtatttttagtagagacggggtttcaccatgttagccaggatggtcttgatctcctgacctcgtgatccacctgcctcggcctcccaaagtgctgggattacgggcgtgagccactgtgcccagccgaggactgtgtccttaacttgtggagtctggtccactatggatagctagtgtcagaattgcattgc

SEQ ID NO: 870652 - DNA, 641 bp, Homo sapiens
gtgaaagttattcccatgctctacaatgttctacataacctagctctgaactcatttcctggtactctttccattgttattgccatgctctacaatggcctacatgacctagctctgaactcatttccttgtacttttttcattataccctccttcctaggtgcactgacctcctcactgttcttgaaagtggcaagcatatccccatctgaagacttctgcattttctgtttcctctttcagaaatgctatctccccaaatagctgcatgattttctcccttatttccttcaagtcttarttgaaatattgacttcttggtcaacttcaattcctacacaccttttctattcccttttcttgcttaattgttttcttcttagcatttattacatccaacattctcaacttacaataatatctaagttattgcctacttctttatcaccagaatgtagtctttctgggggtagttattgtttattttatttattgttgcatctctagctctctagatcagtaaccaaaacacagaaagtgcataggaaatagttactgacctaatgaatgaatgggggatgaaggaatgagggtagaaaaaaggagagaaaatagtatgttgttctgttcttgcattgcta

SEQ ID NO: 870653 - DNA, 645 bp, Homo sapiens
tgaagataagatggttgtaggtgtgtggtgttatttctgggctctgtattctgttccattagtccaggtaactgtttttgtacagtaccatgctgttttggttactgtagccttgtagtagagtttgaagtcgggtacagtgattcctccagctttgttctttatgcttaggatttccttggctacytgagccatttttttgatccatatgaattttaaaatagtttttctttgttctgtgaagaatatcattggtagtttggtagcaatggcattgaatctataaattgcttttggcaatatggccattttaacaatattgattcttcctgcccatgatcatggaatgtttttccatttgggtcatctctgatttctttgaacaatgttttgtaattctcattgaaaagatctttcacctccctggattagttgtattcctaagtattttattctttttgtggctattgtgagtgggattgcatttgcttttttttttttttccttttttttttttttcttttttgagacatggtttcactctgtcacccaggctgcagtgcagtggtgtgatcatggtttactgcagcctcaacctcctgggctcaagcaattctcccatttcagcctctcacgtagctagga

SEQ ID NO: 870654 - DNA, 645 bp, Homo sapiens
tgaagataagatggttgtaggtgtgtggtgttatttctgggctctgtattctgttccattagtccaggtaactgtttttgtacagtaccatgctgttttggttactgtagccttgtagtagagtttgaagtcgggtacagtgattcctccagctttgttctttatgcttaggatttccttggctacttgagccatttttttgatccatatgaattttaaaatagtttttctttgttctgtgaagaatatcattggtagtttggtagcaatggcattgaatctataaattgcttttggcaatatggccattttaacaatattgattcttcctgcccatgatcatggaatgtttttccatttgggtcatctctgatttctttgaacaatgttttgtaattctcattgaaaagatctttcacctccctggattagttgtattcctargtattttattctttttgtggctattgtgagtgggattgcatttgcttttttttttttttccttttttttttttttcttttttgagacatggtttcactctgtcacccaggctgcagtgcagtggtgtgatcatggtttactgcagcctcaacctcctgggctcaagcaattctcccatttcagcctctcacgtagctagga

SEQ ID NO: 870655 - DNA, 613 bp, Homo sapiens
attgaatcagtaagttactttgggcactgactttcttcaaagaattagaaaaaactactttaaacttcatatggaaccaaaaaagagcctgcacagccaagacaatcctaaccaaaaagaacaaagctggaggcattatgctacctgacttcaaaccatactacaaggctatagcaaccaaaacagctatatagaccgatggaacagaatagaggcctcagaaataacaccacacatctacaaccatctgatctttgacaaacctgacaaaaacaagcaatgggtacaggagtccctatttaataaatagtattgggaaaactggctagccatatgcagaaaactgaagccggaccccttccttataccttatacaaaaattaactcaagatggattaaagacttaaacataagacctaaaacctaaaaaccctamataaaacctaagcaataccattcaggacatgcacaaagacttcaggactaaaacaccaaaagcaatggcaacaaaagccaaaattcacaaatgggatctaattaaactaaagagctcctgcacagcaaaagaaactatcatcagagtgaacaggcaacctacagaatgggagaaaat

SEQ ID NO: 870656 - DNA, 533 bp, Homo sapiens
tgaatatcatacagtatacttacaaaaacctcaatggtttagcctactatacacctaagctatatggtatagcttattgctccaaggctacaaacctgtacagcatgctaaatagcgtgggcaattataacacaatggtaaatgtttttgtatctaaacatagaaaagacacagtaaaaacagtataaaagggcgaggtgcggtggctcatgcctgtaatcccagcactttgggaggctgaggcgggtggatcacgaggccagaagatcgagaccatcctgactaacatggtgaaaccccctctctactaaaactacaaaaaattagccrggtgtgttggtgggcgcctgtagtcccagctactggggaggctgaggcaggagaatgacgtgaaccctggaggcggagcttgcagtgagccaacattgctccactgcactccagcctgggcgacagagcgagactccatctcaaaaaaaaaaaaaacaaaaaaagtataaaagatttttttaaatggtatacctgttaaggca

SEQ ID NO: 870657 - DNA, 615 bp, Homo sapiens
gcaagagggaaatccacccccatgatccaatcgcctcccaccaggccccccatcaaacactggggattacaatttgactcaaggtttgggtggggacacaaacccaaaccatttcaacttcatattttaggatgttagaaggggagccttcacagagtgttttagtttcctattgctatggtaacaaattaccacaaagttactggcttaggaaaatacaaattaattatcttctggttctggaggtcagatatccaaaataagtcttgcagagtgtattaattttctagggcggccatgaagcaagtacaaactgggtggcttaaacatcagaaatttgtcgtctcacagttctggaggctaaaatctgagatcaaggtgtcagcaggattggtgtgaataataatctgtttcatrcctttccactagtttctcatggtttgctggcaatctttggcataccttagtttgtagtgcctcaccacaatctctgctttcaccttcatgtgatgttcttcctgtgttcatgtctgtgtccaattttcacttctttatcaggacactggtcatattaaattaggtcctgccctaatgacctcattttaacttggttat

SEQ ID NO: 870658 - DNA, 482 bp, Homo sapiens
gggcagaagagaaagaataaagacctataaattggccacatgatactctaacaaagagttctatgacctacagggaaatgaacatggagacataatttgaacattgattaagatgggattgtcccaaccaacaattatctagcagaagaggaaaaaaataggaaaaatgcatctagaaggtgagttggggctaaagattggattgaagatcaaaaragaagaggaaaaggatcaaaggggacgaaaagaagagaaggagaaggaggtctacttttcacccttccggccacaaagctcttaaaaggtgttctttagtaggacaaatgttccacccttgaacccgataacattaaaaaaaaagaacatttttccaacttggaggcactcagttaaaaaaaaaaacgtacttttccaacttggaggtactcaggcagtactcacatggattcttctggcatgtggtcaaataaggacttctagag

SEQ ID NO: 870659 - DNA, 634 bp, Homo sapiens
gaatttctgataatcattgagagaacaaaatgacttccattatccagttaacatacagttctgtagcagaattaatccatgtctttgcatgctaagtcatagaaaactgaatagctgtatcctaaaaccatagcttcactcttgagtgtctttgttccctgtgagcctcctctgctgaatatcccactgtcatttctttgcttttccactcccggtccacaagtagaaatgctgcccattagggcgattgtgagggcgcagggctcttacgtgtgtttggtgcctagcacagagctgtgcacaaagcacaaaggaggctatcagttaagctgagctttcttttccccttccaattcaaatgaacctgatacaaaatccaaaggaactggtactggtggtggggaaacaaacccagaatagaggaatagtagtttatgkaaccagactctgtttataaaccagcccttcttaaactgggacccgtggttcttagctttcatcaagctttcttagaggttgatgccccaacaaaagctgaatcagtgatgtaaattgcaaaaggagttggagggaaagcacatttgaataaatcaagtcaaatgctccacaagattgttaatatttaactaagaga

SEQ ID NO: 870660 - DNA, 649 bp, Homo sapiens
acttggatatttgatagtgtttgctcctgagattctgtaacttataatttattttttattatttattttttttttgagacagggtctcactctgttacccaggctggagtgcagtggcatgatcactacgtgctgcaatgctgaacttctgggctcaaacagtcttcctgactcagcctctagaggcgctaagactacaggtgtgtaccaccatgcctgactaatttttttttwaaatttttgtacagatggtttctcattatattgcccaggctagtcttgaatcctagccccaaatggtcctctggccttggcttctcaaaatgctgagattactggcgtaagccaacactcatggccaattctttaccctctatttttttttttctcaattacatgactgtgtaagcatatactatattcggggtccatgaaatatagtcatattctgatttttctgaagaccagaaaggacataatatgtattacatacatattatatgttctataccaatacttaatataatacctgacatatagaatatactcaaaatatctattttcacatggagcagaagaatgggttaaaatttactaaatttattagcccactatattgaagccttaccacattgctacttccagctct

SEQ ID NO: 870661 - DNA, 600 bp, Homo sapiens
aattttccatctctctagttagttgtattcctgagtattttattcttttttggctattgtgaatgagattgtgttcctgatttggctttcaacttggctgtcattggtgtataggaatgctactaatttctgtacattgattttgtattctgaaactatgctgaagctgtttatcagatcaaggagcttttgggcagagrctattctcttctaggcatagaatcatatcatctgcaaacagggatagtttgacttcctctcttcctatttggatgtcttttatttccttctcttgcctgactgctctggttaggacttccagtatgatgctaaatgggtgtattgagaggccatcccttgttttgttctgattttcaagggaagtgcttccagcttttttccattcagtatgaggttggctgtgggtttgtcatagatagctcttattattttgaagtatgtaccttcagtgcctactttattgagggcttttttaacacaaaggaatgataaattttatctttagtcttttctatgtctattgaaataatcatttggattttttatttctagttctgtttatgtgaagaataacattga

SEQ ID NO: 870662 - DNA, 608 bp, Homo sapiens
acaggaatgcatgttcacactttgggccaggttccaggcttgagagtggggccctcaccagatacccaccctcttctgctaagaatttccctgtctcctgactctatcaatattatggtaggtgctcccaatggggagtgggaaaagacagccagaaaggtatcaactatgccagtggagttttcaaatgttctaaagggctttcaaagatgaaaaggtactgcagtacttaacaattgtggtgcttttaataatatctaatatattcaagttgcaaatgtaaaactagtttttcttaaaccattaaacaccactttgaaatctaatgaatgtattttattttattgtagattaaaaaaaataaaatagttcatactataaccagcaaagggggcccggttgctcaccacttgtagaaagaagccaaaataacaagagtgaggtgtgataaaaagagggtgaatcttttyatccatgctaagaaggaaaagagtgccagaattctttccaacaattggcactgcccagtttacggagggaacatggggattttaaagagaggggtttggaatgcaggagaggcaagggggcgagaaggtgtcaagtgg

SEQ ID NO: 870663 - DNA, 591 bp, Homo sapiens
tgcacattttcctgctgtgccagccctatcacactgacccttatctttcccatttttaattataatgcattaaagtctatagcttaatctatcaaaagggttatttcaataaatataaaatgagacatctcaatgctaaggagaccttggatcacagttgaattggcastgttttattttttcttagtgggagataaaataatgatgtgttcagcatgggaaggcatatgagatttgatcaaatatcttctcatttgctgttttaaagatagagaaggaattaacctgtttttatttggtgacggactaagctaatatttttcacgtgtgatctcatctaatccttataaaataaactttaacacatgaggaaataaaagcaccaagaggttaaatacctgagtccacagaccttgtaaatgcttcaggactcagtctatttggtttgttccatatattagactacttctttaagcttaaagaagtaaatattagatactgtgcctagtatatgccagagactattgtgagcacataatgggattaacttgtttaattttaataatcccaggaggtaggtactccacctac

SEQ ID NO: 870664 - DNA, 591 bp, Homo sapiens
tgcacattttcctgctgtgccagccctatcacactgacccttatctttcccatttttaattataatgcattaaagtctatagcttaatctatcaaaagggttatttcaataaatataaaatgagacatctcaatgctaaggagaccttggatcacagttgaattggcagtgttttattttttcttagtgggagataaaataatgatgtgttcagcatgggaaggcatatgagatttgatcaaatatcttctcatttgctgttttaaagatagagaaggaattaacctgtttttatttggtgacggactaagctaatatttttcacgtgtgatctcatctaatccttataaaataaactttaacacatgaggaaataaaagcaccaagaggttaaatacctgagtccacagaccttgtaaatgcttcargactcagtctatttggtttgttccatatattagactacttctttaagcttaaagaagtaaatattagatactgtgcctagtatatgccagagactattgtgagcacataatgggattaacttgtttaattttaataatcccaggaggtaggtactccacctac

SEQ ID NO: 870665 - DNA, 677 bp, Homo sapiens
gtgccctgcctcccagcagtggcttaaagggtcaatgtagagctcagctgttgcttcaaacagtgcaagccccaagccttggtggcttacaatttgtgttgggcctatgggtacacagaagttaagaattgaggtttggaagcatctggctagatttcagagaatgtatggaaatgcctgaatgtccaggcagaagtttgctacacagacacagccctcatgaacaacctctgctagggcagtgtggaagaaaaatgttggatgggaacaccyacacagagtcctgactggggcactacctagtggaactgtgagaagaggattgccatactccagaactcagaatcgtagattcaccaacagtttgcactgtaagcctggaaaagtcacagacactcaatgccagcctatgaaagcagccaggagggggctctaccctgcaaaaccacagaggcagagctgctcaagaccatgggtacccacctcttgcatcagaatgacctggctgtgagaagtggagtcaaaaaagataattttagaacattaatgtttaatgactgccctattgggttttagacttgcatggggcctgtagcccctttgttttggccaatttctcccatttggaacagttgcatttactcaattcctttaccctcattgtatctaggaagtaa

SEQ ID NO: 870666 - DNA, 677 bp, Homo sapiens
gtgccctgcctcccagcagtggcttaaagggtcaatgtagagctcagctgttgcttcaaacagtgcaagccccaagccttggtggcttacaatttgtgttgggcctatgggtacacagaagttaagaattgaggtttggaagcatctggctagatttcagagaatgtatggaaatgcctgaatgtccaggcagaagtttgctacacagacacagccctcatgaacaacctctgctagggcagtgtggaagaaaaatgttggatgggaacacccacacagagtcctgactggggcactacctagtggaactgtgagaagaggattgccatmctccagaactcagaatcgtagattcaccaacagtttgcactgtaagcctggaaaagtcacagacactcaatgccagcctatgaaagcagccaggagggggctctaccctgcaaaaccacagaggcagagctgctcaagaccatgggtacccacctcttgcatcagaatgacctggctgtgagaagtggagtcaaaaaagataattttagaacattaatgtttaatgactgccctattgggttttagacttgcatggggcctgtagcccctttgttttggccaatttctcccatttggaacagttgcatttactcaattcctttaccctcattgtatctaggaagtaa

SEQ ID NO: 870667 - DNA, 704 bp, Homo sapiens
attgatggacatttaggtagattttatgtctttgctattgtaaatagtgttgcaatgaacatacacatgcatgtgtctttatactagaataatttatattcctttggggatatatccagttataggatggctgggtcaaatggtatttctgcaaaaactcaattgatttgagttcacaatttttcttcccctgtattctcttctcagaaacagtaccatatgctgctaatttgctcatagctgagttggtaagtcataaatccataacacccatttatctcactgttcatatccagaagcaacaaattctattgagactaacactaatcataatttttgcacctatactcttcattcttcttcttgttacctcagtgtggattacaataatttttcctgcattgttatatgaaatagagtttgaatagactaattttctctgactccttccaatagattctccatgccactacaaatattttttaataaaaattatcatgtcattstcctggcaaaatatttcactgaatacttactgatcttagatgaagtgcaaactttttagtatgttattcaaggtcgttctttcctccctcacttgttctctatatcctaacaatatttcatgcccaaacccatgtcctccctcaatttttggtctgtatgtgtgcacttctccatctagacaatgtgcatccatcgtt

SEQ ID NO: 870668 - DNA, 704 bp, Homo sapiens
attgatggacatttaggtagattttatgtctttgctattgtaaatagtgttgcaatgaacatacacatgcatgtgtctttatactagaataatttatattcctttggggatatatccagttataggatggctgggtcaaatggtatttctgcaaaaactcaattgatttgagttcacaatttttcttcccctgtattctcttctcagaaacagtaccatatgctgctaatttgctcatagctgagttggtaagtcataaatccataacacccatttatctcactgttcatatccagaagcaacaaattctattgagactaacactaatcataatttttgcacctatactcttcattcttcttcttgttacctcagtgtggattacaataatttttcctgcattgttatatgaaatagagtttgaatagactaattttctctgactccttccaatagattctccatgccactacaaatattttttaataaaaattatcatgtcattctcctggcaaaatatttcactgaatacttactgatcttagatraagtgcaaactttttagtatgttattcaaggtcgttctttcctccctcacttgttctctatatcctaacaatatttcatgcccaaacccatgtcctccctcaatttttggtctgtatgtgtgcacttctccatctagacaatgtgcatccatcgtt

SEQ ID NO: 870669 - DNA, 631 bp, Homo sapiens
cacacacacacacacatatgtatatgagcagcaaacataataaaaatgagcccactagagatggtactttaacacattattttaagtaatgttaaaaaaacaaagttttaagaacagagtggaagaaatactgacccagaatatattcaaagagaggaagctatgatcaataagcagtaccaggtacccggaagaacacaaaacatgtacaagggtggttaatttttaggctggaaaagtatttagagctgaaaatakagttgtttcccagaaaattttgtgcataaaacagtaaaccccctctataacttcaggtcacagaaaatccatcaatcaccaacataatacagacagaattatttttagtcacagaaaacaacgtaagaagacagttctttcaggaaggtacggttttctaagcgtgttattaaggactcagaatgctgtattttttctaaagtacttgtcattttacacttttcccttgtggcctcatggtggcaatgcagcttcaggaacaacagttgttgtccaggcagaaagaaagaatggggaaaaaggtgcctagtttcttttaatcatctagaaaaggctcccacagagatttcttcctacatcacatggcaagatc

SEQ ID NO: 870670 - DNA, 641 bp, Homo sapiens
gagtccaattaaggcattggggcatcagcatgaatcagtagatcttcaactttcatgtacatcacaattacccaggaatttattttttcttagatacttaagttctacccaaggagattctgcatcattatatctgccatggagtctctttcctaaattttaaatggtatacacaattttaattaataataacatgaaaatttaaagtaagcttacaggaaaacacaaaaagctattaatagaatgcatgtttgtccctgactcacattttaaacatagtaaaatatttccagttagatgcaccattaagaaggatttagaaattggaagacgctatggcactgtaccataattccttacacgatttctaaaaatttartaatttgttctaaggatataatcagaaacaggttatccacaaagaaaactgtatgatgtttaatagaatgcaacagcttaacaaaaaaaaaaaagaaaatagggaaacctaaatgcatgaaaataaaaacatgtcagacgaaccatcttgcagtcttgaagagcaaatatgttagccactaaactcttcttgaattccaaacaattatataataaaatactgcatatgagaatatggagctgtcttcaaatgctgattcagc

SEQ ID NO: 870671 - DNA, 661 bp, Homo sapiens
caagaaacaagtataacaaatttaattgaccatagttctacatgacatgggagccttcaaaatgaagatccaaagatacagcagaaaatgctcattttatgcttaagttcaacaaagtatgaatggacctgtagaaatatgattgaacaaaaagtatatggtctaatgctaacagrctgagtgacgaagcacagcaaggcttctctgtttagagtcttctttgcctctctgtgcagcattccttcctgctgggtatgaggcaggaccctctctgaaattggggttttatgacctacaatcaaatgagataggtcagataatttatttatggtcaatttttatgcagaaaagaggggcaaagtcagagtaatatttttagggtttctggcttgctttggggaaatgggttatggactcttgtcttggggaaaagagactctagtttctatagtttgcctcaggaaagaatgtggaggtcaggagaagattagggagaaacttgcttctgaggctgcctctgagactttcattttgcagtattattttctgagctccaacaagtgtttttagaaatactagccagtttttatgtagaatgtccctctgtttatatttgtctgatatttttctaagattagatgggggattgtggattttggga

SEQ ID NO: 870672 - DNA, 614 bp, Homo sapiens
ttttcagtctaagaaagtaaataaagcttatttctttcaatctttcaaaatattacaatgagattatttgagcctctgttctggtaaaatcatcactttttcaaagatgatttcttgctgttgtctcattatttacatggtcagagaggttacttaaagagtaccgctttaaaatctggagcattgagagagaaccacaaacagccctataccatgaaaaatcctatttatgtgggagggaaattttcttaaacgtcagtttttaaatcagtttgggacattaaatctctccacctcccactctctcctccctcactgacttctgaggaacaacaaccaccaagaaaaaaaaaaaaaaaaaaccactgtgttttgaattccattatgtttccaaacttccaagtcagaggaaattatttaaaatgacttaccccacacaaatacacataaggagggrgggaaaaacaaattgccagctcacaagatgtttctctactaaccacccgcttttgctgacctgacaaattaaaagtatgtaatttcctcacggcatttccgacatattttagtgatattttgtaagagttaagagagttctgtttgctctttttact

SEQ ID NO: 870673 - DNA, 577 bp, Homo sapiens
aactctgaatgtcatcattcagaaaccacatatggctcagtgaggtgcttttgctcataaaaacccttttgtttttctcagggagcagaagccggaggaagagacactctctaagcattgaaccaaaagctatccagatagaacactgtgaaggataagcagaaagwgtccgtcgttcaatgacttcatttgaatcagaactaacaaccaccacaacaaagtagggggacagtcatttctaagccttgatgtcttataagctgggcaaactaaagtgtaccgtaaccgtatgtcacactgaaactgggtgatttgagatgtggcagggtgcagggccctcagaggagggagtggtcagcaaaacccagaggaaggcttctgtgtggagaggataggctgaagggagctaaaacttttggtcagcggagcaagagaaagctgggaaagctaggaaagagagcataaataccctggcctcacttttctttttttttcttttcttttttttttttttgagatggagtctcgctctgtggtccaggctggagtgcaatggcacgttctctgctcactgcaa

SEQ ID NO: 870674 - DNA, 606 bp, Homo sapiens
ttgtagcaattgtgaatgggagttcactcattatttggctctctgttcgtctgttattggtgtataggaatgcttgtgatttttgcaccctgattttgtatcctgataaatcatgctactataaagacagatgcacatgtatgtttactgcggcactattcacaatagcaaagacttggaayggacccaaatgtccataaatgatagactggattaagacaatgaggaacatatataccacggaatactatgcagccataaaaaggatgggttcatgtcctttgcagggacatagaagaagctggaaaccatcattctgacaaactatcacaactacagaaaaccaaacaccacatattctcactcataggtggcaatgaaacaatgagaacacttggacacagcgcggggaacatcacacaccatgacctgtcatagggtggggatctgggggagagaaaacattaggagaaatacctaatgtaaatggtgacttaatggatgcagcataccaccgtggcacatatatacctatgtaacaaacctgcatgttgtgcacatgtaccctagaacttaaagtataaaaaaaaaaaatagaagatggcc

SEQ ID NO: 870675 - DNA, 606 bp, Homo sapiens
ttgtagcaattgtgaatgggagttcactcattatttggctctctgttcgtctgttattggtgtataggaatgcttgtgatttttgcaccctgattttgtatcctgataaatcatgctactataaagacagatgcacatgtatgtttactgcggcactattcacaatagcaaagacttggaacggacccaaatgtccataaatgatagactggattaagacaatgaggaacatatataccacggaatactatgcagccataaaaaggatgggttcatgtcctttgcagggacatagaagaagctggaaaccatcattctgacaaactatcacaastacagaaaaccaaacaccacatattctcactcataggtggcaatgaaacaatgagaacacttggacacagcgcggggaacatcacacaccatgacctgtcatagggtggggatctgggggagagaaaacattaggagaaatacctaatgtaaatggtgacttaatggatgcagcataccaccgtggcacatatatacctatgtaacaaacctgcatgttgtgcacatgtaccctagaacttaaagtataaaaaaaaaaaatagaagatggcc

SEQ ID NO: 870676 - DNA, 578 bp, Homo sapiens
ctcaatagatgcagaaaggcttttgcatcccttcatgttacaaactctcaacaaactaagtattgaaggtacatacctcaaaataataaaagccatctatttcagacccacagccaacatcatactgaatggtcagaagctggaagcattccccttgaaaaccagcacaagacaaggacacctctttcatgtctcctatttaagatagtattggaagttctggccagagtgatcaggcaagataaagaaataaagggcattcaattaggaakagaggaagtaaaactatccctgttcacggataacattattttatagctaaaaaaccccatagtcttgacccaaaagctccacaacctgataagcaacttcaacaaagtgtcaggatacaaaatcaatgtacaaaaatcactagtattcctatacaccaacaacagccataccaagagcaaaattggagatgcaatcccatttgtgattgccaaaaaagaagaaaatacctagaaattcagctaaccagagagatgaaagatctctacaatgagaattattaaacgctgttcaaagtaatcagagat

SEQ ID NO: 870677 - DNA, 612 bp, Homo sapiens
gattcagcctgacacagtttggaggaaattacatgagtgtgaatatgaaaaagtaaggattgggagaagggagcattttggaggcttgctaccaggggcgatatcactcagattatatgttgaccttccagtatgccaatttatttttcttaatagtgtttttagtatttattggataccgcaggataatggagatttttaacatttgtccagatagtttgtaatgaaaagcaagcagagctataaatgtatctttatctttttctttgctgctagaatatcctggaagtcaatctcaggactattttcaaataaaaatttaaaaggaagatgtcagaactgaaagtagtacagagaattaggtgaacatagcagctaaacttagcaaggtaaaatgtcatactcccagaataaactgataagtcaatcatacaaatgcaaccaaattattggaaaaaatcaatataakaagaatagcatcagatttctcagctgtaaccaaaaattatgagaaatattattgaaatatttgcaaagttaaaagatagaggactgtatacactgtcaaacaaataaatacaagtgaaggcaaaattaaaggcatttttaaac

SEQ ID NO: 870678 - DNA, 473 bp, Homo sapiens
tgttattactgaccttctgaagtctttttctatcaacttgtgaaagtcattctccatccaggtttgttccattgctggtgaggagctatgatcctttggaggagaagaggccctctgatttttagaattttcagctttyctgctctggtttctccccatctttgtggttttatctgcctttggtctttaattttggtgacctacagatggggttttggtgtagatgacctttttcttgttgttgatgctattcctttctgtttattagttttccttctaacagtcaggtccctcagctgcaggtctgttggagtttgctggagttccactgcagacgctgtttgcctggtcatcaccagcggaggctgcagaacagcaaatattgcagaatagcaaatattgctgcctgatctttcctccagaagcttcatcccagaggggcagccacctatatgaggtgtctgtcggcccct

SEQ ID NO: 870679 - DNA, 473 bp, Homo sapiens
tgttattactgaccttctgaagtctttttctatcaacttgtgaaagtcattctccatccaggtttgttccattgctggtgaggagctatgatcctttggaggagaagaggccctctgatttttagaattttcagctttcctgctctggtttctccccatctttgtggttttatctgcctttggtctttaattttggtgacctacagatggggttttggtgtagatgacctttttcttgttgttgatgctattcctttctgtttrttagttttccttctaacagtcaggtccctcagctgcaggtctgttggagtttgctggagttccactgcagacgctgtttgcctggtcatcaccagcggaggctgcagaacagcaaatattgcagaatagcaaatattgctgcctgatctttcctccagaagcttcatcccagaggggcagccacctatatgaggtgtctgtcggcccct

SEQ ID NO: 870680 - DNA, 703 bp, Homo sapiens
gataataacttaactctttcaataaattgccaatcagaaaatctttgactccatctataatcctatgacctataaactactacacttcccacctgtgcgcctgtcccctcctctcccccaaacctatggatacttcacatgtgtagattgatgtcttttgtcaacccaaccaccttgggcacatgttcttaggacctcttgagactgtgccttgggtcatgaccactcatatttggctcagaatattttacagaaaaatttactcttcaaatattttacagaatttggctcttttcatggtcaggtgattagcagggtaaagcagctggctttttatttttttgccattgggagattaggatttggtttacttttttttttttttttttttttttgagaaaggcaattaccacttgtctatcagcgagccaactccccagatattattatcatctcctttggcattctattttgtcctctgcagtttaractttgtaatttttttttctattccattcagaattctttggtgaggttttagaaaaaagagtagttacatgcatgtgttcagtcctaaatcaactggaaaattatgcctctttggtagtgtgattaattttatatttctttgtattttacttatgtatgtacattaattttggatttatttgcatcttcctttactggcagtctatgaggataa

SEQ ID NO: 870681 - DNA, 573 bp, Homo sapiens
aactcaaagtatctttagtttgttacttaactgcacctaatttgttttacatacatataaacatataaaaaataatgcaccaaaataagtaaaagcagttacattggaaagatctatttgagaattccagcaacatcacttgtagaaataccttggggacagtttgttgaggtaaatgaacaaatttttccctctaatttagattcatgtcttgcttttgatctaatataacaattttttgtaggttaggtttttaagagtagctttaatttttaaagttgcctgtataggtgtgtatttcagagaattctattacatgttaaaggggaatgtaatgtgttayggagacttaatttatagaacttctctgtaaatcaacagatatatacataagcatgtatattttcccatggaaaagcaattcaaaatgttaagcttcgcttaatattgcaagtgtaaacattgtctaaagaccgtaattctggtgattctttaatagttttcttcatttgctactgacaagcatgttgtccattttgagttctttatatggtccttatataaaaggaataa

SEQ ID NO: 870682 - DNA, 573 bp, Homo sapiens
aactcaaagtatctttagtttgttacttaactgcacctaatttgttttacatacatataaacatataaaaaataatgcaccaaaataagtaaaagcagttacattggaaagatctatttgagaattccagcaacatcacttgtagaaataccttggggacagtttgttgaggtaaatgaacaaatttttccctctaatttagattcatgtcttgcttttgatctaatataacaattttttgtaggttaggtttttaagagtagctttaatttttaaagttgcctgtataggtgtgtatttcagagaattctattacatgttaaaggggaatgtaatgtgttatggagacttaatttatagaacttctctrtaaatcaacagatatatacataagcatgtatattttcccatggaaaagcaattcaaaatgttaagcttcgcttaatattgcaagtgtaaacattgtctaaagaccgtaattctggtgattctttaatagttttcttcatttgctactgacaagcatgttgtccattttgagttctttatatggtccttatataaaaggaataa

SEQ ID NO: 870683 - DNA, 693 bp, Homo sapiens
atcatgaaaccttcccctattgcaggagcatcccttaggccttccatgctgtgtaccacatgactttattcctcaggcatgtatgtgtgaactactggcagcagctaacctaggagcttttgatacatggcatggccagtgtatcaaaatgcctggcctgctgtgcacagacagaattatgatctgagcttttagtgagctggtgtcttaggattgtgacatttcttcacaagcgtttctccagyggtataacgcttcctctaccctttatttccttccttggttgcagcattcccagtttatttctttgaagttctcatactgtttaatttgttttgttttgctttatttcttgttgttgatgttgtttcatttttgcttaagtgagacaggatggaattagagtaacaagaaggtccctctaaaaagtggaataaagctctgtcaaaattttcccgtgttatcacaaaggctctgaagttatttcacaatgaattttttcttcctttgtccttgccagatgcacaagtggatctttctcagatattcacagagagaaactaatgaatcgcctgcaggtaaagcccacaaaaatgctgggttccctttaaaactgcagtccacaggaaattctcacactttcttccaacactctgccttgaggaatttgtcaaaattaacattaaagagttt

SEQ ID NO: 870684 - DNA, 655 bp, Homo sapiens
acatcacacactggggcctgttgagggggtggggggctaggggagggataacattaggagaaataactaatgtagatgatgggttgatgggtacagcaaaccaccatggcacgtgtatacctatgtaacaaacctgcacattctgcacatctatcccagaacttaaagtataatttaaaaaaaaacatgataaacaaaattwaaaaaaaaatcccagagaatatttgggaaatacaaaaaaaaatgctatcaatcgcttgtctttttcatgctttaaatctctctgatcttctctccctccttctctctcctcctttacacatctgccacatatctctaatgggcccttttgcattcttctgttacttttaaggactcagatgattaccctgagttcacttagatcatttagaataatctctctattttgggggcagctgactataaattccaacctcaattccatctgcaaagctccttcttagcaatacctagattattgtttgattcaatgaccgtgggacagggatttgaggaggggaaaatctttacatttctgcttcccacaatttgcttacttgccttttattctgtaatcagcaagtttgtgaaattctaggtgccagacacctttcacttgtcacaatataagaat

SEQ ID NO: 870685 - DNA, 620 bp, Homo sapiens
tttaaacttaaaaataaaaccaaactaataaacatatcaacattattttaaaaataaagtagcataaaaatgctaaatgaaaaagcaataatcctttgcaccgaccttcttctctcttgtttcactcagatgccaccacttaaacactttttattttttacattttatccagtcaccagtttttaatattttgccatayttatactaccattttctcattttatatacatatatatgattaatttttgaatgttttgaattagtattgaattacagtatagaattgaattgcatacatcatggccctttaccgttaaatacttcagtaatgtatttcctaagcacaagttgaatattcttttatataatctaagtacaactgttaaatccaggaaactaaacagttcaatattgtatctaatctgtagtttgtattccaattttctcaactgactcaatcgtgtctgctagaggatttattatcctttattgctaaatccagttcaggattaagtattgtattaacagtcagccccctgtatccagtttccaaattcaaggattcaaccaatacagatccagaatattcagaaaagaaataattgtgtccatactgaata

SEQ ID NO: 870686 - DNA, 669 bp, Homo sapiens
aatttaaaataatttgcattctgttttaccatttttacatttgagaattaagtttactgtgaaaataacaattattggccaaaattctctttcttaagcttggcatattgttttttctatattcttggtggtagaaatattgggttaagagtttgcttggtaaactgagaagacttcttttctgggaagtggttgcagaatgaagagttggatgttgaggactggagagaggttacatgcactggtgacttgaagctttaatactagatgacgtttttggaagccagcatgtgatattcaacaataagtttatagaagcctgcttggttttcaggttcgatacagttttcctttttcttataaagtattgttgttattgttcttatttgtcattttggttttttcctttawaaagtattttatgtttaatcatatatcatatatatttattttaataaactttataagcattcctacttacatccttcattaacgtcgttttttttttgtttgtttgtttgtttttaagagacagagtctcactctgtcacccaggctagagtacaacggcacgatcatagatcatcgtaactttgaaatcctgggctcaagagatcttcccacctgagcctcctgagtagctagaccaacaggcatgccaccaggccc

SEQ ID NO: 870687 - DNA, 630 bp, Homo sapiens
atccagtagacccagagcattcattgaaagatcatcccttccccactgcactgaagtatcatctttgtcacaatcatcacttaggattttatatttttgaaagatcttttagatttcaacatgtattacatattattgttttacatatrttaaaaggaaagtaaaagcaaaataggtcaatatttctagtatttttaatcattcagtctgactcttcaatttttcaactattcaattcaaagtcattgctgactgtttctccgcaaagcatggtcctctgtgccatcaagaatgttggacatgcagcaaaagaatgcctcactgttatcccaggattttcttcaaagacttgacactcgttctgcacattttcatgtcaatgtgcagaaaatgaaaactttaccctagcttacggtgattttaagatacagtctgacctcaaacttgttaaaatgtgaaagtttacatggctcaaaatcaaggaaataatatggttcttgtcttaggttactagaagcctgagagagattcaagtgaatatagtttatttaaaaaatgatttttaggggaagaaacataacttctaagagagggaaagaagatcagagaagaagtagtagttaagcaaga

SEQ ID NO: 870688 - DNA, 645 bp, Homo sapiens
gggtcaggtttttcccgtgctgttctcatgatagtgagtaagtatcatgagatctgatggttttataaaggacagtttccctgcacacagtctcttgcctgctgccatgtaagatgtgcctttgctcctccttcaccttccgccatgattgtaaggcctccccagccatgtggaactgtgagtccatttaacctccttttctttataaattacccagtctcaggcgtttcttcatagcagtatgaaaatggactaattcagtaaattggtactgcagagagtggggcgctgctgtaaagatacctgaaaatgtggaagtgactttgaacctgggtaacaggcagaggtcrgaacagtttggagggctcagaagatgatgggaagatgtgggaatgtttgggacttcctagagacttgttgaatgactttgaccaaaatgctgatagtgacatggacaataaagtccagactgagatggtctcagatggagatgagaaactttttgggaattggagtacaggtcactcttgctatgcaaagagactggcagcattttgcctctgtcctagagatctgtggaatcttgaacttgagagagatgatttggggtatctggcagaaggaatctctaagcagcaaagtgtt

SEQ ID NO: 870689 - DNA, 646 bp, Homo sapiens
tgtttttttctgaatggagaaaaaacccagagatatttttttaaaaaattaaaactaaagccaaagaaggtacaagttgactagccttgaaaacttcttaaaacattatttataaaaaatgtctatcaaatcatcaaaaattagtrttctctcttcttccccaactagaaatatgcagaaacatcaataattataatttacatggcttgcctacttgccctcaataatttttggaataagatgaagtaaatatattaagttaaatgatgttaactttatttcttaccattattacaatgaataagtcaacttctaaaggttaaaaattaaaacaagaaattaagggtattctcactttagtataacaaacagtcaaataaaatcactccctcatccctgctcccagctaaattacatgctgagctggcagtggaatctgtgggtctattgaggcattgcttcagtttgtttgggggttggagggaagaggtagaatgcagagtcagcctaaagataaacactgatggttccaatggcactgagaaattatgagaaatgccatgacaagaatagaaaaataatgcgatagtgagtgttgttaactaatagtgatgattagagacatttcaacctaggaatttttgtt

SEQ ID NO: 870690 - DNA, 646 bp, Homo sapiens
tgtttttttctgaatggagaaaaaacccagagatatttttttaaaaaattaaaactaaagccaaagaaggtacaagttgactagccttgaaaacttcttaaaacattatttataaaaaatgtctatcaaatcatcaaaaattagtgttctctcttcttccccaactagaaatatgcagaaacatcaataattataatttacatggcttgcctacttgcccycaataatttttggaataagatgaagtaaatatattaagttaaatgatgttaactttatttcttaccattattacaatgaataagtcaacttctaaaggttaaaaattaaaacaagaaattaagggtattctcactttagtataacaaacagtcaaataaaatcactccctcatccctgctcccagctaaattacatgctgagctggcagtggaatctgtgggtctattgaggcattgcttcagtttgtttgggggttggagggaagaggtagaatgcagagtcagcctaaagataaacactgatggttccaatggcactgagaaattatgagaaatgccatgacaagaatagaaaaataatgcgatagtgagtgttgttaactaatagtgatgattagagacatttcaacctaggaatttttgtt

SEQ ID NO: 870691 - DNA, 668 bp, Homo sapiens
ggctcatgtctgtaatcccagcactttgggaggccgaggcgggcagatcacctgaggttgggagtttgagaccagcctgaccaaattggagaaaccctgtctctactaaaaatacaaaattaggtggacgtggtggcacatgcctgtaatcccagatattggtaggctgaggcaggagaatcgcttgaacccaggaggcagaggttgtggtgagctgagatcgtgccattgcactctagcctgggcaacaagagcgaaactgtctcaaaaaaaaaaaaaaaagaattattaatctgaaaggcagaaatttttctatagatgtagctctacttcctagacagttgtctgggctccatgtgccccacaattagataggaatggagtcactgagaaggaagttgattttaactttayattcatgcatttatgtgctgggcagtagggttatgtgtcaacaagataggcactactcctgcccccagagaacttacttgcatcgagttgggaaaacagataagagaacagcagttacaatacagtgtggcaagaaatatgggaagagaaaaccagggaacacagtagagaagttgaatttatgttgttggttgggaaatagtgagcttgaagtgcttctggaacatacaagaaatacttggactagaggtatc

SEQ ID NO: 870692 - DNA, 680 bp, Homo sapiens
tgtgtaatcaaaggttgttttggaaggtggaagggaatgatggggaggaagttagttataggtagcttgtcaaaactttgaatttgagttagatttcttccagcaacaatgaaggcaatactttttattcggtgctagagatgcatgtccagtggaaagaaatttttctacttctcccttcctgtggaggcccaggtgcataaggaaggggcaagagcacaatgtatgtgaaaaaccttatttctaaagagaagtgagttcagactaaacaagtggcttcatcaacaaggaaaattttttagccttgtcactacataataggatgggtctagagaaacaagagataaactcaatctcttaagaatcctgttgaaaaaattgggtgatttttttcaaagaaaatatggtaagaaaatatttgctggtgctaaaatacctacaaaattttaactwtaaaatatggtgtagctaagaacttaacagcatttgtttttatattagaatcactcggtttgaatcggagctctactacctattagctctgttgcctttgagcaaatcatttaaattcacttaccctcagtttgcttactcataaaatgataataataaaaaaattccatgagtctagtgagaataaaaatgaaacaaccatgaaatatactctataaagcactgag

SEQ ID NO: 870693 - DNA, 549 bp, Homo sapiens
  misc_feature 528, 529, 530, 531, 532, 533, 534, 535, 536, 537, 538, 539,540, 541, 542, 543, 544, 545, 546, 547, 548, 549: n = A,T,C or G
tctggatggcacagctctgtagagtgttttgttctccatcccagtttctttcactagataaccttggcaatacatattcattgaaatgggattttaaaaactcaaaaacaaaaacagaaatgcatgcttagctgagattggttttgcctttcaattttgcatcacaaggcctgatgcaagtggctctctctgcttactttcagtaaagaaragactctgcggatggctcttaggaatgcccttgtttttgttcccatcagctacttaactaaatgtgtgtttccacttcccaggcaatgagtgggtggatgtctcaaggcaaactctacccattgctttaaaaaaaaaaaaaaaaaaaaaaaaaaaaagaaagcatccgtggctcttccaattgagagcatcccaggagcaaattctgttttatacctttctttctgttgcagttttacaattattatgctgttaacatgcattattcaaataattttttttggtactaatccttgaactactctctgagctggctannnnnnnnnnnnnnnnnnnnnn

SEQ ID NO: 870694 - DNA, 554 bp, Homo sapiens
tttgtttaataaagccttcaggttaattccaagccttctggatggcacagctctgtagagtgttttgttctccatcccagtttctttcactagataaccttggcaatacatattcattgaaatgggattttaaaaactcaaaaacaaaaacagaaatgcatgcttagctgagattggttttgcctttcaattttgcatcacaaggcctgatgcaagtggctctctctgcttactttcagtaaagaagagactctgcggatggctyttaggaatgcccttgtttttgttcccatcagctacttaactaaatgtgtgtttccacttcccaggcaatgagtgggtggatgtctcaaggcaaactctacccattgctttaaaaaaaaaaaaaaaaaaaaaaaaaaaaagaaagcatccgtggctcttccaattgagagcatcccaggagcaaattctgttttatacctttctttctgttgcagttttacaattattatgctgttaacatgcattattcaaataattttttttggtactaatccttgaactactctctg

SEQ ID NO: 870695 - DNA, 554 bp, Homo sapiens
tttgtttaataaagccttcaggttaattccaagccttctggatggcacagctctgtagagtgttttgttctccatcccagtttctttcactagataaccttggcaatacatattcattgaaatgggattttaaaaactcaaaaacaaaaacagaaatgcatgcttagctgagattggttttgcctttcaattttgcatcacaaggcctgatgcaagtggctctctctgcttactttcagtaaagaagagactctgcggatggctcttaggaatgcccttgtttttgttcccatcagctacttaactaaatgtgtgtttccacttcccaggcaatgagtgggtggatgtytcaaggcaaactctacccattgctttaaaaaaaaaaaaaaaaaaaaaaaaaaaaagaaagcatccgtggctcttccaattgagagcatcccaggagcaaattctgttttatacctttctttctgttgcagttttacaattattatgctgttaacatgcattattcaaataattttttttggtactaatccttgaactactctctg

SEQ ID NO: 870696 - DNA, 619 bp, Homo sapiens
tcagaggttactatgaaaaagggcagagatataaagggaattgaaaactaatcttcaacttgaaaaaaaacatgagaatagtcatttagatcatagagagaaataatgattacctttgattcctagagaaagttaatttaaagtgtaatccaagttccactgtacagccaaaaaaaaaaatctgcaaagttgagatacatctttagtagatggaaacgagtcacaagggtcacctctcttgaatattgggaagatgctcattcacaatgattgggggaaagaaagattttggagattaactgaccttggtttaggatacmcagtgttttttaaatacaaatgatatttggtatcatgataaagacaaaatctgtcctgaatgacagtctctaaggaaatgcactcaacagtcagaaaaccaccaatttgattgcttatgtttttgtgtttaccaaattagaatctataactatttaaagcaagtccttaggatccatgtccagtggaatctttcaagttcatgtgcactttgaaagtatagatatctgtggcccatgaaataaaataggcataaaacttcgttggtttataaatgggtttagcacaagaaaagaaatta

SEQ ID NO: 870697 - DNA, 579 bp, Homo sapiens
ttttcaaatgcttacaatcttttagtctcagcttaaaaaaataaattcaagtgctcgacaatgtaacaaaatactttacattaccaattatttaaagaagaaactgtccagagcgtagaatatttctgttttgcaagctgtctggtaacaagatttcttttcttttttaaaaaaacttattttagattcagggataaactagtgtttcagggtttgttgtataggttatttcatcccccaaatattaaggctggtacccaatrgttgttttttctgctcctctccctcctcccaccctccaccctcaattaggccccagtgtctgttgttctcttttttgtggtaacaagatttctaattagatatgattggctaaatcttgggaggtaggagaagagaaccttagtaggtccttgtctccatttcaaagtgcaggaaaataaaaaaatacaatcaaatatctattaatttactttgatgccttacaaacccacaatgttattgtgaaatgtattcaacttatgagagtagacagctcattgcacagtattctgcacactattgggctttgaatgattc

SEQ ID NO: 870698 - DNA, 565 bp, Homo sapiens
gaagaggcggtacataagtcagcaaaggataggcgtgtgtgttccaaacctcactgcaaatttaccaccaatgtcttcagaaatgctgggcagtgaaggcaaaacctactgcagatattttataggtatcgacgactctctgcacattcatgttcagtgaacgctgcaggagggtgtttgccgaaagctgtcttcacattgaagagtgagctttgttccccacaatcaaccttcagatgactcttcatgagagcctcatagattcttttggaatctttctgacagaacattgctaccyggagaaaatccctcagtattagattttgctcatattaaagagaaatggtggtgtgtgtggctctggtgggtgcacagggatgtgactgccagccttgtgaggcgtccctcattctccagcttgctctgccttgcatctgacaagcgtggggcttggcaggcagtggtgacaggtgacaacacatgacacccagtgcctgggaccactctttactccctcagagaagctccctgaaaaatcccccaagtacagggcaaagtcttcccc

SEQ ID NO: 870699 - DNA, 565 bp, Homo sapiens
gaagaggcggtacataagtcagcaaaggataggcgtgtgtgttccaaacctcactgcaaatttaccaccaatgtcttcagaaatgctgggcagtgaaggcaaaacctactgcagatattttataggtatcgacgactctctgcacattcatgttcagtgaacgctgcaggagggtgtttgccgaaagctgtcttcacattgaagagtgagctttgttccccacaatcaaccttcagatgactcttcatgagagcctcatagattcttttggaatctttctgacagaacattgctacccggagaaaatccctcagtattagattttgctcatattaaagagamatggtggtgtgtgtggctctggtgggtgcacagggatgtgactgccagccttgtgaggcgtccctcattctccagcttgctctgccttgcatctgacaagcgtggggcttggcaggcagtggtgacaggtgacaacacatgacacccagtgcctgggaccactctttactccctcagagaagctccctgaaaaatcccccaagtacagggcaaagtcttcccc

SEQ ID NO: 870700 - DNA, 653 bp, Homo sapiens
ttccttagttgctgtcagtgacccagtaattgttttcatggctctcaagtgtgaagtgctccgatagcacatcaacaaaatgtcaaatagtagaggagagactctatgagtgttactgtgatggattgtttatttgaatctttctgctcccagatgttccttggatgctgtataaaagatgatggacactgtagatgagacattttgaatacaataaaagctgtaccatgtcattgtatagaaagtaaagaagatttgaaaatgaaggacaaagagggtttctgggtagattgctgaaggaactattgtcaagaaaataaccgtggtttggccgggtgcggtggctcacacctgtaatcccagaactttgggaggacgaggcgggtggatcacaasgtcaggagatcgagaccatcctggctaacatggtgaaaccccatctctactaaaaatacaaaaaattagccaggcatggtgacaggcgcctgcagtcccagctactcgggaggctgaggcaggagaatggcgtgaacccgggaggcggagcttgcagtgagcctagatcgcaccactgaactccagcctgggcgatagagcaagaatctgtctcaaaaagaaaaaaaaaaaagaaagaaaatgtccgtggcttacag

SEQ ID NO: 870701 - DNA, 687 bp, Homo sapiens
acatgattatttgaatgctattaataaaagaaataaaaagtgtactttatcctgaacatcataatttattgtcagtcttttcatgaatctataaggtcaactatcctcttgttttcctcatctgttaagtagatcataaaaaaaataagtagtaaattcacatttataagtaaaggtcttttttttttttttccagaaccgtatcttatttcccctatgacctttgctgttgctcggtcctaataaaattgaggcccaggtggatgatgctaacattcttagaatcaagccaagttagagcttcaaggaaccttttagcattgaattcagtggttcttgaattcccctttgagaacctgttgacagctagtagccctttcccccaggaagatgcatattgtaggcagaatgatagccctccaaagatgtctataccctcatgccccaaatctgtgaatatattacattacatgacaaaggacagttcarattgcagatggaattgaggtttcttatcagctgaccttaaaacagggagatcatcttggatcatctacacagattcagtgtaatcacaagggtccttaaatgtgcaagagggaagcagaagagtcagagcgatatgaggtgaaaaagacttgatgggccattgctggctttgaagatgaaaggggcccatgagccaag

SEQ ID NO: 870702 - DNA, 591 bp, Homo sapiens
tttgatttttaataacagtaaaagaaagagtgatagctattttattgaatttatatatccaatctcaaaaaaatatataaaagaataattaagtctcttgacagctataagagcataaaaaccaacttaaacaaaaaagcaggagaaaaacaacctttggactgtgtggacagataaacacagtagaaaaagacgcaggggccagaaatccaccctgacattctatgactcaccagttatatggcagctgaaggtgaggtagaggtccattgacaagaggagactattttagaaytctttttttttgtcccaaactaagaggacaagcagagtcatcacacataattttaaaaagaaaaaggaaaagtaacaaaaagaaaagggaagaagaaggtggctattctgaatgtagttttggtaccaaaaagaatgaaaggagcccacagggagatgaagcagagtggagtggtcagggggtgagatgggttgggacctacggccccccagagcaggacccttccgacattcttaactgcctcctacaagaagacatacatgaccaggcatggtggctcgcacctgtaatcccta

SEQ ID NO: 870703 - DNA, 619 bp, Homo sapiens
gtggaactgcctgagaccatgggaacctacctcttacatcagcatgacctggatgtgagacatggtagtcaaagagatcattttggggctttaagatttgactgccccactggatttcagacttgcatggggcctgtagcccccgtgttctggccaatttctcccatttgggatggctatatttacccaatgcctgtactcccactgtacctaggaagtaactaacttccttttgattttacaggctcataggcagaagggacttgccttgtttcagatgagactttggactgtgggcttttgagttaatmctgaaatgagttaagactttggggaactgttgggaaggcatgattggttttgaaatgtgaagccatgagatttggaggggccaggggcagaatgatatggtttggctgtgtccccacccaaatctcatcttgaattcctacatgttgtaggagagacctggtgggaggtaaatgaatcatgggggcaggtctttcccatgctgttcttgtgatagtgaataagtctcacaagatctgtgaataagtctgacaagatctgatggttgcaaaaaggggagtttcccagcaagtttcttctcttgtctgct

SEQ ID NO: 870704 - DNA, 619 bp, Homo sapiens
gtggaactgcctgagaccatgggaacctacctcttacatcagcatgacctggatgtgagacatggtagtcaaagagatcattttggggctttaagatttgactgccccactggatttcagacttgcatggggcctgtagcccccgtgttctggccaatttctcccatttgggatggctatatttacccaatgcctgtactcccactgtacctaggaagtaactaacttccttttgattttacaggctcataggcagaagggacttgccttgtttcagatgagactttggactgtgggcttttgagttaatcctgaaatgagttaagactttggggaactgttgggaaggcatgattggttttgaaatgtgaagccatgagatttggaggggccaggggcagaatgatatggtttggctgtgtccccacccaaatctcatcttgaattcctacatgttgtaggagagacctggtgggaggtaamtgaatcatgggggcaggtctttcccatgctgttcttgtgatagtgaataagtctcacaagatctgtgaataagtctgacaagatctgatggttgcaaaaaggggagtttcccagcaagtttcttctcttgtctgct

SEQ ID NO: 870705 - DNA, 620 bp, Homo sapiens
gaacaggcagggaccttcccgaggggctcctgccactgctcctcggtacaggttagtgtatcatcctcataaagagctggtcgagttcggagttggcgggaggggtgcagtgggtgggaagtgcgcacggggcctttgtatcagagctctgtggggtggrctgcagggcctcatggaagggctggccaggagtcctgcaagggcctgggtggcagaggcctcgggtggatgggagtgtaggtggaaagagttcccagagcaggcagcgccagggagcaaggtccagggcccttgctgagttgatgggaatgacggggtaaacagaggccgagagccccccaagggccgggtcttctggaaacactgaggctgtggtgagacacagagaaccagccctgctgggttcatgagagccacagccttggttgggcacctcctgggtatagggcccatcccctggctggaggggggattgcacctcagcctggctgtgtggctcaaagcctagcagggagatggcacctcgtgcatgacagtggcagaggggtggctgcactcagtgaggctttctgggggtggcacgagctgagtgctggaggatgagcaattgttggccagaa

SEQ ID NO: 870706 - DNA, 620 bp, Homo sapiens
gaacaggcagggaccttcccgaggggctcctgccactgctcctcggtacaggttagtgtatcatcctcataaagagctggtcgagttcggagttggcgggaggggtgcagtgggtgggaagtgcgcacggggcctttgtatcagagctctgtggggtggactgcagggcctcatggaagggctggccaggagtcctgcaagggcctgggtggcagaggcctcgggtggatgggagtgtaggtggraagagttcccagagcaggcagcgccagggagcaaggtccagggcccttgctgagttgatgggaatgacggggtaaacagaggccgagagccccccaagggccgggtcttctggaaacactgaggctgtggtgagacacagagaaccagccctgctgggttcatgagagccacagccttggttgggcacctcctgggtatagggcccatcccctggctggaggggggattgcacctcagcctggctgtgtggctcaaagcctagcagggagatggcacctcgtgcatgacagtggcagaggggtggctgcactcagtgaggctttctgggggtggcacgagctgagtgctggaggatgagcaattgttggccagaa

SEQ ID NO: 870707 - DNA, 560 bp, Homo sapiens
tcaatttcagagcctgttattggtctattcagggattcaacttcctcctggtttagtcttgggagggtgtatgtgtccaggaatttatccatttcttctagattttctagttttttctttttttgtgtgtgtataggtgtttatagtattctctcatgatagtttgtatttctatgggatcggtgatgatatcccctctatcattttttattgtgtctatttgattcttctctcttttcttctttattagtcttgctagcagtctatcagttttgtygatcttttcaaaaaaccagctcctggattcattgattttttgaagggttttttgtgtctctatctccttcagctctgctctgatcttagttatttcttgccttctgctagcttttgaatgtgtttgctcttgcttctctagttcttttaatcgtgatgttagggtgtcaattttagatctttcctgctttctcttgtgggcatttaatgctataaatttccctctacacactgctttgaatgtatcccagagattctggtatgttgtgtctttgttctcactg

SEQ ID NO: 870708 - DNA, 629 bp, Homo sapiens
tcttttgagaattatctattcatctccttagcccgctttttgatggaattgttttttttcttgctgatttatttgaattctttgtagattctggatattagtcctttgtcagatgtacagattgtgaagagtttctcctactcagtgggttgtctgtttactctgctgactgttccttttgctgtgcaaaagctttttagtttaattaagtaccaactatttacctttgtttttgttgcatttgcttttggattcttggtcttgatgtctttgcctaactcaatgtctagagagrtttttcttatgttaccttgtagaatctgtatagattcaggtcttagatttaagtctttgatccatcttgagttgatttttgtataaggtaagaggagaatccagtttcattcttccacatgtggcttgccaattatcccagcaccatttgttgaatagggtgtcctttccccaccttatgtttttgtttgctctgtcaaagatcagttggatgtaaatatttgggtttatttctgggttttctattctgttccattgttctatgtgcctatttttatacccgtatcatgctgttttggtgactatggccttatagtacagtttgaagtagggta

SEQ ID NO: 870709 - DNA, 629 bp, Homo sapiens
tcttttgagaattatctattcatctccttagcccgctttttgatggaattgttttttttcttgctgatttatttgaattctttgtagattctggatattagtcctttgtcagatgtacagattgtgaagagtttctcctactcagtgggttgtctgtttactctgctgactgttccttttgctgtgcaaaagctttttagtttaattaagtaccaactatttacctttgtttttgttgcatttgcttttggattcttggtcttgatgtctttgcctaactcaatgtctagagaggtttttcttatgttaccttgtagaatctgtatagattcaggtcttagatttaagtctttgatccatcttgagttgatttttgtataaggtaagakgagaatccagtttcattcttccacatgtggcttgccaattatcccagcaccatttgttgaatagggtgtcctttccccaccttatgtttttgtttgctctgtcaaagatcagttggatgtaaatatttgggtttatttctgggttttctattctgttccattgttctatgtgcctatttttatacccgtatcatgctgttttggtgactatggccttatagtacagtttgaagtagggta

SEQ ID NO: 870710 - DNA, 629 bp, Homo sapiens
tcttttgagaattatctattcatctccttagcccgctttttgatggaattgttttttttcttgctgatttatttgaattctttgtagattctggatattagtcctttgtcagatgtacagattgtgaagagtttctcctactcagtgggttgtctgtttactctgctgactgttccttttgctgtgcaaaagctttttagtttaattaagtaccaactatttacctttgtttttgttgcatttgcttttggattcttggtcttgatgtctttgcctaactcaatgtctagagaggtttttcttatgttaccttgtagaatctgtatagattcaggtcttagatttaagtctttgatccatcttgagttgatttttgtataaggtaagaggagaatccagtttcattcttcyacatgtggcttgccaattatcccagcaccatttgttgaatagggtgtcctttccccaccttatgtttttgtttgctctgtcaaagatcagttggatgtaaatatttgggtttatttctgggttttctattctgttccattgttctatgtgcctatttttatacccgtatcatgctgttttggtgactatggccttatagtacagtttgaagtagggta

SEQ ID NO: 870711 - DNA, 625 bp, Homo sapiens
ggactaatacatgtgttgtcagtggtaatatccctcttgtcatttttggctgagaacccagaaataaagtcacaaatctatgactatctgatttttgacaaaactgacaaaagcaagcaatgggaaaataattccctatttaataattggtactggaataactggctagccagatgtagaatattgaaattggatctcttccttacatcatatactaaagtttactcaagatgaatgaaagacttaaatgtaaagcccaaaagtataaaaactctggaagacaacctaggcaatacaattytgggcattggaatgggcaaatatttcacaggaatagacaaaggcaccaaaagcgattggaacaaaattaaaaaaatgacaaaaccaatctaattaaactaaagagattctgtacagcaaaggaaactagaaacagaatgaatggacaacctacaaaatgagagaaaatttttgtaaacattgcatctgaccaaggtctaatatccagcatctataagaaacctaagcaaattaacaagaaaaaaaaaaaaaaagcaacttcattaaaaagtgggcaagggagaggaacccaagcaaattaacaagaaaaaaaaaaaacttcatt

SEQ ID NO: 870712 - DNA, 415 bp, Homo sapiens
tgctcaggacctatcacaggaatggggtagggggtagtgaggaagccccttgtgccaggcctgaaatcattcatcaagccctaaatttagactttcaacttaatgtctaaatagagttatacatcgaggaaaagggtctgtatgagtcagagttctccasagatacagaatcaattagatgaagagaggagagagataaagagcagaagagtggggagaggaaaagtgggagagggagaggggaggagttgggggagaggaaaatggagagagagatatttattctaagggattggctcacataattatgagggctgctaagtcccaaatctgcaggtctggcaggtgggctggaagttgttgatgttgcagcccagagtccaaaaacagcctggagatagaattcctgcttcct

SEQ ID NO: 870713 - DNA, 415 bp, Homo sapiens
tgctcaggacctatcacaggaatggggtagggggtagtgaggaagccccttgtgccaggcctgaaatcattcatcaagccctaaatttagactttcaacttaatgtctaaatagagttatacatcgaggaaaagggtctgtatgagtcagagttctccagagayacagaatcaattagatgaagagaggagagagataaagagcagaagagtggggagaggaaaagtgggagagggagaggggaggagttgggggagaggaaaatggagagagagatatttattctaagggattggctcacataattatgagggctgctaagtcccaaatctgcaggtctggcaggtgggctggaagttgttgatgttgcagcccagagtccaaaaacagcctggagatagaattcctgcttcct

SEQ ID NO: 870714 - DNA, 586 bp, Homo sapiens
ttcctcagaatattcctcagaattcctcatccagtaaaaatatccttcaggaatgaaagggaaatagacattctctgatacagaagagctaagagaatttgttaccagagatctgttcaaaagaaatgctaaagaaagctcttcatamtaaatgcaaatggcactggagggaaacataatttcaggatttaaggaaaaaaacacaaatcaaaatatctgtgtaaatataatagactataacttcttagactctttaaaatgtatataatcattgacagaaggaattataacattttatgtgacaactataacattaagtggggaggataaagggacctatatggttgtgagacttctgaattttactttaaatggtaagtattaattctaagtagacagtgagaaattaggtatgtgttatatctttggagtaatcactttttaaaaaaaggaaaaagagatagcctaaaagccaacagataaatctaaatagcataccaaaaatattcaaatagcctaaaagaagtcatgaaaggaaaaatcaaggaaaagcaacaaaaacaaaaaacagaagaaacacacagaa

SEQ ID NO: 870715 - DNA, 601 bp, Homo sapiens
gcaacagatgtgggaatgcagatatgctgcccagactcttaaatcacctggttgctagagatcataacaacattctttgttaaaaacatggcctctctttttagcagggctacgccaggtgagcagtttcaataaaggatgagggagcaggatagaatgagagttgaaaacagtactggctaatgctaggacttccaatttagaaactttgttcatttatggtaatctaggtcaaaaagcatgaatttctggagctggggccaagttgggggcccaggtggcagtgagtgatgggagaaaatgtgcagtcacctcatgtcagtgcccactggggaggggtctgggaagaaggatgggtgcctggtrggtacttttccaccttttatttccagattttgtttttaatctaaacttacaggtttgtattatacaaggacagccaataaaggaagactataacggtgaaaaaacaaaacaaaacaaaacaaaaaaccatgcatttcctcttacccaagcagccacgtaggtacagaataaagctgtgtcaaaatttttggcaccatggaaataatagcagataacatcagtgagaatgtttttt

SEQ ID NO: 870716 - DNA, 586 bp, Homo sapiens
ttgtaccgtactgtacacaacggcattgtgatggtaattgaatagttatgtccatttgtatctaatgagacaaaatgaacaaatcttgccttttccctttttgaaactatctcagaaattcttgaagctccaggttccattgctgtccttcagtgttcaggctggttgaacatgattccagttgtctttgtttctcagccattattgcttagttgtatttattttgtcagtggtaagtggmtagtgtggcttcaactacttttctagtgtgttgctaatggtcagattggaatattgcttgccacaattaaggatgaatatttccagtggacaaatccaagtataacaaaaataaccatacaatgatacacagagattcaatatggaaattagcaacattggaagagtgatttggcagagggccccttttaaaaccccagagttataggaaatagtcctgtcatcaattaacactttttcaatttgttttatgccagacattcttctatgaacttacggaagacaagataaaattcccgccttggtatccacatggaatccaggaaacctgtgcatctgatggttt

SEQ ID NO: 870717 - DNA, 568 bp, Homo sapiens
tgtgagagataactatagggaaaactaatgaagaaggagccattaaggaactttcccagaacctgatcttgacaaggtagaatgaggctgctgactaggaaattcagggtagatggatcacttgaggtcagaagttcgagactggcctggccaccatggtgaaaccctgtttctactaacaatacaaaaaattagcggggcacggtggcatgcgactgtaatcccagctactcgggaggctgaggcaggagaattgcttgaacccaggaggcggagcttgcagtgagctgagatcatgccactacactccagcctgggcaacagtgtgagactccatctcaaaataaataaattaattaattaaataaataaataaataaacaatcaaacagaaataaataaataaaataaaarccgaaaaagttacatgcaatttgtttggctctatttttttgaatttcaaaatgttatttcaggaagataagctatgtatataccagagaaagcataaatacagacacataaaagaaattttgttttaccatttgaaataggttattatcatgca

SEQ ID NO: 870718 - DNA, 670 bp, Homo sapiens
ccactcttacagccacatcttaatttactgtcacctctttaaaaaccctatctccaaatacagtcacattctgaagtagtgggggttattagggctccaacatgggaattatggagaagaaacaactcagctggtaacagatcactaagagcttgggtagctgttaagtgtgagctccttaattgtggggcatgtggggactaccacctttcyttataaagcccaaggactactgtggccacctagagcggctctgcagcatccccagtcagagaaggagagctctgcccctctcatccccactccctccgccacacctagggagctagcctagagaaggtgagcggagagaagaaccctccaagcccgtgaaagccatacatccagcctgggggcagaaggaaagtggggaaaaagctgcgaattgatgtaacattaaaggttaaaaacaaacaagaatgaagccgggtgtggtggctcacgcctgtcatcccagcactttgggaggccgagacaggtggatcacgaggtcaggagttcaagaccatcctggccaacatggtgaaaccccatctctactaaaaatacaaaaattaactgggtgtggtgatgcatgcctgtagtcccagctactcgcgaggctgaggtaggagaattgtttgaacaggac

SEQ ID NO: 870719 - DNA, 598 bp, Homo sapiens
tatagaactttccaagaagaagccaaagagatgaccgtagcactactaaaaataaaatattgtactcagtaattttcacatagttcgatatatatgtttttcttaaactccatttcagagatactatgaattaaatcacaaatgctcgtaataggaaaaaataacattttaaggaaaccattctcccatgtttttyttaatagacataccactgtggaagaattcaggcttctgaattttggttagaaagacccatcctcctattgtccttgtcccactatccattgaaaacagaagaaaatgacagttcgcctgaggctctaaactggaccctaaccacaatcttccttttctcagtttatttatatatttttatctttttgcacaaagaggaaaagtttaaagagataaatggagaagaaatgagagaactgtcagaacgagaatgcagtgttcattcccttcagttagagaccggggctgagcttctctctgggcactattgtgagagtggcagggccaaggatcaccagtgtctgaacccagccctcccctcaccagttctctttgagcgacacattagaaatgagaattgttg

SEQ ID NO: 870720 - DNA, 616 bp, Homo sapiens
tacttaccttgtagaaggtactgcttatggcacatcccattgaagaccagcttcatgttgaaattccttcctcccctggcattgccactacatcctcctgattttccattcttctctattcatctccttgcttgggaagttttgcttttctcacatcttacccttagatccttccttttcagccctcttcttttctcactctacttgctcaaggaggatggttcccaagcctatctccagcagtgatctttctcctaagtgccagacatatattttctactgccagctggaaacctccccttggatgttcttcaggcatttaaaactcaacacctacttttccctccttcctccccatctgtcttggtcaatggcattgccatcctctcaggctaagagctcagggtcatcattcacttctctctgtttctgacrctcaactccagtctctgtgtcctgtagtgttcacctcttaaatattttttctctttccaaaacctgctgtcttggtttaggtcctttgtattcatcaggataattaacactgctgttatagctgtcaaactcggaactctacatggctgaaaataacaaaggcttgttgttatggactcac

SEQ ID NO: 870721 - DNA, 653 bp, Homo sapiens
aataataccacttattttccttctctccttttagccaagtaaatatgaacttctaattgaaggttgagaatgtttctgaagatacacattttcttgagtagtatgtcatttaccctagagaaacactcttaccatttcccagcccgtgctggtcttattacacttttaccaattcataacagattgttagagcrtattatgtggataaaattagtaagatatttaaaataaaatgtcatacacatgaaagggacactatagcaaaatataagacatttgtctaatggtatggtcctggaagcttgtgaagatgagagggtaaattttttttacatgagaggataggaaatctaggtcttgcttgctaatgagataaaacttctagtttggatttgttatgattacctgaaagatgagactattaataaataaataaaaattgagtgcaagaacctcagtagaatggtgggaaaattattccatattatgactatgtctggatacatatatatatatgtatataaataaatatatatatatatatatttttttttttttctgtagggatcttaatgatactacttcaccttaaaagccaccaggacaaatgagcctgcctttggagaacataaagtttaccatatgtaacacag

SEQ ID NO: 870722 - DNA, 642 bp, Homo sapiens
tgcatttacaaaggaaaagacagaaagaattaactgcataaaaattaaattactcttctgtgtaaaaataccataaagacttagaggtcaaatgtgagactggaaaaaaatgtttgcaataaatataatgacaaatagtaatgactaaaaagcccatataaaaccaataattcatccattcatccattcaacaaatatttattgagcaactactctttaccaagtgagaatacagtagccaatagaacaaattttatttctacatgaagcttacatttcagtggggcagactgaaggtggggcataataaaaaaaataattcaagagataaaagaggccaggcatggtggctcacacctgtaatcccagcactttgggaggctgagatgggtggatcacttgagrccaggagttcgagaccagcctggccaacatgatgaaaccccttctctaataaaaatacaaaaattagctgggcatggtggcatgcacctgtaatcccagctacttggaaggccaagggaggagaatcgcttgaacccgggaggcaggggttgcagtgagtggagactatgtcactggcactccagcctgggcaacagagctagagctagaccctgtctcaaaaaaaaaaaaaaaatg

SEQ ID NO: 870723 - DNA, 595 bp, Homo sapiens
aagtgtccatgtggccagatccatgtgctcactcaagttctgagacatctggatgacgcctgcaagattttggtgctaagtgcccatttattcatcataaaatcaaatttaccatgttataaactgaaggcagggctctcctttatggccagatctaagacaatgaattcaaagaatgaacttttaccttcccaggtgtaggtttgagacccggcctaggaaacgggtgtgccacaccaaggtgaattaaaaactgccagccagctaaaagttgmtcttcctaaaaaaaaaggaaccaagatgaaattctaggctcagagatgaagaactggaggctttgaaacaaaggggtaaaactggttccagttgcttcctgtaacatgtcttctttcccttgtggaaaataatgatttccaaacacaaccgtcttttaaatccaagaacttaactgagtatttgtttagctgttgtctgaaaagggtttggctttcacacatcacttacacccgtggattcaggagagactaaacagcctattcaaatatcttccaagttatgaagaaatcgatttcaacttaatgactttcaacccgtc

SEQ ID NO: 870724 - DNA, 595 bp, Homo sapiens
aagtgtccatgtggccagatccatgtgctcactcaagttctgagacatctggatgacgcctgcaagattttggtgctaagtgcccatttattcatcataaaatcaaatttaccatgttataaactgaaggcagggctctcctttatggccagatctaagacaatgaattcaaagaatgaacttttaccttcccaggtgtaggtttgagacccggcctaggaaacgggtgtgccacaccaaggtgaattaaaaactgccagccagctaaaagttgctcttcctaaaaaaaaaggaaccaagatgaaattctaggctcagagatgaagaactggaggctttgaaacaaaggggtaaaactggttccagttgcttcctgtaacatgtcttctttcccttgtggaaaataatgatttccaaacacaaccgtcttttaaatccaagaacttaactgartatttgtttagctgttgtctgaaaagggtttggctttcacacatcacttacacccgtggattcaggagagactaaacagcctattcaaatatcttccaagttatgaagaaatcgatttcaacttaatgactttcaacccgtc

SEQ ID NO: 870725 - DNA, 635 bp, Homo sapiens
tagtaatgagcacacctggcacccagattttggtttctaaataccattctccactaaaagggtttcttggagaagtggctgattcaggactggagcaggaaaaatacaaggtaaatattgagcattttactgtgcaagaaattatggtgatacagcaaaasgatgcaggtgccattttaaaggaactcccactgcctaattgagggggcaatttgagcattaaaataaataacagtgttaatagattataatccatggaatgatatggaaaatgattagttgacagaaatatttaaaaagttttatgaagaatatgatctatacagaatttcaaagtatttctctacaaaatacttcttaaatacaaatggaaaaagtgcaactttactgtggagaaggctgaataataacacctcagtcaaatgagtaaagataatcagtaataaggaaaatagaaattgtgaaccacctgatagagtgcaatgagttgtccataatatttctgctctcccactatagctaaacatggacctcatgggagacagtaagggggaaaaaatattaaaaccagagcctaaaataaggtgacagacaaccaagctaatcagctatgagaataaatgcaagtaggttaa

SEQ ID NO: 870726 - DNA, 590 bp, Homo sapiens
ctatgtgtcattttaaggatataccattattattattattattttttttggagagacagggactggctatgttgcccaggctggtctcaaactcctgcactcaagctatcctccagcctcagactcctaaagtgctgggattacaggcatgagccaccacaccaggccaatagaccatgatttctttaactgttctctttatgtaggaattcaaagttgtttcaaatttttctattataaataattttcaatgaatatcttcgtgtgtaaattttccttgtgttatttcttagaggagatttccagaaaggaaatattttagtttaagaatatyttttaaagatttgtattataatttccaaaatgcttttcataaaatttataccaaactaaattccaaccaactaggtatgagaataactattacaagacccttttgctagctctgaaagtgtcatttaaaaaaaaaatctagataattgtatcagagacattttattatagttttatttcctttttcattgttattaatgaccttgaagttgtggcccatttgtgaaactctactactttttgtttggtacactgtt

SEQ ID NO: 870727 - DNA, 703 bp, Homo sapiens
ctacctgactgtgatgctgactatgctcctgacatcctaaattttcttgaaaacacaggaccatactctcaatggagctaatttggctccacttcctcctgttctacctggtcacactgcccattcagcctaggattttggctttaggacactgtcccattctggacaaacctatcagcaaacactcttggcttgttctctacaaagatacatattacagtaatactctattttattttttcttgaacttcacacctctgagaatagagttttttccagtctttcaaaccactgaaagatatcctaattacatgagagcaaatagttaaacttgaatagttaaacttggaataaagagccatgtgaaaaggctagagactgaattctagctttagcagaagagttaggctgaaccccatgtacaccctctgcctggcaaatacttcattaatatttccttcaggattcttctgcattaagttttcttcrtgtgtatgccaatctccataattaacctacaccactttgataaataaaaaggaagtcagctcccccttatccagtcccctactatatacacgtttttatggcctgtctaatcccattcattttgttatggttctggcagagatatcagtgtctgggaaaataaattatttaaaaaccagtctgagactgagtcaacacaacatcaaaagcatgt

SEQ ID NO: 870728 - DNA, 666 bp, Homo sapiens
cttctatcttgatctggaactgctacatctcctgcctgatatatattatggttaggcttataagccaatacttcttctgcatgggtcctagctgttcccaaaatgtgttgtttctcttgtactgtacaacacagagacaacaaaacatgcagatcytgccaagtgaaactataggtcagagttcatttctcaacccgatttataaattttcctggaccttcagagaaatgaccaaactctttacattcagccaaatcagacatagtaaaggggacttgtactcttacagtgtcttcttccctttttgccacctctctaagtggacaaagatttccttttggaagtttataagaggctccactacaagtagtactcacaaggctaggtatagagtggggttaggagtagggacaaagggttctcagtagaactttcatgtagactagaaggagaaagggctgatacatctgaactttcagagctgaaagaaggaagttcttctccacacaaaaatgccctctgatctggggagatggggagggggaggcttgcaccaagggatcatctagtatgtctagttctttttctttctttcttctcatcaaacatgcacacacctgctgcagggttttatcttgactgagcagcaaaaacggttgaacatat

SEQ ID NO: 870729 - DNA, 699 bp, Homo sapiens
tatatcataacatggaatccaacaaaataaacgttgaataaggcaaaggaaatgaagagggtgtagatgggaacgaccagggcaagcaggttctgggcaatagtggcagtgtggattggacaagcaaagccaatttgccyaaatccaagaaaggaaagaagtgtctaaatgaaacaaaacagcaagaagaaaattcccctgatttccatcctaatgcttctagatcacatctgcaacaaaacgtaaccacatatatctaaacttattgctcatagttgttaaataccaaatctcaatcagcaattttagagacagagccttcaatgctttttgttcacaatgtttcacaagcaaacagatggaaattgggaggcccactggagaagagtaagttaaaatcccaaagaccagttaaatgaagtctcctgaaaatgacagtgaaactgagacagtgaccaagaaatttattcaggcagcaaacaggacaagcaagattaatacaaagagcatagccgttaacatcccatggtgccaaactcgtttttcgctgagagggattttaatgagagggacatctaaccccctaaatcttaggaacgactctaaccttcctaagttggacctcaaaccaaggttagtcaagcatcctagccttttattgagaggagcctttaaccttctcttaggagaaactctaac

SEQ ID NO: 870730 - DNA, 699 bp, Homo sapiens
tatatcataacatggaatccaacaaaataaacgttgaataaggcaaaggaaatgaagagggtgtagatgggaacgaccagggcaagcaggttctgggcaatagtggcagtgtggattggacaagcaaagccaatttgcctaaatccaagaaaggaaagaagtgtctaaatgaaacaaaacagcaagaagaaaattcccctgatttccatcctaatgcttctagatcacatctgcaacaaaacgtaaccacatatatctaaacttattgctcatagttgttaaataccaaatctcaatcagcaattttagagacagagccttcaatgctttttgttcacaatgtttcacaagcaaacagatggaaattgggaggcccactggagaagagtaagttaaaatcccaaagaccagttaaatgaagtctcctgaaaatgacagtgaaactgagacagtgaccaagaaatttattcaggcagcmaacaggacaagcaagattaatacaaagagcatagccgttaacatcccatggtgccaaactcgtttttcgctgagagggattttaatgagagggacatctaaccccctaaatcttaggaacgactctaaccttcctaagttggacctcaaaccaaggttagtcaagcatcctagccttttattgagaggagcctttaaccttctcttaggagaaactctaac

SEQ ID NO: 870731 - DNA, 687 bp, Homo sapiens
tcttaaggtattgggatatcaggccactcccaagtctgggtctgtttagtaaatgtcatcaatctgttttcttaaccgtaaacatctagaggccaggactacctaactttctgggaatgcagcccagcaagttccaacctcatttttcctcgccctcactcaagatgcagttgctctggtttgaatgcctctgacacaatgacagtttttatgacttaaaatgtgaatttgtattataaattttaaaaccctagtagaaaaaaaaggtcttggacctatttttgcccctcagagctgaagataatggcacttataacaaatatttgtgcaaaaaaaaaawatatatatatgaaaaacacacaggggaattccaattttctgtccagcatataaagagtctgaagtcatcactttcatcctcacaacaacaacaaaaatctgaacaaattgaaaatcaaccactcttcttagatcctgcagagagctgaggtcacagggcaaactattgctcccaacatttgagagagagacaggtgaatacagaaaatcacggcttacctgagaagaagcccaggagccactagagttagtacaagagtaggaaaacttaaattgtaattgaaaaaactgctagaacctaagtatgaactagcgtgagagtcaaaaatttggtgaggaagcagtctt

SEQ ID NO: 870732 - DNA, 647 bp, Homo sapiens
tcttcctcctgctccttccctgcctggccatggcttgggcagtccctgagttcttggatagctccatatcccactggagcccctctgattgttccttcaggctagagggacatagctagtccctcggtactgccccatcccttggtaattcccttgcttctacccaatttgtaggcaagcagagtgggattcagagaagttctgtgtctgctcaagagcacacagcctagattcaaatccattcctgtttgattctggagcccttgcttaaactcttttgctgtattacttcccaattctttggagactgttaagctgcagtaaacaccagaaaggccttgagattattcatttttatatttttctagctatatagaacagtgaaaaaaataaaaattctaatgccaaatcattacaatttatagtcacattttcacagtagatcttttttggttgtctctctcattgtagacagattatttgtatccygtgagattttattttgtattatctatcaatacctaagatatgatgtttagaatgttatggaatgtcataatttcatgttatatatcaggaaaatatctgtctgatagaagggtgaccaaaatcaggagggctgcatgaccagataaattaagtgaagc

SEQ ID NO: 870733 - DNA, 532 bp, Homo sapiens
agctttcatgaaagagattagtgcacttaaaaagagacaggagagcttgcttcctctctctccctccaccatatgagggtacaacaagaagacagccttgtaaaccaggaggatggctctcaccagacaccagatctgctggtgcctccatcttggacttcacaggctccagaaccaagagaaatcagtttcttgtttacgccacccaacccatgatgtttttgttataacagcctaaactgactaagacaacacctrtatcagagagttattataaagaataaatagcaccaggtaaagtacctagcaagtaacctagcacatgttaaaggctcagtaaatgttacctggctgctgtttgtgtttttatttttactattttttttttgaggcaggatcttgctctgttgcccaggttggaatgcagcggtatgatcacagcttactacagcctcaaactcccatctcagcctgtcaagtagctgggaccacaagcatgaaccactacatctggctaattttttagtttttt

SEQ ID NO: 870734 - DNA, 614 bp, Homo sapiens
agtgtttttttctgaatggagaaaaaacccagagatatttttttaaaaaattaaaactaaagccaaagaaggtacaagttgactagccttgaaaacttcttaaaacattatttataaaaaatgtctatcaaatcatcaaaaattagtrttctctcttcttccccaactagaaatatgcagaaacatcaataattataatttacatggcttgcctacttgccctcaataatttttggaataagatgaagtaaatatattaagttaaatgatgttaactttatttcttaccattattacaatgaataagtcaacttctaaaggttaaaaattaaaacaagaaattaagggtattctcactttagtataacaaacagtcaaataaaatcactccctcatccctgctcccagctaaattacatgctgagctggcagtggaatctgtgggtctattgaggcattgcttcagtttgtttgggggttggagggaagaggtagaatgcagagtcagcctaaagataaacactgatggttccaatggcactgagaaattatgagaaatgccatgacaagaatagaaaaataatgcgatagtgagtgttgttaactaatagtga

SEQ ID NO: 870735 - DNA, 614 bp, Homo sapiens
agtgtttttttctgaatggagaaaaaacccagagatatttttttaaaaaattaaaactaaagccaaagaaggtacaagttgactagccttgaaaacttcttaaaacattatttataaaaaatgtctatcaaatcatcaaaaattagtgttctctcttcttccccaactagaaatatgcagaaacatcaataattataatttacatggcttgcctacttgcccycaataatttttggaataagatgaagtaaatatattaagttaaatgatgttaactttatttcttaccattattacaatgaataagtcaacttctaaaggttaaaaattaaaacaagaaattaagggtattctcactttagtataacaaacagtcaaataaaatcactccctcatccctgctcccagctaaattacatgctgagctggcagtggaatctgtgggtctattgaggcattgcttcagtttgtttgggggttggagggaagaggtagaatgcagagtcagcctaaagataaacactgatggttccaatggcactgagaaattatgagaaatgccatgacaagaatagaaaaataatgcgatagtgagtgttgttaactaatagtga

SEQ ID NO: 870736 - DNA, 566 bp, Homo sapiens
aagaaaggcaagggggaaatctgcccatatgatccaatcacctcctaccaggacccttccccaacactcagaattacaactaaaaatgagatttgggtgaggacacaaagccaaaccatatcagtgaccctcccagctgagtaaaatggctttttggacttaaataggaaaaatctgtttctacctgctagctctttattgcagtgagggaatacaactattgattaaggaccacttaatgagatcattttatctgtggcctttaattttctgcaaagcaacgtagctataattttaatcaacactacctctcatcaytaatgtcaaagataccataatttgattagattaaatgtgtaaattgaagagagaaaactgtattagtccattgctgataaagacatacctgagactggacaatttccaaaagaaagaggttttttggacttacagttccacatggctggggaggcctcatgatcatggcagaaggcaaggaggagcaagttacatatttggtggatgacagcaggcaaaaaaggagcttgtgcagggcaactcccatt

SEQ ID NO: 870737 - DNA, 603 bp, Homo sapiens
  misc_feature 326: n = A,T,C or G
aaatgtaatttttgaccaattttgaaatggtcattgaaattaaaatacattcttaatttgaaacccttttttaatggaaccacagaaaggaatattgattagggcttattagaaattgagtttcctattacattccattgcactttaataagcatcctcataaggctttccgggatgcagagtctttccattagagatccgcatggagaagtttatcaagggaggaatttgggatcacccctattgaagagaaagaatggaacagaattggccagagggaaaaattagataatgatacgtctcagtgaaggtctcatatgacccanaagaaaatacaatgttagaatagccttttagaattatcctatggaagtcattggatggtagcttccttgagatgagaccatcactttgggagcagcatctctcttcagccagataattacagagaatgkggacagttgagggctctctgctgacattctcaactttggtcctgaaaatggatgtggatggcacatcacagtgttgagtattgtccactctctgtgtatctcactaactccaccacaattttcgaaactcaaacttgtaagaggaagt

SEQ ID NO: 870738 - DNA, 597 bp, Homo sapiens
gctgtgagctgttagtggcaaacattcctggcagctggggaaacgcacgcccttgccctgagggtagacccaggcagagtaacacagcattcactgtcatctgcttgcatctctttaaaaccttgagagttcctaaaaattcaacggatgtttttgtacttaatttatttcttgtatgtgtctcaaccacagaatctcaaactgctaaagaaacatttccttagcatccagtagccatactgaatccggaagcgtgctctaaatattagtataaacaaattagattttcctctcaaacatgaagcagggggccgggcgcggtggttcacgcctgtaatcccagcactttggaaggccgagagggrcggatcacgaggtcaagagattgagaccatcctggctaacacagtgaaaccccgtctctactaaaaatacaaaaaattagccgggcgtggtggcaggtgcctgtagtcccagctactcaggaggctgaggcaggagaatggcgtgaacccgggaggcggagcttgcagtgatccgagatggtgccactgcatcccagcctgggagacagagcgagactccgtctcaaaacaa

SEQ ID NO: 870739 - DNA, 604 bp, Homo sapiens
tgtccaggaatttatccatttcttctagaatttctagtttatttgcatagaggtgtttacagtattctctgatggtagtttgtatttttgtggggttagtggtgatataccctatatcgttttttcattgtgtctatttgattcttccctattttcttctttattagtgtagatagtggtgtatctatttcattaatgttttcaaaaaccagcttctggattcattgatttttctggaagagtttttcatgtctctatctccttcagttctgctctgaccttagttatttcttgtcttctactagcttttgggtttgtttgctcttgcttttctagttcttttaattgtgatgttagggtgttgatttgcracctttctacctttctgatgtgggcatttagtgctataaatttccctcttaacactgccttagctgtgtcccagagattctggtacattgtctctttgttctcattggtttcaaaaacctcttcatgtctgccttaatttcattatttaaagtggcagtcattcaggagcaggctgttcaatttgcatgtagttgtgtggttttgagtgagtttcttaatcctgagttctaat

SEQ ID NO: 870740 - DNA, 694 bp, Homo sapiens
cttgcgggatctcttctccacagagtttagcattcatctacacacacacacacacacacacacacacacacacacacacacacacccctcagaggcttcaccctggttttggaagaaggaaatagaaatggtagttgaagaataaagcaagcctctgatttctactcagtatgaaagggagatgatgaggagggtcctgaactattggtaaccaggactgaggggcagggcatgggcaggggctttagccaggagaaaagccgtcctgtccccatctctgcctccctgctctgtcagctcccactgctgccctctcttcacctaccaactacttccagccccctgcccagrttcaacactggagtaacttacaatgtgaagattctggagttagagagaaaaatgtgtgagataaaaaaggactgggttgatttagctaaaagtaaagtttggtcgatcaagaaagaccacaagcactaaatgtcttgattttaaagtctgtttttcaggccaggcacggtggctcatgcctgtaatcccaggactttgggaggccgaggcaggtggatcacttgaggtcaggagtttgagaccagcctggccaacatggtgaaacgctgtctctactaaaaacacaaaaattagccaggcatggtggtgcatgcctgtaatcccagctacttgggaggctgag

SEQ ID NO: 870741 - DNA, 495 bp, Homo sapiens
tattactttatattaaacatcaattattacctttatgatgttcatgcatcataaccatatcagacttcacgggaattggaatgttggcctctggtggtatggttctgaacatatctggagctacattctgggtacaggtcatgaaagaaactgcatgcttggcttccatgtaatacataatgtataagttgcacatttcatcactagacgtgccactgcaggcaaaaaaaagatataacaaatcaactattcacataaaacacatgcttaatgcaagaaaaatgaagccmttagatctgccagcaatggattcaaaggtagaaatattgtgcatttattttatagctttcattaaaacccatcacagttttcaacatcaaaagcacattgtcaaaggcatatttccacttaacaatggagtgtcagtttgcaggcacaccatgaacactactaaataccactgatgaaaatggcattttagtagatgagggaata

SEQ ID NO: 870742 - DNA, 647 bp, Homo sapiens
ccttaattgtccaaacagaccacctctggggatctattcgtaaaagactcgttagaagtgcagactcatgcatttgagaatcactcagggaaatctgaagatgacctgtggtgggggtgtaaatggatacttaaatgtgtcttgtgattgtgtgagagtgtgactgtgtgtttgtgtgtgtgctgtcatctgtggagtgggggatcctcttttgccttgagaaagctcatctctgtccacttactctgggctctaccatctgtgccttgtatccagtagaaataaaacagtttgcggcagaaatggagttttattttattttactttactttttattaggattatttgtagaccgggtctcactctgtcactcaggckggagtgcaatggcacgatctcagatcactgcaacctgtgcctcctgcactgaagccatcctcccacctcagcctctggagtggggagatcccacacctgtgtaatttttgcattttttctagagatggggtttcctcatgctgcccgggctggtttccaacgcccgggctcaagtgatccacccgcctcagcctcccaaagtgctgggattacaggtgggagctactgtgcccggccagaaatggagatttttgttcttcttttgatga

SEQ ID NO: 870743 - DNA, 678 bp, Homo sapiens
agctttgttcttttgggggaatagccaggttttgcagaatatgggcaccaaattttgggatcatagtaaagccctgtatgaagcaacaagggggcctgaaaatgagctaatggaatggacctcggaaatgagagaaacctttgccaagttaaaaataggctctcacccagcttccgctcttggcatccaaggcctaactaagcccttctccttgtatgtagcagagaggaaaggcatagctgtagtagtactagcccagaaattaggatcagaacacagatcaactgcctacttttcaaaaaagctggatggagtggcctcgggatggccaagtttcccgtgggcaatcccagccactggtattttagtggaaggagccactgaagtcaccctaggtcaactaccagaagttctaacccctcatcaggtgaagtcagtcttagaaataaaaggatacctctagatgatggagggaagtttaacctaataccaygccacactcttagaaaacccagatgtaacccttgaaacctgtagcaccttgaatccagctctgtttctgcccacaggcccagtaactgatcattcctgcgagcaggtcattgcacatacattcatatgttagccagcctaatttaaaagaccaacttctcccagattctgaggataactggttta

SEQ ID NO: 870744 - DNA, 615 bp, Homo sapiens
tgctagttagaagatataatggtgtaagactttaggcttcagtctaaaccactaagaatccctaaatgttaatatcccaccactgttttattccataagttcttaactgtgaagtcttgacaggctggcttacttccataattgtgaggtacattagaaattatttattgctaataatagatagggacaaagtctggagaatattcattcttttgaaatctgctatgttgggtttgctgcatccctataatagcactctcattctcattcatttaaatatggttaaggatcytgaaaaaattctgggtataacccagaatctatatgttctatgtggtgatctttagtaacctgagtcagtaaagctagagtttaaaatggaattgaggaccctcgtactctttaaataaaaataggtgaaaatgctcatatgaaagcaggcagacctccctctgtaactgtgctcccaaagtgagacaggcaccaggaacataggtactaattttgccatatatacacatatatatgcataaataaatatatatatacacatacatatatatgtgtatatatatatatttataattagcttttgcaggtcacacaaaatgattt

SEQ ID NO: 870745 - DNA, 615 bp, Homo sapiens
tgctagttagaagatataatggtgtaagactttaggcttcagtctaaaccactaagaatccctaaatgttaatatcccaccactgttttattccataagttcttaactgtgaagtcttgacaggctggcttacttccataattgtgaggtacattagaaattatttattgctaataatagatagggacaaagtctggagaatattcattcttttgaaatctgctatgttgggtttgctgcatccctataatagcactctcattctcattcatttaaatatggttaaggatcctgaaaaaattctgggtataacccagaatctatatgttctatgtggtgatctttagtaacytgagtcagtaaagctagagtttaaaatggaattgaggaccctcgtactctttaaataaaaataggtgaaaatgctcatatgaaagcaggcagacctccctctgtaactgtgctcccaaagtgagacaggcaccaggaacataggtactaattttgccatatatacacatatatatgcataaataaatatatatatacacatacatatatatgtgtatatatatatatttataattagcttttgcaggtcacacaaaatgattt

SEQ ID NO: 870746 - DNA, 625 bp, Homo sapiens
agtgggtataaggcacagacttagtccttaattttgagtcagtataaatttgaatgggaaaggaggatatgaattggggtctagtctggtgtagcaaaagccttacacatagtaagtcctataatgctcagtcagtttgatttatttttaaagggagtgttatggacattgtagagggcacattctcataagacaatgagtttgtaatatgttaggtggtgatcagagctgagaaataagaaattttggtaggaggacagggagtggagggtaaggtgttgttaagtaggatatccaaagagagccccccyccggccccaccctgcttttttgagactgtcttgctttgtcacccaagctggagtgcagtgtcctgaccacgcctcactgaagtcttgacctccaggactcaagtgatcctcctacctcaccttttcgagtagctgagactgcaggtgtgtgccaccacacttggctaattgttttgtttttttgtagagataggatcttgttatgttactcagcctggtctcaaattcctaagctcaagcaatcctcctgccttggcttcctgagtcgctgggactgcaggcaggcaccatcatgcccggctaattttttgaag

SEQ ID NO: 870747 - DNA, 585 bp, Homo sapiens
ttcattttgtttctttagataaaaaataaatgtaaatagaatatatcttcatgtttagctcattttcccagctaaataattgccttcttaagcacatgggactgccttaatcatggattaattcatcatggcccaataccacttttgttgttgtatataatakaaattaaacatttctcccaacacctgtggatatgtgtattttagcatgatcagtagaaatgacgctgtgagtattttaaggagttttgctcagagtcgccctaggaacacagggtaatagcactgtcaggattcccagtgaatctagcctgattcctcctgtcctggaggtggatgccagagaaaggcttgaggctggcaggcagtgaatcaaagcctcgccacagagcggcacagcatatgggtacccatatgtccgagatcctggctgaactccttagatttggggataagaaagaaagtgcgggcggccaggctttcctctagggccagtggcttctggtaataggctttgagacagtatttgtacaactctggctacataacggatgtggaaaccaggtgtgatttatgagcttccga

SEQ ID NO: 870748 - DNA, 701 bp, Homo sapiens
accaaactaattaacattaatttttatgtaatcctttgaactttgtctaacatgcagttcttaataattgtggttctcttatttatgattcccaatacttagttgtgcgagaggatttgagagagaaacagggctgtaagaggcagaattgcagcagatagcctgataagaggagaggggaggattgctagactcaaagaaacaaatctatcttacatcattacaaaataacagatgtttctrattacaaccttgtgtcttcgagaacaggttaaattatattgacagtgctttgtgacatacaagccttttgagaaggattttctacaaaatgttcaaaatgaagtcttggtgtccaaaagcagttaaatattgcttatatagggaagtcatttatgtaattcttataactgtgaagttacaataaatcctttttccagagtgagtgtaaggttggattatgtatataaatagtgagcctgttaatactggctctgttgcctcagtaaactgagaagaataatactactgcacagaggtgctgttggatatttgaaggagttgtggaaaatggaaagttctatatagttgtaagctatcaagatgatgatagttagaaaacgtgaatggacacattctcccaagaagagctctccctgtggagatgagctacggaaactggaagagctcaacattaaaga

SEQ ID NO: 870749 - DNA, 662 bp, Homo sapiens
cagacgtgaatccatctcattgtggatttttctttgatgagataatttttattactgattaagtgctattattgttctgttcagattccttactgctttgtaattcaatcttggtacattatgtgttaacaaaatcatcaatttcttctagattattcaatttgctggtgtttaattgttcatcatattctctttggttctttcatgctgctgaggtattagatgaaaaagtcttctttttatttctgattttacctatatgagtcttccctctttttgtcttagtatagctaaaagtttgtcaattttgtcttttcaaaacaccatctctttgtttccttgattttttttcatcattattttagtctccaattgcattcatttctgctctgatctttattactttattacttctaataatttggcatytagtttgttcttattttttctagttccttgaggaacaccattacattgtttatacaatttttttcttttatgatgtaggcattttgtctttgtcatttcccattaattataacaggatactagaaactggataatttataaagaaaatgattttttttctcacatttcaggaagttagaaagtcccaggtcaaaagggtagatctggtgaaggcctttttttctagtgaatac

SEQ ID NO: 870750 - DNA, 591 bp, Homo sapiens
ttcaagagcatataaaaagatattgctccttaatatactgactcctctttttcctgttgagagttacagaatatttccagagaaattcctctgatataattttttttttctccagctattggttcctattcacagtatgttgtttccctacaggttttctgggttttaatgtgagctactcattttcccttgaacttcaattgtcggaattctttaaggcctgaatgaacttgaacttcttgagagaaaatgtgcatttatttctgccaattttctaactacattataatcagaaaatattttaaattacacatgtattttgatgttttcaaagaatatatacaggttgtataaattaacagtgacaacaagagaaaaaaactctgaaaaccaatttgtgagtactcagttaaagaaaatctccatgctatgttattctaatgtcayggcaatcatttttgctctttatttctctgtagcaaagtttttcttgttcagcttcttcctaggtgtgtgactgtttctttcttgggatgaccttaggttttatctcctatcccttataacttgtttgtgagtagaaaaattcaa

SEQ ID NO: 870751 - DNA, 485 bp, Homo sapiens
ttatgctggtgtatgtactttccaaagttagtaaacttacacttaaggttatatattttggccaggcgcggtggctcacgcctgtaatcccagcactgggaggctgaggcaggcagatcacgaggtcaagagatggagactatcctggcgaacatggtgaaaccccgtctctactaaaaatacaaaaaattagccgggcgtagtggcgggcgcctgtagtcccagctacttgggaggctgaggcaggagaatggcgtgaacccgggaggcggagcttgcagtgagccgaggtcccgccactgcactccagcctgggcracagagcgagactccgtctcaaaaaaaaaaaaaaaaaaaaaaaaaaaaaaaaaaaaaaattagccaggcgtggtggtctactaaaaatacaaaaattagccaggcgttgtaatctgagctactcaggaggctgaggcaggacaattgcttgaaccccagaagcggag

SEQ ID NO: 870752 - DNA, 610 bp, Homo sapiens
gggcaatcaggcaagagaaagaaatagagtgtattcaaataagcacagaggaagttaaactgtctctgtttacagatttcatgattctatatgtggaaaaccccatcatctcaatccaaaaacttcttaaactgataagcaacttcagcaatctstggatacaaaatcaatgtgcaaaaatcacaagcatttctatacatcaacagtagacaagcagacagcaaactcatgaatgaactcccatttacaattgctacaaagagaagaaaataccgaggaatacagctaacaagggaaatgaaagacctcttcaagaagaactaaaaccactgttgaaggaaatcagagaggacacaaacaaatggaaaacattccatgctcatggataggaagagtcaatatcatgaaaatggccatactgctcaaagttatttatagattctatgctattcccattaaattatcattgacatttttcacaaaattagaaaaaaaaaactacctttaaattcatatggagccaagaaagagcccatatagccaagacaattctaagctaaaagaataaagctggaggcatcacactacctgacctcaaactatactgcaa

SEQ ID NO: 870753 - DNA, 458 bp, Homo sapiens
agacttaagtaaccaaaacagcatggtactggtataaaaacagaccgtggaccaatggaacagaatagagaaatcagaaataagaccatgtatctacaaccatctgatttttgacaaacctgacaagtaatggggaaaagattccctatttattaaatggtgctgggagaactggctagccatatgcaaaaattgaaagtggaccccttccttacaccttatacaaaaattaactcaagatggattaaaaactttaaaaccccaaactataaaaatcytagaggaaaatctaggcaatatcatttaggacataggtaccggcaaagatttcagcacaaaaatgccaaaaccaattgcaacaaaatcaaaatttgacaaatgggatctaactaaactgaacagcttctgcatagcaaaagaaactatcatcagagtaaacagacaacctacagaatggg

SEQ ID NO: 870754 - DNA, 651 bp, Homo sapiens
tacaggatgtaataagagctgtgtagcaataaagggtcatttaggtcatctattggactgaacttacattttaacaattgtgggtgagatgcattcttaacaatcttgaaataaactcagctgtatttgatatatggggaagccacagtaggtggtatatattggagtggctacaggcatttgctgggggtgttttattttgcacgtgcatggaaagctcagagcaaatgcagtttgtattccaaaaatgacattatatagctttacaagaatatggtccttaacatgaactaaggcatcttttgtgcttcatatttagtatttagataaataagttaattttgaaaaatgtagtatrgtttttgtttgtttttttgttttgagacggagtctcactctgtcgcccaggctggagtgcagtggcgctatctcggctcactgcaagctccatctcctgggttcataccattctcctgcctcagcctcctgagtagctgggactacaggtgcccaccaccatgcccggctaatttttttgtattttgtttagtagggatggggtttcactgtgttagccaggatggtttcgatctcctgacctcgtgatccacctgcctcagcctcccaaagtgctgggattacaggcatgag

SEQ ID NO: 870755 - DNA, 666 bp, Homo sapiens
ggtagaagttctgctcagaacttaattctcaattgtttacttcaatctttgccttccagagagctctacatttgaatagtggatatgtgtgtagctattgatgggagtgaactttacacttacttggttgttgttctttgcatagagttctcacaggtacttttattgacagtacagagtaggggaggagaattgtgggaagagagtagcattaattggcagagcaggaatagaaaaatcctaggtctgtgatcatgctaatgatgagccccccagctctaccatgatgttatgagctcgttggagttcatttttcaactgcagagtgtttcaagagctcaagatattctctagtgagagagaaaatttctcctctttttctcttacaatcacataggttagaaaggggaatttagtaaaccgagattaaccaaaaatrgtgaatattcatagaaactgagaatcatgaatggtggaaaagtccaggcttataattaattaatatcaatttaccatctgttccagattgactaacccatctggtgtctgctgccagctaggatcaacacatcttccagatgcctctgctgagtgtattattaaagtttgtacttgatttaaaaacagatgtagaagggcaaagtatagtgtttaatcacaattaaa

SEQ ID NO: 870756 - DNA, 594 bp, Homo sapiens; identical to SEQ ID NO: 869906

SEQ ID NO: 870757 - DNA, 672 bp, Homo sapiens
gtatgatactagctgttggtctgtcatatatgacttttattatgttgaggtatgttcattccatacccagttttcaaagggttttttattattaaagaatattaaattttatcaaatttttttagtataattgaaatgattatatggattttgtccttgtttttttttttttttttttttttttgagatgaagtctccctctgtcacccaggttggagtgcaatggtgtgatctcagctcactgcaacctctgtctcctgggttcaagtgattctcctccttcagcctcccgagtagctgggattacaggcacccaccaccgtgactggttaatttttgtatttttagtagagacagggctttgccatgttggccatactggtttagaactcctgaactcagatgatctgcccacctcggcttcccaaagtgctggaattacaggcgtgagccattgtgcctggycccttcattctgtttatgtgatgtatcacattgattgatttgcatgttgaaccatccttgcatccctgggataaatcccacttggtcattatgaattacctgtttgtgtgttgtttaattcagtttgctaggttttttgcaaatttttgcatcaatattctcagatatgggcctgtagtttgcttttttaatgtgtctctgtctggt

SEQ ID NO: 870758 - DNA, 595 bp, Homo sapiens
gctattgccagacaggattagggtttatttgcagttcacgtcacaaaattaaagtaagaccatcaacatggccacattgttttctccagttacactcagctgcactgagagttggatctaaccagggttgtgggttttgtcaaatgaggacaatgaagcaaaaaagggataarggagttaaggatgtgtgcaagggggtgagtaaccataaatttaagctggttaagtagggaagagaggacatgaagtagatgatgggcagtggcagagtagcagaataatagataagaggtcctagagtcaaaagattgttggagttagtgctaaagaaatgagctggaaagataggaggcatggccagaaagaggaatgaataaacaattaggaaggagttacagctactaaaaatgacaagatagggcacaacccgtgagtacatgactaagggagggtgaattgcaagctcattggtaagggcaaggttctgttttcttttcttactagcacagagcttggaacatagtaggcactcattatatatccgttgaatgaatgaataaggaatgactaccacctccccagcagctctaattga

SEQ ID NO: 870759 - DNA, 595 bp, Homo sapiens
gctattgccagacaggattagggtttatttgcagttcacgtcacaaaattaaagtaagaccatcaacatggccacattgttttctccagttacactcagctgcactgagagttggatctaaccagggttgtgggttttgtcaaatgaggacaatgaagcaaaaaagggataagggagttaaggatgtgtgcaagggggtgagtaaccataaatttaagctggttaagtarggaagagaggacatgaagtagatgatgggcagtggcagagtagcagaataatagataagaggtcctagagtcaaaagattgttggagttagtgctaaagaaatgagctggaaagataggaggcatggccagaaagaggaatgaataaacaattaggaaggagttacagctactaaaaatgacaagatagggcacaacccgtgagtacatgactaagggagggtgaattgcaagctcattggtaagggcaaggttctgttttcttttcttactagcacagagcttggaacatagtaggcactcattatatatccgttgaatgaatgaataaggaatgactaccacctccccagcagctctaattga

SEQ ID NO: 870760 - DNA, 616 bp, Homo sapiens
attgacagtgcaggagtttcgtatgacacgctcttttgatataaaatgctattctgcatatagaacttttgtttacaaatgtacttactcatttattattttatttgatccacacatccactctatgggtaaacacggcaactctgggcatcccattttgtaatggggatgctgaaacacagagctaatgagagggccaggactagggtaagcaaatgaggagggtcattgtacgtgcaaagtgggattctgtcttcctttaaaatgatgatattttgttcatcgcagaatttttgcattaactttgattttttaaatatattgcactaaaatattatttatcttgattattgaatcttttgtactcaaggctagtgaattatttgcttcatcytaatccctgagtctcaggccctgcaaggtgaatggattagcttgagtcatataaagtatccatttattgcatatgaaaaacagataaatatctgtcattccatatgattcaacctaatggatcctcctaggatggagtcaggaggccacactgcacatgagtgcttcaattataccactcggtggtcctaagcctggtgcacattagagctctttctgaaat

SEQ ID NO: 870761 - DNA, 662 bp, Homo sapiens
aacgacttctctcatgggcctcaaatacagggagcatttcctctccctgactaatataggaccagattcattcttcttaaggtcagagtcaacctccaccatcactgcctgggtgaccttggccaggggcattacctctttctgccttgacttcatcatctctaaagcagtgctcataacaagacacagctcatagggctgcgaaggacagaacaatataaattgctttgcccagtaccaaacacacargtaagaattcaattaacttaaggggcaaataccttcccagaatctttaaagcaatgaaatccagccccagttttataccatcccaaattctgaaaagaaacagtgttaattcactttaattttaaaagtgccatacagcacttttaagaggagtgggagggtgccatgaagtcaaaagatctggtgtttgcaattccaaaaagaggtcaggaatcatagcctaggagtggactattttggtctggtctcactgccccaaccagacactgcagaaattgtcctgcacctcctgggtcacagcaaatcttgaaagggacccatggaaaaaggggcctctctcaggatacacagcaaggatattacaggagatagaattccagaaaaggacatggaagctctgggacaaactttgc

SEQ ID NO: 870762 - DNA, 563 bp, Homo sapiens
attttggtgcttctgtgtttggtacatgtatatttaggatagttagctcttcttgttgaattgatccctttaccattatgtaatgcctgtcattgtttttaaccttcgttggtttaaagtctgttttgtcagagactaagattgcaactcttgtttttttktttgtttgtttgtttgtttgctttccatttgcttggtaaattttcctccatccctttattttgagcctatgtgtgtctttgcacctgagataagtctcctgaatacagcacacagataggtcttgactctttatccaatttgccagtctgtgtctcttcattggggcatttagcccatttacatttaaggttaatattgttatgtgtgaatttgatcctgttataatgatgctagctggttatttttgcacactagttgattcagtttcttcatagtgtcattggcctttatattttggtgtgtttttgcagtggctggtactgatttttcctttccatatttagtgcttctttcaggagctcttgcaaggcaggcctggtggtgacaaaatccctcagcat

SEQ ID NO: 870763 - DNA, 583 bp, Homo sapiens
tcttgatagtggtctatcaattttgttaatcttttcaaaaaaaccagcttctagattcattgattttttgaagggatttttgtgtctctgtctctttcagttctgcttgatcttagttatttcttgccctctgctagcttttgaatgtgtttgctcttgcttctctagttcttttagttgtgatgttagggtgtgaattttagatctttcctgctttctcttgtgggcatttagtgctataaatttcccgctacacactgcttgaaatgtgtcccagaggttctggtatgttgtgtctttgttctcattggtttcaaagaacatctatatttmtgccttctttcgttacgtacccagtagtcattcaggagcaggttgttcagtttccatgtagttgagtggttttgagtgagtttcttaatcttgagttctagtttgattgcactgtggtctgagagacagtttgttatactttctgttcttatacatttgctgaggagtgctttacttccaaccatgtggtcaattttggaataagtgcgatgtggtgctgagaagaatgtatattctgttgacctggggt

SEQ ID NO: 870764 - DNA, 586 bp, Homo sapiens
ggtatgttttttcgataaaagaatagttgcttccctcctcctctcctcatttcagtttaacttttccttttattggcatctatcatgaagacataccgcattcagtatcatcatagctattaaagaagaaagggacttgagaaacgatggagagcaaccattttttaataataaagaaattgaagctcagaggttttagaaacttgtggagtcctgtaggtaagtaatggtgcaaccatgactagaagagaggtgctccggcccacagttcatcatatatgtgatggctccacaatgaatgtgaggatgtaaactgctgtcatggcccagtgcaccctgcaatgcaggcctctccacccatggactctgagttcacatctttgtgcaactgccttttctgaacagactgaaatacctgttgcttggctkcatttttatgagtaattacacactcataaaaagaaaagccaggaaaatacaatgaaaacaggtttatttaaaaaatgtcttcagttgtctgtcagtaggtaatgaaatggttggaatatggaagtcctgaaaggctacgtttcattcctacctatat

SEQ ID NO: 870765 - DNA, 664 bp, Homo sapiens
tatcttctgtaaatatttttattttcactttgaagtaacaatatgattagatataaaattttaagcttaaattttttcttgaaaacttttaaatatgttcaattgtcttatgttttattttcttacattagactacrttatactttagaaataccacaatttttaaaaaggcattttcatcatgtcagtctttgaacataaaagttcttcaaggtgtgaaagttcttcagtatataagcagaggaacaggcacagtggttcacacctgtaatcccagcactgtgggaggccgaggcaggaggatcgattgaggccaggagtttgaaagcctgggcaaccaaatgaggccctgtctctaaaataaaaataaaaataaaaatagataagcagaacttggaaagtggatggcctggcacctctttctaacacttagtggtgggtatcagtcaacagactcacctgacagacccatcatcttcacatcttacacctcatgtaagtagaattgtgcaccatttgtcattctgtgactgcttatttcatttagtctaatatcttaaggtttatccatgtttagcatgtgacaggacctccttttttaaggctgcataatattccactatatgtgtacaccatattttctttatccacttctctgtcagtg

SEQ ID NO: 870766 - DNA, 707 bp, Homo sapiens
gaacctgctgtctaacaagaaagtctctacagctgcaagaggtctctgttatcctgaactgcaatcagtccaatcactcaatataattccacagtcaggaaacatgcagctattttaatagacatagtatattgacaaaataattttccagtttatgcattagaagtgattttaaatggatttacctcaaatagcatacacagtggattttacaacataaaaacaagggcaggaatatatgatttatttttaaaacacaggagaaaataaaggtttatagttttaaaagttgactatagttcagagatgatttaaaaagttcaacaaagatcaatgggtcttcctctttataaataaataaatacatacatgcgtgtgtgtgtatatatatgyatatatgtatctgtagaaaattttgaagaattgcttttaattgccaaagttttaataaaatgtctctctaaacttttcacaacccaagtttttttctaataaattagtcacctatttagaataagctccctgtgatgtataagagcatgctaataatgtattttttgtatcttctatatattcatattttaacagtgagaaaattggaagtagtaagcttgatctatgattcttcatcaacaattgtcccaaatcatgtttcttacataataactaagcaaaattttctcgaatcaataatatgcagggaaagg

SEQ ID NO: 870767 - DNA, 637 bp, Homo sapiens
acagtctctcacaccacagcgcaatcaaatgagaactcaaaactaagaaattcactgaaaaccatacaactacatgaaaactgaacaacctgctcctgaatgactcccgggtaaatactgaaattaacacagaaatcaagttcttcgaaactaatgagaacaaagagacaatgtaccagaatctctgggatgcagctaatgcagtgttaagagggacatttatagcactaaatgcccacatcaaaaagctcgaaagatctcaaattaccaagctaacatcacaactaaaagaactggagaaccaagggcaaacaaacyccaaaggtagcagaagaaaagaaataagcaaaatcagagcagaactgaaggagacagagacacaaaaaacccttcaaaaaaaaaaatcaataaagccaggttggtatttcgaaaaaattaataaaagagactgctagctagactaataaagaaaaaagaatcaaatagacacaatcagaaatgaaagggggatatcaccactgaccccacagaaatacaatacagaaatacaatcaccagagaatattataagcacctctatgcacatatactaaaaaaaaaactggaacaaataaattcctaggcacatacatcctcc

SEQ ID NO: 870768 - DNA, 584 bp, Homo sapiens
ggattataaatcattctactataaagacacatgcgcatgtttattgcagcactattcccaaaaacaaagacttggaaccaacctaaattcccatcaatgatagactggaaaaaaaaatgtggaacatatacaccatggaatactatgcagtcataaaaaggatgagtttatgtcctttgcagggacatggatgaagctagaaaccatcattctcagcaaactaacacagggrcagaaaaccaaacaccacatgttcttattcttaagtgggagttgaataataggagcacatggacacaaggaggggagcatcacacacgtaggcctgtcggggggtggagagctaggggagcaatagcattaggagaaatacctaatgtaaatgacgggttgatggttgctgcaaaccatcaccatggcacatgtatacctatgtaacaaacctgcacattttgcgcatgtatctcagaacttaaagtataattaaaacaaacaaacaaaaaaatgcattactgtttcacagagctatcttctattctgttctttggtatgagacttatgaccatttgatacttggatttatg

SEQ ID NO: 870769 - DNA, 551 bp, Homo sapiens
aatgtctggcatttcccctgcttgcacttctctctcctgccaccctgtgaagaggtgtcttccgtcatgattgtacatttcctgaatcctccccagccatgtggaactgtgagtcaattaaacctctttccattataaattacccagtctcgggtatttcttcatagcagtatgagaasggactaacacagtacattggtaccaaggtagtgggtcattgctataagatactttagaatgtgggagcgactttggaactgagtaacaggcataggttggaacagtttagaggactcagaaaaagacaggaaaatgtggagaaatttggaacttcttagagtcttggagagctcagaagacaggaagatgtgggaaagcttggaacttcctagaggcttgttgaatggctttgaccaaaatgctgatagtgatattgacaatgaactcctggctgatgtggtctcagagattaggaacttgttgggaactgaagtaaaagtcactcttggtatgctttagcaaagagactggtggcattttgcccctgccct

SEQ ID NO: 870770 - DNA, 547 bp, Homo sapiens
aaatgtctggcatttcccctgcttgcacttctctctcctgccaccctgtgaagaggtgtcttccgtcatgattgtacatttcctgaatcctccccagccatgtggaactgtgagtcaattaaacctctttccattataaattacccagtctcgggtatttcttcatagcagtatgagaacggactaacacagtacattggtaccaaggtagtgggkcattgctataagatactttagaatgtgggagcgactttggaactgagtaacaggcataggttggaacagtttagaggactcagaaaaagacaggaaaatgtggagaaatttggaacttcttagagtcttggagagctcagaagacaggaagatgtgggaaagcttggaacttcctagaggcttgttgaatggctttgaccaaaatgctgatagtgatattgacaatgaactcctggctgatgtggtctcagagattaggaacttgttgggaactgaagtaaaagtcactcttggtatgctttagcaaagagactggtggcattttgcccct

SEQ ID NO: 870771 - DNA, 576 bp, Homo sapiens
acaaatgggcaatcatcctgcatgcttattcaaccagcactggttatgtgccaggcacagtgcttggcgctggggataaagtacggagcagatacagagaggacctgtcttcctggaatttgcagtctttcataaacatgtgtgcagcttgtccattccaaagatgtttgtctttctattaaaatgcatgcattatggcactgtatcttttacaaagttcttttacatataccactttgtcatcctcttgagaactctaataacaacatgaatgtaaakattttctcttataatgaagaaggaaaggctcagagtccaaaagtactggcgacaaatcacataaaacgtgttctttcaaccacactgatagtaacaaaacacagcaaatgtttaacataacgcttataaagtctaagcatttatagccattctctgttaattcttacaacaaacctataattccctacttaaaaagtggtgtgactgagactcagaggtttagtaacttattataagccaatcattcaactaaaaagaaagatgtgaacccaagcaatgtgattggagagctggcat

SEQ ID NO: 870772 - DNA, 568 bp, Homo sapiens
gagaatctcaagcacagaggtagagaagaacaaaagcgaggtaacaatgcttaaaaaaagaaatgatcaacaagtggtgcagaagaattaagcaacgagaaattccacaaaatgcctatgggattcagcctaggtgacagaagaacagtagagtggaataaactaggaaggaaatggaaattgatgagaaggcagagtgtagactacctttgagaaagctatcccagagtgggagggagagagatcaagtaagagctggaggggaagaggattaagaaaaaaagatagacgcatgtttataaggggattaagagagtgaaatatttgacagcatatttctgtttaaggaaattctgggtttactaaacttcccagagtttgactacaatttgacaaggtggctttagaaagtttttttttttwaattttttattatacttttaagttctgggatacatgtgcagaacgtgcaggtttgttacataggtatacatgtgccatggtggtttgctgcacccatcaacccatcatctacattaggtatttctcctaatgctatccctcccct

SEQ ID NO: 870773 - DNA, 600 bp, Homo sapiens
tgacctatttgcagacaactggagccccataggcaacttcttactgaatagctttgctcagaggcatctaagaaccttgaactcaacatttcaaaatttgaactcatcatcttcccaatattgtgtctcctccagtgttgttatgtcagtgaaaggtggctctactacccaaaccagwaacctggggccatctgtgacttctctctcactgcttaatcaatcaccaggtcaataaacagtgaacagaagaattatatttcaattctgtccatctcgccagcattattaccacaaccctaatccattccctcactgacactcacctggactactacaaatacctcattatttagattcttccctccattcttaatctcacaaattcgtttttcacattgtaccttaaatgattttccacaaataccaatgccacagttcatatcattccttagttccaaacatttctaaactttcccagtattattgacatcaaaatataatataatgtgcaagaccctccatgacctatcttctacctgtgtctcctgcctcttctccagtgcccatacaccactgtgtactgttgtcataccaaacctt

SEQ ID NO: 870774 - DNA, 581 bp, Homo sapiens
acattgagcactcactattgacacagatggcttatttttagcaaaatagctcccggaatactttatagcacctacacacagaaagaaatctacatcttgaaaaaatacagcaaagctgtcaatttgaacatgcaattgcgtaatcaacgctattaaaaacttattttgggaagcaggactgtacactaagaactttcccttgatgtttttctattagaccattttaacaagtcaattttttccaaagatatctaagtggatatatatagcatttaatatttctaggcatgtacctagtatatgtgcccaatgattataggaaatttgatgtttagaaaaatgttttatgggaggaagagactgcaactcttagaactgttaaggatgtgatacatttctgacctaaagaaaggcacaatttaatcaggaaaggtaagcacaaatggcaaataacaccacaacaaaacatctactgagcttgtttaaaktcattctgatatttcatctcttaagacttctgagatctatttgagcactttcaaactgtgtgcaaataaatggaaaatgacagctgaagggca

SEQ ID NO: 870775 - DNA, 601 bp, Homo sapiens
ggtgcatacggagttgtttgttccttccggcaggttcgtgatctcactgacttcaggaatgaagccgcagaccctcgcagtgagtgttacagctcataaaggtagtgtggacccaaagagtgagcagcagcaagatttattgtgaagagcaaaagaacaaagcttccacagcatggaaggggacctgagcaggttgccgctgctggctcgggtggccagcttttattcccttatttggccccacccacatcctcctgattgktctattttacagagtgctgattggtgcatttataatcctttagctagatacagagcgctgattggtgcatttacaatcctttagttagacacaaaagttctccaagtccccacccgacccagaagcccagctggcttcacctcttaaaaggaagtaaagtacacttggaagagggccaagtgggtgacttgaaagagttaagtgcctggtttgacctttggcttggggttttatatggtggcatgcatccagggtcttgtgttatgtctcccctgattcttcccttgaggtgggctgtctgcatgcacagcggcctgccagcacttgggagggactgca

SEQ ID NO: 870776 - DNA, 671 bp, Homo sapiens
aaccttttgtacttcatgaaataattattccctaattgaagaagttctttaatgtaaaagagctatgaattaagccatgaaactgattaaacctttggaattcatcaggaggctctgctagaagtcatcattataaaggattgtaaaggatcaaggattaataataataacaaagaaataataaaataatagcmtcgaaatttggcatccaacagtgcaaattacttttttctttgcaaattagattccctttcataggactgtttcctgttaaactatggttttaatctacttccttttctaaaactttcatatctaaggagtcagtcaaatagctagagctacaagaacagcccagctttatggtttccaccctactcatgggcccaactgtggcacataacaaaggggccaagtcttggtttttggtttttcatttttctttcaaagggggacttggaatacttgaggtaggaaaggtgagagaacaagtcattatgtatttggagaaattacttattatttattatctaaatgtattattttcctcctatggtaatataggcagccataatcatgtgagctctgaacatgagagagaaataattcaattcagcaaaattatactgattgaaatggatgtgtaaaaaatattgaactacattttatag

SEQ ID NO: 870777 - DNA, 671 bp, Homo sapiens
aaccttttgtacttcatgaaataattattccctaattgaagaagttctttaatgtaaaagagctatgaattaagccatgaaactgattaaacctttggaattcatcaggaggctctgctagaagtcatcattataaaggattgtaaaggatcaaggattaataataataacaaagaaataataaaataatagcctcgaaatttggcatccaacagtgcaaattacttttttctttgcaaattagattccytttcataggactgtttcctgttaaactatggttttaatctacttccttttctaaaactttcatatctaaggagtcagtcaaatagctagagctacaagaacagcccagctttatggtttccaccctactcatgggcccaactgtggcacataacaaaggggccaagtcttggtttttggtttttcatttttctttcaaagggggacttggaatacttgaggtaggaaaggtgagagaacaagtcattatgtatttggagaaattacttattatttattatctaaatgtattattttcctcctatggtaatataggcagccataatcatgtgagctctgaacatgagagagaaataattcaattcagcaaaattatactgattgaaatggatgtgtaaaaaatattgaactacattttatag

SEQ ID NO: 870778 - DNA, 671 bp, Homo sapiens
aaccttttgtacttcatgaaataattattccctaattgaagaagttctttaatgtaaaagagctatgaattaagccatgaaactgattaaacctttggaattcatcaggaggctctgctagaagtcatcattataaaggattgtaaaggatcaaggattaataataataacaaagaaataataaaataatagcctcgaaatttggcatccaacagtgcaaattacttttttctttgcaaattagattccctttcataggactgtttcctgttaaactatggttttaatctacttccttttctaaaactttcatatctaaggagtcagtcaaatagctagagctacaagaacagcccagctttatggtttccaccctactcatgggcccaactgtggcacataacaaaggsgccaagtcttggtttttggtttttcatttttctttcaaagggggacttggaatacttgaggtaggaaaggtgagagaacaagtcattatgtatttggagaaattacttattatttattatctaaatgtattattttcctcctatggtaatataggcagccataatcatgtgagctctgaacatgagagagaaataattcaattcagcaaaattatactgattgaaatggatgtgtaaaaaatattgaactacattttatag

SEQ ID NO: 870779 - DNA, 611 bp, Homo sapiens
gtgatctcattattaaagaaaaggacaagcggaaattaatcctcaggagcaatcttctactttattactctagctgactgtttacctctgagcaagtggctagacctctgtatttcacattattataaacaccaaatacatcattaacttgcattgttctcacatttgtaattcaactagcaatcttttcacaaatttgcataactgccagcttcaatatgctagtaagttattttcaattgtataaaatgtgagagctcagtgatgtgggaagttgttcttccagcctaatctactgagtgacctctcttctgtgcttagcatcctcatatggccttcaggccagcagtggctcccaagaatcctaccagaatctgagctgcccaaggcacamttcatgctttagatactcctgcatactcttaagcaatgagagagaatggataaaagaatgcatagacacagagatgatagatagatagatagatagatagatagatagatagatagatagatagatgatagagacagataagatagaaagaaagatagatattggtaactttaaaagacagatattgataatataagaaggttattgaggttaaaag

SEQ ID NO: 870780 - DNA, 485 bp, Homo sapiens
tggtctcagctcagactgtctgtggtaactcctattggagaaataagttggacaggatgaatgacaaggtgattatacctgacagcgcacggcatgggatggcatggaagacaagaggtattctccctagtactactccaggcactcaggcctccctgagatcaggcccccagccactgcccccaaccagggtgtagaaactcctggcctgggcacctcaggtccaccaggaagtcccaaggaaatccaggagcaaagtccmgttagtgtccattctccatttgctcatcgcattgcatatgtgggagccatggaagaaaaaacatggtgcttctcttggttgagtcttcatttgggcttcaagaccagtctacaccttggctgatggactccgggacctcaggcccctcacatttcctctgcaagcctctttacttctgatttatcaggagactcactcatttccagaggtaaccacacctcca

SEQ ID NO: 870781 - DNA, 649 bp, Homo sapiens
cccaaaaaaacatctgggcctgatgcttttttaattgctgattatctgcaagatttgctaaattctttcactactagtggtggactccagttttcaatatcttttagttaatttctgttatttatatatttcagacatattcttcttcttttttttttttttttttttttgagatagagtttcactcttgtttcccaggctggagcacagtggtgtaatcttggctcactgcaacctctgcctcccaggttcaagcgattctcttgcctcaacctcccaagtagctgggattacaggcatgtgccaccacacacggctaattttgtatttttagtagagatgaggatttcaccatgttggccaggctggtctcaaacacctgacctcaagtgatgcacccacctcagcctcccaaagtgttgggattacaggcatgagccactgtgcccggcccagrtatattctttctgctgcttgacagtatgctgtattaaaagatttttgcctgttaatttttatgttttagaatttttttgagattttctctgtaatgtaatatattaattattttcatgattgtttggtgaagtgggggaaagaattgtatcctcttgagcataaaatctgttatagaaacattactggtaaa

SEQ ID NO: 870782 - DNA, 646 bp, Homo sapiens
gagaggatgttttgtgtgttgtgtgaggcagggatatgcttttttcaaaatgaataaccaattttctcaatgccatttattgaataatttattatttatgcaattataaagtgacttttctcatacaccatgttcccaggtaaaggtaggtctgtttgtcatacaaagcctggtgccttacatatttgaccatacttattgttagactttttctaactccttgaaatagtttagagaaaataattttgcagagaactgtggccttgtactaatatttgagggtttaaattagcaagaaacaggaaatgtaggttacatgtattaaataaacagtaaaagataatagtgccttttatacagaaggtattttgttatgaattagtaataaagatgtaaatatgatggttaaccttgaaaaataagaaagatyttcaagtaaatgatggtctggtatagtatttctcaaccttatcagacctaacacctttttgacaactttttgtaatcaccccataacgatcctgaattttattttatttacaagctaatgtaacccacctgctcacataccataaaatcaataaaactttttgtaacataaatgaaaaaaagatgcataagtaaacaatctgtatttcaatatgta

SEQ ID NO: 870783 - DNA, 542 bp, Homo sapiens
aagttgttttctttctcaaccttgcaacaaccctcagctgtttgaggagagcttactaggaaatgtttatttttcattaactctatttctttctattagagccaacagaaaaccagaagagcaaaagagaaaggagatctgttcaattagcctcattagacttcccacttcaggtctctgtccagctctagtaaattcaccacaggagacactgggaaaaccgtgatcctgctggtcccttctgttacaagtcaatgccttgttggttcatccgctcaatgcttgttaagtcctcaggatgtgctagatgctctcacatggaawgtccttttttttttctttttataagcaacactgaaagatacgggttattaacttcatttaaacaccaggaaattgaagtttagagaagctaagtgacttgtccaagattccttgcgtggaaaatggtggaaccagttttgaatctttagacaccacatagttttctattctcagtgtctattttgaggaagtgagtgggctgtgctttgtggctatat

SEQ ID NO: 870784 - DNA, 621 bp, Homo sapiens
gttgattcctggagattgatcttgctcctttgtttgaaacgtcttagcctagttcctaattttccttgactctctgtgttgatgtctgtgtattagataaaagaggcacatcttcctgtcttcacaaactggtcttgtacaagagaaaactcccaccaatcagcccagccagaaattatgagggactcttccaactcttttctaccccagagagaaggaggaagctgtggtttttgtctacttgttctatgctgagctacaatgagtgggaggaactgtggtatctaacagctcaacctgctgtctccattctcccccaggtagctagattctgatggatccatcagaactccaggactgccaasaaaaatactaattttgggggcagccccagcagagctggttagctaatcaataaaatcctaagtgaaataaacaatacaacttttactaaaagtttcaattaaaagaggttatcatttttacttgctttgaaaactaaggacagcgaaggcaaggaagtgagtatttaaatagcttaagtctgtgttttgaatttactgtgattgtagtgactgcctactaatagaaataatagaaaagattgtaaattggtttcat

SEQ ID NO: 870785 - DNA, 650 bp, Homo sapiens
tctgagcccatctccagaatttctgattcggcaggtctgggccagggccaaatgtcaaaaagtttctaacattttcccatttctgttaatgctgctggtctgggaacggcactttgagaactagggccctaggatgcataagatacaaagaaacattgataaagrtaaaaagtcataatgaccttcactttctagttcactgctgtgttcccacacctgggctctggacagtacctagcaggtattcaacaaatggcttttgaataaattaatgagtgaaatactgaaatatgaattaggtctgtgacaccagagaccatgtctttttcctctgcagaagcccagaactttttcccagttctcagatcttgaccatcacatacctgatggtcaatggaaaagaagaccccagatggcctggtgcaatgcccttcagatagaaagactgctgttatcccatacaaaacatggtattagtcctttccaagtaggttctgattaggtacaaggaaccaggcatgctatcttcatttctttgcaagagatccagaaaatatgtcccattgcatgaaactagagagggtttgaaatcagaccctttgggaatattacaacagtggcccccatctctagctctgatggcagtggct

SEQ ID NO: 870786 - DNA, 610 bp, Homo sapiens
atttattaaaatttcagaatgaatgctcattaaaaagtaaaatcttgaaacttcaatctaacatataaattatcattttttttatttttttttttgagatggagtctcactctgtcgcccaggctggagtgcagtggcgtgatcttggctcactgcaagctccacctcccaggttcacaccattctcctgcctcggcctcccaagtagctgggaccacaggcgcctgccaccaccggccaccatgcccagctaattttttttttttgtaataaattatcattttttaaaatgtcttttcctctttccctgttctttcaagccaatacatttcccatttatgactcttgaagaagatatctccaatgattcgcctggactgtaagaattctaaaaagcattcaagtcatcacgaatcacagcagaacacagttttgaaagctcttggcctccagtcaggacaaatcatttcacawgaagaaaatttttggaactaatacttcttctccagcttcaggataggtcaagcatggcaaagagaaaaatgagcataatgtcaagagaggagaatgattccagtggtaaaattttaggatctctatgaaggtctgt

SEQ ID NO: 870787 - DNA, 597 bp, Homo sapiens
ccagagatagcccaggaagtgaagcagccataggacagaatcccaagggacataaacttttaaggtctgtttttaagagcagagaaaagggaaccgacaaataaagcaaacaagtagcatgcagagagatagagggaaaacaagaaaagtgtggtgacaccaaggccaaaggaaaaggatgtttcaagaaggagggagtgagaaatgaagccaagttctgctaagaagtcaagtaagataaggacagagcaatatggcccatgaaggcttctggggactatggtgaagtgagtttgaaaaacagtggaatgggactggtataagagataggaaaatagacataatgaatacagatcactcttccaagatctggctttgaagggagaggtactttagtcaggagcagaaggagagggagggaatcacacyaaagaaaaacttttctaagatgggaggaacatgaacctgcttcaattcttatcttaaaatgtggaacaatagaaagaaacagaaaatacaggtatgtgagagagggaaaattgctgatagaaaaaagctcgaggttgagtgattagcttcagctgaaaggcgctccag

SEQ ID NO: 870788 - DNA, 592 bp, Homo sapiens
ggcctgcttgtatgctagtcactcagtggtgacagtcataagattaaagcaaacaaacaaacaaatgaaaaatgttctatctcagccagattgtaggcaggaaggctcttttaactcagagagggatttcttctaggaaaactagatgggaagcccactcccctcataagaaagagaaagacaaacaacctttgtttttttttttttttttttgagacggagtctcactgtcgcccaggccggagtgcagtggcgcgatctctgctcactgcaagctccccctcccaggttcacgccattctcctgcctcagcctcctgagtagctgggactacaggcgcccgccaccacgcccggctaatttttttttttttttttttttttttttttttgkattttcagtagagacggggtttcaccatgttagccaggatggtctcaatctcctgacctcgtgatccgccctcctcagcctcccaaagtgctgggattacaagcgtgagccaccgcgcccggccaacaaacaaccttttctttgcttgagatgtggttttctggaatcagagtaagagtaaaaaatggcttcaatagac

SEQ ID NO: 870789 - DNA, 613 bp, Homo sapiens
ttttataaggggcttttccccaacttcactctatttctttctgctcccgccatgtgaaggaggacatatttgtttccccttctgctgtgattgtaagtttcctgaggcctccccagccatgctgaactatgagtccattaaacttcttttctttataaattgcccagtattaggtatgtctttattagcagcatcagaatgagctaatatagtaaattggtaccaggagtggggtgctgctgtaaagatacccgaaaatgtggaagtgactttggaactgggtaacaggcagaggttggaacagtttggagggctcagaagaagataggaaaatgtgggaaagtttagaatttcctagagacttggagggctcagaagaagataggaaaatgtgggaaagtttagaatttcctagagacttggaggkctcagaagacaggaagatttgggaaagtttggaacttcctaaagacttgttgaatggctttgactaaaatgctgatagtgatatggacagtaaagtccaggcagagatggtctcagatggagatgaggaacttgttggaaactggagtaaaggtcacttttgctatgcaaagagactggtggcact

SEQ ID NO: 870790 - DNA, 650 bp, Homo sapiens
taaaatattatgaagattcatagattgaaagtttatactttcacttctatttcacaccacacacaaaaattaactcaaaatagatcaaagccctaaatgtaagagctaaaactataagactcttagaagaaactatagggataagtctttatgatcttggacttggcaatggattcttagatatgatatcaaaarcaaaagcaattatagaaacaacatagataaattggacttcgtcaaaatttaaaactttgtctgggcacagtggcttattcttataatcccagcactttgggaggccgaggtgggtggatcgcttgaggtcaggagttccagaccagcctggccaacattatgaaaccccatctctactaaaaatacaaaattcagccggggtgtggtggtgctacttgggagctgtaatcccagctacttgggaggctgaggtgggagaattgcttgaacccaggaggcgaaggttgcagtgagccgagatcgctccactgcactccagcctggatgacaaagtaagactgtctcaaaaaaaataaaaaataaaattaaattaaaattaaaacttgtatgcaccaaaggacacaatcagacagtaaaaagataacccacagaaagggagaaaatatttaccaatc

SEQ ID NO: 870791 - DNA, 626 bp, Homo sapiens
aaggtgggaactctaggatctccctctccagaatagtgcacccatgaagaggtgctgaacagaagtcagccatttaggtgagctatgaaaaggaggcaaagtgagaattgggattcctatcttaaaaagcttcttaactttagctgcagaaatccaaaacatggggaccggtatgacaggaaggcaagtagaaaagacatcacatttactgagtgccctaatgtgatatgcctatgccaggcactttacacgggttgtgtcgtctcatggaattctctcagcacccgtgcaaggtaagtactactattcccattttacatctgggaaaytgaggcccagagaggttcgactactctctagtacatgggcaagcagagattcaaacccaggacactctgttcaaaacccattttctttccaccacactatgctgtctcgtggcacacaccaatgtgcacatcacagctgcactgtaagtcaagtatagttcggaattcttgacccgcatttgctcctctgcctcacctgtttcatgtcccccttcactgggtttggagggtagggattggagagggctgcaggctatccataacatacctgggcacttaatttccaccctgctcccc

SEQ ID NO: 870792 - DNA, 617 bp, Homo sapiens
ggaagagggttccaaagccccaggctcaccaaatgcaggagaagccaccttctcatcatctaaagtgtgctgctgcctcagcaacgggcccagagaacactcaaaacgagtgttaaattccaggcccacatcacagcgctgggggaggaaactgctctgggtccatcggggcagacctactcctcctagcacctagatccttccatcctggtctgggactacctgtttttcatcaaacttactttactgcaagtttctttctttctttctttytttttttttgagacggactcactctgtcgcccaggctggagtgcaatggcgtgatcttggctcactgcaagctctgcctcccaggttcacgccattctcctgcctcagcctcccgagtagctgggaccacaggcgcctgccaccgcgcctggctaatttttttgtatttttagtagagacggggtactgcaagtttctttactccacctacaacccagacactggcacagtttccctcccatccttagagatagagggtaaaaccacatgtttggaggtttaaagatttcccagaagtctttttctaattttctggtattaaattggaaaggaaatagaatgca

SEQ ID NO: 870793 - DNA, 639 bp, Homo sapiens
cgtctccatcggcctctacatgcccgccaccagcttcttgctcctggtccttggtttcaaggctctgcaactgtggatgcagctgcatgaggccggagtgggccttgaggagctcaggggggtccctgaccctagtgtcccccctcccccagcacaggatggtaagcacacaggtcccagacaggggctggatggctctgaagctggtagccctgatctacctartactgcagctgggctgatcgccctcaccaacttctgactggacttcctgctggccgccactatggtgctgccgctgtgctcgccgagcctttgggccctggaccctctgtgctgtcctgctggtgttgacaagcccggcagccacgctccttggcagcccattcctgtggcgggactgcaggaggcaccactgtcactggccaagggctggcagctcttcctggcagcactggcccagggtgcgctggagcacacacctaaggcgccctgctcttcccactgctgtccctgggcctctgccttgctgactacttttctggaatgtgctcttctggaagtgagatctgcctgtccggggcaccaggctgggacagagactccccaaggaccccattctgcctccttctggggaaa

SEQ ID NO: 870794 - DNA, 639 bp, Homo sapiens
cgtctccatcggcctctacatgcccgccaccagcttcttgctcctggtccttggtttcaaggctctgcaactgtggatgcagctgcatgaggccggagtgggccttgaggagctcaggggggtccctgaccctagtgtcccccctcccccagcacaggatggtaagcacacaggtcccagacaggggctggatggctctgaagctggtagccctgatctacctaatactgcagctgggctgatcgccctcaccaacttctgactggacttcctgctggccgccactrtggtgctgccgctgtgctcgccgagcctttgggccctggaccctctgtgctgtcctgctggtgttgacaagcccggcagccacgctccttggcagcccattcctgtggcgggactgcaggaggcaccactgtcactggccaagggctggcagctcttcctggcagcactggcccagggtgcgctggagcacacacctaaggcgccctgctcttcccactgctgtccctgggcctctgccttgctgactacttttctggaatgtgctcttctggaagtgagatctgcctgtccggggcaccaggctgggacagagactccccaaggaccccattctgcctccttctggggaaa

SEQ ID NO: 870795 - DNA, 588 bp, Homo sapiens
ccctgcgtgtgaggcccatgctcttataactcaaaaaaaaaaaaaaaattcagccaggcatggtggctcacatatctaatcccaggccttggtgggaggatcacttgagcccaggagttcaaggctgcagtgagccatgatcacaccactgaactccagcccaggcaacaaagcaagaccctgtctcaaaaaaaaaaaaaaaagtattggattacgtccaaatctatgtgctgtaccctatatacttctcaaaatatctgtgtaaacaatgccttcagtttgggttcaagttcaagagtatcaagtgctgaaggacaggtggttcyacatgatggtttaacatgttagttacctgatggcctgaggtgagtttcaaatggaacatttctgttgtactgggcatccaaaacataggcagctgccaggagaaggtcctgttccccattgagacagagtaagggagaccaagtcagaggaggagaggatacttttctttttcctttgttaagtatgcactgagtataaaaggaagctccccttcgcctctccacagacccactctcccagaggtagccaacatctaaacag

SEQ ID NO: 870796 - DNA, 631 bp, Homo sapiens
tccaaataaacacaatcaaaattgacaaaggagacattatcaatgaccctacagaaatacaaaaactctgagaccattatgaacacctctaggcacctagaaaacctacaaaatgtggaaaaattcctgaaaacacaactccscaaaattgaaccaggaagaaactgaaaccctgaacagactaataatgagttttgaaattgaatcagtaataaaataatttccatctaattttatgattttgagcaagaaaaagcccaggatcagatgaattcacagccaaattctaccagacgtataaagaagagctgctaccatccctgcttgaaactattccaaacaattgaggaccagagactcctcactaactcattctatgaggcaagcatcattctgataccaaagcctggcagagacacagcaaagaaaaaactacaggccaatatccttgatgaacacagatgcaaaaatcctcaacaaaatactagcaaactgaatctaccagcacatcaaaaagctaatccgccataatcaagcagggtttatgcctgggatgcaaggttggttcaacatatgcaaatcaataaatgtgacttatcacataaacagaactgaaaacaaaaaccacata

SEQ ID NO: 870797 - DNA, 611 bp, Homo sapiens
ctatttcctgcttctttccctcttcccaccctccaccctctgataggccccagtgtgtgttccttccctctaggtatctgtgtgttctcatcatttagctcccacctgtaattgagaacgtgctgtatttggttttctcttcctatgttagtttgctaaggataatggctttcaacaccatccatgtccctgcaaaggacatgctctcgttccttcttttatggctgcatatwattccatgctgtatatgtaccacattttagttcttaaaacaactaaaacagtcttttccccaagacataaattttcaaaagggcagttaaaggttatctattactattttctacctccagaaatgcttttgtttgaaaggagggaggaaaagcttcaattgagattaagtcctaatgccccaattttaaatctctcagcttgctcaagcccagcaggaaaacatgtagttttcaaagacggaaggatcctgagagatagtagaatatgcctgccacataataggtgtctggcttatgtctgatgactaaatggataggaaaaatggatgaacacagcttgggagttcaatatttttaaagaaaactcctatagagtag

SEQ ID NO: 870798 - DNA, 611 bp, Homo sapiens
ctatttcctgcttctttccctcttcccaccctccaccctctgataggccccagtgtgtgttccttccctctaggtatctgtgtgttctcatcatttagctcccacctgtaattgagaacgtgctgtatttggttttctcttcctatgttagtttgctaaggataatggctttcaacaccatccatgtccctgcaaaggacatgctctcgttccttcttttatggctgcatataattccatgctgtwtatgtaccacattttagttcttaaaacaactaaaacagtcttttccccaagacataaattttcaaaagggcagttaaaggttatctattactattttctacctccagaaatgcttttgtttgaaaggagggaggaaaagcttcaattgagattaagtcctaatgccccaattttaaatctctcagcttgctcaagcccagcaggaaaacatgtagttttcaaagacggaaggatcctgagagatagtagaatatgcctgccacataataggtgtctggcttatgtctgatgactaaatggataggaaaaatggatgaacacagcttgggagttcaatatttttaaagaaaactcctatagagtag

SEQ ID NO: 870799 - DNA, 604 bp, Homo sapiens
aagtcctcactttgttgaagaagacattgagcctaagagaagcaagttgcccaagaacaaatagctgttcattatggagctaggacttatgcagagttgggacactttctattatgtcatgctaatgctagctaatttactgggtcacagtgcccttgatttatgagtatttcaccttacatttttttcgtctttaattagaagcttaaagagaagtttgtagaatgtactcataagtggatgggataatactattaagttctgwtattctgatattgtttgaaatactcttaataattctacatttggtaagtttttttatatcagtattaaaatagtaatttggtttattacatttttatacatagaatttgccagttactttctgactacaaagaaaaacagatgctaaaaatctcttctgaaaacagcaatccaggtaagacttgtgatagtgaattactttagtcagttgtccccaacctttttgacaccagggaccggttttgtggaagacaatttttccatgggctgggggaaggtggggatggtttcaggattattcaatcatgttacatttattgtgctactttatattattatc

SEQ ID NO: 870800 - DNA, 645 bp, Homo sapiens
gtctgttctctttcatccagatctagaaagtaaaccaagggatgattacctttaacggcagaaaggaaagctgatgtctcagcctgggcactaagctctgcaccccagccatgtctagttcttcagtatttctgtcctggtcttgtgtgtgtgacaacaaacttccctggtacccgaagctcaggatgtctgtagaggagaccccagaattggctgtgctattcttttcttcatctgggttatttccaccaacacctataaaaacaagccaagaaaaagtcaacagcttaaaaaggccggtttcttggtggcatctctatgtgggcacagcgttttcctccagtgacagagtgatcgtttatagctgctcgggtacaatatgaatttagctcctcytgaaagatgttacatttagattagagaaagggaagattctacatgggatttagaaacctagatagagcttacgtgacccaactatgaatgcgtaggctcaaaagaagttcataaggccagctatcccttattaagctctagccatgtgatgggcaccttagatatacatataggaagatatggacatcttcccatcttctcagcaaacccaccaggaaggtgtaatcccagttcaaacatgagaaaaca

SEQ ID NO: 870801 - DNA, 626 bp, Homo sapiens
agttttgagtgatattcttatttctgtttttaaagggggcttagggctgggtgcggtggctcacgcctgtaatcccagcactttgggaggctgaggagggtggatcacgaggtcaggagatcgagaccatcctggctaacayggtgaaaccccatctctactaaaaatacaaaaaattagctgggcgtggtggtgggtgcctgtagtcccagctacttgggaggctgaggcaggagaatggcgtgaaccaaggaggcagagcttgcagtgagccaagatagtgccactacactccggcctgggtgaaagaacgagactctgtctcaaaaaaaaaaaaaaaattaagggggcttagaagatttaatttcctgagctcatacaggtaggacaggtggattcacactacatctgtctgcttctacttttggtggcttttcacatttcccctagaatgtgtctttcatgtgaatttgtgtaacacaggtctttccataaagtggcatgagtcctacttttccttcacaaaatatttctcttttatgaggctaaggaaaactcccttgctcagtgggattaagaagaggacggaactgttctgtttagggaaggctactggcaaaatgacg

SEQ ID NO: 870802 - DNA, 626 bp, Homo sapiens
agttttgagtgatattcttatttctgtttttaaagggggcttagggctgggtgcggtggctcacgcctgtaatcccagcactttgggaggctgaggagggtggatcacgaggtcaggagatcgagaccatcctggctaacacggtgaaaccccatctctactaaaaatacaaaaaattagctgggcgtggtggtrggtgcctgtagtcccagctacttgggaggctgaggcaggagaatggcgtgaaccaaggaggcagagcttgcagtgagccaagatagtgccactacactccggcctgggtgaaagaacgagactctgtctcaaaaaaaaaaaaaaaattaagggggcttagaagatttaatttcctgagctcatacaggtaggacaggtggattcacactacatctgtctgcttctacttttggtggcttttcacatttcccctagaatgtgtctttcatgtgaatttgtgtaacacaggtctttccataaagtggcatgagtcctacttttccttcacaaaatatttctcttttatgaggctaaggaaaactcccttgctcagtgggattaagaagaggacggaactgttctgtttagggaaggctactggcaaaatgacg

SEQ ID NO: 870803 - DNA, 621 bp, Homo sapiens
gcactaaattgtagtgcaaaagtgggcttccaaactcaacatagtaaaggcatcagttctccccaaattaattttataggtccaatgcaattcttaccaaaatcctagcaaggtattttgtaatcatagatgagtttattctgaaattaattttataaattttattgtatattcataatgtaatttacattatacaaataaaaatatcttctgaaacttatttgaaaatgcacaagcactagaatagctataatcttcaaaaagtagagtggagtgggaggaatcactgtaattaatattaaggcttactatatagctacagtaatagtgagacagaaagatggacacatagatcaatggaacagaatagataatccagaaatagacccacacaaatattcccaactgatatttgacaaaatgcaggagaaattcaatgaggaaagaattgctttttcaataaatggtgmtggaacaataggacatccgtagatgaaaaaaaaaaaaaaaagatcattgacattaaacctcacaccttgtacaaaaatgaactccatatggatcctggacttacatgtcaatgcaaaactatatgatttttagggaaaaaaaggggaagaa

SEQ ID NO: 870804 - DNA, 597 bp, Homo sapiens
aatttgttgcaaacactgaatgctttgtggctggtaagttcttaaagataaacaggaagtgagatttaattaaactaaagacctctgcacagcaagagaaactatgattagagtgaacagacaacctacaaaacaggagaaaaattttgcaatctatccatctgacaaaggtctaatatccagagactacaaggaacttaaacaaatttacaagaaataaacaaataaccccattaaaaactgggcaaagaacaygaacagacacttctcaagagaagacatttatgtgaccaagaaacatatgaaaaaaagctcaacatcactgatcattagataaatgcaaatcaaatccacaatgagataccatctcatgccagtcagaaacgtgacttaaaaatcaagaaacaacagatgctggtgaggttgcagggaaaaaggaacgcttttatgctgttggtaaaagtgtaaattaattcaaccattgtggaagacagtgtgttaattcatcaatcatctagaagcagaaataccatttcacacagcaatctcattactgggtatatacccaaagggatataagtcattccattataaaga

SEQ ID NO: 870805 - DNA, 507 bp, Homo sapiens
gctgaacttgtacttctgtttctttgctggttgtcagccaggggccattctcaacattcagaggccacccaggcacctcactccatgatccctccacatgttttttgttttgttttgttttgttttgttttgttttgttttgagatagkctcactctgttgcccaggctggagtgcagtggctcaatctcggctcactgcaagctccgcctcccgggttcaggccattctcctgccccagcctctcgagtagctgggactacaggcacccgccaccatgcctggctaattttttgtatttttagtagagctggggtttcaccgtatcagccaggatggtcttgatctcctgacctcatgatctgcccgcctcccagagtgctgggattacaggcgtgagccaccgtactcggctgacccctctacatctttaaagccagctgtggagagtctccctcctgtcaaatccctctcatgcttcaaatccactttgccaaggagagcctag

SEQ ID NO: 870806 - DNA, 704 bp, Homo sapiens
aaaacctattttaaaattcatatagaaccaaaaaagagcctgaatagccaagacaatcctaagtaaaaagaaaaaagctgcaggcctcacactacaggacttcaaactatactactaggctacagtaaccaacacagcatggtactggtacaagaacagacacataaccaatggaacacaacagaaaactcagaaataagaccgcacatttaaaaccatctgaccttcaacaaacctgacaaaaaaaatcagtggaggaaaggattccatatttaataaatgatgctgagagaaccagctagccatgtacagaaaattgaactggaccccttccttatatcatatamaaaaatcaactcaagttaaattaaagaattaaacataaaacccaaagctataaaaatctctagaataaagccaaagctatatcattgaggatatagctatgaacaaagatttcatgataaacatgccaaaagcaattgcaacaaaagcaaaaattgacaaatggggtctaactaaactaaagagcttctgcacagcaaaagaaactatcatcagagtgaacaaacaacttacagaatgggagaaaacttttgcaatctacccatctgacaaagatctactatccagcatctataaggaacttaaataaatttgcaagaataaagcaaacaaccccattaaacagtgggcaaagaaca

SEQ ID NO: 870807 - DNA, 609 bp, Homo sapiens
tcaagaaatgaaagaaaaccctggacctatgtattgaaatgggccatagaaaaaaatgacccagagcaatcaaatctgaggcatagtctaatgaaactatcagattttaaagataaagaaattctccgagtctcaaacaaaagagcaaatgatttgctagagcaagtaaattaggctggtatcagaattcttaacagtaacatcaaagcaaaacaaaaataaaacagctttttcaagaaactcaagaaaagaaagtctgaaccagttattactaatcctcattattagcagattctgtatttgcaaacttgcccacttgctaaagtttatttgtaactgcaaaacaaatagtctcagtgctgtataagtcatttgttggcatgcacatggacaaagtgtgaaaaatttgaatcatctgacatgtgatgtgaactttcccatctgacattaaaraaagcaacactctgccttctggctttatctcatatactgtaaacaaaatattttgtttgtggtctatttattgccacatttttgtgctttttgttggtgattttgctgtttaaaatgtccctcaaacatagggaagtgctgaacactgaacactga

SEQ ID NO: 870808 - DNA, 675 bp, Homo sapiens
cctggtggacagatatcattgccatcattttacagatgaaagaaatgaagcccagtgagagtacatgacttattcaaagtcgcattcctaattaataacagagctaggaactgatgacagctcttttgactcaaaatctaataatcttttccattkgtctgcactgactctaattgaaccgtggaaactggaatccaacatgtgggactttgggggtttacttatgtatttatttttaatatgtccaacccagccatccacctaataaagaaatactgtctgcagtattcctgactagtagcctctctttgaacttcccagggatgaaggagactattatttcacaagtttactttttatacccttgaaatgatcaggaagttcttatatacagatataagaacagatataaatacagatacacatacacacacacacagagagagagagagagagagagagagagagattcacaatctttcttcttactaacttcaactcatttgttgtgactgtgttctccagagacacacagaacaagtatgctctctcttccacagagggcttcagcagaaaggaatattttgttaattaaaatttagattggtgcaaaagcaattgcagttttttccattgaaagtgatggccaaaactgcaatgacttttgcaccaacc

SEQ ID NO: 870809 - DNA, 675 bp, Homo sapiens
cctggtggacagatatcattgccatcattttacagatgaaagaaatgaagcccagtgagagtacatgacttattcaaagtcgcattcctaattaataacagagctaggaactgatgacagctcttttgactcaaaatctaataatcttttccattgktctgcactgactctaattgaaccgtggaaactggaatccaacatgtgggactttgggggtttacttatgtatttatttttaatatgtccaacccagccatccacctaataaagaaatactgtctgcagtattcctgactagtagcctctctttgaacttcccagggatgaaggagactattatttcacaagtttactttttatacccttgaaatgatcaggaagttcttatatacagatataagaacagatataaatacagatacacatacacacacacacagagagagagagagagagagagagagagagattcacaatctttcttcttactaacttcaactcatttgttgtgactgtgttctccagagacacacagaacaagtatgctctctcttccacagagggcttcagcagaaaggaatattttgttaattaaaatttagattggtgcaaaagcaattgcagttttttccattgaaagtgatggccaaaactgcaatgacttttgcaccaacc

SEQ ID NO: 870810 - DNA, 632 bp, Homo sapiens
cattctcaaatgtgacattcctgtcaaaagccttcgttatataatcagtgtttccaattatgtcctgctataaggagaatatgttcttattgtgcttatgcaactaactatattgccatgaaaataaaaatattcaaaaacagtttctaaattttggagggataagatgggaagaaaaaaataaacatttcctttttgactgcaagcacttttggaaagcgtcagaataaataaaacaaaaactatytgtgaatgccaaaaaagtcttaaaatggccatggcttaaaattttatagagtttatttaacaagaaaatgtggttgtttctgtgaaatataatatcttaaagtaataaccagatttgtgactgatagcatgatattgaatgtatcttaacaacaagagtgctgacaaatttccctaaacttcagacaatttctgaaatacttattttaatagtgcttatccatacaaatgaacatagggaagattaaacatcttttctcatttgccgatgccttttatgcaatttaacgtatcaaataaagtgaatcgtttttaacatttttctgaaaagtgaaagaataaatccactgaagacctatgggaaatttcaaagtccgttcaagaac

SEQ ID NO: 870811 - DNA, 632 bp, Homo sapiens
cattctcaaatgtgacattcctgtcaaaagccttcgttatataatcagtgtttccaattatgtcctgctataaggagaatatgttcttattgtgcttatgcaactaactatattgccatgaaaataaaaatattcaaaaacagtttctaaattttggagggataagatgggaagaaaaaaataaacatttcctttttgactgcaagcacttttggaaagcgtcagaataaataaaacaaaaactatttgtgaatgccaaaaaagtcttaaaatggccatggcttaaaattttatagagtttatttaacaagaaaatgtggttgtttctgtgaaatataatatcttaaagtaataaccagatttgtgactgatagcatgatattgaatgtatcttracaacaagagtgctgacaaatttccctaaacttcagacaatttctgaaatacttattttaatagtgcttatccatacaaatgaacatagggaagattaaacatcttttctcatttgccgatgccttttatgcaatttaacgtatcaaataaagtgaatcgtttttaacatttttctgaaaagtgaaagaataaatccactgaagacctatgggaaatttcaaagtccgttcaagaac

SEQ ID NO: 870812 - DNA, 535 bp, Homo sapiens
tatatatatgtacaaaaccaaaggcatagcggagaagtctgtaagagaccattgttcctatctaatgtgagaagcagttagctctttagaaacccataagagagcctcaccaaactaaatttcaaaaaattatgagaacttgccgtgagaaaaaagacacaggattactatcatctctagcagagaacaaactcaccacaggccagaaaattgaagaagaaatccaaccttctacacatttatgaaacgtatgtgggaactagaaaaatggattcaaatcctgaagagtactagccccaggctgagactacaccaacacaaacactcattcccgtatgaaatgcaaaacaggaaatgygccaaaggccagcaggaaagctcatagaaatctctttttcacaagtgtactgcagctgtgctctgaaagttggaatggagcagcaaagacgagagatatctccggcagcacagaaaacaggggacgtggtgggaattaacacagaaaattgttaagtaaccaaaaagcttagtgcta

SEQ ID NO: 870813 - DNA, 695 bp, Homo sapiens
acctaacatttaaacttattttgggcatacatggttgtgtaggcttgttaatcatttacctataaaaataaaaactaggtatttctgaaatttggaaaatattttgtattgcatttattctttagttagaattatggcatacattagcactgtaaaattaattgctctaattagcaagtgttatcagtgacaaactaacatagaacattttatttgctgcagctgtcattaatataaaaaaaaaagtgaaggaaaaagatttttaattagtcatgtatgagccaatcgggtcatattggagtagccaacatcccttttcctctgacttttgaatccagttacagatatcagggattagcactggggtacctcaagtccctggaagcccctcacatctcagctgctcttatacggctgctactttcccactgattacccactacttctatagctaattatctgttagcatatttcaagcttgtcttttcaagcagaaatgtggctggaaactgtcttatttatctctgacccaaatctgagcctgggctagtgtctttatacaatcataggttcagaaaaaagacatgttgattgattgattggtatttgagyggtaaatcaatttcagaacatggcttcttttttaacttattctctgcaaagtcaaaaaaagccacatctgcttgagtaaaaag

SEQ ID NO: 870814 - DNA, 607 bp, Homo sapiens
ggctccatggaaccactgggaatgcagttccctgggatttggcaaacatgttgtaagggctttcaggcagaaagcagcctggaaacattactgacctctgttagagagaagtctccagtagatctaacaaaagttcatctctaatggatgtgttctttagtkcttctcagtaaggcaagatacctttaacagcatctttgaaattatagtactttgttctagtttcatagtaaatgctctgacggcagtgtgggctctcttgggtttcttccttctttgctgtgaaaacatacactgcatatacactgtcattatcgttgttattaagtagtgtgagagcatgagtttctaccccatcatctatgcagggcagaggcagtgaatcctgctggagtgtaataacaatctataagtaaaccagttgtggtgaaatctatcaaaaaatgtggcaatttatgaaaatatgtccctcaagcacaccaaagttgtcatcaaagtgagttaactgacaattaacttctacatcttgcacaaagggtgtggaattctagtgtaaaaataaaaccagctaagacatatctactgtctatgaacaataaatcagaaa

SEQ ID NO: 870815 - DNA, 600 bp, Homo sapiens
atcaccaatctctctttcacacatactcctcctcttctcatttctgttcgtgtacttggttctcagtgtaagattttgttagaagaaagaggcatgttggtaaaataagaaataatatatcaaaaataaaataaaattgtttgaaagtctctgcagtgctttaacaatgaaagaagtatctatgcacactttatagtttgctaaatacataattgattaagttagaagactatgtagagctgmggcgggcagatcactaggtcaggaatttgagaacagcctggccaacatggtgaaaccccgtctctactaaaaatacaaaaattagccgggtgtggtggcaggcgcctgtaatcccagctacttgggatgctgaggcaggagaattgcttgaacctgggaggcgggggttgcagtgagccaagatcatgccactgcattacagcctgggtgacagagcaagactctgtcccagaaaaaaaaaaatttaaaaaattaagctatgtagagttatttctacaaattgggtttagccattgttatatgaatatttattgctcttatatacagttctgagaacccctgaaatgattactgaat

SEQ ID NO: 870816 - DNA, 600 bp, Homo sapiens
atcaccaatctctctttcacacatactcctcctcttctcatttctgttcgtgtacttggttctcagtgtaagattttgttagaagaaagaggcatgttggtaaaataagaaataatatatcaaaaataaaataaaattgtttgaaagtctctgcagtgctttaacaatgaaagaagtatctatgcacactttatagtttgctaaatacataattgattaagttagaagactatgtagagctgaggcgggcagatcactaggtcaggaatttragaacagcctggccaacatggtgaaaccccgtctctactaaaaatacaaaaattagccgggtgtggtggcaggcgcctgtaatcccagctacttgggatgctgaggcaggagaattgcttgaacctgggaggcgggggttgcagtgagccaagatcatgccactgcattacagcctgggtgacagagcaagactctgtcccagaaaaaaaaaaatttaaaaaattaagctatgtagagttatttctacaaattgggtttagccattgttatatgaatatttattgctcttatatacagttctgagaacccctgaaatgattactgaat

SEQ ID NO: 870817 - DNA, 607 bp, Homo sapiens
ggtataaaagtaattttaatgctaggtttttaattgtttattttcttctaataatttctaagttttatttttcatatataagtatttaatgtatctagtcttcttttcctgaatggtgtgaagtggggatttacttatttttcatatggatttgaaatatggccacttcatattgcttttttgagcaggtccccaaacccattcctcatcacctggtggaatcttccaaccagggtctccagctagccctgatggtgttctctggctgacagaggtttcaaacctccctgggatagagctcccagaggaaggtgttggcaccatctttgctgcttcacagacttcacttgtgatacctccaggtactgaaaaatctgaagcarctagtgactacagcaggccaccagcacactacagcagccctacggaaaagcggccaggcttatacataaaggcctggtcccatatctcctcactaggcaggtcctccgggcctgagcatccagccacccactgccaaagctatcaagccagtagcagttcagtaactccccggacagagcctccaggggcaactgaaagcctctcacccactgcctctgccttt

SEQ ID NO: 870818 - DNA, 552 bp, Homo sapiens
gtagatagtctccttctagctgtgtcctcacctggtcttttctctgcgtgtacattcctagtgtttctttgtatatccaaattcccttttttttttttgagacagagtcttcctctgtagcccaggctggagtgcattggtgtgatttccgctcactgcaagctgcgcctcccgggttcacaccattctcctgcctcagcctcccgagtagctgggactacaggcgcccaccaccacacccctggytaatttttttgtactttttagtagagatggggtttcaccctgttggccaggatggtctcaatttcctgattccatgatccaaccgccttggcctccccaagtgctgggattacaggtgtgagcaaccgcacctggccaaattcccattttttataaggacaggtcatattggattagagcatcacactaatggatccatttatttatattctgaggccctgaggttggaacttcaaagtattaattggggaggagagagcataattctctccatagcactctccattagattgggctttatgaaaa

SEQ ID NO: 870819 - DNA, 577 bp, Homo sapiens
actgaatggcataaagattttgatacatcagtaaaagtattttgtctgttactctgagtgacttaggagatgtttcagagttttaagcactgaagtgttgtaatttgatttatgtctttaaaatatcttggctagcctgaattgagaatacaccatagggatcaggaatagactcaaggagacytattgcaataacctagatgaggaatgatgatggctcaggtgggagccatggatgacgtaagaggtagttgagtttctgatcattctgaacgtagaacaaatagtatggatcacacttggggtgtcagaggagagtcaaagatgactgaaattttggcctgaaagtcagaaaagatggaataacctgaactgagatgaggaaggctgccagaggggtggaggaagaaaagagttcagccattgataggtgtatctgaaaagcatactagacatccaagtaaggatgttgagtaaacagttgggtataaatctggagtttggggaaagtatagagataaatgtttggagatcaccaactttgaaactgaataagatcaccaagggagtgagaata

SEQ ID NO: 870820 - DNA, 632 bp, Homo sapiens
aactacaaaccagtgatcagtgatggtgaaccttttttcatatgtttgttggccgcatgaatgtcttcttttgagaagtgtctgttcatatactttgcccactttttgatgctcaagtaaataagagaggatacacacaaatagaaaaacatttcatgctcatggatargaagaatcaatgttatgaaaatggccatacttctgaaattaatttatagattcaatgttattcccatcaaggtaccattaactttcttcatagaattagaaaaaactactttaaattacacttggaaccaaaaaagagtttgtatagccaagacaattttaagcaaaaagaacaaagccagacccatcagggtacctgacttcaatctgtactataaagccacagtaaccaaaacatcatggtaccggtaccaaaacagatatatagaccaatggaacagaacagaggcctcagacataacgtcacacatctacaaccaccaaacctgacaaaaataagcaatggggaaaggattccctatataataaatggtgttgggaaaactggctagccttattcagaaaactgaaacaggaccccttccttacaccttatacaaaaattaacccaagatggattaaag

SEQ ID NO: 870821 - DNA, 671 bp, Homo sapiens
taccaacagaatgttaaaatacatgaggtgaaaactaagagaactggaaggaaaaacagacaaatccactgttatagccggagacttaaacacacttccatcagtaattgacagatgcagcaggcaaaaagttaataagaatacggttgaactgacagcaccaccaatcaatgaatttaactggtatttacagaatacctcatccaacaacagcagaatatacattcttatcaagctcacatagtatattcactaagacagaaaacattctgggccaaaaaacatacctcagcaaatttaaaagaatagaaatcatacaaagtatgttctcagaccaaaatggaattaaattagaaattaatgactaaaagtcaaaatacgtggaatttaaacaatatatgtctaaataacacatggatccaaaaactcaaagtacattttaaaaagtatttcaaactaaacgaaaatgaaaacataatttctaaaaatgtagggatgcagcagaagtagtgcttaaagggaaatttatagcattraatacatatatctgattaggagaaagatctaaaataaattatctaaacttacatagtagaaaatctagatgggtgggcctagatgggctaatgggtgaattctacaaacatttaaagaagaaataataccaattc

SEQ ID NO: 870822 - DNA, 633 bp, Homo sapiens
cctttatttctttctcctgcctgattgccctggccagaacttccgacactgtgttgaataggagtggtgagagagcgcatccctgtcttgtgccagttttcaaagggaatgcttccagtttttgcccattcagtataatattggctgtgggtttgtcataaatagctcttattattttgagatacgtccatcaatacytaatttattgagagtttttagcatgaagggctgttgaattttgtcaaaggccttttctgcatctattgagaaaatcacgtggtttttgtctttggttctgtttatatgctggattacgtttattgatttgcatatgttgaaccagccttgcatcccagggatgaagcccacttgatcatggtggataagctttttgatgtgctgctggattcggtttgccagtattttattgaggatttttgcatcgatgttcatcagggatattggtctaaaattctcttttttttgttgtatccctgcaaggctttgctatcaggatgatgccgacctcataaaatgagttagggagcattccctctttttctgttgattggaatagtttcagaaggaatggtaccagctcctccttgtacctctgatagaattcggctgtga

SEQ ID NO: 870823 - DNA, 656 bp, Homo sapiens
atctatttgctttaaataatattggcaatgtttcatattttaaccatatcaagtaaatttaattttaaacattgtaataatttttagtaatttagaaaaagttgaagaacctttgggtaattacaactttatttctattatataggctcattcaastccattaacacgttccctcctttttagttttccctggttggttggttcttccaatgctgaagaaaaattatttgacaatatattactgaggattcagtggtgagcaagtcatgaacattgaacgtagtctgccaggattactggatgagtgtgaaaaatacaaagggaacgataagtgttggattttagcctatatatgggacaatataaaagatttgtaccctctgcataagtcaaacattaagcattttagttactacttactttttccccaacagaattaaaaagccagttggtttggtgtaatcttcataattaaacaactaaaccaattggattacacctgttattgtgttcattcaggatttatttagaacaaagaaagaagtaattattcaaggtcaagaatcaagaaggcaaatggtaagaaaaggtactctgaattctactctctgaaaaggaagaagaaaacgaacacttcactgaaacagccacagtgc

SEQ ID NO: 870824 - DNA, 656 bp, Homo sapiens
atctatttgctttaaataatattggcaatgtttcatattttaaccatatcaagtaaatttaattttaaacattgtaataatttttagtaatttagaaaaagttgaagaacctttgggtaattacaactttatttctattatataggctcattcaactccattaacacgttccctcctttttagttttccctggttggttggttcttccmatgctgaagaaaaattatttgacaatatattactgaggattcagtggtgagcaagtcatgaacattgaacgtagtctgccaggattactggatgagtgtgaaaaatacaaagggaacgataagtgttggattttagcctatatatgggacaatataaaagatttgtaccctctgcataagtcaaacattaagcattttagttactacttactttttccccaacagaattaaaaagccagttggtttggtgtaatcttcataattaaacaactaaaccaattggattacacctgttattgtgttcattcaggatttatttagaacaaagaaagaagtaattattcaaggtcaagaatcaagaaggcaaatggtaagaaaaggtactctgaattctactctctgaaaaggaagaagaaaacgaacacttcactgaaacagccacagtgc

SEQ ID NO: 870825 - DNA, 656 bp, Homo sapiens
atctatttgctttaaataatattggcaatgtttcatattttaaccatatcaagtaaatttaattttaaacattgtaataatttttagtaatttagaaaaagttgaagaacctttgggtaattacaactttatttctattatataggctcattcaactccattaacacgttccctcctttttagttttccctggttggttggttcttccaatgctgaagaaaaattatttgacaatatattactgaggattcagtggtgagcaagtcatgaacattgaacgtagtctgccaggattactggatgagtgtgaaaaatacaaagggaasgataagtgttggattttagcctatatatgggacaatataaaagatttgtaccctctgcataagtcaaacattaagcattttagttactacttactttttccccaacagaattaaaaagccagttggtttggtgtaatcttcataattaaacaactaaaccaattggattacacctgttattgtgttcattcaggatttatttagaacaaagaaagaagtaattattcaaggtcaagaatcaagaaggcaaatggtaagaaaaggtactctgaattctactctctgaaaaggaagaagaaaacgaacacttcactgaaacagccacagtgc

SEQ ID NO: 870826 - DNA, 656 bp, Homo sapiens
atctatttgctttaaataatattggcaatgtttcatattttaaccatatcaagtaaatttaattttaaacattgtaataatttttagtaatttagaaaaagttgaagaacctttgggtaattacaactttatttctattatataggctcattcaactccattaacacgttccctcctttttagttttccctggttggttggttcttccaatgctgaagaaaaattatttgacaatatattactgaggattcagtggtgagcaagtcatgaacattgaacgtagtctgccaggattactggatgagtgtgaaaaatacaaagggaacgataagtgttggattttagcctatatatgggacaatataaaagatttgtaccctctgcataagtcaaacattaagcattttagttactactyactttttccccaacagaattaaaaagccagttggtttggtgtaatcttcataattaaacaactaaaccaattggattacacctgttattgtgttcattcaggatttatttagaacaaagaaagaagtaattattcaaggtcaagaatcaagaaggcaaatggtaagaaaaggtactctgaattctactctctgaaaaggaagaagaaaacgaacacttcactgaaacagccacagtgc

SEQ ID NO: 870827 - DNA, 529 bp, Homo sapiens
agtaccagtaccatgctgttttggttactgtagccttgtagtatagtttgaagtcaggtagtgtgatgcctccagctttgttccttttgcttaggattgtattggctatacgggctcttttttggttccatatgaaatttaaagtagtttttttctaattctgtgaagaaagtcaatggtagcttggtggggatagcattgaatctataaattacttcaggcagtatggccattttcatgatattgattcttcctatccaggagcatggaatgtttttccatttgtttgtgtcctctcttatttcgttgagcagcagcttgtagttctccttgaagatgtccttcacatcccttgtaagttgtattcctagrtattttattctctttgtagcaattttaaatgggagttcactcatgatttggctctctgtttgtatgttattggtgtataggaatgtttgtgatttttgcacattgattttgtatcctgagactttgctgaagttgcttatacgcttaaggagattct

SEQ ID NO: 870828 - DNA, 625 bp, Homo sapiens
agtagaaatcacaaaatggtcccattccattgatggttgttccttacaaaatttcatatttttaggcttcacatatcctttagatttcaagtttcatttaataacagtttgatctttggtttcaaggatctctttttagaattgttwaaatacctgagaggtcaaaccaaaaatttatatctctactcttcaggaacagaatcaaatggacttagggtgtaggcgtcccacagtaatggtaaagtcgcagaaacatggcaatgctgaattaccatgcagtctaaaattagtatgtaattggcttaaaatgaagacaccttggtatagcaacgtagtataatatacaaaatgcaagcagtgattagtggaactctgtgtctttatttagtagaactacccctctttcttatatcactagtgtgtgaatcagatatgtattcaagagtcaaggacaggacagaagacttgtatctgttcttagatcagaaaaagaattgaaaattataaccaatgtaatttggtgaaagtcaaagttgaggtgagctaaaggattaaaacatgcttacagatcactttggataccacctcctacaaatgcagaggtgactgcaattggaaaactgaa

SEQ ID NO: 870829 - DNA, 624 bp, Homo sapiens
acatgaggccagtgttccaatgaaaatgatttggtttaacgtgtaaacctactgggcaagatatctaatgctatgtcaggtgccaggcttagcatactgccactactcaaaaagtgaaatgtaataatgggacttgtcaagactctgaagtaataaatgtcattaaacccaggagaaaggagatggctttgctttcatttacccggggacatacagtctcagttttctcagaaaaacctaaaatcctgttgctaaatttacatagaaatgaactgaatacattatttaaagcctgattcaggcttcccatcataaaggacagggaatcttacctatattgattggtctttcaaaaggtgtatgggaaaacrcccctctcctaatcactgaattaaatggaatttgctagcattagtttaatcagtaccttgtaatcaaatcaggcatgaaatcaagttttgattatatattgttctcactattactatcaaattgccaaatcattggaaacacccctaagtatgggggaggaagacaaaggatcagggaagcaatatttatttagtaaaacagagaaatataattagatttaaccaaatttgtgaagctcttcagccttccttt

SEQ ID NO: 870830 - DNA, 607 bp, Homo sapiens
tgtttgtctattattggtgtatctgaatgtttgtaatttttgcacattgattttgtatcctgagactttgctaaagttgcttatcagtttaaggagattttgggctgagatgatggagttttctaaatatacaatcatgtcatctgcaaacagagacaatttgacttcctttcttcctatttgaataccctttattgctttctcttgmctgattgccccagccagaatttccaatactgtgttgaataggagtgatgagagagggcatccttgtcttgtgcctgttttcaaatggaatgcttccagcttttgcccattcagtatgatattggctgtgggtttgtcaaaaatagctcttattattttgagatactttccattaatacttagtttattgagagtttttagcatgaaggggtgttgaattttatcaaagggcttttctgcagctattgagataatcatgtggttttcgtcattggttctgtttatgtgatggattacatttattgatttgcatatgttgaatcagccttgcatcccagggatgaagctgacttgatcgtggtggataagcttttttatgtgctgctggatttggtttgcc

SEQ ID NO: 870831 - DNA, 628 bp, Homo sapiens
attatgaagctaatcaaggacgcaccaaagaaaggtgaagtccaacttaaagaaatcaaaaccctaatacaggatatgaaaggaaaattcttcagtgaaatagataacataaataaaaaaaatcacaacttctggaatcaaagacactcttagaaaaatgcaraatgcactggaaggtctcaacaaaaatagaactgaataaacagaagaaagaacttcggagctcaaagacaaggcttttcaattaacccaatccatcaaagacaaagaaaaaaagaattgaaaaaatgaacaaagcctccaagaagttaggggctatgttaaatgtccaaacctaagaatgattggtattctcaaagaataagagaaataaaaaagtttggaaaacacttgagggaataatcgaggaaaacttctccagccttgctagagatctagacatccaaatacaagaagctcaaagaacacctgggaaattcattgcaaaaagatcatcgcctaggtacatagtcattagtttatctagagtcaagactaaggaaagaatcttaagacctgtgatgcaaaagtatttggtaacctataaaggaaaacctatcagattaacagcagatttctcagcagaaac

SEQ ID NO: 870832 - DNA, 591 bp, Homo sapiens
acatgttatgggagggacctggtgggagataagtgaatcatgggggtggtttcctccatactattcttgtggtagtgaataagccttacgagttttgatggttttatcagggatttccacttttacatattcctcattctctctttgtctgctgccatccacataagatgtgatttgctcctccttgcctttggccatgattgtgaggcttccccagccacatggaactgtaagtccaattaaacctctttcttttataaattgcccagtctcaggtatgyatttatcagcagcatgaaattgaactaatatgtaaattggtaccagtagagtggggtgctgctgaaaagatacctgaaaatgtggaagcaactttggaactgggtaacaggcagaggttggaacaatttggagggcttagaaaactcgaaaatgtgcgtaagtttggaacttcctagacacttgttgaatgactttgcccaaaatgctgatagcaatatggacaataaaatccaggctgaggtggtcttagatggaaatgaggaacttattgggaactggagcaaaggtggctcatgttatgttttagca

SEQ ID NO: 870833 - DNA, 591 bp, Homo sapiens
acatgttatgggagggacctggtgggagataagtgaatcatgggggtggtttcctccatactattcttgtggtagtgaataagccttacgagttttgatggttttatcagggatttccacttttacatattcctcattctctctttgtctgctgccatccacataagatgtgatttgctcctccttgcctttggccatgattgtgaggcttccccagccacatggaactgtaagtccaattaaacctctttcttttataaattgcccagtctcaggtatgtatttatcagcagcatgaaattgaactaatatgtaaattggtaccagtagagtggggtgctgctgaaaagatacctgaaaatgtggaagcaactttggaactgggtaacaggcagaggttggaacaatttggagggcttagaaaacwcgaaaatgtgcgtaagtttggaacttcctagacacttgttgaatgactttgcccaaaatgctgatagcaatatggacaataaaatccaggctgaggtggtcttagatggaaatgaggaacttattgggaactggagcaaaggtggctcatgttatgttttagca

SEQ ID NO: 870834 - DNA, 596 bp, Homo sapiens
atagacgcaataaaaaatgataaaggggatatcaccacctatcccacagaaatacaaactaccatcagagaatgctataaacacctctatgcaaataaactagaaaatctggaagaaatggataaattcctcgacatatacamtctcccaagactaaatcaggaagaagttgaatctctgaatagaacaataacaggctctgaaattgaggaaataattaatagcttaccaaccaaaaaaagtccaggaccagacggaatcacagccgaattctaccagagtttcaaggaggagctggtacctttcctcctgaaactattccaatcaatataaaaagagggaatcctccctaactcgttttatgaggccagcatcatcctgataccaaagcctggcagagacacaacaaaaaaagagaattttagaccaatatctctgatgaacattgatgcaaaaatcctaattataatactggcaaaccaaatccagcagcacatcaaaaagcttatccaccatgatcaagtgggcttcatccctgggatgcaagactggttcaacatacgcaaatcaataaatgtaatccagcatataaacaa

SEQ ID NO: 870835 - DNA, 620 bp, Homo sapiens
acaaacccaaaacaaacttcacattttgaacacttttcatgctaatgtaaaggctaatgtttatttgtctaaacaagagaaagaatatatatatttttaacctggatgaataaaatctgtaagcccggagagtttataacaatgcaatgcacttgtagcacctgttgtcatggatacacactgtctctgatgggaacagtaaaaatgacccaatcacaccgagagaccgtgcaytctttctgaccagcacttatatactgtttataagttacactattttcatacacgattcggttttgtatgaaaatctcaaatacaagtttctaccactcttagattaaaggatggcttttgcagtgtaaaatttaaaaattccaccaacaccaatcttctaagcatataattttcactgacctaactattcttcattattctctaattttgctcacagaatggtggttttaatgtatttgttttataaatgactttttttttccaagtgagataacatcattctaatggttgaaatgctaagcacatgatttaacctgatggctttgagaatcaatagtatgccttcaatatcattttatctgtagtcttgggcaagttacttagcc

SEQ ID NO: 870836 - DNA, 506 bp, Homo sapiens
ggcaaaggatatgaacagacacttctcaaaagaagacacttatgcagccaaaagacacatgaaaaaatgctcatcatcactggccatcagagaaatgcaaatcaaaaccacaatgagataccatctctatcttttcaactcatgaatggcttattgttcagcagcagactcatgaggacctctactcagagctctgkaacattttctttaaggaggttcctcttcttttgtgctctgcttcacaattctagctgccttagctttcctaaactcttatttttgctgataaattaagcaagacccctttgcatttcctgtttcctcccttccttcactactgactaaaacatgcttccaaaaagaaacttggggtattcataggaaacatctggtttgttatttttgtttttgtcttagggatcacagtgctgtgctgcatgttcacgggaaactaaataataagaaaaaatagtataactccaaactatttgagggaaatattataa

SEQ ID NO: 870837 - DNA, 621 bp, Homo sapiens
gttcagatccctgaggccttccagatgactccctacctggaggaaaaactgcaatatcaggccacaaccttcttggttcattcttttgaaaggaggagtgtccagcttctacatcacagcacaaacatatgccacacttttcttgcttttctggcaatggagctcctctcttgctcaaaatcatatcaccaatcttatcttcatgaccctggatggtatgcttgtgtccygggtgtattagtctgttctcatgctgctaataaagacatatctgagactgggtaatttataaaggaaagaggggaggcctcacaatcatggcagaaggcaaatgaggatcaaagtcctgtcttgtaaggtggcagggaagaaagcatgtagctaggatcacagagacccatggttggaatataaagctccagagttccttcacttaccccttccttgggtctgagttcaggtccctggactgttctcagtactcagcaaccctaaacattcagccctgtttcctatttctttaatcacggtatctctcatcacctttctattgtattttagtgttcgggcttagaaaatctatttgaaatgcaaagattttttggatatttttgctcttct

SEQ ID NO: 870838 - DNA, 605 bp, Homo sapiens
catgaaaatgaagaacttatatcaccaaaaatgaccactaaaagactgatttcgcaagccacagagtggaagaaagtcaatatggtacctatatctgataagaaattccatgtagaatatataaataaccaaaataaatcaataagagaaagagcaacaacacagtgggaaaatagtgcaaagtcttcatcagatattttttaatgatatatgcaaaaatccaataaaagtacataattttatcaataatcagaaaaaggaaaatgtaaaccaagatgcaataataatgctgagaggaaaattttaattgtaggtctgcgttcatcatttcagtttcaataatgcagtttttcaccatctcaatacagttattagtttaattttattacataatatatcaaaaaagtataaaagtataccagatctaagacaaataaatayttaattatcaagattgtttactgagtaaaaataagagttttgactgagaagcagctgcagtaaagaatacaaaatatgctaggcacggtgacttattcatataatcccagcactttcggaggttgaggtgggtggacctcttgaggacaggagttcgagaccag

SEQ ID NO: 870839 - DNA, 625 bp, Homo sapiens
acattccagaataaagctcaagaaatttttagttatataaaaatatctagcatccaacaaggtaaaatccacaaggcttgaatgtaaacaaacatcaccagcaatgcaaagaagcttgaaattacaaaataaaaaaaaaaaaaaatcaataaattgaaaccaaccaagaattgatgcagatgttagagttaccagacaaggacatttaaaaagttatgacataatctattcatttacaaagttaagtagaggcatggaaaactgtaacaaagacgcccaaattaaaattttagagatgtaaataataatatctgagcttaaaaatacgacaaattggataaatgacatattaaactatggaaaaggaaagattaaagaatttgaaaaaatggaaataaaaatcatccaaaatgaaacaraaaagaatttttttgaagtatgaaaaatatcagtggactgttgaacaatggcaagcaacttaatacacaggtaaagtccccaaagcggatgagagaagtattaatacttttcacctggcagatcccctgaggtaaggagatgaagctcagagtcccgggagaggaaggcagctaaaattcttagccactgtttcttcaaatgttac

SEQ ID NO: 870840 - DNA, 569 bp, Homo sapiens
ccccttgtccttagaatggttacctgccagtaatttaccttccaagtgggagattcttttctggagaaaccaaacagccctagagacaagagcctcaaatactaaaatttggaagtcctcaaacaaaaattccagctccagtgaaacccctcaattgacagccccacctccttcatgcttacccacgaacacatatcttccaaagagttctttagggatttggatttaaatatgatagcctagaattacctasatagcctaaatgcttgaggcaaatctctaacatgaataaaagaaatcaaaagagagaaatagaaaaaaaagaacccataggaattagagatacagtatcactaatgatctagagatctaatgatctgatctgaagacacacctgcattagatggcagaagaaaactgaagaaaatctacaataaatattctcagagaattaagaatagctattggattcttataacaagaacaaggcactaataaaaaatgacctataagaaaacaagaaattaaaatattctatagcagtttgaaagataatgttgagaaattct

SEQ ID NO: 870841 - DNA, 603 bp, Homo sapiens
aatacataaaatcctagttactatagaccgtttcgatgtttcaccgggtacagaggttattaagttacattattaacttttaactctttgatagtcaccatctttactgctcttgaaattttaattataaaccattatttatcttattaytataatttttactgtcataatcaaagaatttctgagattttcaaccaacccatatgatgaaggtatgaaacatctttttatcaccaagatgggaaaacaatggcaaactcttgcatcaatcaagttaaatgaattggttatagatggttcttagtgttggattttcacctgaagtatctgccatcagcctttcatgggaaatattttaatttaattttgaaattaaaacagtggtgtagtttcattttgatttgtatagaaaagggcttagatagtaatgcagtataaacaaccctgacagaaatcttgatttatcggttcttgggggattcagcaaaggctttagggcatgaaaggcataaagaaaacttggcaggaaccagagcagaggaaggcaagatactagccagctagcatggtgttttttccctgttctctgacagaaggaggaca

SEQ ID NO: 870842 - DNA, 637 bp, Homo sapiens
atgctaaacaaaagacgactttcattccaaggaaatgagatagagacagcacgagtcttacttctgttgttttccatggaggaccttgacaggaagagcaagttttgtctcagtgatgtacagagttgatctttaagttgcatgacaacatcattatcttgctctggcttaaaaaaaaattatcagctttgggaacaattgtctcttaacagtaactcagattttaggtttytccttccctgccagcccagggtgatatgaacattttgaaaaaactagaggtagctttttatcagtaaaaaaaaaaaaaaaaaaaaaaaaaaaaaaaaaattccctcctgcacatttgtttcttgaaggacaggtttctgcttctatctttttgttttctaggttgaggatgatgaatggcagtttccaaatgtatttctgaaaaagatgaataagaaagagctgtttctgattcaaccttccaattcctgggagaaatggatgaagtaggaagtagagagagctgtagattacagaaaggccaacatgaggagttgcttttcttgtaaatgtgtttcatttagaaggcatgtgtgcttaacaaaggatttaatttgtgtggaattaaaaaaaaccaaacttttga

SEQ ID NO: 870843 - DNA, 565 bp, Homo sapiens
gtatatgaatctgcacaagtctcaggctcattctcaaagaaaaagaggagtaatagatgcaactagcatagtacaggttttgacaaccaaactgaggtttgaaccactgcccacagatggcaagatagaacttgcagtctaagcctaaacagttgattgccataaaacaagaacatcaacattctacagaggattataataggatccagtgcctgtaaaatgtaaatccacaatgcccagataccattccaaagttatatgacatataaaaaagcagaawaatgtgttcacatttttaccccagtggaaaagataatcaacatatgaccagatcaaggtgacccagatgttggaatcatcagacacaggctttaaaatagctattatagctgcataccatggagtaaggaatccatccttgaaatgtatgagaagatagaagtggatatcttaaaactgcaaaagaataaaatgaaaaatttagaactgaaaaatgcagtatctgaaaactggatgggctgaatagcaaaatgaaaatatagaagaaacaccccagtgaacttaa

SEQ ID NO: 870844 - DNA, 647 bp, Homo sapiens
aactttagaacttaggcttaggggtgaatggcgagctcggggcttgctcaagaagccgactgaacagaggcccaccaaaataaggccttcccttttcgggtctttctgggacctgcggctttttaaactctgccgcaagccttcatgtccctggcgtgctcactccccctaagaaagtttctccgaaaatgcacagcmataagaagcggtagacttggtggatgtgcgcgcgggggtgatcacagcgcatggggaggagggtgttaaaacaagccgaagtagaacttgggccaccctaaccggtgcttttctttcccattttcttctttctccccctgcttcaccgtctctccttccgtcttgggccaggtgtggttccagaaccgccgcgccaagtttcgcaagcaggagcgcgcagcggcagccgcagcggccgcggccaagaacggctcctcgggcaaaaagtctgactcttccagggacgacgagagcaaagaggccaagagcactgacccggacagcactgggggcccaggtcccaatcccaaccccacccccagctgcggggcgaatggaggcggcggcggcgggcccagcccggctggagctccgggggcggcggggcccgggggcccgggaggcgaacc

SEQ ID NO: 870845 - DNA, 566 bp, Homo sapiens
ctactcaggagctgaggcaggagaattgcttgaacccgggaggtggaggttgcagtgaggcaagattacaccactgcactccagcctgggccacaagagtgaaactccgtcacacacacacacacacacacaaaagaaaaaaaaggtctcctgctggracacagactagttagagaaaggaaaaataaacaaatgatagtatgtatattaataaaagaactagcaacacccactgcttagttgtgataataaaaactggacattaatataggcagaaaaacagaacagccttgatatggttaaccctttgacactggcaaacactgtgaccagtgctgcccacactggaagctcctgcatccctcttcctcatgtttccttcagcattaaggagcaacaagggagacagccagttcatagttccttacgcatggagccaaaggaccttcaatgtacaaggtctgagcaaggacccgcagccacatgtgcttcctgcttcagcagtgccccgtgggtctcagagctacccaaaggcctatccttccgagaggtttctcctctctccc

SEQ ID NO: 870846 - DNA, 600 bp, Homo sapiens
ctgaatctctgatacatcatactatttactgtctagtaaatagtacacacttaataaggattttttgaattaataattctacaatcaacgaatctgggaaatctttaatcttttattacctgctagttccaatggttatctaagaaaacaacaaataaaaaaaaaaccttatagatatctttattgaatcagcaccagagtttaaggtataaagttgactggcattacatatatgaattaaattatatttgtgcatgtgtatctgtgtttaaagagatagactcatatacactgtgcttggtacacaagtaagaatttgatttttagttgcttttccttcttggagtcaaaataactaaaaactctagcaagctctacatcatattgartggtattatgtattttgattcttgtttttatgtaaaattatcataatcatgtctgtcataggacttttgtgactattccttgaatagcaaatgtatagcacccagcacaaaccctggacagaataatattggaaaaaaacaaaactatggattcagaatttaaacatcactttgccaattttactaaatttctgaatgcaggaatgaacag

SEQ ID NO: 870847 - DNA, 610 bp, Homo sapiens
  misc_feature 582: n = A,T,C or G
taacatttctgagaggaaacagtgcaggataatggtttaaatcaaatcacactgatgttatgtctggccctgaccttgcctcatgaaggtgttctttgtcttttgtgtgttttactttttttctttttaacagaggcgggtttttgctgtgttgcccgggttggtcttgaactcctgagctcaagccatccacccatcttggcctcccaaagtgctgggatcataggcgtgagccaccacacccagcctgatgaaggtgttctttgaaccacctcagggaatgacactgtgcgcttgtaaagtttccacaaggacttttatctccgtttggtttgaaaataccatgattttccaagtagtaagcttttctaagtagtgagattttccaagtaaaggcagattttttttttctgagtctrttgtgtggatgcatagaggtgagggagtagccataactccagtgtgtggtctctgaactccaaacattcagacttttttttttttttaagagacaggatctcgttctgtcatccaggctggagtgcagcggcatgaccacagctcactacagcctcaaactcntgggctcaagtgatcctcccacctcagt

SEQ ID NO: 870848 - DNA, 521 bp, Homo sapiens
tgtatgtttattgcagcactgttcaccatagcaaagactcggaaccaacccacatgcccatcagtgatagactggataaagaaaatgtggcacatatacaccatgaaatactatgcagccataaaaagggatgagttcatgtcctttgcagggacatggatgaagctggaaactatcgttctcagcaaactaatacatgaacagaaaaccaaacaccacatgttctcactcataagtgggagttgaacaatgagaacacatggacacagggaggggaacatcacacactggggtctgtcagggggtgggaggctaggggagggatawcattaggagaaatacctagtgtagatgacgggttgatgggtgcggcaaaccaccatggcacgtgtatacctatgtaacaaacctgcacgttctgcacatgtatcccaggacatgaagtataataataaaaggcattgctaagtgagggactttgccgccctagttttaatctattaagaatattatgcacaggg

SEQ ID NO: 870849 - DNA, 559 bp, Homo sapiens
aaaagagaaaaggggttttgatataaaaatgaggacatagacaaacttcttaaatatactaaagtcttgaaagttaaaaataaattgaattaataaaggaaacaatttgagatgtcatcgttacactttgtatacgtgtgtcaaaatatcacactgtttcccataaaaatgtacattgattgtgtcagttaaaaataattataaaagcaaaaataaattttaaaaaatgagaagtaattactaatgagagatgaaaaaaattcaagataaaaaacgtgggactctcagaactgagatagaatcgctgattccattccagcagctgctaagcatgagagaaagggaaagtgcaggagaatgatgtagtagatctacatttgttagacagytgacatttgtttctaccacaaatcaaaattcaaggaagaagctaattctgtcctgaaagctatcactttaaatctaagagaaatgatttttacacctgcaaatattttgctaaagacatatcagtccttgaagacatttaacagaagagatgtaaaacctttttggatat

SEQ ID NO: 870850 - DNA, 592 bp, Homo sapiens
ttgtttttgtcaggtttgtcaaagatcagatggttgtacatgtgtggtaatacttctgagggctctgttctgtttgattggtctatatctctgttttggtaccagtgccatgctgttttggttactgtaatcttgtagtatagtttgaagtcaggtagcgtgatgcctccagctttgttcttttggcttakgattgacttggcaatgcgggctcttttttggttccatatgaactttaaagtaattttttccaattctgtgaagaaagtcattggtagcttgatggggatggcattgaatctgtaaattaccttgggcagtatggccattttcacgatattgattcttcctatccatgagacattcttacactctacctggctccacaaagcagggcttttagagatcatcctgctggtgtgtggaaatagctgtgctatgggcatggcttatgatgggcttttacctgagtctttgaaaaaacagataaatttaaaaaataataatgatgaagagaagggaaatttaggaatatacaggagctgcaggctacatttttattccttcagtgatgtaaggtcctctacatctt

SEQ ID NO: 870851 - DNA, 574 bp, Homo sapiens
aaatatctcttaagatagggtttggcatctctattgtaaaattgttccacagttgattctgatgcaagccagggtttagaacactgatttaaacttattcattacgatctgctcctttaaggaatattgatgaatactattttgtgtcaggtacttgttaargactttctctgcaacattccattattataatccacccaatgaccctatgagttctatctcattatttccgttttatgaggagatcagtggggttaaataacttgcctaagttttctctgtctgactccaaagcctacgttcacatcacaaattcatggagttaagggtgcttagaattcaagagaatagtctaaggctctctactgaattgttaggattatccacacccttttgctgatgctcaaactactaatcatcatagctcataagagagctgtttaatgtgtgtaacttcttactattctcatgacaaatgtagtatagtaaaaatgcacaagaaaggagaaaaatagtctttactctattaatttttactatcacattttaagtctgaagctggagaaataatata

SEQ ID NO: 870852 - DNA, 574 bp, Homo sapiens
aaatatctcttaagatagggtttggcatctctattgtaaaattgttccacagttgattctgatgcaagccagggtttagaacactgatttaaacttattcattacgatctgctcctttaaggaatattgatgaatactattttgtgtcaggtacttgttaaggactttctctgcaacattccattattataatccacccaatgaccctatgagttctatctcattatttccgttttatgaggagatcagtggggttaaataacttgcctaagttttctctgtctgactccaaagcctacgttcacatsacaaattcatggagttaagggtgcttagaattcaagagaatagtctaaggctctctactgaattgttaggattatccacacccttttgctgatgctcaaactactaatcatcatagctcataagagagctgtttaatgtgtgtaacttcttactattctcatgacaaatgtagtatagtaaaaatgcacaagaaaggagaaaaatagtctttactctattaatttttactatcacattttaagtctgaagctggagaaataatata

SEQ ID NO: 870853 - DNA, 671 bp, Homo sapiens
aaaatttattcctccagtctgagactttatacactttgatcaacaccttcccttttcccaactcctcctcaacccagctttctactctctgtttttatgagattgactttttagattctacatgtgagatcacacagtatttatttgtctttgtctggtttattttgcatagcaaaatctccttcagttccatccatgttgtcacaaataacaggacttccttctttttacggcagtataatattccactgtgtttatataccacattctctttatctatttttttcattgattaatacttacattgtttccatatctttgctattgtgaataaaatgctgaaataaacatgggagtgaagatatgaacataccaacttcagtttatttgaatatatacccataggtgggattacagaatcatatggtaattctatttttgttttttgaagaacctccatattatgttccaaaatggctgtagcaatttacattcccaccagcagtgyacaagggttcccctttctccacatctctaccaatacttgttatcatttgtatttttgatagtagccattctaaatggaatgaggtgatatttcattgtagttttaatttgggttgcttgcatttcttacatattttggaaattatccccttattagatgtatg

SEQ ID NO: 870854 - DNA, 588 bp, Homo sapiens
tcattcaactagacaaaatgtgtcagccagaaatgtatgacacagtggaggccagaggtttttacagcagcaagtccctaaaaaaacaacaggatcaaatatgctatttttaaaaaattacccaaagatagtttaaggtctgtgctcttagtataattcccttttgtctcactttacattkggatactttcaaatctcctgctaagtggattgacattacaaatgactctaatacagagcaggtttttcctgaactttcctagacagtcaagtggagagatttctaaatataaaccatcttattcatggtttcattgctgtatataaataaaacctgtcccaaccctgtatgaatttttaaataattttcattaataatctcttgggcagcttcagtctcactgtgaaggattcactcttgaacatttcgattgactcaattaattgtcaatcttatttagaagttctaaataagagagatagctattataatttgtgaatgatgcagctagagttgcaaagagtagctcattccatacttcatcactcatttttcagggtatattaacaatgtctttacaaaggttt

SEQ ID NO: 870855 - DNA, 683 bp, Homo sapiens
ttaatcctcataatacccccatgagggcatttatagggcttttccaggcatgtccccacctcagtacttttgcacttgctgtttgctctgcctggaaagcttttacttcatatccatgtggctggcttcctcactttcttcaggttattattcaaatggcatatcagtaaggccttcttttctaaactctattctaaatttgcaacccccccaatttttatctcactttcttgaccatttttctccttagcagctatcactttttaatatgtgctatattttttacttatttgccttttcactgcttccccgccccgcatttgaatacatgttctatgtaggtaagaattgttgtcactttttttgacttttttgacttcttgatttccatgattcctagaacaatactragcatatgtaaaagtgttcaatgaatatttgttgaatgaatgaatatggttaggactattataatcacacatacatacacacacacactgtttacatgttacttaaaaactttatatttaaatatacttatatttgaaattagtatataaaattatatgtcagatctcagagaatgaaaatgagaaaatatctatatatatgtaaattcttatgtgcagatggaaataaaatagtctctagtatgtgagcatagctatagaattcaggtaata

SEQ ID NO: 870856 - DNA, 605 bp, Homo sapiens
ccaatttgcagctataagtaacatgggccctgcagtttgaggaaggtgaaagcacctgaatctatgtggcatgatgagggggtgcaaaaacaatgatttttacatggaaatggcttcttgtaccactaggctatagttgaagaaaytgtacctagtttgtggcgggacccaaattgtttatacagcttctagaagactataaacacagtttaaacatactagtgtgttaaatgcaaacatacagagtgacaatagtgtctttttttgaggaaacaccgtagaaaataaagaaatggtttggccttaaataaaactgtgaagaagctgaagtttcaccaacgcttagcaaagaagctgtgccccttccctcttctatcatcccctgaggtcagtcagtagctcctgactgacccagattcagaatctactgatggctgctctcttttaggaaaatatacccatcctatatcttcaagctgaagaatcaattaagtgctttccagtgggagtcgatttattaaaactctgtttttctcagtcttcctatcacattcctcttcctctctccagttgaatgttagagttactcagacctggatagcagg

SEQ ID NO: 870857 - DNA, 587 bp, Homo sapiens
ttgatttggctcttagcttggatcttgttggtgtataaaaatactactaattttttttttctaaatgaagtctcgattttttgcccaggctggtgtgcagtggcatgatcttggttcaccacaacctccacctcctgggttcaagtgattctcttgcctcagcctcctgagtagctgggattacaggtgtgtgccaccacacttggctaactttttttgtatttttagtagagacaggktttcaccagactggccaggctggtcttgaaatcctgacctcaaatgatccgctgacctcagcctcccaaactgctgggattataggtgtgagccgctgcgcctggtgtatgcattactgatttttgtacactgattttgtatgccaaaactttgcggaagttgtttatcagatcaagtagctttggggcataaactatggaattttctaggtatttaattatatcatcttcaaacagaaatagtttgttctcctggcttactatgtggatgccttttatttctttctcttgcttgactgttctggctaagacttccagtactatgttgaataggagtggtgagagagg

SEQ ID NO: 870858 - DNA, 574 bp, Homo sapiens
ctttaatgctctgtttcccttttaaaactgaatgcctttaacagcacccaagtcatctctgaaatgctttgctgcttacaaatttcttctgccagataacctaaatcatctctctcaagttcaaagttccacaaatctytagggcaggggcaaaaatgctgtcaatctctttgctaaaatataacaagagtcacctttgctccagttcccaacaagtttatcatctccacctgagaccacctcagcctggaccttattgttcatatcactgtcaagatttttgtcaaagccattcaacaagcctctagaaagttccaaactttcccacattttcgtgtcttcttctgagccctccaaactgttccaacctctgcctgttacccagttccaaagttgcttccacattttcaggtatcttttcagcaacaccccactctactggtactgtttacttattagtccattttcacattgctgataaagacatacctcagaccaggccatttacaaaagaaagcggctcaattgtgatatggctctgatgactggaggaacaccagggttcttggtcttc

SEQ ID NO: 870859 - DNA, 574 bp, Homo sapiens
ctttaatgctctgtttcccttttaaaactgaatgcctttaacagcacccaagtcatctctgaaatgctttgctgcttacaaatttcttctgccagataacctaaatcatctctctcaagttcaaagttccacaaatctttagggcaggggcaaaaatgctgtcaatctctttgctaaaatataacaagagtcacctttgctccagttcccaacaagtttatcatctccacctgagaccacctcagcctggaccttattgttcatatcactgtcaagatttttgtcaaagccattcaacaagyctctagaaagttccaaactttcccacattttcgtgtcttcttctgagccctccaaactgttccaacctctgcctgttacccagttccaaagttgcttccacattttcaggtatcttttcagcaacaccccactctactggtactgtttacttattagtccattttcacattgctgataaagacatacctcagaccaggccatttacaaaagaaagcggctcaattgtgatatggctctgatgactggaggaacaccagggttcttggtcttc

SEQ ID NO: 870860 - DNA, 574 bp, Homo sapiens
ctttaatgctctgtttcccttttaaaactgaatgcctttaacagcacccaagtcatctctgaaatgctttgctgcttacaaatttcttctgccagataacctaaatcatctctctcaagttcaaagttccacaaatctttagggcaggggcaaaaatgctgtcaatctctttgctaaaatataacaagagtcacctttgctccagttcccaacaagtttatcatctccacctgagaccacctcagcctggaccttattgttcatatcactgtcaagatttttgtcaaagccattcaacaagcctctagaaagttccaaactttcccacattttcgtgtcttcttctgagccctccaaactgttccaacctctgcctgttacccagttccaaagttgcttccacattttcrggtatcttttcagcaacaccccactctactggtactgtttacttattagtccattttcacattgctgataaagacatacctcagaccaggccatttacaaaagaaagcggctcaattgtgatatggctctgatgactggaggaacaccagggttcttggtcttc

SEQ ID NO: 870861 - DNA, 563 bp, Homo sapiens
ggtttttgactctagtccctgactcctggatggcacttctgaacccattaggggtctgtgggaccttgctaccctgaagggaaggacacaggcctggctggctttgctacctgctgattgcagagccccagggccttgagtgaatataggcagtagccagggaatggttacagcaggacttgggcgagacatagcactgtgctggcttcaggcctgacccagtgcagtcacagtggtggtggccacaggagtgcttgtatcactccaccccccatgttaggtgggggrgggggggagagagagagagagagagagacagagagactctgtatgtttgggagaatgtaagggaagggaacaagagtttttatccaataatccagagaattctcctggatgttatccaagaccatctaggtggtacctctacagctctgcaagaaccacagcgtaactggacttggggtgccccctaaggcacatacagcctagatcacagcacccaagtcctttcaaatatctgaaaagccttcccaagaaggacagctacaaataagcccagt

SEQ ID NO: 870862 - DNA, 616 bp, Homo sapiens
aaaaagcttgcgcagagaaactcccatttttaaaactatctgatctcatgagacccatttactatcacgagaacagcatggggaagacccacccccatgactcaatcagctcccaccaggtcccactcacaacacatgggaattatgggatctacaagatgagatttgtgtggggacacagagcmaaaccaagtcatttctcctctggttcctcccaaatctcatgtcctcatatttcaaaaccaataacacctttccaacagtcccccaaagtcttaactcatttcagcattaactcaaaagtccagagtccaaagtcttatttgagacaaggcaagtcccttctgcctatgagcctgtaaaattaaaagcaaattagttacttcctagatacaatgggggtatagacattggatcaatacagccattccaaatgggagaaattcgccaaaacaaaggggctataagccccgtgcaagtctgaaatatatcagggcagtcacattttaaagctccaaaatgatctcctttcactccatgtcttatatccaggtcatgctgatgcaagaggtgggttctcatggtcttgggtagctctgtccctgtggctttgcag

SEQ ID NO: 870863 - DNA, 652 bp, Homo sapiens
tcatgagacccatttactatcacgagaacagcatggggaagacccacccccatgactcaatcagctcccaccaggtcccactcacaacacatgggaattatgggatctacaagatgagatttgtgtggggacacagagccaaaccaagtcatttctcctctggttcctcccaaatctcatgtcctcatatttcaaaaccaataacacctttccaacagtcccccaaagtcttaactcatttcagcattaactcaaaagtccagagtccaaagtcttatttgagacaaggcaagtcccttctgcctatgagcctgtaaaattaaaagcaaattagttacttcctagatacaatgggggtatagacattggatcaatacagccattccaaatgggagaaattcgccaaaacaaaggggctataagccccktgcaagtctgaaatatatcagggcagtcacattttaaagctccaaaatgatctcctttcactccatgtcttatatccaggtcatgctgatgcaagaggtgggttctcatggtcttgggtagctctgtccctgtggctttgcagggtacaggctcctcctggctgctttcatgggctggcattgagtgtctgtgccttttccaggcacatggtgtaagctgtcag

SEQ ID NO: 870864 - DNA, 616 bp, Homo sapiens
aaagacttaaatgtaaaacccaaaactataaaaagcctagaagaaaatctaggcaatactaatcaggacataggcacaggcaaagatttcattatgaaaatcccaaaagcaattgcaacaaaagcaaaaattgacaaatgagatctaattaaactaaagagcttcttcacagcaaaagaaactatcagaatgaacagacaacccacagaatgggagaaaaattttgcaatctatccatctgacaaaggtctaatacctagagtcaacaaagaacttaaacaaatttatgagaaaaaaaacccattaaaaaggaggcaaagagcattaacagacacttctcaaaagaagacgtacacgtggttaacaaacatatgacaaaaaagtttaacattatggatcaytagagaaatgcaaatcaaaaccacaatgagataccatctcatgccagtcagaatggctattattaagaagtcaaagaacaacagatgctggtgaggttatgaagaaaaaggaacacttttacactgctggtgagagtataaattaattcaaccattgtggaagacagtgtggcaatttctcaaagacccagaggcagatataccattcaacccag

SEQ ID NO: 870865 - DNA, 685 bp, Homo sapiens
attcagttttataaaggaagcaaagcataaaactttggaaaaattgcagtctgactatgcaatagagaagaaaatcccattttctggggagaaattcaagccggctgcagaaatttgcataagtagcaaggagcctaatgttaatctccaagaccatggggaaaatgtctcagggcatatcagagaacttcacagcagcccctcccatcacggacctggaggcccaggagaaaaaagtggttttgtgggctgggcccagggtccctgtgctgtatgcagcctagggacttggtrccctgtgtcccagctgtgccagctgtggctgaaaggggccaatgtagagcttgggctatggcttcagagagtggaagccccaagccttggcatcttccatatggtcttgagcctgcagatggacagacatcaagaattgaggtttgggaacatccacctagatttcagaagatgtatgataatgcctggatgcccaggcaaaagtttgctgcaggggcgggatgctcctggggaacctctgctaggacagtgcagaagggaaatgtggggtatgatcctccacacagagtccttattggggcactgcctagtggagctgtgggaagagggccatcgtcctccagaccccaaaatggtagatctaccaacagcttgcactttgcacctggaa

SEQ ID NO: 870866 - DNA, 638 bp, Homo sapiens
ccttaaaatatttcatgaaattctaggtaattcatcccctggtaaaatacttaataccatagtcgtttatagttgaattccatttatcattaacaaatgtacaactaaaaataaataaatgtaaatcagaagcgattcagtggataatgtcacatgatcaaaatgtaaaattgtttcaaaccataggcctttttaccaaatcaataactcaaaatgatttactatgtatatttaatacaaatcagtccacttcaataaatagaattaaattatgccttttcagataagcaaaaatatcgtatagcattattgtatctaaagtgatttcaccttcggggtaggggcagagaaggcaccaggatctccgaarggagaatatctaagtcagtaatatccacctggtcctggataagggccagagataaaagatgaaagaaaattataagaatagaggaagctgccgggctaaggttttgctcatattgaagagaaatagtcaaaacagatggagtctccatgatgacctagaaagtctagccccccatctgtggtcctcgaacccacatctttactccttcaacttctgcagcttccaaattagacacacacatgtgttccctccagtaggcccctctagg

SEQ ID NO: 870867 - DNA, 594 bp, Homo sapiens
gtctacttgacactgaactctcaggaattcagtcattgaccaatctttttaattgtagtgtgactttaacttcaaattttgacttttaaaattaaagaggcttaaagattttgcagcccttccatctttttgtccaagagattagaacactcaggtataacaaatatttggcatagctggaaatacaattagagatttctaacatccaacacagtgctttttgtttttgtttttgtttttgttttgtctcactcttgtttgcccaggctggagtgcaatggcatgatctcagctcactgcaacctccgcctcctgggttcaagcaattctcctgcttcagcccaagccagtgctcatgccactgaatcatgcttctctttgtcaagtatcttsaaaaagtcacttaacctcttgtggctttatttttttcatctttataatataaatagcttccaaggtctctcttgaattacgttttataattcagtactgtatcaatagcacaaatcttttacatttctacatatatatagagattggtttgatgaacaagtgaaatatttgttttattttaaaaaatttatggagaggccg

SEQ ID NO: 870868 - DNA, 509 bp, Homo sapiens
gagtttggaagtagtcttcccttctctatttttttttttttttttttttttggaatagtttgagcaggactggtgtcagtttttctttaaatatttggtagaattcagcagcaaaaccattgggtcctgtgcttttcttgctgggagaacttttgatactccttccattaaattgtttattatttgtctacataagctttgaattttttcatggtttaatgttcataggttgtatgtatctaggaatttatccmtttcttatagattttccaatttattggcatatagttgcttagattaatctttaatgatcttttaaattttttcagtatcaaattctcttctttcagctgtaattttatttatctacatcttctctcttgttttctcaattaatctggctaaagatttgtcaattttatcttttcaaaagaccaacttctcatttcattgatcttttgtatttcaattttatttatttatttatgctctaatatttatttttttct

SEQ ID NO: 870869 - DNA, 650 bp, Homo sapiens
cttcttcctactgatttctttagtttcccattttgtgcatagaaatcttaataaaatatttcagtgtgcttgcatacattatttttactgaaacaatagagtaatagtgataataatatatgctcctctcaccaccaggcctaggcatgtgtctgccagagtctgtgaatggaaagtggatgatgaggttaggattattaaagcaggaatgcaaagaaggagttaatatgtgtcttccgatacctgcagttgtgtgtgttgtgtgtgtgtgtgtgtgtgtgttgtgtgtgtgtgagagagagagagagagagacaggagggtggggggagagagattcttaaaattcttttttccaagcctagaggactcaaatcatatgacttgaatggtgttgccaaaaatgcacctttttctaggagaatgtgatgtacaaaatattcaattttttttaaaaggtgyccataccaatccatcccctcaacttctactgcctagaattgtgaagagaggaagcaaaagtcagataaacaagtacatcagagtcaggataatccttctcattttctgtttattttctgtctcatccactaaaatggaagcttcataggagccaagaatttgtatgctttgttactcattctatcttcag

SEQ ID NO: 870870 - DNA, 593 bp, Homo sapiens
tttggattaaatatcaatgttatcagtgacagtgctatgtatacaataaaatataggaggatttgatcgagaaagtaaatgcaatatttacttattacaatgactcattctaatttctttacttcatttcattttacaaacttctcatgaatgtgccatgaaccagaaagctatggagaacttctgaaagttctcaatgaaaaattgagtataaggaagtctactgttgtgaatgttcttgaatttattttgaaacattgactttgaaggcttaaaaaatatcttgaaagctagacccctgaaactaactactacaaatgtgaaaaccacaaggaaatatatagcaattcaatgtaagaagaatgtaataagtaaaatgaataaataaataaatttttacattttttttacagtctcaaatrtaattaacagcattcaaaacattactttataaattgttttcatattactatcaaacattaatacctaaatacccaatttaggaaaaaaaaagggtattaaaaggtttaacatggcggcggttccaagatggccgaataggaacagcttcagtctacagctcccagcctgag

SEQ ID NO: 870871 - DNA, 453 bp, Homo sapiens
cattcttaaagaaaacaattttcaacccagaatttcatatccagccaaactaagcttcgtaagtgaaggagaaataaaatcctttacagaagagcaaatgctgagagattttgtcaccaccaggcctgccctacaggagcacctgaaggaagcgctaaacatggaaaggaacaatcagtaccagccactgcaaaaacatgccaaattgtaaagaccatcaaggctaggaagaaactgcatcaactaacaagcaaaataaccagctaacatcataatgacagratcaaattcacacataacaatattaaccttaaatgtaaatggactaaattctccaatcaaaagacacagactggcaaattggaaaaagagtcaagacccatcagtgtgctgtattcaggagacccatgtcacacgcagggacacacataggctcaaaataaagggatggag

SEQ ID NO: 870872 - DNA, 597 bp, Homo sapiens
ttgtcagatggatagatagtgaaaattttctccctttccataggttgcctgttcactctgatcatagtttcttttgttatgccgaagctctttagtttaattagatcccacttgtcaattttggctgtggttgcagttacttttggcattttcatcatgaagtctttgcccatgcctatattctgaatggtattacctaggttttcttttagggtttttayggttttgtgttttacatttaagtctttaatccatctttagttaatttttgtataaggtgtgaggaagggatccagtttcaattttctgcatatggctagccagttttcccagcaccatttattgaacaggagatcctttcttcattgcttgtttttgtcaggtttattgaagatcagatggttgtagatgtgtcatgttatttctggggtctctgttctgatagaataatttatattctgatagaattggtctatatgtctgttttggtaccagaaccatgctgttttggttactgtagccttgcagtattgtttgaagtcaggtagtgtgatgcctccagctttgttcttttgcttaggattgtcttggctatat

SEQ ID NO: 870873 - DNA, 600 bp, Homo sapiens
ttgttattgttgtatctctgccaggttttggtatcaagatgatgtgagcctcataaaatgagttagagaggattcccccttttttaattgtttggaatattttcagaagaaatattccaccattgcctctttgtacctctggtagaatttggctgtaaattcatctggtcctgggatttttttggttggtaggcttttattactgcttcaattttagaacttgttattgatctattcagggattcggctccttcctggcttagtcttagtagggtgtatgtgtcctggaatttaatcatttttttctagattttctagtttatttttgtagaggtatttatagtattctctgayggttgtttgtatttctgtgacgtcagtggtgatatcccctttatcatgttttattgtatctatttgattctttcctcatttcttctttattagtctagctagtggtctattttatttttttaaaaaaaacaggtcttggattcattgattttttgaagagtttttcatgtctctatctccttcagttctgctctgatcttatttattgtcttctgctagcttttggatttgttagctcatgcttct

SEQ ID NO: 870874 - DNA, 663 bp, Homo sapiens
ttctaaacatttggatttctcttcttcttctggaacaccacttattcttaggtttcgacagttaacattgtcccaaacttcttggaggtgttgttcattttttaaattcttttttctttgtctttgatggattgggttaattttaaagccctgtcrtcaagctctgaagttctttcttctgtttgttcgattctattcctgagactttccagtacattttgcatttctctaagtgtttccttgatttccagaagttgtgatagttttttatttatgctatctattttgctgaggatttttcctttcatatcctgtatcatgtttctgatttcttcaagttggacttcacctttctctggtgcctccttgattagcttaataatggaccttctgaattatttttctggcaattcagagatttcatcttggtttacatacattgctggtgaggtgatgtgatcttctgaaggtgttaaagaacactgttttgtcatattaccagaattgttttcctggttccttcccatttgggtagactatgatcagagggaagatctgggactcaagggttactgttcagattcttttgtcccataaggcaggggcagggttaagtgtgtctgagctcagactctccttggacggggctttctgaggctgctg

SEQ ID NO: 870875 - DNA, 663 bp, Homo sapiens
ttctaaacatttggatttctcttcttcttctggaacaccacttattcttaggtttcgacagttaacattgtcccaaacttcttggaggtgttgttcattttttaaattcttttttctttgtctttgatggattgggttaattttaaagccctgtcatcaagctctgaagttctttcttctgtttgttcgattctattcctgagactttccagtacattttgcatttctctaagtgtttccttgatttccagaagttgtgatagttttttatttatgctatctattttgctgaggatttttcctttcatatcctgtatcatgtttctgatttcttcaagttggacttcacctttctctggtgcctccttgattagcttaataatggaccttctgaattatttttctggcaattcagagatttcawcttggtttacatacattgctggtgaggtgatgtgatcttctgaaggtgttaaagaacactgttttgtcatattaccagaattgttttcctggttccttcccatttgggtagactatgatcagagggaagatctgggactcaagggttactgttcagattcttttgtcccataaggcaggggcagggttaagtgtgtctgagctcagactctccttggacggggctttctgaggctgctg

SEQ ID NO: 870876 - DNA, 445 bp, Homo sapiens
gaaaggggcagctcaaatctcagttcagattctttctctttagctgacctcttttgtctgcatcacacatacataggtcatagattagtcataaatatgggtagaaagaattatggaccccatttttggctctttcccttctagaatttctttttttttttttttttagtggagtttcactcttgttgcccaggctrgagtgtagtggtgtgatctaggcaggttcaagtgattctcctgcctgactccagagtagctgggattacaggcacctgccaccacgcctggctgatttttatatttttagtagagacggggtttcaccatgttggccaggctggtctcgaactcctgacctcaggtgatccgcctgccttggcctcccaaagtcctgagattacaggcgtgagccaccgcacctggcctcaccattgtcttgtctctg

SEQ ID NO: 870877 - DNA, 632 bp, Homo sapiens
catggtctatatatacatcacattttcttcatccccttgatgggcatttaagttgattccatatttttgcagttgcaaattgtgctgctataaatatgcgtatgcaagtgttttttcatatgacttcttttccaatagtgggattgctggatcaaacagtagttctactttaattctttaaagaatctccatactattttccatagtggttgtactagtttacattcccgtcatcagtgtaaaagtgctaccttttaaccacatccatgccaacatctgatttttaatttttttagttatggtcattcttgcaggaraaaggtagtatctcattgtggttttgagttgcatttccctgataattagggattttgagcattttttcatatgtttgtttgccatttgtatgtcttcttttgagaattgtctattcatgccctttgccaactttttgatgggattattatttttttcttgctgatttgtttgagttccttgtaggttctggatgagtcctttgtcagatgctaatttgtgaatattctctcccactctgtgggttgtctatttactcttccaattatttcttttgctgtgcagaagctttttagtttaattaggtccaatctatt

SEQ ID NO: 870878 - DNA, 519 bp, Homo sapiens
gcccaaatgaagtaagataaaaactgggtactggtaactctgggtgctgttgtaacaaatacctaaaaatgtggaagtagctccagagctgggtaatgagtagaggcaggaagaatttttagatacaggctagaaaaatcctatattaccataaagggaactttaaagatgattttagtgagagcaactaaaaggaagaagtagccatttactaaagcaaagagggtaaagtttctaggtagacctcaggagttaactgttagacattwtttaaatatcttattaattcccaaagttaaaagagtcaagtctaattcttaaaccgtatgttcagactactaataatgcagttttgataggcaaccccacataggagcacagtgtacctcaaggaccaatgggagaaggtaattccactctcaggtactctaaaaacaagaggatctagttttaagacacaaaccatagcttctaaaggaagtataatgggaggatttggtcaagtgtgagaatgcactg

SEQ ID NO: 870879 - DNA, 630 bp, Homo sapiens
gacctttctctctggctgcccttaacattttttccttcgtttcaactttggtgaatctgacaattatgtgtcttggagttgctcttctcaaggagtatctttgtggtgttctctgtatttcctgaatgtgaattttggcctgccttgctagtttggggaaattctcctggataatatcctgcagagtgttttccaacttggttccattctccctgtcactttcaggtacaccaatcagatgtagatttggtcttttcacatagtcccatatttcttggaggctttgttcatttctttttattcttttttctctaaacttctcttctcacttcatttcattcatttcgtcctccatcactgataccctttcctcyagttgatcacattggctactgaggcttgtgcattcatcacgtagctctcatgccttggttttcagctccatcaggtcctttaaggacttctctgcattggttattctagttatccatttgtccaattttttttcaaagcttttaacttctttgccattggttcaaatttcctcctgtagctcggagtagtttgatcatctgaagtgttcttctctcaactcatcaaagtcagtctctgtctagctttgttccgttg

SEQ ID NO: 870880 - DNA, 592 bp, Homo sapiens
aacttttagtataaccatcacccaaatagttacattgtacacattaagtgatatctcaaccctcacccatctcccaccattccaccattcagactctccaaaatctattatcccacaccctaccctctatgattttctttgcttagaagataaaatccagactccatgcaaagccagtcataaatggatcaatttctacctctctaatctaatgattctcaagcagggtcaattttactgtccagaagacagtaaacatttgacaatgtctgaagatatttttgatgatcactttggaatgtgtgtgtgtgtgtgttactagcatctagtgggtggaggccagggatgctctgaagcttctacaatgcacaggacaaaatgtcagtagyggtgaagttgagaagccctgcttttatgtgagctgctcctttctccagtgcaacctggactccaatcacaggcaactatttgcccctccatgagcaggccatactgcattgcttgcccttatcttcacacattctgttacctttcactagaatgcttctctccatttttaccatttggaggtaaactaatatcatccctgggc

SEQ ID NO: 870881 - DNA, 603 bp, Homo sapiens
gatcagagaggcttcatgtctgacccaagatcaaacagctgtcaagtggcaaggctgtgaacagtttctaattctcagctactttctatactcctatagcagcccttaaataagagctaacatggcttgggacatggtatgtccaggatcaacactgactgactgactgactgactgactgamtgaatgaatgaatgaatagcaccattacagtcaaaagtggtttcaggtgtgttagctctctgacaccttgcagcagccctgagaggcaggtctggccacctctgttttacagcagaagctatgcaggtggggtaatggagagagcattgtgctgtaagctcagagtttgtcctgttgattgtgtcactgatttatggcgtgaccttggcccgaccttgacctgggtcaaagtgctccccccagtttctccattgccccatttgcaagacataaggaagaatcccttgtccttctaatctgatgggcaggaaaaaaaaaatgagagtgtggagggtactgcgcagggtgtctgggaattataaggtggtatttgtcagacctgccttgggaaaccttgaaaaattgaatggaaaccactgg

SEQ ID NO: 870882 - DNA, 600 bp, Homo sapiens
tctcagcatctactacagtccaccccttgcaccacccaaatctgcttgtttcatctaagttctgggaacagcatattctgactcctggattccagttgtctcttttcctggggagacttataggaggaaggttagtgggacagatgacagccaccactgctgcatgtagcactctcagttcccctcctccacttctctaggttcctttcagtagcacctagcacctatggtggtctctgtgctcatccaatatcatgcccagaccttattcctagagggtctgaatccctggctgccatcccatccttcaggcctctctggatcccgsgtacttacttcacagatgtctgtgcttctcaaattacacagtttattcctgttcaaaactgggcaggaaagaacaaaacacttcctagtgtatcaccttggtgccaaatacattcttccctgttctttcatggcgtaacgacagcccaacttcctcctgacaacaagggtcccttaactctgccagaatagtgacactttttccttgcctgctggtccctcaatgtaagcagcccaaagacactgtgtaataccgtagcttaaagtttaatg

SEQ ID NO: 870883 - DNA, 603 bp, Homo sapiens
gcttgacaaagattgtttgagcatctacttttgctgggacctgtgctaagccaatgcagtaataaataaataactgttgcactgtattgatagttctgctgttctgatgtctctaccaataataaaatgcacctgttggaggttgttagtttttctttctcaactgccacagatacccagagaaatcctgtcttggtctctatgtgaataataaaattagccaaagttcttargctaggatttcttagcttggaattcttaggacctgcagttatttgcccacaatctcaaagtataagctacaaagcttgaagatgttctatcagacaataaccccgatggtaattaaagaaaacaggaataaacagaggttgttaaggcagatgaaagcagttaattcatttttttacttgagatattctcaaggtcagtctagttatagtctcattctttgcacatatgtggggaagtaagcacccttagagaattcttttctagggactctccctccactgcaaccccctccccaacacacacacacacacacacacacacacacacacacacacacatacacacagagtagaagtggcactgggttta

SEQ ID NO: 870884 - DNA, 586 bp, Homo sapiens
tcccgagccctggccagggccggagccaccctaccccttggcctcactccacgaaggcctcccaggaaccaaatcgggcggtggcggcggttccggggccctggggggctccccagttttagccgggaacctccctgaacccctctacgccggcaatgcgtgcgggggcccatcggcggcgcccgagtacgcggccggctacggcggggggtacctggcgccgggttactgcgcgcagacgggcgccgcgctgcccccgccgcccccggccgcgctcctgcagcccccaccgcctccggggtacgggccctcagcgccgctgtacaactatcccgcagggggctacgcagcgcagcccggmtatggcgcgctcccgccgcccccaggcccacccccggccccctacctgaccccgggcctgcccgcgcccacgcccctgcccgcgccggcaccgcccaccgcctatggcttccccacggccgcgccgggtgccgaatccgggctgtcgctgaagcgcaaggccgccgacgaggggcccgagggccgctaccgcaagtacgcgtacgagcccgccaaggcccccgtg

SEQ ID NO: 870885 - DNA, 604 bp, Homo sapiens
gagtatggagtctgagcatcaatttttaaaaaagttctccagacacttctaccttaatgcaagaatgagaatcatccctgaagtattccttattcttctgagtgagagcagactcctttctgtaggataggaactggagcggcattccctgttcctgaaggggtatacaaaagctacagcttaccatcgtttggggcaaacacttaaagacaattttgagatatagagaaatgggacaacaaaacacagctggtgaccagtcactaaaacatacttttctccagctatgggttaaatattgcaatatcagtgacccaacaatgaaatagaaatccaaaatatcactataagatttattctggaatggtggccaggacactggtggagcccaaacaaattttgttagaaaatgaggaatgaawgcagagagagagaaattaaacaaacaagaagacctcttgtctaacatgagattgcaaatcaaaatggaaagaaatacatcaaaactacaatgagatattatctcacaccagtcagaatagccattattaaaaagtcaaaaaaaaaaaaaaaaaacagatgtgggcaaggctgtggtgaaaag

SEQ ID NO: 870886 - DNA, 594 bp, Homo sapiens
acatcctaacatcacaatgaaaagaactagagaagcaagagcaatcacattcaaaagctagcagaaggcaagaaataactaagatcagagcagaactgaaggagatagagacacaaaaaactcttcaaaaaatcaatgaatccaggagctggttttttgaaaagatcaacaaaattcgtagaccaytagcaagcctaataaagaagaaaagagagaagaatcaaatagatgcaataaaaatgataaaggggatatcaccaccgatcccacagaaatacaaattaccatcagagaatcctataaacacctctatgcaaataaactagaaaatctagaagaaatggataaattcctcaacacatacaccctcccaagactaaaccaggaagaagttgaatctctgaatagaccaataatgggctctgaaattgaggcaataattaatagcttaccaatgttcaacattcttaaagaaaagaatttccaatctagaatttcatatttggccaaactaaggcttcataagcgaagaagaaataacatccttttcaggcaggcaaatactgaaggaatttgttaccaccagatctgcct

SEQ ID NO: 870887 - DNA, 594 bp, Homo sapiens
acatcctaacatcacaatgaaaagaactagagaagcaagagcaatcacattcaaaagctagcagaaggcaagaaataactaagatcagagcagaactgaaggagatagagacacaaaaaactcttcaaaaaatcaatgaatccaggagctggttttttgaaaagatcaacaaaattcgtagaccactagcaagcctaataaagaagaaaagagagaagaatcaaatagatgcaataaaaatgataaaggggatatcaccaccgatcccacagaaatacaaattaccatcagagaatcctataaacacctctatgcaaataaactrgaaaatctagaagaaatggataaattcctcaacacatacaccctcccaagactaaaccaggaagaagttgaatctctgaatagaccaataatgggctctgaaattgaggcaataattaatagcttaccaatgttcaacattcttaaagaaaagaatttccaatctagaatttcatatttggccaaactaaggcttcataagcgaagaagaaataacatccttttcaggcaggcaaatactgaaggaatttgttaccaccagatctgcct

SEQ ID NO: 870888 - DNA, 669 bp, Homo sapiens
acagaactagaaaaaaatattttaaaattcatatagatccaaaaaggagcccgaatagccaaggcattcctaagcaaaaagaacaaagctggagaaatcacactacctgacttcaaaccattctacagggctatagtaaccaaaacacatgattctggtacaaaaacaaacataacccaatggaacagaatagagaacccagaaataaggatacgcacctaaactatctgatctttgacaaacctgaaaaaaataagcaatggggaaatgactccctatttaattaatggtgctgggataacwggaaggccatttgcagagcatccaaactggaacccatccttacataatatataaaaattaactcaagatggattaaagacttaaatgtaaaaccaaaaactataaaaaaccctggaagagaacccaggcaatactattctggacataggaatgggcaaagatgtcatgatgaagatgctaaaggcaattgcaacaaaagcaaaaattgacaaatgacatctaattaaatgaaagagtatctgcagagcaaaggaaactatcaacagagggaacagacaacttacagaatgggaaaaaatgcaaactgtgcatcagataaaggtctaataaccaatatctatgagaaacaaacaaattaacatgaga

SEQ ID NO: 870889 - DNA, 669 bp, Homo sapiens
acagaactagaaaaaaatattttaaaattcatatagatccaaaaaggagcccgaatagccaaggcattcctaagcaaaaagaacaaagctggagaaatcacactacctgacttcaaaccattctacagggctatagtaaccaaaacacatgattctggtacaaaaacaaacataacccaatggaacagaatagagaacccagaaataaggatacgcacctaaactatctgatctttgacaaacctgaaaaaaataagcaatggggaaatgactccctatttaattaatggtgctgggataactggaaggccattygcagagcatccaaactggaacccatccttacataatatataaaaattaactcaagatggattaaagacttaaatgtaaaaccaaaaactataaaaaaccctggaagagaacccaggcaatactattctggacataggaatgggcaaagatgtcatgatgaagatgctaaaggcaattgcaacaaaagcaaaaattgacaaatgacatctaattaaatgaaagagtatctgcagagcaaaggaaactatcaacagagggaacagacaacttacagaatgggaaaaaatgcaaactgtgcatcagataaaggtctaataaccaatatctatgagaaacaaacaaattaacatgaga

SEQ ID NO: 870890 - DNA, 669 bp, Homo sapiens
acagaactagaaaaaaatattttaaaattcatatagatccaaaaaggagcccgaatagccaaggcattcctaagcaaaaagaacaaagctggagaaatcacactacctgacttcaaaccattctacagggctatagtaaccaaaacacatgattctggtacaaaaacaaacataacccaatggaacagaatagagaacccagaaataaggatacgcacctaaactatctgatctttgacaaacctgaaaaaaataagcaatggggaaatgactccctatttaattaatggtgctgggataactggaaggccatttgcagagcatccaaactggaacccatccttacataatatataaaaattaactcaagatggattaaagacttaaatgtaaaaccaaaaactataaaaaaccctggaagagaacccaggcaatactattctggacataggaatgggcaaagatgtcatgatgaagatgctaaaggcaattgcaacaaaagcaaaaattgacaaatgrcatctaattaaatgaaagagtatctgcagagcaaaggaaactatcaacagagggaacagacaacttacagaatgggaaaaaatgcaaactgtgcatcagataaaggtctaataaccaatatctatgagaaacaaacaaattaacatgaga

SEQ ID NO: 870891 - DNA, 699 bp, Homo sapiens
cctcatagactgccagtaaaggaagatgcaaataaatccaaaattaatgtacatacataagtaaaatacaaagaaatataaaattaatcacactaccaaagaggcataattttccagttgatttaggactgaacacatgcatgtaactactcttttttctaaaacctcaccaaagaattctgaatggaatagaaaaaaaaattacaaagtytaaactgcagaggacaaaatagaatgccaaaggagatgataataatatctggggagttggctcgctgatagacaagtggtaattgcctttctcaaaaaaaaaaaaaaaaaaaaaaaagtaaaccaaatcctaatctcccaatggcaaaaaaataaaaagccagctgctttaccctgctaatcacctgaccatgaaaagagccaaattctgtaaaatatttgaagagtaaatttttctgtaaaatattctgagccaaatatgagtggtcatgacccaaggcacagtctcaagaggtcctaagaacatgtgcccaaggtggttgggttgacaaaagacatcaatctacacatgtgaagtatccataggtttgggggagaggaggggacaggcgcacaggtgggaagtgtagtagtttataggtcataggattatagatggagtcaaagattttctgattggcaatttattgaaagagttaagttattatc

SEQ ID NO: 870892 - DNA, 648 bp, Homo sapiens
tctctggtcctcatgctggccccccacatgccagccacgctcactcaagctgagaaaacctggagagaccttcaccccagtcccacatggaagattgggtagcactattttgactcttgcagatggggcgagtgtctcatcttcctcctaacctcacaatattgggtaggctagggaataaaagcctctgcstaagtggtcatttaaaaatccctcattatttgagtgccctaaaacatgtccttgtcactccttcccatggtcctttgtcctctgactccgttttagtgctccaacaaccaacaaccattttatttttagtcttaaaatgtatgttatgttcacagttattttattttattttattttattttattttatattttattttattttttgctttcactccgtgggcaactgtttaaggcaggacaatttgttgtgagaggtcccctgctgtgctgattctgggatgccagattcacattgctctgtgtccccagccagacctctctggttcactgttggctgtccctcagatgctcctgggttttctgcctttggtcagtcccaggtactccaggatttctggcatttgatgcgggtaccctcatggactaatactcagatagtttgggttgttgccat

SEQ ID NO: 870893 - DNA, 608 bp, Homo sapiens
aaatgcatggcagagggtgcctgtgacttcagttttgtgtcaaccacattcaacatgcatcataacacaacagtgacctctcatttgtaatagatttgtaacaaaatgtaataataatgtaatataatcgtaatttataatagagtttaataatttacattttataaggctctcccatagttagcttatgttacactgaaatgactctgtgaatgatgataatccatgttcatagacaaggaaaggagttaaaaaataatgacagaatttatctaaagctgtgaaaattattagtttcaaatgtgtgccttgaattccaggtttaatcttcattccattaacataaaaatgcacttgctagctccaaaaatagtcattggccaggtacggtgrctcacacctgtaatcccagcactttgggaggccgaggcaggtggatcacaaggccaggagatcaagaccatcctggccaacatggcgaaacctcatctctactaaaaatacaaaaaaattagccaggtgtggtgatgcgcacctgtagtcccagctacttggggggctgaggcagggggactgcttgaacccaggaggcggaggttgcagcaagc

SEQ ID NO: 870894 - DNA, 616 bp, Homo sapiens
taaagaggaggcctgggggccccatcagggagagaataaagaaaacactgaatcactgaatcaagatctctggacccctggcatctgggaggggtgtgcaggggaacactgagtgaaatccctaaaatctgatcaagaatctctgcaagagagagcaggcccttgcaggcaatcagatggagcaggcaggacagactgcaccagcagagggctgccaggagcctcagtgctggccagaaacaccttcaaggcaggtctgggaagtctgcagtttaccagcctgttctacctgcctggcctctgacaycctggaggggaaaccctggcaggagagggcaggcccagggagagcttcctccacaacacgtgaccttggactccagcactcacctggtctgggtgggcatggggcacacaaagtcaccccccagaaggctcccacactgccacagcagtcctcctgggtagtcagctccagcagagggttggcacactggaaggagaggccatggacacctgtgaccaccccccttccctcccaggctgtgcacagagatgtcccgggaaagcctaggacacagagctcactccccacattctgccagaggatgtcccc

SEQ ID NO: 870895 - DNA, 616 bp, Homo sapiens
taaagaggaggcctgggggccccatcagggagagaataaagaaaacactgaatcactgaatcaagatctctggacccctggcatctgggaggggtgtgcaggggaacactgagtgaaatccctaaaatctgatcaagaatctctgcaagagagagcaggcccttgcaggcaatcagatggagcaggcaggacagactgcaccagcagagggctgccaggagcctcagtgctggccagaaacaccttcaaggcaggtctgggaagtctgcagtttaccagcctgttctacctgcctggcctctgacatcctggaggggaaaccctggcaggagagggcaggcccagggagagcttcctccacaacacgtgaccttggactccagcactcacctggtctgggtgggcatgrggcacacaaagtcaccccccagaaggctcccacactgccacagcagtcctcctgggtagtcagctccagcagagggttggcacactggaaggagaggccatggacacctgtgaccaccccccttccctcccaggctgtgcacagagatgtcccgggaaagcctaggacacagagctcactccccacattctgccagaggatgtcccc

SEQ ID NO: 870896 - DNA, 616 bp, Homo sapiens
tgaggacattgaggctttgagggattaaagaataggtctgtgcccttatggtgaaggtcttgaaatattcagggaggtgtctgggctgtactgagtgggtgaaggggagtgtcctgagattttgaagcaggaaatgacccggtccgaagaacagctacactttttcactcattcaaagggcaagtactgagtgcctgttacaggccatgcactgaccccagggatggcaaaaactccaaccttggktgaagtcttttgtcccctaagctccaatgcggggtggacaaagggactagtaccctagcaaaggtgagggggcagaggggaagccacatgttagcctcaagtcactcgtggtcttcaagcaggcctaggacatgttgggatgggcattcttaaatgatgattattgcagtgaaagaccacctggtagagagtggactaaagagaggcgagctggaggccagctggaaggctttggctgtggtctaggctatcagtggccgaggaaagaaccaagaagaaggcatggatgcaagggctatttcagatgtagagacagataattcccagctatgacttggactaataggtggagggagttccaagagccaag

SEQ ID NO: 870897 - DNA, 616 bp, Homo sapiens
tgaggacattgaggctttgagggattaaagaataggtctgtgcccttatggtgaaggtcttgaaatattcagggaggtgtctgggctgtactgagtgggtgaaggggagtgtcctgagattttgaagcaggaaatgacccggtccgaagaacagctacactttttcactcattcaaagggcaagtactgagtgcctgttacaggccatgcactgaccccagggatggcaaaaactccaaccttggttgaagtcttttgtcccctaagctccaatgcggggtggacaaagggactagtaccctagcaaaggtgagggggcasaggggaagccacatgttagcctcaagtcactcgtggtcttcaagcaggcctaggacatgttgggatgggcattcttaaatgatgattattgcagtgaaagaccacctggtagagagtggactaaagagaggcgagctggaggccagctggaaggctttggctgtggtctaggctatcagtggccgaggaaagaaccaagaagaaggcatggatgcaagggctatttcagatgtagagacagataattcccagctatgacttggactaataggtggagggagttccaagagccaag

SEQ ID NO: 870898 - DNA, 612 bp, Homo sapiens
agtaattttaattttaaaaacagagagaaaatatgaagaaaaaaattggaactaagttatataagacagatgatatttttaaaaatacagagaaaaatatgctattatctaagtttattcctacaaatctgagaatttcagtggaaaggaaattttattttaaagatcttaagtggggaaaattgacttataagtaactagaaaccagaatatgtggaatatccattgacaaaatgagaaaataaaagtttcaaagaattatttccacaaaagattataaggtgtgttgatcaagctttctagtagcaggtttaataaattattccagaacatagaaagagtttgaaagctatccagattattttagaaaataaaaaaaagctaatataaatagcacaaaaattatagaccaatacaatatttgcaaattgaattcaactatatttggtaatagagaaatctacctccattaacagtgttaatacaagaaatgggtaggaagctaaatattagaatatctctttctawaatgacacgtattagaaggtccatttataacaaaatacagttaccttctcagcaggtggtttaaaggcatttagtggaactgaa

SEQ ID NO: 870899 - DNA, 641 bp, Homo sapiens
acatcagagtcacactgaccatattcacagatgggcatgtaaccccaaatgccagtatgtaaccatacactgacaactataactatcacttggtcctaaatcctcaagttgacacgaccagcccattttctccctgatactgaagggaagccataacatcatcgggagcatgaagagtgtttggtgagccctgaaccaaggygaggggtgttggtattacatttcaattgtcaaatcactctaggttgcaattttcttgatttccttgtgcattcatctccaacagagacgcagtccctttagaaattggagtccatggggtggatctctctacccttaactgtgttagggtaatgctgacaactcacgcctctctgaatgattttcttagggctttcatacttagcctctgctgattcccctagaagttcagttccatttgtcaagtactggtctggtctgaaagccattctttccattacagtaacttcacacatttctgctctaattcaattggaattgagtttacagttggagcagagaaaaaccttattcactattatttgttttccctcatggcaactctcaagtctattgttttaaaataaagcaataaaataagccacccctaaaagtaatag

SEQ ID NO: 870900 - DNA, 641 bp, Homo sapiens
acatcagagtcacactgaccatattcacagatgggcatgtaaccccaaatgccagtatgtaaccatacactgacaactataactatcacttggtcctaaatcctcaagttgacacgaccagcccattttctccctgatactgaagggaagccataacatcatcgggagcatgaagagtgtttggtgagccctgaaccaaggtgaggggtgttggtattacatttcaattgtcaaatcactctaggttgcaattttcttgatttccttgtgcattcatctccaacagagacgcagtccctttagaaattgkagtccatggggtggatctctctacccttaactgtgttagggtaatgctgacaactcacgcctctctgaatgattttcttagggctttcatacttagcctctgctgattcccctagaagttcagttccatttgtcaagtactggtctggtctgaaagccattctttccattacagtaacttcacacatttctgctctaattcaattggaattgagtttacagttggagcagagaaaaaccttattcactattatttgttttccctcatggcaactctcaagtctattgttttaaaataaagcaataaaataagccacccctaaaagtaatag

SEQ ID NO: 870901 - DNA, 636 bp, Homo sapiens
tggatcatatggtaagagtatgtttagttttgtaagaaactgctaaactgtcttccaaagtggatgtatcatttttcatactcaccagtaatgaacaagagttcctgttgctccacatcttctgcagcatttggtgttatcaatgttttggattttggccattgaatgggtgtgtagtggtatctcactgttttaataattccataatgacatatgatgttgagaattttttcatatgcttatttaccacttataatcttctttggtaatgtgtctgttcagawcttttgcccattttaaatcaggtcattcgttttctttattgcttagtttatgagctctttgtatattttgagttacaattctttttcagatgttttttgcaagtatttttcccattctgtgctcatcttcacattctcttgacagtgtattttgcaaagcagaagtttttaatcttaataaagtctagcttatgagttatttctttaatggattgtgcctttggtgttggagacgaaaagtcattgttcccaaggtcacctagatttcttcctatgttattttctgtaagttttatagttttgcatttcacgtttagatctatgatctatgttgagttaattttttgtaaat

SEQ ID NO: 870902 - DNA, 685 bp, Homo sapiens
ccaatgggaaataaggggaaaaaagcaatttaaaataaagtacaaatataaaacaataggaaacagaaaagacaggcaagtacattattaaacatataaattattaaatatgtgaacaaactgaatcatctcgtcaaaagatacagcttattcagagagggttaaaaaccaaaagcaggctgaacatagtggttcacgcttgtaatcagcattttgggaggctgaggtgggaacattccttgtagccagacctacaaaaccagcctgggtaacacagtgagaccccatctctacaaaaataaaataawtagctgagtgcggtggcacacacctttatccccagctactcaggatgctgaggcaggaagatcacttgagtccaggagtttgaggctgcagtgagctatgatgcagtttcattgcactccaacttgggtaagaaagtgagaccgtgtttcaaaaaaagaaaaaagaaaagaaaaaacctacaacatttatacccttaagggtatagatacacttaaattggtgacaacggattcaaattatagggataaaaggaggaataccaggcaaattgcaaacaaataaaaagcaagattggcaatatttaatattaaataagatagaattcaagattatatactaaacaggattaaaaaagtgacgcataacaacaaattgt

SEQ ID NO: 870903 - DNA, 580 bp, Homo sapiens
gctattgccagacaggattagggtttatttgcagttcacgtcacaaaattaaagtaagaccatcaacatggccacattgttttctccagttacactcagctgcactgagagttggatctaaccagggttgtgggttttgtcaaatgaggacaatgaagcaaaaaagggataarggagttaaggatgtgtgcaagggggtgagtaaccataaatttaagctggttaagtagggaagagaggacatgaagtagatgatgggcagtggcagagtagcagaataatagataagaggtcctagagtcaaaagattgttggagttagtgctaaagaaatgagctggaaagataggaggcatggccagaaagaggaatgaataaacaattaggaaggagttacagctactaaaaatgacaagatagggcacaacccgtgagtacatgactaagggagggtgaattgcaagctcattggtaagggcaaggttctgttttcttttcttactagcacagagcttggaacatagtaggcactcattatatatccgttgaaatgatgaataaggaatgactaccacctcccc

SEQ ID NO: 870904 - DNA, 580 bp, Homo sapiens
gctattgccagacaggattagggtttatttgcagttcacgtcacaaaattaaagtaagaccatcaacatggccacattgttttctccagttacactcagctgcactgagagttggatctaaccagggttgtgggttttgtcaaatgaggacaatgaagcaaaaaagggataagggagttaaggatgtgtgcaagggggtgagtaaccataaatttaagctggttaagtarggaagagaggacatgaagtagatgatgggcagtggcagagtagcagaataatagataagaggtcctagagtcaaaagattgttggagttagtgctaaagaaatgagctggaaagataggaggcatggccagaaagaggaatgaataaacaattaggaaggagttacagctactaaaaatgacaagatagggcacaacccgtgagtacatgactaagggagggtgaattgcaagctcattggtaagggcaaggttctgttttcttttcttactagcacagagcttggaacatagtaggcactcattatatatccgttgaaatgatgaataaggaatgactaccacctcccc

SEQ ID NO: 870905 - DNA, 615 bp, Homo sapiens
atttcagaaagagctctaatgtgcaccaggcttaggaccaccgagtggtataattgaagcactcatgtgcagtgtggcctcctgactccatcctaggaggatccattaggttgaatcatatggaatgacagatatttatctgtttttcatatgcaataaatggatactttatatgactcaagctaatccattcaccttgcagggcctgagactcagggattargatgaagcaaataattcactagccttgagtacaaaagattcaataatcaagataaataatattttagtgcaatatatttaaaaaatcaaagttaatgcaaaaattctgcgatgaacaaaatatcatcattttaaaggaagacagaatcccactttgcacgtacaatgaccctcctcatttgcttaccctagtcctggctctctcattagctctgtgtttcagcatccccattacaaaatgggatgcccagagttgccgtgtttacccatagagtggatgtgtggatcaaataaaataataaatgagtaagtacatttgtaaacgaaaggttctattgccgaatagtcatttatatcacaagagcgtgtcatacgaaactcctgcactgtcaa

SEQ ID NO: 870906 - DNA, 613 bp, Homo sapiens
acaacaaaaaactccaggccaatattcttgatgaacattgaaacaaaaatcctcaaaaaaattgtcaaatcaaatccagcagcacatcaaaaagcttattcactacactcaaataggcttcatccccaggatgcaaggttagctcaacatccataaatcaataaatgtgattcattaaatagatacaaataaagacaaaaaccacatgattatctcaatagatgcagaaaaggcttttgatatatttcaacatctctttgtgttaaaaactctcaataaattatgtattgaaggaacatacttcaaaataataacagccatgtaggacaaaccaataggcaacttcatactgaattggaacawgctggaagcatcccccttgaaaactggcacaagacaaggatgtgctctcttgccattcctattcaacatagtattggaaattctggccaggcaatcaggcaagagaaagtaataaagcgcattcaaataagaagagagaaagtcaaactattcctatttgcagatgacatgatcctatatctagaaagctccactgtctcagccccaaaagcttcttaccctgataaacaacttcagcagtctcaggata

SEQ ID NO: 870907 - DNA, 576 bp, Homo sapiens
agtggtttcagcctgatgccaaggacagttttttcctttactacatctctctgcttgggttgcattctccacaagcagccctctgattatgatttggctcccatggggcttttctacaggtagggattgtgatagtcttacaggagtgtctgtatctggtctttccaacagatgcagctccccctgcaaattaataaatcatgattctggttatgaccattggtgtctgggggattggtttgtcttgatcagcatccctgagtctagttaaccctggggtcctcgggagacaagttcacagacctgaaggccaaacactggcagagccagagggatttaggggacctggaagctcctatagacacctcctttaaaatcggtcccaccttcaccttcagacatccacccactatgtcaaagcacccagrccatctcctcttcattttacaactgctttatggctgtaataaaagaaaacagggatttatttaggctgtatagtgtgttcatgtcatgcattctcaaataaaaaaacacacacacacgcaaggtgccaggcactgtgtcatgttatta

SEQ ID NO: 870908 - DNA, 626 bp, Homo sapiens
tattattttccaattgctttagaagaacacttaattgaatttataatttctaaaaattacactatttttctaggtacagtatatgtgaatattagtatttcattttagagctaagttaaaatagcttcaaaacaaaataaatacaactttaaacattgattaataaaataaactattagtaaaggtaggtttaatatgaaataagtagtttgcaaataaaagctattagcaaaaaaggaaacaagaaaactgtgtactttcaaatgtgcattatatagcttcactatttttgaacttataagtcaggttatgttcaatgaaatagacactgggtaaactgatagcttttttaccagcattttaaattattttatatttggaaagcatcaaattacttatataataraaacattatactgttctttagaagagaaattggaatttggcaataagcaagtatataaaggtacagaaggggacagaaataaataaatcttaaatattgctctagcatatgtaatctaaactacttcataaatctggacaaaatgagatatataacaaagagggagctagaaaccaaaatgtaaaagtaatgttatagctgctttttagacatttaccaa

SEQ ID NO: 870909 - DNA, 667 bp, Homo sapiens
ggcaaattggataaagagtcaagacccatcagtgtgttgtattcaggagacccatctcacatgcaaagacacatagaggctgaaaataaagggatggagaaatatttaccaagcaaatggaaaggaaaaaaaaaagcaggggttgcaattctggtctctgaagaaacaaactttaaaccaacaaagatcaaaaaggacaaagaaaggcattacataatgcttgaacccaggtgatggaggttgcagtgagccgagatcaggccactgtactccagcctgggtgacaaagcaagactctatctcaaaaaaaaaaaaaaaaaaagagtcaaattgaagactagaacagctactatgtttccaagaaagggaatgtttaatggatcaatgcaacaagaagagctaactatcccaaatatatatgtacycaatacaggagcacccagattcataaaacaagttcttagaaacctacaaagagatgtaggctcccacacaataacagtgggagactttggcatcctactgtcaatatcagacagatcaatgaaacagaaaattaacaaggatattcaggacctaacaaggatatagggtcagctctgggccaaatggacctaatagacatctacagaactctccactccaaaccaacagattatacattctt

SEQ ID NO: 870910 - DNA, 667 bp, Homo sapiens
ggcaaattggataaagagtcaagacccatcagtgtgttgtattcaggagacccatctcacatgcaaagacacatagaggctgaaaataaagggatggagaaatatttaccaagcaaatggaaaggaaaaaaaaaagcaggggttgcaattctggtctctgaagaaacaaactttaaaccaacaaagatcaaaaaggacaaagaaaggcattacataatgcttgaacccaggtgatggaggttgcagtgagccgagatcaggccactgtactccagcctgggtgacaaagcaagactctatctcaaaaaaaaaaaaaaaaaaagagtcaaattgaagactagaacagctactatgtttccaagaaagggaatgtttaatggatcaatgcaacaagaagagctaactatcccaaatatatatgtactcaatacaggagcacccagattcataaaacaagttcttagaaacctacaaagagatgtaggctcccacacaataacagtgggagactttggcatccyactgtcaatatcagacagatcaatgaaacagaaaattaacaaggatattcaggacctaacaaggatatagggtcagctctgggccaaatggacctaatagacatctacagaactctccactccaaaccaacagattatacattctt

SEQ ID NO: 870911 - DNA, 627 bp, Homo sapiens
aatgccattgctgtaacatacaagtatgtgataattttttagaaatccatttttttcacaattatccttctatgatgcagacaggcaaaataatctttcaccacagatagtttgagaagtcgtgtccaagaaatattcagtactacttccattatgctttgttttcctgagtcgctgcctatgtcctgtcttcccaggtcatctatcatttattccatcatccagctttttctgtcasaactggtctgtacagccgggtggtggctcacacctgtaatcccagaactttgggaggctgaggcgagtggatcacctaaggtcaggagtttaagaccagcctggccaacatgatgaaaccttgtcctaaaaacacaaaaattagctgggtgtggtggctcatgcctgtagtcccagctacttgggaggctgagacaggagaatctcttgaactcaggaggtggaggttgcagtgagctgagatactgccactgcactccagcctgcgtgacagagcgagactccatctcaaaaaaaaaaaacctaatctgtacattgagtaatctatcccttttttgcacccttctccagcatcccaaagtctttcactgagatttaagaaaataacat

SEQ ID NO: 870912 - DNA, 655 bp, Homo sapiens
agtattcaataaatgttggcctttattacttccttatattttatttatgtcttatcacggcacctaatgggaaaataattgtgctggagaaagcgtgctgccactttgagatataggccactcataatgagctcttgaatctatcacaccaacatttggaggccctactctgcacagatcacagatgggctccacttgacttatatatagcagtgctgtgaaatagggcgggaaggatatctgctggtgataatgatggcaattaaactggcaggtaatgtgctaactagttgcagtgttgttagcgctgctaagacaggaaaaaaaacagtgagaaagatttattctttgaggcatataggaaagaaatattttaaaaagaatattcagtgtaagtcctggcagtagcaatttacarttcccaagatttgcacattccccttcctcactcaggcctccaccatcatctacttcaccgataccttatgttggattttcactatgataaaactataatagaaggtaggaaatataacaattaggagtgcaaccctttgcatctgaaagacataagtcttgctcctgccccgtaccatgttttaactttgggcaagttaatctgacacttcttagcttgctgctaaagatttcacat

SEQ ID NO: 870913 - DNA, 526 bp, Homo sapiens
tggttaatggcatccaagaaggaaattgctgattctttactgcctgccgacctacctatattttgctccagtatattggtggctacctcagttactcactacttgcccccagaatgaggttaaatttgtcaaaattatgattccccttaatgatggaaccaatattgtgattctcattctaaatcttttattgtaatgaagaggtaggaaaaatatttctacacaagaactccttaayccccagcacacatcctcattcttaaataaatatccagatatccattcacactcaatggatatttatcaagggtgttctgggtcctataagctagcagtaagcaagactggttccgttcatgctgtcatagaacttacaatctggagtgagaagagagacattaaacaattataggaattgttcgacaacagttaggatatgtatcatgagaaggcagaagttaggagagcttgtcaagctgagtataatttaacatagataaatagagaatccttgcccaagaaagca

SEQ ID NO: 870914 - DNA, 624 bp, Homo sapiens
agtttccatcactgccaagaaattttgagctcataaagggctgtaagacaacctgcctaggttgcacagcatacaaacccacctctatcattgtaacatttctctttatttcttgaatggcttctcgctttaaggtagaatcatctgatattgctataggtgtacaagatttcttttggttaactttatgacatagaatttccccttacttctgcttccatttttcctgtgtcgttatatttaaggtatgtcttagccaacctgataatctcagtcttttaaacagaatacttaartaacttaatgtaaatgctgacataattttgttgacatcttttgcctattttttaaaagttggcctctcttttatacccctacttttacttttatctactttcacttgaattgttttttgtatttcaatttttcctttattaaatttttatatattctttattattttctggctatcctacaaaagacaacatgcattattctcttattacaatctattaagattaattatatttattaccactaagataatgttagaactttaaaatagtttaatttcatttcatctttctcaacgtttacaaaattctacataaatcttaaagtatg

SEQ ID NO: 870915 - DNA, 641 bp, Homo sapiens
agaagtcctaatccccagtgtgatggtacgtggagatggggcctttgggagacaatgatggttggattaggtcatgggggttgatccttcatgttgggattagtggctttacaagaagaggaagagagaccctcacccccaattcccagagtacatgcattaaggaaaggccttttgagcacagaaccagatggcagctgactgaagccgggaagaaagcccttaccagaaaccaaacatgctggaccttgaccttgaacttctcagcttccagaactrtaagaaatacatttctgtttttggagccactcagtctatgataatgtatttataggcagcctctccaggctaataccacttcttagaggaaaatttatagcattaaatgcttatatgagagaagagtagaaacacctcagatgaatgacttaagctttcactttaagaaacaaacaataattttaaaagagcaaaagaaatacaaaataagcaggattaagaaaataacaaatataaaagagaacacataaaacagaaaacaaaattttaattgttgaaaccagaaactgtttctttgaagaagatcaataagtcaataagcctctaaggatattgattacaaaaaaatttaaaaacataaa

SEQ ID NO: 870916 - DNA, 617 bp, Homo sapiens
acaagccagaagacagtgggggccaatattcaacattcttaaagaaaagaattttcaacccagaatttcatatccagccaaactaagcttcataagtgaaggagaaataaaatcctttagacaagcaaatgctaagagattttgtcaccaccaggcctgcctcacatgaactcctgaaggaagcactaaacatagaaaggaacaaccggtaccagccrctgcaaaagcatgccaaattgtaaagaccatcgatactaggaagaaactgcatcaactaataggcaaaatacccagcgaacatcaaaatgacaggatcaaattcacacatagctatattacccttaaatgtaaatgggctcaatgctccaattaaaagacacagactggcaaattggataaagagtcaagacccatcagtatgctgtattcaggagacccatctcatatgcagagacacacataggctcaaaataaagggatggagaaagacctaccaagtgaatggacagcaaaaaaaagcaggggttgcaatcctagtctctgataaaacagactttaaaccaacaaagatcaaaagaaacaaagcaggccattacataatggtaaagggaacaatt

SEQ ID NO: 870917 - DNA, 617 bp, Homo sapiens
acaagccagaagacagtgggggccaatattcaacattcttaaagaaaagaattttcaacccagaatttcatatccagccaaactaagcttcataagtgaaggagaaataaaatcctttagacaagcaaatgctaagagattttgtcaccaccaggcctgcctcacatgaactcctgaaggaagcactaaacatagaaaggaacaaccggtaccagccactgcaaaagcatgccaaattgtaaagaccatcratactaggaagaaactgcatcaactaataggcaaaatacccagcgaacatcaaaatgacaggatcaaattcacacatagctatattacccttaaatgtaaatgggctcaatgctccaattaaaagacacagactggcaaattggataaagagtcaagacccatcagtatgctgtattcaggagacccatctcatatgcagagacacacataggctcaaaataaagggatggagaaagacctaccaagtgaatggacagcaaaaaaaagcaggggttgcaatcctagtctctgataaaacagactttaaaccaacaaagatcaaaagaaacaaagcaggccattacataatggtaaagggaacaatt

SEQ ID NO: 870918 - DNA, 617 bp, Homo sapiens
acaagccagaagacagtgggggccaatattcaacattcttaaagaaaagaattttcaacccagaatttcatatccagccaaactaagcttcataagtgaaggagaaataaaatcctttagacaagcaaatgctaagagattttgtcaccaccaggcctgcctcacatgaactcctgaaggaagcactaaacatagaaaggaacaaccggtaccagccactgcaaaagcatgccaaattgtaaagaccatcgatactaggaagaaactgcatcaactaayaggcaaaatacccagcgaacatcaaaatgacaggatcaaattcacacatagctatattacccttaaatgtaaatgggctcaatgctccaattaaaagacacagactggcaaattggataaagagtcaagacccatcagtatgctgtattcaggagacccatctcatatgcagagacacacataggctcaaaataaagggatggagaaagacctaccaagtgaatggacagcaaaaaaaagcaggggttgcaatcctagtctctgataaaacagactttaaaccaacaaagatcaaaagaaacaaagcaggccattacataatggtaaagggaacaatt

SEQ ID NO: 870919 - DNA, 641 bp, Homo sapiens
acattgaaggacacgcccaatgagaaaaagtcattagattataatgaattagatcaaacatagataactgcaaacattgctgccaaagaaacaagcttacgccgggcgcagtggctcacgcttgtaatcccagtactttgagaggctgaggcaggcggatcacgaggtcaggagtttgagaccagtctgaccaacatggtgaaaccccgtctctactaaaaatacaaaaattagctaggcatggtggcatgctcctgtaatcccagctactcgggaggctgaggcaggagaatcacttgaacctgggaggcagaagttacagtgagccaagatcgccccactgcactccagcctgggcgacagagtgagactctgtctaaatgaaaaaaaaaaagcctaatactgtgataaataaatggaataacatgaagggtatccacttaattcagaaytgcttagatatttaatgaaataggatgtttgtattgcgatgaaaaacttaaaagaaacctagaagattcaacacgtttctcttcaccacaaggtaggtgaatgagggaaatataaaagcaaaaaaagtattggttggttaagataacagtaaagctgtaagacaccatacggttcaacataaaaacaaa

SEQ ID NO: 870920 - DNA, 657 bp, Homo sapiens
ccttgcccacagaaaaaataaagtgtactgaactgacacagaaaaaggtaggaaaaggcataatgagatgacctaccagcaagcctggagcctaggctgcaggtttgaagagatgttttaggtttctccatttttgtttcttcccagcctcagagaaaggaatatcagaaatgaaacagagaccaaaacatattattttgctgggcatggtggctcatgcctataatcccagcactttgggaggccaaggtgggcagatcacctgaggtcaggagttcaagaccagcctggccaacatggtgaaaccctgtctcttctaaaaatacaaaaattagctgggtgtgatggcaggtgcctgtaatctcagctattcgggaggttgagacaggagaatggctggagcctgggaggcggaggttgcagtgagccatgatcacagcactgcactccagcctgggtgactgagtgagactctgtctcgaaaaaaaaaaaaaaamatatatatatatatatatgtatatatatatatatcgtgtaagtagccacacaaaattggtacccattttctaaagactatcaatccctgtacactaaaaacatggcattccttcaaaaacagtggctgtttgtgaaaagcagggcagtggtcaaccaagg

SEQ ID NO: 870921 - DNA, 638 bp, Homo sapiens
ccaagcagagggtcaaggatgggagtggtagctggcagcatgtcggaaccagctgagagattctcatatacacagttgtctagagggtcctgtaaacatacccactgggtcagaagctccagggtaaggtcctaggatcaccatcttaacaggtgccccacataatttgtgtgcagccaactagtgctgaggtctgggaattataggacttcagtgtggaggatgcttaaagtgtgagcagaggctcctggaagcctctgagtgacacaggattttcttctcagtcattttgcaagccagggacctccagccagtgacaccctgcctggtccttgcctgaccacattacctgctgcaggagactgcccacccactcagcccacytgagccacgtctggcttatgcatgggttcatgagttcttgtcccactcccaagaggaatgaggatacactgacaatcacagagtgaccaaggtgaggagttacactgagtgatgaaacagctttcagtggagaggggtcacgggggtggtcccctacccaaaggggcaaagtcgccctaatatggctgagcccagggctttttatgggctcagaatgggggaggtgcaggccataggtagtattggaaaaggca

SEQ ID NO: 870922 - DNA, 615 bp, Homo sapiens
atttaacaactaataattttggggcagtaatatatatatcataaaatcatcacttctcacattcaacaattagcccaatttattcatgaacagcaccaaaagacagtgaatgttgaaagtaaagcttatttcatttctccttggagagtagtttcttccaaaacagacctgagatcatttataggaggttttggtgaaacaattttctggattcgttcattatatttttccaaagggggatttagttttatcatccaatggaaatgtgtatacatgtgcaaacatgcacgcacattcctaaagtaagcacgttgctggttgtgatttctggtgaaagtgttaaattaatatgtcaacatttgaaggaggatttaatttctggtgctttttatctctgacccaagcaacactttgtttcacttttttctgtttcttttgaatgatttgctttttacmcttactgctctgctctcttatctgttgaatgaatactagtatctaatttatagggttgtttgtagaatcaaataagacttttgtataaaggacctagtgcagtgcttaacatagtaagttctccatgaagttgctttcactcattttattcttcttcat

SEQ ID NO: 870923 - DNA, 605 bp, Homo sapiens
aaacttattccctgtgccagctttggtaagtttattaaactctctgcgtctcatttctttatcagttaaaaaaaagtaataatagtatttaccatatagaatattggaagaattaaatgttcaagtcatgtaaatcatatagtaggatcttgataaatgtcagctttaacattttttcattaattactttatattcatctcatttgtatattggtcacttcaaaagtatttgaaactgcttaaaacaaaaggcccaggtataacaaaaccactaagacaagcaagcaatcattagagcaaagcaattcttattagccacactactgtttgtttacctcatctcccascattctctctgcacactgtgctggagcctcaccagcctcctagaacctgccaaatggtttccctcctcggggcctggctgttctgttccttctgcctgggttgctctttgtttcctctttatgtggcgagcttattctcttccttgaagtctcactgcaaatttctcctgcacacagcagtcttctccacctgtaccgtctaacacaggttgcctcttacagctggttaccctccatcatgtccctgctttctttcct

SEQ ID NO: 870924 - DNA, 604 bp, Homo sapiens
ctttcttctttagatggccgagcttttccttttcagtgttctcacctttctaatttttcatgcagtcaagaagtattttcctaatatatttgatcatttccattattttaagttgttatgaaaaatatttgggtaatatcttaaatatatcattctgaagtggaatagctacaggaggttgcaactgtaagaaataagcccaaagcattctccaaggtgacttctgtgctaccttatttaacattaacataaaagttaaaactttactatggtaagaacaattttttttaaatttgttgttaaaaaaaggaaatcaaaacaatytagagaacataagtcaagggttatttaatcttttactaagtcagttgggggtgatttggagagcagttgatagtgctagagtgagcaggaatctagcaaaaaagagctaattgctgtctaatcacgcttgcaatggaatgaatacactagtaagtattacagttaagccaggcataatggttggcttaaatacattctgttatatcagtgttataaccagtatatattcagcctcaggatgggaaagagttgtagttatgtctatagttccccgatttag

SEQ ID NO: 870925 - DNA, 648 bp, Homo sapiens
agtgactttaacataattcctaatgatacttccataaacaacaggaccattgaatttttgagatttctctgtggttctttttttcctcaggatattttccattgaaatgtatggttgaaatttgatctttgaaaatctacttgatgtataattaggcttatttctatcagtttgttttttaagagttgttttgattttttcckttttatttaaccttggtttttaataatctaaaacttgtacatgattccaaaatcaaaactatgaaacaaggtacatttggagtattcattcctgtctgttctctatacccttttaacaaatgaattttaaaaattagtttttagtgtatgttttagtttacttatttctttttaaaagcataagcaaacccacacacatgcatatataagataataatatgaatatttatacatatatcaattcataaatcttttcccctttctacacaaatgtagtatactagatgcactctactggaccttgttttctcatgtaacaatacattctgaagatcattttatttcttttgatagctgcacagtaccatattatgtggctacataatattttattcattaggttgcacactgatagacataggggttgtcatatcatgctttaaat

SEQ ID NO: 870926 - DNA, 648 bp, Homo sapiens
agtgactttaacataattcctaatgatacttccataaacaacaggaccattgaatttttgagatttctctgtggttctttttttcctcaggatattttccattgaaatgtatggttgaaatttgatctttgaaaatctacttgatgtataattaggcttatttctatcagtttgttttttaagagttgttttgattttttcctttttatttaaccttggtttttaataatctaaaacttgtacatgattccaaaatcaaaactatgaaacaaggtacatttggagtatkcattcctgtctgttctctatacccttttaacaaatgaattttaaaaattagtttttagtgtatgttttagtttacttatttctttttaaaagcataagcaaacccacacacatgcatatataagataataatatgaatatttatacatatatcaattcataaatcttttcccctttctacacaaatgtagtatactagatgcactctactggaccttgttttctcatgtaacaatacattctgaagatcattttatttcttttgatagctgcacagtaccatattatgtggctacataatattttattcattaggttgcacactgatagacataggggttgtcatatcatgctttaaat

SEQ ID NO: 870927 - DNA, 616 bp, Homo sapiens
agcacattaccattcattgccctggccagcagcaacccacttgggtcctcacagatctttctgaaaatctttcactatttctccaacgcaaatctttcactgtttctccagtgcctttaagtgacagtaatagcattagtcatagctaacatctcttgagtattttccatgttctaggcattatacttttacccatttatayttataatcccttttaaatccttgcagaatccaataaggttggtaatatgattattatttttactagatgagggaattggaacataggataattaacttgcctaaaagggatatgcctggtatctgaatactcacagtctggctccagagctattgtacctctcagtgatatttaatagatttttcttgagtcaatgaaaggtatggagggaaagaggaagagaagttgaagaaatagacaaaacttaagactgagcaggacgtccctttctcctcttagtatgggcattctctgtctatgcagcatcccattcaaggaattgcagcccatgttgaaggtaaaaatgccatcacctccttccattaaatgttaaaatagtcaagtctttatttttatattctaggatactaaggc

SEQ ID NO: 870928 - DNA, 658 bp, Homo sapiens
tataagaagtgtccactccttcccctgtcaacaacattgggctggttcttttttttgttctcattcttataaaattattcatatcccagtagctttggctggttcaactaattaatggaatttagtgttcttctcttaaaatcttttaaaagttttccactttgttctagagttaaatagtgcttcttttttcatgttggatgagaartagagaaaagggatgatttgtgaagaaagcatttatccacataattataaaacacttctagcatgaattgaaatgtttgacagaccagacaagcagatgcttttactacagtgtttcagttttgtgactggcactaacatgtatattacagaagctaacatttgaattctgctaagctgtggtttgggtcatgagaaatgtttgcatctaagttgaaacctttttagttttcttcctttcaaaatggatgtaaccatctgctggagtgtgcttttaattaaaattattcttactaatactgtaagcagttttttaaatgagctttagtcatttaaaatagcttaattttaaaactggtatcagagttgtgtataattgatgattataagtaattcctttcagtaattcctttccttggttatcccaaattgtagtgagataaataaacca

SEQ ID NO: 870929 - DNA, 626 bp, Homo sapiens
aaaactgaatgcctttagcaacacccaagtcacctcttgaatgctttgctgcttagaaatttcttctgccagataccctaaatcatctctctcaagttcaaagtttcacaaatctctagtgcaggggcaaaatgctgccagtctcyttgctacaacataacaagagtcacctttgctctagttcccaactagttcctcatctccatctgagaccacctcatcctggactttattgtctgtatcattatcagcattttggtcaaagccattcaacaagtctctaggaagttccaaattttcccacattttcctgtcttcttctgagtcatccaaaatgttccaatctttgcctgtttcccagttccaaagttgcttccatatttttgggtatcttttcagcagtgcccccactctattggcaccaatttactgtattcattcattttcatgctgctgataaagacatactggagacggggaagaagaaaggtttaaaagagtcacagttccatgtgacttgggaagcctcacaatcatggtgggaggtgaaaggcacttcttacagggtggcagcaagagagaatgaggcagaagtgaaagtggaaaccccttataaaaccatgaaa

SEQ ID NO: 870930 - DNA, 659 bp, Homo sapiens
gttctcagcttcctcagggtcctcctacacatcttcattccaagttgtagtgtcccattcttttctaattaatgtcctcactttaacagtagacacctggtgaggctgcacatgcacctttcgttgcaggtcagccacttgcatgataagagcttgtgtctgatttttcaccatttcagctctttgtctacaggagataagactctcactcagggcaatcttagcggatttgaggctcagtatctgcttgtgaagcctggagttagaatccctgagttcatcatttgtttttcatcactttgtccagtgaacttaggagcagccaaccaacttctttatgtttcttggttctccacatttagtcaaaggtattatgtgtagaatccctaaagtccttgcctctctctagccatgaatcaggagtgtcaaatgcaytcatttggcgtaactctctaaacagttcatgccaaggatcatcagtgttctccatactattagaagtatagtcctcagcattttgaggtctaattatattaaacagtcaactctagaaatccgaaaaccaatgaaagaactgcatccttaatattctatttctctgtaaacactcctggcacaaaagtctgtattagtcagggttctctagagggacagaacta

SEQ ID NO: 870931 - DNA, 659 bp, Homo sapiens
gttctcagcttcctcagggtcctcctacacatcttcattccaagttgtagtgtcccattcttttctaattaatgtcctcactttaacagtagacacctggtgaggctgcacatgcacctttcgttgcaggtcagccacttgcatgataagagcttgtgtctgatttttcaccatttcagctctttgtctacaggagataagactctcactcagggcaatcttagcggatttgaggctcagtatctgcttgtgaagcctggagttagaatccctgagttcatcatttgtttttcatcactttgtccagtgaacttaggagcagccaaccaacttctttatgtttcttggttctccacatttagtcaaaggtattatgtgtagaatccctaaagtccttgcctctctctagccatgaatcaggagtgtcaaatgcactcatttggmgtaactctctaaacagttcatgccaaggatcatcagtgttctccatactattagaagtatagtcctcagcattttgaggtctaattatattaaacagtcaactctagaaatccgaaaaccaatgaaagaactgcatccttaatattctatttctctgtaaacactcctggcacaaaagtctgtattagtcagggttctctagagggacagaacta

SEQ ID NO: 870932 - DNA, 413 bp, Homo sapiens
cagtggattattgtaagcttaaccacatggagttaagactccagctgaagcttctgtaccagatgtggtttaactgattgaggaaattaacatattcccgggtacctggtatgtagcattaatctggaaaatgttttgttgggtttttttcctccatacctgtcaataaagtctaccagwagtagttgctttcagggggaaaggccataaatccaccttcactgttcccctacctcaggggtaggtcaactctccagtcatgtaccataatttcatccatagggatcctgattgccttttcattccacaatatatcatactggtctactacattgatgacattatgctgattgaacctagcgactgagaagtagcaatgactctagacttactgcatatgtatttgaatgtca

SEQ ID NO: 870933 - DNA, 620 bp, Homo sapiens
taccatttctactgaaactattccaaaagattgaagaagaggaactcctccctaactcattatatgagtccagcatcatcctgataccaaaacctggcagagatataacaaaaaaagaaaacttcaggccaatatttttgatgacatcaatgcaaaaatcctcaataaaatactggtaaaccaaacccaccagggcatcaaagcttatcaaccatgatcaarttggcttcatccctgggatgcaaggttgattcaacatatgcaaatcaataaatgtgattcattacataaacagaactaaagtcaaaatccacatggttattccaatagatgcagaaaaggtctttgataaaattcaacatccctttatgtttaaaacatcacactctggggactgttgtggggtggggggagtggggagggatagcgttaggagatatacctaatgctaaatgacgagttaatgggtgcagcacaccagcatggcacatgtatacatatgtaactaacctgcacattgtgcacatgtaccctaaaacttgaagtataataataaaaaaaactctcaataaactacgtattgaaggaatacctcaaaatagtaagagccatatatgaca

SEQ ID NO: 870934 - DNA, 633 bp, Homo sapiens
actgcagattcaaagatattgatataaaatataattggatctcatgaggaaatgaaaaaaagtacagaaagagaacagagagggagtagaagaataatacaaggtggatctgaagaaacaggcacagctaacatgcacgctttgtaattgtgtgaacttggacaatgagtttgatctgtataatatgtataactcaacacagataataactatacctaccttatggtcttgttataaagattaaatgagttactttataaaatcacttatagctgacacatacaaagtaatataaaagattttgccatctatgtatatctgtatctaattggggagttccaggctgtgaatgcatactccagagtccatgattccactgaataataactgggcaatttagttatcctctatgcacctaaatttctttatccctaaaragagaaaagtaaaagaagccacctcactgggttcctgtgaggattaaggcttgacaggagtacagaacaatgccagataataatgttccatgatgctagctattactagtgttactattataattggagtccaaaaagtagatgaatatacctaatattggaatacacaccaagaaataaaaaaggacgcagtccc

SEQ ID NO: 870935 - DNA, 633 bp, Homo sapiens
actgcagattcaaagatattgatataaaatataattggatctcatgaggaaatgaaaaaaagtacagaaagagaacagagagggagtagaagaataatacaaggtggatctgaagaaacaggcacagctaacatgcacgctttgtaattgtgtgaacttggacaatgagtttgatctgtataatatgtataactcaacacagataataactatacctaccttatggtcttgttataaagattaaatgagttactttataaaatcacttatagctgacacatacaaagtaatataaaagattttgccatctatgtatatctgtatctaattggggagttccaggctgtgaatgcatactccagagtccatgattccactgaataataactgggcaatttagttatcctctatgcacctaaatttctttatccctaaaamgagaaaagtaaaagaagccacctcactgggttcctgtgaggattaaggcttgacaggagtacagaacaatgccagataataatgttccatgatgctagctattactagtgttactattataattggagtccaaaaagtagatgaatatacctaatattggaatacacaccaagaaataaaaaaggacgcagtccc

SEQ ID NO: 870936 - DNA, 689 bp, Homo sapiens
tgtggttgtttgtgtggtcaatggtttggggcttcctgctcactgaaggatggtggttttttgtttggctttttcttccttcttctacctgagaagaaactgggggagaaatagttaaccctgcaccgtttgtgtgtgcttttacttccagcttatcagagcagggggcagtggtgttcccaaggccaggacataggctccttcaagtttgccccttgggttagagagaaagtttcaaaaatgaagcttctcatctaatctaagttactttattaagtctttgcttctgagatgggaggaaaataattataattaaggaagatataacaatattctttttcctctcttggggactgcaggaaaaagcttacgtccatgtggaaaatcaagytatcctctttttaatctagtaatcctactcctgggaatttattccaaggacagaagtcaaaagaacaaatgctgtatatacacagtgatctgtatgtagtagtattagccatagtagcaaacaatggaaacaccctgttaggatgtccccaacaggctgatcaaacacattatggaacagcaaataagcaaaattttctccagctattaaaattacagctaggaagaaaaaaattcatgcaattttaggaaatggtagtaaataaaacattggacacaacatatgcatattataattg

SEQ ID NO: 870937 - DNA, 484 bp, Homo sapiens
cccccttagttgtagttttatttaccctgggagaaaaacataagaatgctttcaagtgtaaggaagggctgtgtattcagatatcagcatactgctccaagaaagacatcagagagttttgaactgattgaaagcccaaatctattggatcagttgaggagcagagcaaaatatgaccaagcaataaacgagtacyttcaaagcttttaagaaattcttatagtttgtataggtggttgggaggtgaaattccagggctaggaatataatgtaaagccctacaatgaaaaagaagactgcaaattgtggccttaggggactttccctgccccgttcagagacacatgatttttttttaacagaaatccctggaaaaattactttagagccatgttttcttgcattctgcattttcattaatggtagtatactgaaatcacaaattcattcattcttttcttcatcagagcacatttacttagtt

SEQ ID NO: 870938 - DNA, 630 bp, Homo sapiens
taatagccatatataggaaaaaacaaagtaatattataaaagtgctgatgctaagctatttctaaatttaaaagtaccatatatgtgaagttgtatcagctatgacaagtctggggtcactatcccataaatgacagctgaaatccacacccaagcctaattataaggraagatgttctctttataacactgaagataaaagctccaggtttcccagaagagcttctccaaattgctgctggcttttctgtttctgagaaagtggcctcaagtacactctaggggactgccctcagagaatactgtccacatgataaacataaatctacctgtcgcttacactgtagacttacatattgctgaataatcttgcataaatactttaacccttttgggttttctcagaaaggaaaggatatcttttttcactaaagttatggagtaccttaattctagagtagcattttaacctgtggtctgcaacccgtatgtggctcagaaaatcaattttgtgagtcacgatcggcatctttttaaaaagtgaatggaacagaacacagtacatctggagtagtaaaggtaaaaattctttttttttcttattatataaatatgtgtttgcactagatc

SEQ ID NO: 870939 - DNA, 603 bp, Homo sapiens
gaaaacaacttgagtaattgataaaaatgtggaagagaggaggaaccaagatggccgaataggaacagctctgttctacagctcccagcgtgagcaatgcagaagatgggtgatttctgcatttccatctgaggtaccgggttcatctcactagggagcgctagacagtgggcacccaccatgcgcgagccgaagcagggtgaggcattgcctcacttggkaagcgcaaggggtcagggagttccctttccgagtcaaagaaaggggtgacagacccacatggaaaatcgggtcactcccacctgaatactgcacttttccgacaggcttaaaaaacggcgcaccacgggattatatcccgcacctggctcggagggtcctacgccaacggagtctggctgattgctagcacagcagtctgagatcaaactgcaaggcggcagcgaggctgggggaggggcgcccaccattgcccaggcttgcttaggtaaacaaagcggccaggaagctccaactgggtggagcccaccacagctcaagcaggcctgcctgcctctgtaggctccacctctaggggcagggcacagacaaacaaaaagacag

SEQ ID NO: 870940 - DNA, 603 bp, Homo sapiens
gaaaacaacttgagtaattgataaaaatgtggaagagaggaggaaccaagatggccgaataggaacagctctgttctacagctcccagcgtgagcaatgcagaagatgggtgatttctgcatttccatctgaggtaccgggttcatctcactagggagcgctagacagtgggcacccaccatgcgcgagccgaagcagggtgaggcattgcctcacttgggaagcgcaaggggtcagggagttccctttcygagtcaaagaaaggggtgacagacccacatggaaaatcgggtcactcccacctgaatactgcacttttccgacaggcttaaaaaacggcgcaccacgggattatatcccgcacctggctcggagggtcctacgccaacggagtctggctgattgctagcacagcagtctgagatcaaactgcaaggcggcagcgaggctgggggaggggcgcccaccattgcccaggcttgcttaggtaaacaaagcggccaggaagctccaactgggtggagcccaccacagctcaagcaggcctgcctgcctctgtaggctccacctctaggggcagggcacagacaaacaaaaagacag

SEQ ID NO: 870941 - DNA, 603 bp, Homo sapiens
gaaaacaacttgagtaattgataaaaatgtggaagagaggaggaaccaagatggccgaataggaacagctctgttctacagctcccagcgtgagcaatgcagaagatgggtgatttctgcatttccatctgaggtaccgggttcatctcactagggagcgctagacagtgggcacccaccatgcgcgagccgaagcagggtgaggcattgcctcacttgggaagcgcaaggggtcagggagttccctttccgagtcaaagaaaggggtgacagacccacatggaaaatcgggtcactcccaccygaatactgcacttttccgacaggcttaaaaaacggcgcaccacgggattatatcccgcacctggctcggagggtcctacgccaacggagtctggctgattgctagcacagcagtctgagatcaaactgcaaggcggcagcgaggctgggggaggggcgcccaccattgcccaggcttgcttaggtaaacaaagcggccaggaagctccaactgggtggagcccaccacagctcaagcaggcctgcctgcctctgtaggctccacctctaggggcagggcacagacaaacaaaaagacag

SEQ ID NO: 870942 - DNA, 698 bp, Homo sapiens
ccgcttaactcttattttattcctctgtccaacaatatttgttgactccccagcaaaatcaaataaagatcaaaatttcacatgctccatccttgcctttacagctcccctacacataacctaggtaatggaccaatcattsttctacatgctctgtgtttttctgcttctacacattgtttactctgctttttcatctgggacactacctaccatctatggctgtctaaattcctcccacccatcaaggccaaactcagatgccatcttctccataaaagcttccctgaaacctctagttggaaatattattattacctcttctgcactttcattgccactgactctgctgatggttgcacatagcacccgttttcctgctatagctatctgacagtgtcttaaatctccttctagactgcaaatgtcttgagaacaagaaccatgtcttattcatcttttaatcttatatggtgcctggcatagtgccttgtaattagaaggtacacaataaataatggttaaatgaatggatggataaatgaatttgagtataactgtacctgattaggtgaggaacaacttaaatatagacagagattttaatatgcctgtgcataaaagaggaagtacgaacctggaatatgtgatgagcttgggggcagatgtcagagatgaaaggtgcagtaactcataac

SEQ ID NO: 870943 - DNA, 639 bp, Homo sapiens
agacatacaaggccccaatataggaaactggtgcctgcaagaaactgcaaagccaagacagcccaagtgtagaggcagagggattgttaggagaagaagatggagggtaggtgaggacttgatagtgtggggccctccaggtttcttagaagtctaggtttcttctaagcacagtaggaagtcactgaaggatttcagcagagaaggaacataatccacccttcactttkagtgctgcatggagaaagattggacccgctacagagttaagttaggagactgtggcagggaagattttagactaaaggagtggcaatggatgtgcagagaagtgacaatattggagaaatattttgggagatataatatttgagatacagttattgccaccaaatttcttgaatgtattttcttatttattgtcaatgtttcacaattagaacataagctccatgaggacaaggacttgtcttatacactgctgagtcccactgcctacaacagtgcttggcatatagtgggtattgggtaatatttgtcaaatgaaattatgatggaatgacttataaatttgaggtaaaaatgaaaaggaagaaggtgtagagagagaattccaggattgaaggtgatatttattga

SEQ ID NO: 870944 - DNA, 563 bp, Homo sapiens
aattctgatttgggggctcgggtttttttaaatcccaaaaaaactgtaaaatagttgtagaaggaagagtagataaaatgggggaacaaatgggacattttcccagctgggcaggaggatgctgattgagtacaatcaatgccaccagcccgctaacgagacccaatcaggcggggcgattagagatattcttcagggaaagaagcctgacagctgcaggaaagtttctgcttttccagaggagagtgagtgggagagacaggcagagtggtgtggcagagaggggagggagagttgggggaaatcgaatcaacaaagctgagcacccacccagcccttcyttgaagaagtcaaagaggagaaaaggagggtaaagcctccagagagatccttctgctgtctccattttcttagacattgattttcatattcattcccactgacttccattctcctgctgggctagggagtcatgggtctgccacagtggccttgagatgggcagggcttgagcccctaacaaggatcccagcacacagctacgaggcttgttataggttgca

SEQ ID NO: 870945 - DNA, 678 bp, Homo sapiens
ctgcatgaagaaagtgagactcaaactgaacttcaaagggcacattgccttggatgaggaatgagagaggacccaacaattctgactatagacaattgcaattttgctttaaaaaatttctttttacataccgagagagtagcatgttatcttggaaaggccatgcgctgaaatccaggcgacccaggttgtattgctgatttggccctcaattcactgtgcagcatcaactcctcttcaggaactgtattagaaaaactcatcacaaaagcactttctaatttacatggtaaaacataatttaattctaaaattatcagtgccatgctctcaggctgtttgaaaacaatcacaactagatttctagctttccctagcagaaatatcagcaatgattctcttccctatttttaatagcaagacagacagcaaatcccagtgtagagatacctaatacatgtggagaaacaaaaggattgattatactatgattccaatgcacagaaggccatataactccytgtaggccacggagtttagagaattcaagtgaagtatgatggtactaaaggcaaaatttagtgatgccttcgaagtctgaatatacttttttgatgttgaaatccttgagttactaataatagctcacgtgcatagcatgtcaaacttcttaaaata

SEQ ID NO: 870946 - DNA, 680 bp, Homo sapiens
gggggactcaaatgcaataattctacagaagtaaaaacatgcaagaatcaaaagaagcaaaatggttacagagagataaacaatttaaaagacaaatggttacaaaaagagcaacggtaccaggcgcaaagctctaaatctttcattataattagatatagggagtatgcgggacccgaactcaaggctttatgttgttatctctttaagaaaaatcctgggaacttcatacattgttggtgctagtaccttatcagttaactgggctcctttgaaatactgaggatctgcttacacaggtcaactcctcgcggaagggggttgggtaaggagcccttagtgtcttgtaaattaaggggtcaactggagtttgtccggctttcccagctagagagagtcttatttacacgggaagcaaggctaggtgattaaagagacaagcaggataaaattccaagtagcgagttagagtaaaaacaaggttaggcatttcagtggaaacccmtaagtttcattggccatggccagaaacctgcagttgtctccatgtttaggtgctacccaccaagggtcccaacttggaaaagaaaagagagagagagtccctgtatggagcagaaaggaaagggagaaaaatgaatctcaaactttgggcttacctcttcctcctggctggttcg

SEQ ID NO: 870947 - DNA, 584 bp, Homo sapiens
atagcttaataggaatatctagttctttcaggcatcaacaagagtaaaagtactgaagtagtatttttctccaactgaatcaatcagtgggatggaatttacctcattttatgttctctttctccttttccattacctgctctctatgcttcacccaacccattctttcatgacctcaagtttacccagcaaaatcttcacatctacsatcacctgtaccagaacttgtatttctctaatttttcagtggactaaatccttcacgttttaccttatatcttgctaaaacacttttgctagctaatcctagtttattctagattcctttattatcatctctcatcatatattctactttctctcttatttcatagcattttttattatttgtaattatttagtcatctgtgtgattttttgttgtttaatttaaggatcccctctttctagaggaaaagccccatgaatggaaaagccccttgaactgtgcctattttgctcactccaggatgagtattatttcttagtattatttctttaaactgaacaactctagtaagattccattcttatatcagaaagta

SEQ ID NO: 870948 - DNA, 608 bp, Homo sapiens
ctagtcaatctcgaaaggcttgaatcttgcccgcatatgcatattttaaacttactgaaagtaaaattttgtcacaaactcttctggttatgcacctctttgccttagtacagtgttaaatctggaggaaaacgatcaataaattccccccaaataaagtggcagaatatttatttgtgacaataatttattataaaggttaatgacgttttttactatctggaaggagaaaggtcctgacgaataacatccaaaagaaatgctgtgcagacatttttatttcctacacgttttaaacttgaatttaagttttcctcaaacagtttttagaaaggtccaatttggcatccagcacaaggttatytgagaaataattaagtgaggtggtaaacttgccaaaatatcagtgttcccaagaattttattcctgacttagcaaatagtcttttatttgtgactattcactttttttctctatcttatatctaaatattgtttccaagggagagccagtatgactacaagtaagtaatatgcagattagtgacttctctttcctactcatcaaatctcctactaaaatgagattcaaggattatttttatttt

SEQ ID NO: 870949 - DNA, 673 bp, Homo sapiens
aagttgaagaatggaatctcattatgatgattttcaatatgaaataattcatgatttagcaggtaaatcttgaacttcgaattattaaaatataaaaaggactatttgggggctttaattattttttaattgacaaatagcatgtatttatcctgcatacaacagatgttttgaaatacatatacacattatggaatgactaaatttagctaattaacaaatgcatgatctcatagagttatcatttttgtggtgagaacacttaacatccactctgttagaatttttcaaggaaacaacacaatgtaattactggtccctccttcagttcagtaggaacttactaaacaagaatgasgtgctagttgcaggtatttgatgtttgcacgtactcgaattatcactttttgaggccacaggtgatacagatattgtaaagaggtaaacaaacttagaggtgttatttagaggtaaacaaacttagacttgcatactgcccatatgatcgtgggcaagatacttaggtgtatttggtctagtttcctcatgcaggaaatggaaatgataccaaagttgcaagaccactgtcaagattaaatggcaacataatcaatgtaacacaggcagcaggatgcctgacacataacagaggctcaatagttgttattattac

SEQ ID NO: 870950 - DNA, 673 bp, Homo sapiens
aagttgaagaatggaatctcattatgatgattttcaatatgaaataattcatgatttagcaggtaaatcttgaacttcgaattattaaaatataaaaaggactatttgggggctttaattattttttaattgacaaatagcatgtatttatcctgcatacaacagatgttttgaaatacatatacacattatggaatgactaaatttagctaattaacaaatgcatgatctcatagagttatcatttttgtggtgagaacacttaacatccactctgttagaatttttcaaggaaacaacacaatgtaattactggtccctccttcagttcagtaggaacttactaaacaagaatgaggtgctagttgcaggtatttgatgtttgcacgtactcgaattatcactttttgaggccacaggtgatacagatattgtaaagaggtaaacaaacttagaggtrttatttagaggtaaacaaacttagacttgcatactgcccatatgatcgtgggcaagatacttaggtgtatttggtctagtttcctcatgcaggaaatggaaatgataccaaagttgcaagaccactgtcaagattaaatggcaacataatcaatgtaacacaggcagcaggatgcctgacacataacagaggctcaatagttgttattattac

SEQ ID NO: 870951 - DNA, 609 bp, Homo sapiens
caagctctctttttcttaggtacttcttttctgcaaatgaataaccacacaaagtttaagtcattaaaatttcagagtaaatttacagaatgatatagattttcagaggtcttaattagagttcatggaactttagaaaattgagaaatgccctctcttgacactttgtctactgagttatttggttttctgatttaaatatgtgtttaattagttattattagtatgcaatagcctacagagaattgaagtgattctgattgtgagacaacttgacacttttcagggagagtgaaattaarggttattgatttacgggctctagcctcttctaaagcgctcacctcccatgataactctccggaaattaccagtctctggaaacactgagatcagacacagcagaaaccacatatcccattcttaggagtttgcagctctgtgacacaccatagatattttgtctagtttcccatatgtaatccacttagtcttacgtgaataaatgggcaggaagttaacatgaggagctgaacgtaaaagctagtgagtgaaccagtacaaaaggtagaggtttctatctgtacatcttttggtctctgacaggtg

SEQ ID NO: 870952 - DNA, 609 bp, Homo sapiens
caagctctctttttcttaggtacttcttttctgcaaatgaataaccacacaaagtttaagtcattaaaatttcagagtaaatttacagaatgatatagattttcagaggtcttaattagagttcatggaactttagaaaattgagaaatgccctctcttgacactttgtctactgagttatttggttttctgatttaaatatgtgtttaattagttattattagtatgcaatagcctacagagaattgaagtgattctgattgtgagacaacttgacacttttcagggagagtgaaattaagggttattgatttacgggctctagcctcttctaaagcgctcacctcccatgataactctcyggaaattaccagtctctggaaacactgagatcagacacagcagaaaccacatatcccattcttaggagtttgcagctctgtgacacaccatagatattttgtctagtttcccatatgtaatccacttagtcttacgtgaataaatgggcaggaagttaacatgaggagctgaacgtaaaagctagtgagtgaaccagtacaaaaggtagaggtttctatctgtacatcttttggtctctgacaggtg

SEQ ID NO: 870953 - DNA, 609 bp, Homo sapiens
caagctctctttttcttaggtacttcttttctgcaaatgaataaccacacaaagtttaagtcattaaaatttcagagtaaatttacagaatgatatagattttcagaggtcttaattagagttcatggaactttagaaaattgagaaatgccctctcttgacactttgtctactgagttatttggttttctgatttaaatatgtgtttaattagttattattagtatgcaatagcctacagagaattgaagtgattctgattgtgagacaacttgacacttttcagggagagtgaaattaagggttattgatttacgggctctagcctcttctaaagcgctcacctcccatgataactctccggaaattaccagtctctggaaacactgagatcagacacagcagaaaccacatatcccattcttargagtttgcagctctgtgacacaccatagatattttgtctagtttcccatatgtaatccacttagtcttacgtgaataaatgggcaggaagttaacatgaggagctgaacgtaaaagctagtgagtgaaccagtacaaaaggtagaggtttctatctgtacatcttttggtctctgacaggtg

SEQ ID NO: 870954 - DNA, 608 bp, Homo sapiens
tagtttaaatttaacattaagttgttttgtataatgtctgttccctgtaattttcaaggtacactttctgctgacatatatgtactgctttagttactattaataagttttaagtctgatgactcattagaacccatttcctctcctacccctgctatacaatgagcaaatcaggagggaagatgatttgttctgactgatgtaaatcaggtatagaaaggatggtaaatgaatatataatttgtttagattattctgcytaaatgatttgttcttactgttgtaaatcaggtatagaaaggatggtaaatgaatatataatttgtttagattattcttcctaaatacattatgtaatttagatatgataaccaactagcccattcaatataagggactaaatggaatggacacagtcatgaggttccagttgtgcctggctatctctgtgaatttggcgaagtatgtcactgtattactcaatgaaatgcaaaagtatttacttaatacaactgaacaatagcatttagaaaattttctggttaatagtaggatacttagctattcaaaatctttatgatgtttcatgtttgttgcatgtttgttgt

SEQ ID NO: 870955 - DNA, 555 bp, Homo sapiens
ctgagaatgatggcttccagcttctttcctgtccctgcaaaggacatgatctcattcctttttatggctgtatagtattccatggtgtatatgtgccacattttctttatccagtttatcattgatggatatttgggtgggttccatgcctttgctaatgtaaataatgctgcaacaaacatacgtatgcatgtgtctttatagtagaatgatttatattcctttgggtacatacccagtaatgggattactgggttaaatggtatttctggttctagatccttgaggaatcaccatactgtcttccacaatrgttgaactaatttacattcccaccaacggtgtgaaagccttcctatttctccacagcctcatgagcatctattgtttcttgactttttaataattgccattctgacaggtgtgaaatgatatctcattgttgttttcatttgcatttatctaatgattagtgatcttgagcttttttcatatatttcttggccacataaatgtcttcttttaagaagtgtcttttcatatcttttgtccacc

SEQ ID NO: 870956 - DNA, 626 bp, Homo sapiens
acacaagtatcgatagcccaatctatcaagcagaagaaaggatatcagagattgaagatcaacttaatggaacaaagtgtgaagaaaagattagagaaaaaagaaaaggattgcacaaagcctccaagaaatatgggactatatgaaaagaccaaacctacatttgattggtgtacctgaaagcggcgggagaagagaaccaagttggaaaacactcttcatgacattattcaggagaacttccccaacctagcaagacaggctgacattcaaattcaggaaatacagagaacaccacaaagatactcctmtagaagagcaaccccaagacacataattgtcagattcaccaagattgaaatgaaggaaaaaatgttaagggcagccagagagaaaggttgggttacccacaaagggaagcccattagactaacagcacatctctctgcagaaaccctagaaaccagaagagagtggggccaatattcaacattcttaaataattttcaacccagaatttcatatccagccaacttaagcttcataagcaaaggagaaataaaatgctttacagacaagcaaatgctgagaaattttgtcaccacccggccttccttacaaaagct

SEQ ID NO: 870957 - DNA, 626 bp, Homo sapiens
acacaagtatcgatagcccaatctatcaagcagaagaaaggatatcagagattgaagatcaacttaatggaacaaagtgtgaagaaaagattagagaaaaaagaaaaggattgcacaaagcctccaagaaatatgggactatatgaaaagaccaaacctacatttgattggtgtacctgaaagcggcgggagaagagaaccaagttggaaaacactcttcatgacattattcaggagaacttccccaacctagcaagacaggctgacattcaaattcaggaaatacagagaacaccacaaagatactcctatagaagagcaamcccaagacacataattgtcagattcaccaagattgaaatgaaggaaaaaatgttaagggcagccagagagaaaggttgggttacccacaaagggaagcccattagactaacagcacatctctctgcagaaaccctagaaaccagaagagagtggggccaatattcaacattcttaaataattttcaacccagaatttcatatccagccaacttaagcttcataagcaaaggagaaataaaatgctttacagacaagcaaatgctgagaaattttgtcaccacccggccttccttacaaaagct

SEQ ID NO: 870958 - DNA, 762 bp, Homo sapiens
gctatgttgaaaaaaacatactgaaggatcacactaacaacatgtccatcattcctcccaattctaagattcttggcatatgctatggtctgaatgtttgtgtctgcctccctccccacattcatatgttgaagtcctaacccccaaggtgattatattaggaggtggagtttggggcagctgattatgacatgaaggtggatttagtgtactcataaaagagaccccagggtctcttttccccttccaccataggaggatacagcgagaaggcaccatctacgaaccaggaaataggacctcgacagacaccgaatctgccagcaccttaatcttggacttccygacctcaagaactgtaggaaataaatttctgttgtttataagccacccagtttatgatattttgttatagcagccgaagcagactaagacagcatatgtagaaataatcactttgattcatacagtaggaaagtcagaaacaaggaggttcctgaagattaaaacagataattattatgcctccctttgatataatgaattacttacatcaaaccctctgacttttgcaaacaagacctgaaagtaatcctcactggtgccctggtgtaattccactgatgtcagtaatactctctttgtagctatgcaaacattgcatcaagaagtcttccagcagaccttcataaaagacaggcacagttgaaaacctcaaataagtttccaggcatgtattgttttctgtgttgtaagtcagta

SEQ ID NO: 870959 - DNA, 561 bp, Homo sapiens
tactatagaagatgtttggtttaataaaatgtaatctttccaagtatgattttttaactgagaaaaaatctgtgaaataatttttatgtatattccttcatctcaaagttatatttttgacacccaaacatgatacaacttgaaaagtacatttttttttttttgagacagtctccctctattgcccaggctggaatgcagtggcacaatctcagctcactgtaacctccacctctggggttcaagcaattctcctgcctcagcctytaagatgtgaaaacatgttaaagtgaatttaaagtgttttatgatttaaaatataattaactcaattttagactttgagattttactgaaaaaaaaaaatggtgtctctggaaatgatgatgcttcatgaaaaaaaaaaagtgcttggttaaatgacaagataaataaatgagcagtgactagagctgacctatgatagaaccctgacagatttctgtagcatcagaatggacagcccattaaataccaagctacttggtgatgtgtaagacaactgggtgagaccaagagaag

SEQ ID NO: 870960 - DNA, 554 bp, Homo sapiens
cacctatcatggagaggaagcccatggtccctggggagctgagctggggtacagttccttcatcaaggataggggctccaccatcccatgctttttagcttgttgacttggccatgctgaggaagcactcagggctactgaagacaattctgctcttgcccacagtggatggtcaactctgcccagctacttaaaacttctcacttcargctatctgctctctggttttgggatattcagatgccccggtcaatctaccactggctctcctagcaacttttttcaggtagccattaacccctctgatgtcttgaaaaagccgtaagtggtactaagcagagttcattcctttgtggtcagcagtactgtgcaaggagggcccaatacaggtgtccatttgttagccacaaaaattcaagataaattccaacaccactggcagactttaatagggaaaggaaaagccacatgcagccagcatcaatgagagaaaagccacatgcttccttcctcccatgcaccctcagagagacctgaagaagccagccatcctt

SEQ ID NO: 870961 - DNA, 554 bp, Homo sapiens
cacctatcatggagaggaagcccatggtccctggggagctgagctggggtacagttccttcatcaaggataggggctccaccatcccatgctttttagcttgttgacttggccatgctgaggaagcactcagggctactgaagacaattctgctcttgcccacagtggatggtcaactctgcccagctacttaaaacttctcacttcaggctatctgctctctggttttgggatattcagatgccccggtcaatctaccactggctctcctagcaacttttttcargtagccattaacccctctgatgtcttgaaaaagccgtaagtggtactaagcagagttcattcctttgtggtcagcagtactgtgcaaggagggcccaatacaggtgtccatttgttagccacaaaaattcaagataaattccaacaccactggcagactttaatagggaaaggaaaagccacatgcagccagcatcaatgagagaaaagccacatgcttccttcctcccatgcaccctcagagagacctgaagaagccagccatcctt

SEQ ID NO: 870962 - DNA, 632 bp, Homo sapiens
ctagaggatctaattataagaggtaccttttttttttaatttcatcacatcctttgggccatccaagttctaaaactcagtatgtatatgtatggtttctaattctcagaataactgtagagaatttaacaacccatcttgcaaatgaagacattatatcaaaacagagaaatgagttgctgagtttgccataggaagtagaasatataatttggatctaaactcactttcacttgactctctctcccaaaaatgagcaattgagcagactcagttgagcatctacggtctgctgtatgccaagctttttatgtttatttacctctttggctgcaacacctttcagtaggtcttattactagcactacaccactagataggaaacagtttgcccaacgtcacagccttgggtaaggggagacttggctgtaaacctaaatgttgaagtccatctccaaatgcagtgcaaagcgtatagaaagtcaagcaggaaagccactgattaaataatgaaaaataatctatgggcatctagctaagaatgaatataagggattttgtaatttcttctcatacgtaatgacattttacaatattaagtaatgataaagcctgagaaaatatttcactat

SEQ ID NO: 870963 - DNA, 553 bp, Homo sapiens
agaaaataataataccccctaatagatatgttgatgtttctggcttgtattatgatactaagtgatgtgcattagacattaccagccagagctctgtcactgctgtgaaattattttgcctaacctcagtcactattgttggtgtcgcttctgatattcctatgttacaaacactcattcttcagttgaacacaaatgatttaatatatgcaaatgaatgtggaagtttttttgtttttttttttgtttgktttttttttttttggagacacagagtcttgctctgtcactcaggctggagtgcggtggcgcgatcttggctcactgcaagctccgcctcccaggttcactccattctcctgcctcagcctcccaagtagctgggactacaggcatccaccaccacgcccggctaattttttgtatttttagtgagacagggtttcaccgtgttagccaagatggtctcgatctcctgacctcgtgatctgcccgcctcggcctcccaaagtgctgggattacaggcgtgaaccaccgtgcccggccgcagat

SEQ ID NO: 870964 - DNA, 554 bp, Homo sapiens
caggcgttcgcgcccctcatggcagcgtagacgctcggggtttgcaccccacggcgcgcgcgccggcacacacgcccctccgcacccaccgcgctcacaccgccgctcacactggcagcagcgctggctcacaccggcgctcggctgcccgcgcgctccctctcacgcgcgcaccgccgcggggcggcccaggtagccgggggatacgcggccggcagggcggaggcacttttaaaggcgattatggtgccgtctgactcgacgcttagtttcccctgaggagctgctctggcagccacaggccactgctgaatatcccgtttgttctccggcggcaggaggggcggctccgaggccagagccgccccytctcgtggggcgggcgaacgtctcctcccggcaccccgggaccgacgggtcctctctcgtccagccctcagggaccccggggagaagaggaaccccttgcggagtggcaccccagcggcccgggccccgacgcccagagacgattctcagggagggcttctggttttgctttggggaatgttttt

SEQ ID NO: 870965 - DNA, 686 bp, Homo sapiens
aaacgatggatgcacattgtctagatggagaagtgcacacatacagaccaaaaattgagggaggacatgggtttgggcatgaaatattgttaggatatagagaacaagtgagggaggaaagaacgaccttgaataacatactaaaaagtttgcacttyatctaagatcagtaagtattcagtgaaatattttgccaggagaatgacatgataatttttattaaaaaatatttgtagtggcatggagaatctattggaaggagtcagagaaaattagtctattcaaactctatttcatataacaatgcaggaaaaattattgtaatccacactgaggtaacaagaagaagaatgaagagtataggtgcaaaaattatgattagtgttagtctcaatagaatttgttgcttctggatatgaacagtgagataaatgggtgttatggatttatgacttaccaactcagctatgagcaaattagcagcatatggtactgtttctgagaagagaatacaggggaagaaaaattgtgaactcaaatcaattgagtttttgcagaaataccatttgacccagccatcctataactggatatatccccaaaggaatataaattattctagtataaagacacatgcatgtgtatgttcattgcaacactatttacaatagcaaagacataaaatc

SEQ ID NO: 870966 - DNA, 686 bp, Homo sapiens
aaacgatggatgcacattgtctagatggagaagtgcacacatacagaccaaaaattgagggaggacatgggtttgggcatgaaatattgttaggatatagagaacaagtgagggaggaaagaacgaccttgaataacatactaaaaagtttgcacttcatctaagatcagtaagtattcagtgaaatattttgccaggasaatgacatgataatttttattaaaaaatatttgtagtggcatggagaatctattggaaggagtcagagaaaattagtctattcaaactctatttcatataacaatgcaggaaaaattattgtaatccacactgaggtaacaagaagaagaatgaagagtataggtgcaaaaattatgattagtgttagtctcaatagaatttgttgcttctggatatgaacagtgagataaatgggtgttatggatttatgacttaccaactcagctatgagcaaattagcagcatatggtactgtttctgagaagagaatacaggggaagaaaaattgtgaactcaaatcaattgagtttttgcagaaataccatttgacccagccatcctataactggatatatccccaaaggaatataaattattctagtataaagacacatgcatgtgtatgttcattgcaacactatttacaatagcaaagacataaaatc

SEQ ID NO: 870967 - DNA, 618 bp, Homo sapiens
ctttgttgattgtttcctttgctgtgtagaaagttcttaacttgatatgttcccatttgtccattttttgttgcctgtgcttgtagggtattactcaagaaatttttgcccagaccaatgacctggagagtttccctaatattttcttgtagtagttttgtagtttgagttgttagatttaagtctttaatccattttgatttgatttttatatatatcaagagatagggggtctagtttcatttttctgcatgtggatatccagttttctcagcaccatttattgaagagactgtcttccctaatgtatgttcttggcacctttgtcaaaaatgagttcactggatgtgtgtggatttctttctgggttccttattctgttccattgatygatgtgtctgtttttatgccagtaccatattgttttggttactatagctctgtagtatagtttgaaatcaggtaatgtaattcctccagttttgttctttttgcttagactagctttggctattctggatcttttgtagttccatataaattttaggatttttttttccctttctgtgaagaatgtcattggtattttgatagggattgcactgaatctctagatta

SEQ ID NO: 870968 - DNA, 610 bp, Homo sapiens
cccaatttcccaaaatatgttataattagccagggcagttctaggcattggaattttaaaaactccataggtgattcaagtatgtagccaaggtcaagaaccatgggtctaaactgttgttccaatcactgtctttgcactacctctgtcacataaaacccaagctcatatacaggacataggatactggtataagatatcacagaggtaagactcagagtggaggataactgargactggggcagtgtgatgggacagggtatagggagacaggaagggagggatagagcagcaatggcaggaagtgagagggagccactgctcctagcaactcactagcctgtgtggtgtcacagggctcctgcttcgtggaaggctgtgacctgcttccaggtgtttcagagcctgctcctgactgcggaccccaaggagtccttcccactacaatgagctgggcttttcttggcacatgaggcttatacagaccacttctcgactgatccacttgtgagaagatccagaccttttctggtagtcatggccagaaagcagcatcatatgtacagctgaggagggctacaggagccagctttcccaagctggcaggac

SEQ ID NO: 870969 - DNA, 635 bp, Homo sapiens
agggataacaaatcttcagccaaatcaccctactggtaaatagctcaagcttcagtccccaaaaatgattagctgaagaacatagtgaggaagtgagaaaagatgtcaaagggactcactcatgcagaaagagagggtccatctgagctaaataagatttaaaccaccctaggctttattacctcccacagcttcatacagtcagccctctgtacccatgggttctgcatccaaggattcaaccagctacagatgaaaaatatttgggaaaaaagcaagraaaaataacaatacaataaaaaattaaattaaaaaatatggtatgacatgtttacataacatttacattgtattaggtattataaggaatctagagatgatttaaagtataaggggggtgtgcataggttatatgcaaatactatgctgtttcatataagggacttgagcatctgcagattttgttacctgtggagggagagggagggttggaatcaagtactgtgcatactgaaggatgactgtatttggagtcactgctaaattcctcatctttaaagagatcactcaagacagtaactcctgatttatcttgaagcctactccatagttttggtgctaggtaggagagtccc

SEQ ID NO: 870970 - DNA, 625 bp, Homo sapiens
aattaatgtccttatacctgaatctctgtacacttgaactcatgcataattatttccttaggataacttcttaaaaatagtattgataatgataattctgcctactccagcctatcctctttcctaatctagaaagtatgaaaaaaatggaagtagaggaaagtttttaaaaaaatctacataaagggacaggtgtaaggtaaaataccacagctcatactgcatctctgcagtatcaacatgttgtggaaagcagggcaatgaagatgctagaggatggtgttatgaatagataaytttgtcattaaatgacgtccactgctatgagatgtgcttgcttttatgtaactggttaatttcttgactattaagtgtaaagaaaatggttaaataacattttaaatgtgtaaccaacagtgcctgtttggttttggtttgaaatgtgttcaagtggtcattttctctcttttttttaaaaaataattttaacttttattttagactcagggggtacttgtgcaggtatatttcatgggtatactgtgtgatgctaagacttgggtacgactgatgccatcacccaggtaatgagcatagcacccaacagttagtttttcaactcttg

SEQ ID NO: 870971 - DNA, 625 bp, Homo sapiens
aattaatgtccttatacctgaatctctgtacacttgaactcatgcataattatttccttaggataacttcttaaaaatagtattgataatgataattctgcctactccagcctatcctctttcctaatctagaaagtatgaaaaaaatggaagtagaggaaagtttttaaaaaaatctacataaagggacaggtgtaaggtaaaataccacagctcatactgcatctctgcagtatcaacatgttgtggaaagcagggcaatgaagatgctagaggatggtgttatgaatagataactttgtcattaaatgacgtccactgctatgagatgtgcttgcttttatgtaactggttaatttcttgactattaagtgtaaagaaaatggttaaataacattttaaatgtgtaaccaacagtgcctgtttggttttggtttgaaatgtgttcaagtggtcattttctctctttttttwaaaaaataattttaacttttattttagactcagggggtacttgtgcaggtatatttcatgggtatactgtgtgatgctaagacttgggtacgactgatgccatcacccaggtaatgagcatagcacccaacagttagtttttcaactcttg

SEQ ID NO: 870972 - DNA, 576 bp, Homo sapiens
ctgctttatctcccagctagattataaacttcttcagggcaagatccacatctgattcactcttgaactcttgcccaagcacttagcacagagaaaccccttaataaatatttattgaaggacgtaaaaatagaggaaggaaagcaaggagggaaacttcaaaaaccatcagatttatcatctcgtctcctgacaaggttacaccaatctgcctccaatagatgactctgcaagtascagttactaaatcgctttaggaaaatcactttctcagtgcggttcatgggctacagccgaggaccctgattcaactcaatctatattctatctctgttactaatttgatgtgtcaccttgtgcaactaataccagatttgcaagaggtcttggaaaatacataacagatgcagaaagcattaagtaatcaggatgaggaaattgctggaataacttggctctgttaaataatgaccaaagttttgtcagtgattcactcagggattatgaatatactgatgtgtcaaaagtcagtttcaggaaatacatttgatgaggtgaattagacaatagaaaaat

SEQ ID NO: 870973 - DNA, 647 bp, Homo sapiens
gttttcagccacttgcccctccatgcggtctgagaggttagggtgggagcagacctcgaggccaagggaccccaggagggacagaagggacaggagacagcgtgggggcaggagacgatgtgggggcaggagatggcgtggggacagctgtggcatggctgctggcacagcagggtgggcgcctgttgcccctgmgattaggaaccacccgagaggcagcctctggcctgcccgtctcttttccgtgggttcttgatgcggctctaagtgttaggtgccattcacccaccgctagttcattcaccgccttctttatccggcgctcagtgacaggtgactgttgatgagacatccagccgtggacgtggagggcccgggtgagcagaagcctcttggaagtgctttccgagtctccctggggagcctgggttaggctgggtcagccccaggagaaccaggtttctcgggacggggcaggtgcgccggtgaatcagtgggcgggtcctccctgagtcacggaacccacgcctgaggacggcggtggcctcggctgccaaatgtgtctccctgggtgtgagctgctgaaacccagccccgccaaacgcaggcgtttcctttacactcgccttacccaggtttaagttcag

SEQ ID NO: 870974 - DNA, 647 bp, Homo sapiens
cataaaactgtatgttacaaagtcacaatttgaacccagacttttctgactttagaaccctgaacttatctactatactaacactcttcaccctggatctgcagttttgtaaaacaaagtcagattagagaaatgggcaaagaagagatctattattctttcttctgtgccaaggaaaatctcccaggagatgtgtctgaggagcttcaggaaactgacctgcatgcatatgaaccagtgtccccactgaagtgcggagacgcacctgggtgcacagctttttttttctttgttatgaacwgttatattttattttatttttattatactttaagttctagggtacatgtgcacaacatgcaggttcgatacataggtatacatgtgccatgttggtttgctgcacccatcaactcatcatttacattaggtatttctcctaatgctatccctcccccagcccccccaccccctgacaggccccagtgtgtgatgttccccaccctgtgtccaagtgttctcattgttcaattcccacctatgagtgagaacatgcggtgtttggttttctgtccttgtgatagtttgctgagaatgatggtttccagcttcatccatgtccctgcaaaggacctgaaatcgtcctt

SEQ ID NO: 870975 - DNA, 609 bp, Homo sapiens
gccattccattaggctggctcagtcagtagcagcactttatgttagcctgatagcaaaaatatgtcttgttggggaaaggatgaggtagaaattaaaaaatgtaagttttgaaactggaaataagcactcacactttgtttttaattagaattgatatttctcctacaataatctgacttcaattaccttgggcaatgcatttgatttcccctagtcaataaaagtaaattgtatagaagttcaccttaaattytccttttggcttattaccagtaacttttaccatggtacttaaaaaaatattttcagtaagaccaaaattgccgcagaagtcacacgaaaaacaaaactttggcacatgaaaaaaattcttattaacaacaagcatcaggattctgagaaaaatcaacccacgagacaactttttttagcatgatggcaagaatttgggaaaagggaacttacaggaaaaagagtttgttttgccaattattcattcacctttttttccttctatttttgtagtgtccaagtaggattccttaccccaaacctaattttattttccattttgtcctttaaagatctcaatcttctgattataaaat

SEQ ID NO: 870976 - DNA, 609 bp, Homo sapiens
gccattccattaggctggctcagtcagtagcagcactttatgttagcctgatagcaaaaatatgtcttgttggggaaaggatgaggtagaaattaaaaaatgtaagttttgaaactggaaataagcactcacactttgtttttaattagaattgatatttctcctacaataatctgacttcaattaccttgggcaatgcatttgatttcccctagtcaataaaagtaaattgtatagaagttcaccttaaattctccttttggcttattaccagtaacttttaccayggtacttaaaaaaatattttcagtaagaccaaaattgccgcagaagtcacacgaaaaacaaaactttggcacatgaaaaaaattcttattaacaacaagcatcaggattctgagaaaaatcaacccacgagacaactttttttagcatgatggcaagaatttgggaaaagggaacttacaggaaaaagagtttgttttgccaattattcattcacctttttttccttctatttttgtagtgtccaagtaggattccttaccccaaacctaattttattttccattttgtcctttaaagatctcaatcttctgattataaaat

SEQ ID NO: 870977 - DNA, 526 bp, Homo sapiens
tcaatagggaggcctgaagagagggagagagatgtgggattgttggggcagttagaacacacatatttttctactgagtttgccgacttgcatgggaaaagttcatggggccccaaaacaattacaataggaacatcaaagatccctgaytgcagatcaccataacaaatataatgatgataaaaatatttgaaatattgtgaaaattaccaaactgtgacacagagacacaaaatgagtacatgctgttgaaaaaaaaatggcacaaattattttgctcattgcaaagttgttagaaatatttcatttgtaaaaggtacaatatttgcaaagtacaataaattaaatcataataaaatgaggtacgcctacatacatgcacgcacacacacacacacgtataaggttaaagttttagggtaaaatttatcaataaattacatgagaatgacctttcatgtaacttcataatgactatggaaatttacatggtccacatggcatctgcttgtgaaattaaataaaa

SEQ ID NO: 870978 - DNA, 552 bp, Homo sapiens
acaatgggggtacaggtattgggtaaatacagccattccaagtgggagaaattggccaaaacaaaggggtcacagggcccatgcaagaccaaaatccagtggggcaaattttaaatctccaaaatgatctcttttgactccatgtctcacacccaggtcatgctgatgcaaaaggtcagtttccatggtcttaggcagctcagccmctgtggctttgcagggtacagcctctttcctggctgccttcatgggctggtgttgggtgtttgcagcttttccaactgcacagtgctagctgtggtggatccatcattctggggtctggaggatggtgtccctcttctcacagctcaactaggcagtgtcaatgtagggattctctgtgggggctccaaccccacatttcccttctgcattgcctagaagaagttctctatgagggccccacccctgcagcaaatatgtgcctgggcatccaggcgtttccatttatcttctgaaatctaggcagaggttctcaaacctcaattcttgacttctgtgtacctgcag

SEQ ID NO: 870979 - DNA, 552 bp, Homo sapiens
acaatgggggtacaggtattgggtaaatacagccattccaagtgggagaaattggccaaaacaaaggggtcacagggcccatgcaagaccaaaatccagtggggcaaattttaaatctccaaaatgatctcttttgactccatgtctcacacccaggtcatgctgatgcaaaaggtcagtttccatggtcttaggcagctcagccactgtggctttgcagggtacagcctctttcctggctgccttcatgggctggtgttgggtgtttgcagcttttccaactgcacagtgctagctstggtggatccatcattctggggtctggaggatggtgtccctcttctcacagctcaactaggcagtgtcaatgtagggattctctgtgggggctccaaccccacatttcccttctgcattgcctagaagaagttctctatgagggccccacccctgcagcaaatatgtgcctgggcatccaggcgtttccatttatcttctgaaatctaggcagaggttctcaaacctcaattcttgacttctgtgtacctgcag

SEQ ID NO: 870980 - DNA, 605 bp, Homo sapiens
catgccagaggatgggaaataaatctggcttaaattcagggatcttctacctcagtagaatttctaggggtccagtggtgtggggcctgtcgagatattccttcaaagataaaggataagttaccacatttggtccctcctacaaccaagaaagaggcacaatgcctagtgggcctatttggattttggaggaaacacattcctcatttgggtgtgttactctggcccatttatcaagagacatgaaaagctgccagttttgggtgggttccaggacaggagaaggctttgctaaggtccaggctgctgtttaagctgctgtgccacttgggccatatgacccagcagatccaatggtgtttcaggtgtcagcagcagataaggatgctgtttggaacctttggcaggttcrcataggtgaatcacagcggaggcctctaggattttggagcaagtccctgccatcttttgcagataactactctctttttgagagacaggtcttggcctattactgggctttggtggaaactgaacatttgactgtgggtcatcaagtcatcatgtggcctgaactgcctatcatgaactgggtgctttctgac

SEQ ID NO: 870981 - DNA, 606 bp, Homo sapiens
tagaaaaccagtttgagggtggtggtgtcccctaaatttcagaccagtatatctatagatgtgcaattccagcccaggagagccacagggacacgacccaggcacgttgctgctgcagaggtggggttactgcagggaactgccgtatgggtggagmcacccaagcctagaagacagggccatcatcccagtgggcctggaagacagagccactgctccagagtgcccagacggcacagtttcacgccaaagaagttatttttgacccttaaggttttggacttgctcaggacccattacctcttccttctttcctatttctcctttttggaatggacatgtctatcctatgcctatctcgccattttattttggaagcatataacatgcttgatttcacaagtcaacagctggagagctatttgcttcagaataaagggaaccttgagtctctccatatctgatttagatgatctttagatgatgctctgggttttagacttctgaggtgatgctggaatgtgtaaagacttttgaggctattgggatgaaatgaatgtattttgcatatgagaagggcatgaattgaagctagggaaagaatgc

SEQ ID NO: 870982 - DNA, 622 bp, Homo sapiens
ctcagtttcatagtccattgaggctgctataacaaatactttaaactgggtagcttataaacaacaaacatttatttctcacagttctggagactgtgaaatccaaggtccaggcaccagcagatatggtgtctagtgagggccaatttcctggttcataaaatgtgccttctcactgtattcccacatggtggaagtggctaatgagatcactggagcttattttaaaagggcactaatgccagtcatgarggctccaacctcctgacctaatcacttctccaaaggccccaactcctaataccattcccatgagggtaaggatttgaacacacaaactctggaggggaacacaaacattcagaccatagcaggcagtcatggtaaaaaagtaattctcagctctgacataatgattttaatctggaatagagctgagtggtgagttataaagtcaaaacctccagactacaaactcaagaatacacaaaaagaataacctaaatgtttttattcaagagtgacatcatatttaaagactcattaccaaactggcaagcataggtttgattcttgaatcctgtgtctgtaagaacttttaaatggcttcagatcatgacct

SEQ ID NO: 870983 - DNA, 578 bp, Homo sapiens
tggaattgaggaaatcagcattccttagtagattcctggcttcagtttttatccacggctgggaaaggagtgacctgcaaggctgctttaaacaccctttggcgtggcctgaaatcaaagccgcacccacactggagtgcagttgtctcaaatgagaactcactccctcagggcaggcacatccaggaagtgctaaaacacttaaaagttcctagtgctggccaggtgcggtggctcaagcctgtaatcccagcactttgggaggctgaggtgggcggatcatgaggtcaggagatcgagaccatcctggctaacatggtgaaaccctgtctctactaaaaatmcaaaaaaaaaaaaaaaaaaaaattagccaggcatggtggcaggcgcctgtagtcccagctactcgggaggctgaggcaggagaacggtgtgaacccggcaggcagatcttgcagtgagccgagatcgcgccactgcactccagcctgggcgacagagcgagactccatctcaaaaaaataataataataataataaaataaaaattaaaaaaagttcctagtgtttttgagacc

SEQ ID NO: 870984 - DNA, 578 bp, Homo sapiens
tggaattgaggaaatcagcattccttagtagattcctggcttcagtttttatccacggctgggaaaggagtgacctgcaaggctgctttaaacaccctttggcgtggcctgaaatcaaagccgcacccacactggagtgcagttgtctcaaatgagaactcactccctcagggcaggcacatccaggaagtgctaaaacacttaaaagttcctagtgctggccaggtgcggtggctcaagcctgtaatcccagcactttgggaggctgaggtgggcggatcatgaggtcaggagatcgagaccatcctggctaacatggtgaaaccctgtctctactaaaaatacaaaaaaaaaaaaaaaaaaaaattagccaggcatggtggcaggcgcctgtagtcccagctactcgggaggctgaggcaggagaacggtgtgaacccggsaggcagatcttgcagtgagccgagatcgcgccactgcactccagcctgggcgacagagcgagactccatctcaaaaaaataataataataataataaaataaaaattaaaaaaagttcctagtgtttttgagacc

SEQ ID NO: 870985 - DNA, 560 bp, Homo sapiens
atttgaatatactttaaagcatttctgtcttgtcaaaatgaagacttcagttttctgtctctttggaattttttttaattggtaatgaaaactaagcaaattataccactgagattctttaacccacttaagtacaataaataagccgagtatgttttgatcaaagttttcactggaatctccttttaacttttcaccagtttcataattaacagtttgtacaggcattagcctatttacagcggttgctctgcaatgccctgtgctgttgctctcatctttttgaattacaacacaagcatactgaaatgttacatgcttcccttggtaactgaatcattcatttgaaacaccattggcttgctataattcttatgggggaaagagttttttgttgaattttttatttgaataaaagwgagtccaaattaaacaaaagaacttgaaatgttggctgccttgccaacataatggaactgacataattttgtagcaaatcatatttctggaacctgtagaacatgactcagtttgagtggactgtctcagtttttctaaac

SEQ ID NO: 870986 - DNA, 595 bp, Homo sapiens
aaacactgttcaaagaaatcagagatgacacaaacaaataagagacatttcatgctcatagataagaagaatcagtatcactaaaatggccatactgcctaaagcaatttacaaattcattgcaatttctatcgaactaccaatgacattcttcacagaactagggaaaactattttagaatccatatggaaccaaaaaaagctaaatagccaaggaaatactaagcaaaaataacaaacctggagttaccacgttatccaaatatcatggtgttggtacaaaaatggacacatagactaacagaacacaatagagagcccagaaataagtttgcacacttgaagccatctgatcttcaacaaaactggmaaaaagaagcaatggggaaagaactttctattcaatcaatgttgctgtgataactggctagccatatgcagaagattgaaactggacccctttcttacaccatatacaaaaattaactcaaaatgaattaaagacttaaatgtaaaactgaaaactatgaacactctgggaggcaacctaggcaataccattctggacctaggaactgccaaagatgaagacacc

SEQ ID NO: 870987 - DNA, 562 bp, Homo sapiens
tttaggtttaggtctcacgtttaggtttgtgatccattctgacttttttttttttttttttttttttttgagacagagtttcgctcttgttgcccagcctggagtgcaggggtgtgatctcagctcactgcaacctctgcctcccggcttcaagcgattgtcctgcctcagcctgcagggttgccagagttgcaggtgcacgccaccacacccagcttctgagtttcaccatattggccaggctagtctcaaactcctgacttcaggtgatccacccgcctcagcctccccgaagttctaggatgacaggcrtgagccactgtgcccggcaatcatttttttttttttttttgagactgagtctagctctgtcgcccaggctagagtgcagtggcatgatcttggctcactacccactccatctcccaggttcaagcgattctcttgtctcagcctcctgagtagctagaactacaagtgcatgctgccacacccagctaatttttgtatatttagtagagatggggtttcaccatgttggccaggctagtctcaaactcct

SEQ ID NO: 870988 - DNA, 595 bp, Homo sapiens
taggccttcacccagaggtggctactatgatcacctagatatgcatgccctgaaagctcatgagtgcacaggaagtggagggatagcctggcatcttcctgaaaaacctacccctgaacacaaggaagataacacaaggccacaccagagacccctgtggttcacttttcttctttctcttcctaatgaagtagggcccagctgcctccttaaagactcttccacctgtatccagttccatcacttggacaagccaccctaggacccagatcccattttctacttttgtttgagaacgtagaccatctctgggaggtatgacagtgtagatgacatcatctcacaaatggaaaaccagaccctcaaaggtaaatattgcacttrcaccccaatagagagctgggagcagaggccattgtgaggacttgacactccaagatgctaaatgtgtccttgttttctgcaaaacaaacagaacactaagagaagtgaggttgtctgcctcaaatgcaaagttgaaatgagtctacttgtatgatcttcacgtggactaaaatcatccacacagagggcagtgcaagattggacaccacag

SEQ ID NO: 870989 - DNA, 595 bp, Homo sapiens
taggccttcacccagaggtggctactatgatcacctagatatgcatgccctgaaagctcatgagtgcacaggaagtggagggatagcctggcatcttcctgaaaaacctacccctgaacacaaggaagataacacaaggccacaccagagacccctgtggttcacttttcttctttctcttcctaatgaagtagggcccagctgcctccttaaagactcttccacctgtatccagttccatcacttggacaagccaccctaggacccagatcccattttctacttttgtttgagaacgtagaccatctctgggaggtatgacagtgtagatgacatcatctcacaaatggaaaaccagaccctcaaaggtaaatattgcacttgcaccccaatagagagctgggagcagaggccaktgtgaggacttgacactccaagatgctaaatgtgtccttgttttctgcaaaacaaacagaacactaagagaagtgaggttgtctgcctcaaatgcaaagttgaaatgagtctacttgtatgatcttcacgtggactaaaatcatccacacagagggcagtgcaagattggacaccacag

SEQ ID NO: 870990 - DNA, 601 bp, Homo sapiens
tacagttgtaagtatttagatcagtgctttctaactttaatacgcacaagaattatctgggactgctgtcaaaatgcagtcccattccctaggcctggggcaggtcctgagattctgcatttctaacaaggccatgccaccactgctgatccgtgaaccacacataactcaggagagctgacccttcactcccactcaacatcagtgaagcggaataggttcgagggaggtgggaatggttggctttttttcccctccccttctctgttatcagcagcacccagtgggtggttgaacttgcattctccctcagaggcaatgtgacagtgtgaattggtctccacttctcaggaaagcattggtggggtgtggaaagagttgagtttcctttccacctatgaacaaagagaacacccagagggaagctgcatgtatgtrcctggcccttactctgcatgttagcagggggtctacctgctaataaaagaagactcagtaaaatccagagtccgaacccaaaggcagaggttacaattaatttgtcactcaccataacaagaacaaggaaaactacaacttgaatgagaaatgacaaccaaca

SEQ ID NO: 870991 - DNA, 620 bp, Homo sapiens
tccatccctttattttgagcctatgtgtgtctttgcacatgagatgagtcttgactctttatccaatttgccagtctgtgtcttttaattggggcatttagcccatttacatttaaggttaatatcgttatgtgtaaatttgatcctgtcattatgatgctagctggttattttgcccattagttgatgcagtttcttcatactgtcgatgrtctttacaatttggtatgtttttgcagtggctggtactggttttttcatgtccatatttagtgcttcctacaggagcgcttgtcaggcaggcctggtggtgacaaaatctctcagcatttgcctgtctgtaaaggtttttatttctccttcgcttgtgaagtttagtttggctggatatggaatttctgagttgaaaattcttttaagaatattgaatattggcccccactctcttctggcctgtagggtttctgcagagagatctgctgttagtctgatgggcttccctttgtgggtaaccggacctttctctctggctgcgtttaacatttttccttcatttcaaccttggtgaatctgacgattagtcttggggtcgctcttcttgaggagtatctttgtgttgt

SEQ ID NO: 870992 - DNA, 620 bp, Homo sapiens
tccatccctttattttgagcctatgtgtgtctttgcacatgagatgagtcttgactctttatccaatttgccagtctgtgtcttttaattggggcatttagcccatttacatttaaggttaatatcgttatgtgtaaatttgatcctgtcattatgatgctagctggttattttgcccattagttgatgcagtttcttcatactgtcgatggtctttacaatttggtatgtttttgcagtggctggtactggttttttcatgtccatatttagtgcttcctacaggagcgcttgtcaggcaggcctggtggtgacaaaatctctcagcatttgcytgtctgtaaaggtttttatttctccttcgcttgtgaagtttagtttggctggatatggaatttctgagttgaaaattcttttaagaatattgaatattggcccccactctcttctggcctgtagggtttctgcagagagatctgctgttagtctgatgggcttccctttgtgggtaaccggacctttctctctggctgcgtttaacatttttccttcatttcaaccttggtgaatctgacgattagtcttggggtcgctcttcttgaggagtatctttgtgttgt

SEQ ID NO: 870993 - DNA, 646 bp, Homo sapiens
gacctttctctctggctgcgtttaacatttttccttcatttcaaccttggtgaatctgacgattagtcttggggtcgctcttcttgaggagtatctttgtgttgttctctatatttcctgaatttgaatgttggcctgtcttgctaggttggggaagttctcctggataatatcctgaagagtgttttccaacttggttccattctccccataactttcaggtacaccaatcaaacataggtttggtctcttcacatagtcacatatttcttggatgttttgtttgttccttttcattcttttttctctaatcttgtcttcrtgttttatttcagtaagttgatcttcaatctctgatatcctttcttccacttgatcaattcagctgttgatacttgtgtatgcttcacgaagttctcatgctgagtttttcagctccatcaggtcatttatgttcttctctaaactggttattctagttagcaattcctctaattgttttcaaggttcttagcttccttatgttgggttagaacatgctcctttagctcggaggagtttgttattacccacgacctgaagcctacttctgtgaattcgtcaaactcattctccgtccagttttgttaccttgctggcaaggagt

SEQ ID NO: 870994 - DNA, 607 bp, Homo sapiens
atagcagccgtctgaatccatgcttcctgaattagtctcattgggcttttacaggctccctgattattattatgggacttttgcagtttgcttccctgtgtagctgcaagcctgcttccttgtggcagaaaattacttcccagcactgttgcaagtgcatatgagaatacctacagtagactcaagacaacattacaaagaaaggagttccttctttaaccaacccgaggcctgcctttccatcctcattttctgttccagaaaactggcagtgggaaaaatttatctccttcaggggcaagtacacttggcacccatggaagtcagtcctgtgacccccaacaatcatagcagacaatytcatcacagctgcatcagcttcatctcaagcaatattcacagaaaaggaaaattttttttctttacatctcacttccatgcacagtaaaaaaaaaaaaaaaaaaaaaaagacaatggttttcatttttaacatttctccattatatatagtgtatttatactccaatggatgttgagcatctacaaaccagcttagttctcttttatggtctttcctctgcttgcatttcatctgttgcagttttgt

SEQ ID NO: 870995 - DNA, 548 bp, Homo sapiens
aacaaaaacagcatggtactggcataaaaccagacacacagaagaatggaacagaatagagaaccccagaaatgaggccacacagctacaactatctgatctttgacaaatctgacaaaaacaagcaatggagaaaggactccctattcaataaatggtatggggataactggctagccatatgcagaagactgaaactggaccccttcctttcaccacatagaaaagttaactcaagatgaattaaagacttaaatgtaaaacccaaaactatataaagcctggaagacaacytaggcagtaccattcgggacataggcacaaccaaagatttcatgatgaagataccaaaaacaattgcaacaaaagcaaaaattgacaagtgggatctaattaaactaaagagtttctgcatagcaaaagaaactatcaacagagacaacatacaacccacagaatgggagacaatttttgcaaactatgcagctgacaaaggtctaatatccggaatctataaggaacttaaacaactttataagaaaaaaaag

SEQ ID NO: 870996 - DNA, 539 bp, Homo sapiens
ggattcacagatgaattctaccagaggtacaaagatgagctggtgccattacttctgaaactatttcaaacaatagaaaaggaaggagggactccctcctaactcattttatgaggccagcatcatccggataccaaaacctggcagagacacaacaaaaaaagaaaacttcatgccaatatccctgatgaacatccatgcaaaaatcctcaataaaatactggcaaaccgaattcagcagcacacygaaaagcttatccaccatgatcaagttggcttcatccctgggatgcaagtctggtacaacatatgcaaatcaataaatgtaattcatcacataaacagaacaaatgacaaaaaccacatgattatctcaatagactcagagaaagccttccagaaaattaaacatcccttcatattaaaaactctcaataaactacatattgatggaacgtatctcaaaataataagagctattcatgacaaacttacagccaatatcatactaaatgggcaaaagctggaagcattccctt

SEQ ID NO: 870997 - DNA, 567 bp, Homo sapiens
tattattatgtgtctttgaattctaattatctacatggatcacaatagacaagcagttagcatttgttgtttgtgtcgaaattcaggatttttcctttcttttcctgatcagttcatcctggaatgtgtgctgtgtgcctgacaccactcaagactcactctcattcccagcaaattccttacaatcttgtcttctgagtccacgtccataactcttcagttctttccagatcccttcccatggtattttagacagaatggagtatgaagctttactaaaatagcttaatcctgacagtttgatcactaagaaggagcagtaatggkgaatttactggggagactaaatggcatttgcaatatttacataatgtgagacaaagtacctctgaatatgacggtgcgttctatcactatattagtctatttttgcactgctacaaagaaatacctgagactgcgtaattaataaaggaagaggtttaattgactcatagtttcacatggctgggaaggcctcaggaaacttacaatcatggcagaaggtgcaggggaagtaagttcaga

SEQ ID NO: 870998 - DNA, 650 bp, Homo sapiens
attactccaaaatccgaaactttttgagcacggacattatgcccaaggaaatattcactggagcattttggattttagactttcagattttggatgctcaagtgttaagtataatgcaaataatccaaaatccaaaagaatcataaatttgaaacacttattgtcccaagcattttggataaggaatattcaacccgtaaaccaaggaagcatattttagaggtggcatttactgaaatctttcatcatcaaatgggaaattcaaacaytttcctggttagtttctttccacctggggttgtgttgtgaacaacctgagtacaagggtttgtacttctatcttaaatttccagtctccagcagagtgctggcccatagtagaagctcaacaaataaaatgtctgaaagtcatatatgtgcattctgctggaagaaaaccttatacttacccaaaatacaaattgatcagtgaaattagtcaggtggttgtaggtgagcaaacatatcttttccctctacccatcttaggttcattggctgagatttcatgacaaaagattaacaagataaaaacatacaatttatttaatatacattttacatgacatgggagccttcataaggaaatgaagacctgaagaagtggttaa

SEQ ID NO: 870999 - DNA, 658 bp, Homo sapiens
ttaatgggtgcagcacaccaacatggcacatgtatacatatgtaacaaacctgcacgttgtgcacttgtaccctaaaacttaaagtataataataaaaataaataaataaataaattgtcttttctattctccctcaactaatctcaccctttattcaaacctcccacactgtaaggatttccccagtgctttcccacacatttgctaacaggttcctcattttccctgaggcttcctgggcccagcatgccactgcaaatcttgctcccaaaggaagcctgttttttactttgagaaatgaagggaagggccagggagagaaaaacaaaaggaaacrtagaggctggcccttagaggcctgagctgagggagtaataatagcagaaactggcatcaacaacaattgaagacagagacagccgcatgctgggcccatgcccagcatgtatcagtgatctattcattagtgataaatgaattcagtaaattcgtgagactttttttttctcctttcccatttagcttcaaacctataagccaatatacaattctgaagtcagtaaagtcgtgagactttaatgaattcattcatcaggtccagagctttttggatgagtctttagggttttgtttgtatacaattgtatcaccagtgaa

SEQ ID NO: 871000 - DNA, 638 bp, Homo sapiens
tcttctggagagcagtctgtcctcacaggcaggaaaattggcctctgtagcttctgtagctcattatgtcagcctgtaccagctgagatccaaaccactgtcccagccctttgcctccacactcagtcaccgtctcctgtgccccaccctgagacaaactcctatggttctcgctagctcatgttcctgatgcarcattagctgcccaggcctagtgtagatcttgtttgtgagtcacactgaagagactgctattaaaaacatttctggcatatgaggttcaaacaatatttgaggttcaaacaatatttgaatatttgaatcaggttgagaatctggttgagaacctggaataacaacaaatataagaaataaacccatagctattctagacatattgctaaagagttattcttgagatagggagccagataggtgaagccttcctcttaggtttagattttctaagtgcagtttcagagctgaagaatttatggaaggagattagccatacttctcattttttttttcattttgatgcaacctcacagagtttgtgagaagagattttggctgaaattgggtttttatatagattgagtaggcacctctcatgtgtataattttaaagacattga

SEQ ID NO: 871001 - DNA, 671 bp, Homo sapiens
ataaccatggaagatgctgttatagaaatctttgatttcagtggatgtgataggatcctagagggtcagaattccagtgatagccaccagttgcaaaaagagcattttaccctaatacagagcagagcaaagaataataattggaattatttgagtgctgcatccttgtggggctaactgatcatagtttccatgttgaatccaatgaataggctattaggktcctatttgatctttataactaaagcaaaataaaatctttaaggctggtgaatggaaactgacttgaggtaacataatgtagagtcgaggacattcatgaccaaaccccagatttgagagagctctcatactccacagcatcttgactcaagggatggctgagtccttttgaaaaagtacttgcaacattcagtaagtgtttttcctaatcctccccaagtgatttgccatttgccataacactcaaatactggaaaaaagaaaaaaaaactagttattttgagaattattgattagtgactgtaaaaaaatgataatccttagaggtcctgttgataatccaaagtgataatctcattttggtcctcatgtcacagttatcttttttgaaaatcaggtgattaatggattaagggttattttggtattaaaagctaagtaaagatcat

SEQ ID NO: 871002 - DNA, 671 bp, Homo sapiens
ataaccatggaagatgctgttatagaaatctttgatttcagtggatgtgataggatcctagagggtcagaattccagtgatagccaccagttgcaaaaagagcattttaccctaatacagagcagagcaaagaataataattggaattatttgagtgctgcatccttgtggggctaactgatcatagtttccatgttgaatccaatgaataggctattaggttcctatttgatctttataactaaagcaaaataaaatmtttaaggctggtgaatggaaactgacttgaggtaacataatgtagagtcgaggacattcatgaccaaaccccagatttgagagagctctcatactccacagcatcttgactcaagggatggctgagtccttttgaaaaagtacttgcaacattcagtaagtgtttttcctaatcctccccaagtgatttgccatttgccataacactcaaatactggaaaaaagaaaaaaaaactagttattttgagaattattgattagtgactgtaaaaaaatgataatccttagaggtcctgttgataatccaaagtgataatctcattttggtcctcatgtcacagttatcttttttgaaaatcaggtgattaatggattaagggttattttggtattaaaagctaagtaaagatcat

SEQ ID NO: 871003 - DNA, 542 bp, Homo sapiens
atcctaatatatttaatcacctactcagcatttcttcttggctttctaatagatacctaaaatttagcatgtcaaaagcctaattcctctcagcccccaggaaatctcctctcactgtctttcctagaacatgaaagaacaattctattcatacacttgcctatgtcaaaacaccttgaaaacatccttcatccctctctttttctcatattgtgctccagtaaatgctgtcagttctactgatggaatccaccaatgtggaccacctagttcaagcagttgtgctccctctcttggtttattgacacagtctcctgactgtctccctgttttyaccactgggccctggattctgttctcacagcagccagggtggcctcttgaaaacttgcctcagattatgtcattcctctgctcaaaacctttcaataattttgcatttcactgagaattaaagccaatgtccttaaaaataaaagatctgttcctcttacttttcagctctcatcttctgtcccctttctcactgttcacaccactgc

SEQ ID NO: 871004 - DNA, 634 bp, Homo sapiens
cctctttttactctcttctccaacctctctcgctatccctcaacttctttctcctttcaattttggtgccacccttcaatctctcccttctcttaatttcagttcccttccctttctggtagagacagaagagacatgttttatctgtgaacccaaaactccggcaccagtcatggacttgggaagacagtcttcacttggtgtttaatcactgccgggatgcctgcctgattattcacccacatttcagaggtgtctgatcaccgtggggacacctgccttgatccttcacctttgtggcasgcaacctccctgggagcgaaagtatccccccccaccccttctctccatgtctctaccctctcttttctctgggcttgcctccttcactatgggcaactttccaccctccattcctccttcttctcccttagcctgtgttctcaagaacttaaaacctcttcaactcacacctgacctaaaacctaaatgccttattttcttctgcagtacctcttgaccccaatacaaactcgacaatggttccaaatagccagaaaacagcacttttgatttctccatcctacaagatctagataattcttggcataaaattagcaaatggtctgaggtg

SEQ ID NO: 871005 - DNA, 634 bp, Homo sapiens
cctctttttactctcttctccaacctctctcgctatccctcaacttctttctcctttcaattttggtgccacccttcaatctctcccttctcttaatttcagttcccttccctttctggtagagacagaagagacatgttttatctgtgaacccaaaactccggcaccagtcatggacttgggaagacagtcttcacttggtgtttaatcactgccgggatgcctgcctgattattcacccacatttcagaggtgtctgatcaccgtggggacacctgccttgatccttcacctttgtggcaggcaacctccctgggagcgaaagtatcccccccyaccccttctctccatgtctctaccctctcttttctctgggcttgcctccttcactatgggcaactttccaccctccattcctccttcttctcccttagcctgtgttctcaagaacttaaaacctcttcaactcacacctgacctaaaacctaaatgccttattttcttctgcagtacctcttgaccccaatacaaactcgacaatggttccaaatagccagaaaacagcacttttgatttctccatcctacaagatctagataattcttggcataaaattagcaaatggtctgaggtg

SEQ ID NO: 871006 - DNA, 608 bp, Homo sapiens
ctcagctctggaccaagtggacctaacagacatctacagaattctctaccccaaatcaacagaatatacattcttctcagcacctcatcgcacttattctaaaagtgatcacataattggaagtaaaacactcctcagcaaatgcaaaagaacggaagtcataacaaacagtctctaagaccacagtgcaatcaaattagaactcaggattaaaactgacagaaaacctaacaactacttggaaactgaacaacctgctcctgaatgactactgggtaaataataaaattaaggyagaaataaagttgttcattgaaaccaatgagaacaaaaacacaacataccagaatctctgggacacatttaaagcagtgtgtagagggaaatttatagcaccaactgcccacaagaggaatcaggaaagaactaaaatctataccctaatatcacaattaaaagtactagagaagcaagagcaaacaaattcaaaagctagcagaagacaagaaataactaagatcagaacagaactgaaggtgatagagacatgaaaaacctttcaaaaaatcaatgaatccaggatctgattttttgaaaagatcaacaaa

SEQ ID NO: 871007 - DNA, 641 bp, Homo sapiens
aactaatacagattgatgttaggaagataacatcagtgctatgaatatagttaaaaacatgaactatgaagccaaacttctgccttggatgagttacctaatctctacatacctgtttcttcaactgtgaagtaggactaataatacttacctcataatgtggttagaaaaaygaaggaagtttccttgtaagttgtattcctaggtattttattcactttgtagcaactgcaaaagggagtttgctcatgatttggctctctgtttttctattattggtgtataggaatgcttgtgatttttgcacattgattttgtatcctgaaactttgctgaagttgtttatcagcttaaggagtttttgggctgagacaatggggttttctaaatatacaatcatgtcatctacaaatagcgataatatgacttcctctcttcctatttgaatacctttatttctttctcttgcctgattgtcctggccagaacttccaatactatgtggaataggagtggtgagagagggcatccttgtcttgtgccagttttcaaagggaatgcttccagcttttgtccagtcagtatgatattggctgtgggtttttcataaatagctttttttattttgacatatgttctgt

SEQ ID NO: 871008 - DNA, 669 bp, Homo sapiens
aaaacttctttaaatttcatatggaaccaaaaaagagcccgtatagccaagacaatcctaagcaaaaataacaaagctggaggcatcatgctacctgacttcaaactatactacaatgctacagtaaacaaaacagcatggtagtggtaccaaaacagatatctagaccaacggaacagaacagaggcctcagaaataacaccacacatctacaaccatctgatctttgacaaaccttacaaaaacaaccaatggggaaaggattccctattaaataaatgttgttgggaaaactggctagccatatgcagaaaactgaaatgggaccccttccttacaccttgtacaaaaattaactcaagacggattaaagatttaaacataagaactaaaaccataaaaaccctagaagaaaacctaggcaataccattcaggacataggcatgggcaaagacttcatgactaaaacaccaaaagcaatggcaacaaaagcccaaattgagaaatgggatctaattaaacaaaagagctcctgcacagcaaaagaaaccatcatcagagtgaacagggaacmttcagaatgggagaaaatttttgcaatctatccatctgacaaagggctaataccaagaatctacagggaacttaaacaaatttacaagaaataa

SEQ ID NO: 871009 - DNA, 655 bp, Homo sapiens
tgtaatagtgaaggccatctgataaagaacattttttatatgtgatattatgatgttgtagggaacattctatttatgcatcacaaatgccagcatattctctacatgtacttttaaacaagtttattctaagcaaacgatgctgctacaatcactttgcttaagttgcagcattacttcatgatatgatacaacacacactaaatccacatttattgttttatttaattgtattttttamcacatgtcatcttttttggtgtaaatttccagaggcctccaagaattcaacctcaccaagtaagtcagttatgatattttcatgtacatgaaacacctccatctctaccaactcagcaactactcatttttttttctttttcacaagtttaaatctaagccctttgaccctagggaatttttaaaatattccttgatgaaagtaagtgatttctgaatctaggcagaagctccaggtatgctgtatatcaaagacttgatcagtcgaacatacctccacaaacagtaccaagactacttggccaggtacagtaattgtccaggtacttatacctaaaaaaacatttttaaattagggacaatttttccatatagtttttaaaactaaacttgttcaaataatatttcacttcat

SEQ ID NO: 871010 - DNA, 655 bp, Homo sapiens
tgtaatagtgaaggccatctgataaagaacattttttatatgtgatattatgatgttgtagggaacattctatttatgcatcacaaatgccagcatattctctacatgtacttttaaacaagtttattctaagcaaacgatgctgctacaatcactttgcttaagttgcagcattacttcatgatatgatacaacacacactaaatccacatttattgttttatttaattgtattttttaacacatgtyatcttttttggtgtaaatttccagaggcctccaagaattcaacctcaccaagtaagtcagttatgatattttcatgtacatgaaacacctccatctctaccaactcagcaactactcatttttttttctttttcacaagtttaaatctaagccctttgaccctagggaatttttaaaatattccttgatgaaagtaagtgatttctgaatctaggcagaagctccaggtatgctgtatatcaaagacttgatcagtcgaacatacctccacaaacagtaccaagactacttggccaggtacagtaattgtccaggtacttatacctaaaaaaacatttttaaattagggacaatttttccatatagtttttaaaactaaacttgttcaaataatatttcacttcat

SEQ ID NO: 871011 - DNA, 644 bp, Homo sapiens
aaacttgcattggtattatacatatattattttgcaattgtacccttggtattttcaggagagggttttatcagaaatttcactgacattttcattaatgcaaatgctgtctttattcaaacataatgaatattctagtggtaatgggtgataagaacttgaaattatatttaatatatattagatttcagtaatcaacttttatactttaggaagtcatgatttgattctgtctcttcctcatttaattactttaaccaaataataatacccaaaatatcatgacagtgatgattaatttcaattattaaaatttaaaataaatattaattttaaaactctgattcatattttctttattaaagaattaactcaggatttcttygtgagtcatctatctatacaacatatatttttattttttaagcatttcacaaaacatggcaggaggatggacattcttgtgttgtaaattattacttggatttctgatattaggtgtgttaggaattaagaattcatttattgacatacatacaaaatatataagttactttgcgtgtataactgagaaaaatgaattatttttaaaatgtatccttttttcttccacaattagaatagcagtctaaatatcctagagt

SEQ ID NO: 871012 - DNA, 563 bp, Homo sapiens
tatgctatttattactgtctcaatttcagaactcgttcttggtctattcagggattcaatttcttcacagttcagtcttgggagggtatatgtgtcaagaaatttatgtatttcttctagattttctagtttatatgcatagaaggatttatagtattctgtgatggttatttgtatatctatgtggtccgygatgatttccccccttattatttcttattgtgtttattttattcttctctcttttttcctttattaatctagccagcagtctatctgttttattattttttcaaaacaccagcttctggatttgttgatcctttgaagggtttttcgtgtctctgtctctttcagtttagctctgatcttggttccttcttgtcttctgctagctttggggtttgtttgctcttggttctctaagtagattgctaatttgagatctttctagctttttggtgtgtgcatttagtgctataaatttccctcctaacactgctttagctgcatcccagagattctagtatattgtctctttgttctcattagtttcaaaaatg

SEQ ID NO: 871013 - DNA, 595 bp, Homo sapiens
gttgccttaaaacattatcttttagaatggattgttatgtaccgatagacaactggtcaccctccttataggtaatagtttaccatccacatacaaaactacttagactagtattagcccataaaagcaacacattccatttcctctctatttgacagtccttacaagggaaaatcccaagtgatctgaaaacacagttacagttgctgccagataggtaaatcacatgaccttgaacacaggtagctacatttacaaagtgtcccttcaatgatttctttagatttcaaaaggagaggccaatacaccaacattttcattgacttctttttctgttatttttttctcttttctgatatctttaccaaatgkttttggataactagaacacctttcgatcttcaagtatctgtttgcaagcttggtatcttagctgttaagttgtttggaaagtcagataaatgtctcttacccagagctttttaaaattcttagcagcaaagtcctgaaaaatttgctcctcagcaacaactgtgagtcctactggatggtcataacattcaataagataattgtggcaggggggaaatgggga

SEQ ID NO: 871014 - DNA, 625 bp, Homo sapiens
gcagacaaaacagacttctggacaaaatatactcctacaataaagatgataattttataaggtaatcatcttacgcagtctttctaatgtggtaatagaggagctgaatgacagcaaatgatgttgaagaagttgactacaggactatattatgtagatatttatgtaacatattaataattgctattttatgtgcaacaagaaaggtgttaaaaagttgtaagcaagagcatgatttcatttacattttaagaaaatctctctgagtgtagaaaggatttgggggaaaacaratcaaagcaaggagtccagttagagctgtggcagaagtctcgacacaggaggaggatttggatgagagtactgacagaaaagattaagtgaagaaggcagattcaataccattttaattgtttgaaaggcacaacattttattgattgggtatggggttcagggaggtgtaaaaaatgtcacaggcttctggtataaataattagattttaaatggtgccattctctgaaatgggagaaggttagaagatgagcagtttaattctgagacattcaaatggaaatggtaagcaggcaaataaatgcataagccagagggatcaaagaaaaaga

SEQ ID NO: 871015 - DNA, 626 bp, Homo sapiens
gctggaaatgcaagccaggggtaagatcatcaaggaattttatgccaaattcaggcattttgattttatcttacggggaataggaaactactgaaggagttaagcttggaagtaaatgatcagatttatgttttaaaatggtgacatatccctaacacctaatgcagtctgtggccagaataattcctcaaaaaaaccagtaaatgaactttttgtggagaatggatttgagaggagcaatattagaggcaggtggaccagcagggaggctgctgcagccactcaggtgagaaatgatgactggcttctccaagtgcccctggggtggtggtggacagtattgctacatccgcctgcaaaggttgcttctcacccttcaccccgatggtcaagacatgcaatcttcaccctgcaggtatcttcacggtttttcagaagagcaaaagtcaccatcctaattctacactttsaaaatgtctccctgattaccccctttgcacttagggaaatcacaaagcagagagcctcctcatctagaggaaagcataggggtcccttgtctcagaatcatcaaagtctctttttcagatttctgcaacccaaccattagcacagcctatgagcac

SEQ ID NO: 871016 - DNA, 642 bp, Homo sapiens
cagaaaagttgctcttcagtttggggctagagctaccaatcccagacactgccacaggtctcagttttcactgtttccccctcagggagagcagagcgacttctacgaaccccacaccccttatctccactgcctccgagagttcccaggccagcgggcgtctccattgctgccgttttccatggttacacatctatgccatgtcatttacacttcagtacatccttaccgcaatgcttttgcctccctggctggggttttcccgtaaatccccatcttttatttttytagtacagttctgttttcatatattttataaaggtactaagccagggatcaaaagagttcaggtcagatttcctattctgccacacactagtcgtgggttcttgtttatgtcactaacctgccgtcagtctcagtttccaaatctgtgaagtgagccaaaaaatacttgtcctctctacctcacaaggtagttgaaatgatcaaatgcagactgtcagccaggaaaatgggtctggccttgggacacagactctgaggctcttgggaagccgactctgagatggaggttagcttgcaggtgtttattcgagaggtcttggaatcaacatctagggaaaagaagggaagggaagc

SEQ ID NO: 871017 - DNA, 540 bp, Homo sapiens
gtctgaaatcacccaaagagttctacttaaaaaataatgtttagattgagttatccagttaaaatcaaactctccaggctgactgatatcaatggctcatatgtgcaattggctttcctcctggttgtaagcaagaggacaaggaccacatcttccctgtgcacccagcataacatggcccctagcaggtgctccataggcacttgttgtacacatgtacaacagtaattatggcttgttgtaattattcaacttgttgaatgaaggttgaacatcatcaggagagactcacttggccttcgtctgtggaagcaaaggatgaaaatgtaatasagaataatagaatagagacatcttcatggtccctgactcccagtaaagctaggatctttgtacctaatcataagtaacagggatattctgaaggggttctgtggccccttgacaatcataagtgattttgagaaataaatattttgacatctagtcccaaagcattagtcatgagactgacaatcattgatgagacagtggaaatgt

SEQ ID NO: 871018 - DNA, 615 bp, Homo sapiens
agcaaaacagaatcatcccataaactgtaaggtccgtggtatcagagggtccccagtctgactgcacatctaagtcgttaacaaacacattccaggccccaactgagcgcactgaatcagaatccctgcaaggaggacaatgatcttgtatttgcactgaccttccagatgtttcttactctgatcaacttgggggtaggaaccattgagctgcatcacatcattccaaagcccaaacacagaagcagaacaagaatatattcaatgcattctctaaagtggagaaaactgttgagggaacctagaagtgaaggaaacctggcttgctgggctccatcttaactttatcctgagtacggcagagacaggagcactttgggacacatgcctgaggtagtgacagtmcaacattgaaacagtggaagccctagtttcaaattcaaacttgctttgagtagaaattaagtttacatctttttgcatagcaacagggccagttttctccaagctgctcaatttacaagaaaagaaatcatatggctaagaattcaaacttcagcagacatgggtaaacaaggaactcttacaaatctattctagcaacctaacaagaaa

SEQ ID NO: 871019 - DNA, 641 bp, Homo sapiens
ttcctagaagaatattactttagaagcagaatattatatgctctatatctcactgtccaaattctgtttatcttcttttcatgttttaggttttcatttcctcaggaaagcccttctcatctagtactaacaaaagtcattacgtgctcagccttgagactttgagccttcctcttgagcagctgtttgtaaaagaaattatgaagagaaaggatgaaaatgctrttggcacagatataaaatgagataaattcaataacaaagccatttagaaagatttttagacaatgtgaggactgaaaatattcacaacaatattaatacaatataattgtccttttctgttttacgttatcataaaaaatcagttcctgccctgtgtttatagcaacagagtatttgagagcacctgggctgcagagattactgctctatcccatgaaacaaaacattaagagtataaaagtctgacttaaatagtcaaactgattgccccagacaataaggttcaaatttgcatttctgttttctgaaagtttaaacaggtatttctttgttagcttggagagcttagtaatttcccttttttccagtcacatctaggttaaataatgtgatgaatctgctagtcttcttagttt

SEQ ID NO: 871020 - DNA, 570 bp, Homo sapiens
tctttattctcctttcttctattaacctatctgaacagtaattgtatagaaaaatatgtatatgtgctattggacttataatatacagaaatgtaattcacatgtaatatatttgccaataaaagaacaaaggagttgggtggraacaacactttaatgagctaaaaactgattacaattggtaaaataattataaaaatatattgttaggcttgtaacattaatgaatatggtatgtataacaataatattacaaaaatggggaaagggaatagagctatatttttatacctttttctgttattaatctagtataaatctaaagttcataagaatatcttgagatatatattaaaaaaccctacagcaagctctagaagtaaaaatatatagaaaactatagtgaagaaatcattaatgaaatttaaatgttacattagaaaatattcacttaacacaaaacaaagcagtaaaagattaacagaggagcaaaaaagacatgagacatggagcaaagaaataataaaatgcaaatataaatccaaccatattaatattattgttacattt

SEQ ID NO: 871021 - DNA, 593 bp, Homo sapiens
ggtgggtcttttccatgctattttcatgatagtgaattagtctcatgagatacagtgggttaataaagggaaattccccagcacaagttctcttttcttgtctgccaccatgtgagacatgcctttcaccttttgccatgattgtaagacctttccagccatgtggaactgtgaatccattaaacctctttcttttgtaaattgcccagtctcaggtatgtctttatcagtagtgtgaaaagagactaatacagtaaattgctaccagtagagtggggttstgctgaaaagataccaaaaaatgtgaaagcaactttggaacagggtaacaggcagaggatggaacagtttggagagctcagaagaagacaggaaaatgtgggaaagtttggaactctctagagacttgttaaatggctttgaccaatatgctgataatgatatggacaatgaaatccaggctgaggtggtctcagatggagatgagaaacttgctgggaatcagagcaaagatgactcgttacgttttagtcaagagactggtaacattttgcccctgccctagagatttctgcaactttgaacttgggaga

SEQ ID NO: 871022 - DNA, 568 bp, Homo sapiens
gaattccatacacatcagatctgaaaatgtgtgtgtgtgtgtgtgtgtgtctgtctgtgtgtgtttgtgtgtgtgtgaagcagggaaagagagcaagagtgagagtgagcaagagaggagagagagggagagaatcagacaggtacaggaagagagtgacagagctacagagacagaattaaaaggggacaccaagaatattgagcagagaaactataaaatgggagttgccattaaacagaatggggaagagcaactttggggagtttcagtggctccatacagacatattaattttgagattcctaactgacatccacgtggawaagtcagggagtgttgggtgtagtgtccagtgtttaggtgtaatatgaaatatcaggaaattaatgacacaaaaattagtaagaaagcaaagataagaaagataagaagtgaatgtcctgagcctaatggtcctctaacatttaaaaaatagtaaagatgaaacctgcaaaaaaggactaggggtaattatcaaaaacgtggtggggggaaagtaagttaagtgttctggaattctataaaa

SEQ ID NO: 871023 - DNA, 742 bp, Homo sapiens
attctgtcatctgtcatgcaaatctagttccacagaagggcaaattaggaatccattacctggagtaaccattcctcatgcctagaagaagaatctctacaagtaggattcttgctgttcaacatgcccttataaattggagtcagacagaatcattttttcttggcaatggacaagaaaatcagactgtaactatagctttgtcactgagaattggtcaaccatttcaaaataggtaagttttctccctctgatgcttctactggggcttgaaggattgataaatatgcttctattctctgtcagaatttkgaactaagggagagatacgcaaagattcaggcagatggagatcaagatggcaggtttatttttaaaggagctatggggaatctttggggtaacaatagatttttctgttactgtagacacacataccttcccagccacaagtggtgctagacaactgcacacctctccatcccacctcccatcccaacagatacataggcattttcttcagatgttgatgaaaataattattttatcactatatccagataattccaaaaagcaatatgcttgttgaggtgaaataatttttctaagatacaaacagaaaatatatacgattgaaatagacactaggtgatatttcacatatgcaatatgagctctgtttctttgacaagacagatgaatgaagaattcatgtttgaatgattggcattagtctaaagta

SEQ ID NO: 871024 - DNA, 742 bp, Homo sapiens
attctgtcatctgtcatgcaaatctagttccacagaagggcaaattaggaatccattacctggagtaaccattcctcatgcctagaagaagaatctctacaagtaggattcttgctgttcaacatgcccttataaattggagtcagacagaatcattttttcttggcaatggacaagaaaatcagactgtaactatagctttgtcactgagaattggtcaaccatttcaaaataggtaagttttctccctctgatgcttctactggggcttgaaggattgataaatatgcttctattctctgtcagaatttggaactaagggagagatacgcaaagattcaggcagatggagatcaagatggcaggtttatttttaaaggagctatggggaatctttgkggtaacaatagatttttctgttactgtagacacacataccttcccagccacaagtggtgctagacaactgcacacctctccatcccacctcccatcccaacagatacataggcattttcttcagatgttgatgaaaataattattttatcactatatccagataattccaaaaagcaatatgcttgttgaggtgaaataatttttctaagatacaaacagaaaatatatacgattgaaatagacactaggtgatatttcacatatgcaatatgagctctgtttctttgacaagacagatgaatgaagaattcatgtttgaatgattggcattagtctaaagta

SEQ ID NO: 871025 - DNA, 565 bp, Homo sapiens
gatttaaagttttcatagaagtatgaacttatattaatggagaaattctactgatagacatctcttgaagaagcaatgggatactaatgattaggacagaatcataaagacttccagagtaggaggatagaaaggtaattttcaatggaataagaagtagatagcaaagaaaatttattcttaaacatgtaratgttggtaataactgggacaagaccatcaatgtctgaagaaataaatgtttttacaaatagtgtcctataagtacctaaatacacatttaattttgtggacaaagcaaagacaattgtgcatatctcccaattcccaagcatttagaaatccaaaaataaaataataaaattaacaaacagatttttggaattatatctggcaggagtttggatcagtcatagagcgcaatagcatacttgaaaataaggacaatatggccattttaatgatattgattcttcctatccatgagcatagaatgttttttcatttgtttcatcctctctgatatctttggtgtttttagttcttatagagacctttcacctca

SEQ ID NO: 871026 - DNA, 565 bp, Homo sapiens
gatttaaagttttcatagaagtatgaacttatattaatggagaaattctactgatagacatctcttgaagaagcaatgggatactaatgattaggacagaatcataaagacttccagagtaggaggatagaaaggtaattttcaatggaataagaagtagatagcaaagaaaatttattcttaaacatgtagatgttgktaataactgggacaagaccatcaatgtctgaagaaataaatgtttttacaaatagtgtcctataagtacctaaatacacatttaattttgtggacaaagcaaagacaattgtgcatatctcccaattcccaagcatttagaaatccaaaaataaaataataaaattaacaaacagatttttggaattatatctggcaggagtttggatcagtcatagagcgcaatagcatacttgaaaataaggacaatatggccattttaatgatattgattcttcctatccatgagcatagaatgttttttcatttgtttcatcctctctgatatctttggtgtttttagttcttatagagacctttcacctca

SEQ ID NO: 871027 - DNA, 635 bp, Homo sapiens
ggaaactggaatgaagtagtgctacaagcaagggacagaataaagctttgtgtattaattacctgatttatactttagtccctttaagtaaaagaatgtaacaaatagaaggatagttattaatatatttggaggagaaagaaggataaaatgaaagaaagatacaatgttcttaaaaaacgggagttttatcttttttcagaagtttaaaaaatatttaaacatcttcctttatgttagcgcatatttatgttatacatttcatttacaagtaattgtatggtaaatagttacaaaaacaacaaggaaaatctttgagttaaggagctcatgattttcagtgtaaaatacatgttatttgagtaatttgggaaactgacagaagctttcttgcagtcaagaatactgctcaaaaattaattttaaaataaaaataaaagaaaaaaartcctgaaagcttatgtagcaaaacaagtattgtagtccattaccaaaattagccttttctgaaatgttaaaaagcaaaaagatcttagagcagaatttcatatacagttcattttgggactgatcttacttccttggtaggtggtcttacttcatcctgttggagcccatcatggagagctgtttta

SEQ ID NO: 871028 - DNA, 598 bp, Homo sapiens
cctcctcccacatggtaaaaagggcttgcttcctcttggctttacatcatgattgtaagtgtcctgagcccgcccagtcatgctccctattaagcctgaagaactgtgggtcagttaaacctcttttcctcataagttacccaatatcaggtagtwttttataactgtgaaaatggactaatacaaggccttaggataacaaccatgcttcaggccataggtggacatctggctgcaactggacactattccccaggtggatacctaggctcaaggttgacattagtccccaggtaaacaacaagccccaggtgaatacctatgccctagtagacatcaggcctcaggctgacactcagtctaacctcaacattaggctccaggtggacgcccagactccaggtggatactagaccccaggggtacaccagactcctggtaggcataaggccccaggaggacactagaatccaggtgtacataaagccactggttgacaccaagccctcagatgaacaccaggccaattagtggacgttaggcacatgagaatacttgggcaccaggtaggtatcaggccccaggtaaacatcaaact

SEQ ID NO: 871029 - DNA, 598 bp, Homo sapiens
cctcctcccacatggtaaaaagggcttgcttcctcttggctttacatcatgattgtaagtgtcctgagcccgcccagtcatgctccctattaagcctgaagaactgtgggtcagttaaacctcttttcctcataagttacccaatatcaggtagttttttataactgtgaaaatggactaatacaagrccttaggataacaaccatgcttcaggccataggtggacatctggctgcaactggacactattccccaggtggatacctaggctcaaggttgacattagtccccaggtaaacaacaagccccaggtgaatacctatgccctagtagacatcaggcctcaggctgacactcagtctaacctcaacattaggctccaggtggacgcccagactccaggtggatactagaccccaggggtacaccagactcctggtaggcataaggccccaggaggacactagaatccaggtgtacataaagccactggttgacaccaagccctcagatgaacaccaggccaattagtggacgttaggcacatgagaatacttgggcaccaggtaggtatcaggccccaggtaaacatcaaact

SEQ ID NO: 871030 - DNA, 633 bp, Homo sapiens
tggaattaggctctctcctcttgcaggactgtagtgggaagagagttgctaaagcagaggtttctcaaggatggtgagacttgcagccaagaacagctttgcaacctggaactggtctgtgtgtgtcattgctgggtgtctcagcctgctcccttggtcagttgagagagtactccatcagctccaagaaacaagagggaggtgaaccccatcccccaggagacctaaactttggtgaggaccagccctaagggaaggaggaatacagcttgccaaagccaccccttgggtcaaaggaaacacgatcactatatcagctgctgaaaggggcacaccaaagcctgggaacagattcagagaggtggtcatctcttgycctctgtccccttcctagtgcactgctgcagatccagcagtggtcatcctgttggggcccaaggaacgtgggctgaatgaggctgcttcttaggtttctccagcagctctgcccctgctgaagactagtacacactgggacagggcacttttggcattttgtcacttctgcacctgtcgaggacaagtacacagaggagaagaccctgcagccagctgttactcttaagcactgtctactggactgaagcctgaatt

SEQ ID NO: 871031 - DNA, 550 bp, Homo sapiens
agtccatcttcaaaatatcttatttggctaaatttttcacttttccagcagatttttcctttgtttttgttttttttttaattttacaattgtaattcaggtgtcatctccatgagtgtcccagatttccagccttctgaagctttctttcccataactggtagatgtcagattcctgctaacatccaaggacttacattctcagggccactacgagcttcggtttcctccccctgccaaattctcaatctctgtcacatagacacacaccttctgtgctgcatctcttatttaagcttctaggtgatttcagggtgaaacacaggccctttatmtttaattccccaagtaatacactagccaagactggtgtacataggagagttactaagttttgggcaagagggtccattaggtcatagcgtataacacaggacctgtcccaccacaagccctgaggcagctcctgccctcagtttcattcaaggaacggctgagaaagagacagattatcttttgaacaactaaatgtgatcttaaagctcctagg

SEQ ID NO: 871032 - DNA, 646 bp, Homo sapiens
gtaacacacccttcctactccagacttttgataaagcgcaaattcaatagactatgttgagaaggcaacaaatttaagatttaaaaagggattttattagaaaaagaaaacatatactttgagaatggttgtgttctgttgtgagcagtggattgaacaagatgaagataagacttaggttaggaggaagggccaactggagtggrccaggacaagatggccctttggcccaggtccttggaaaggctgtggttgcagcatttgtctttttttttttttttttttctcctttccttctttcctttctggaaaagaaaaatacagaaaaatggaaagggcaatgtaagatcaatgcttgggtattcacatcctagaattaactaataaagtcatttttgctttaggttttaaaaaatcatttaaaagaaatagaggcgggcatggtggttcacgcctgtaatcctagcactttgggaggctgaggcaggtggattgcttgagctcaggactttgtgaccagcctgggcaacctgatgaagccccatctctacaaaattagccagacgtggtggcacatgcctgtagtcccagctactccggaggctgagttgggaggatcgcctaagcccaggaggttgaggctgca

SEQ ID NO: 871033 - DNA, 646 bp, Homo sapiens
gtaacacacccttcctactccagacttttgataaagcgcaaattcaatagactatgttgagaaggcaacaaatttaagatttaaaaagggattttattagaaaaagaaaacatatactttgagaatggttgtgttctgttgtgagcagtggattgaacaagatgaagataagacttaggttaggaggaagggccaactggagtgggccaggacaagatggccctttggcccaggtccttggaaaggctgtggttgcagcatttgtcttttttttttttttttttyctcctttccttctttcctttctggaaaagaaaaatacagaaaaatggaaagggcaatgtaagatcaatgcttgggtattcacatcctagaattaactaataaagtcatttttgctttaggttttaaaaaatcatttaaaagaaatagaggcgggcatggtggttcacgcctgtaatcctagcactttgggaggctgaggcaggtggattgcttgagctcaggactttgtgaccagcctgggcaacctgatgaagccccatctctacaaaattagccagacgtggtggcacatgcctgtagtcccagctactccggaggctgagttgggaggatcgcctaagcccaggaggttgaggctgca

SEQ ID NO: 871034 - DNA, 644 bp, Homo sapiens
tcgtctgtcatactattttacttatattttaaacattgattgtatgtctctgtacattgggatataagctccagagaggcaggaaatttggtcatttttgttaagctttgcatttctagcatctagaaccctgggctaagatgttgcccaactttaggagggagcattcatgtacagtataatgatagatttcaatgtggtggctttacctaaaatagcacctggcacataattagcccttgataggtttttgttcatgaataatctgtctattcttggcacagttaaatctcttcaaagtagaatgcaatgcccatggttaagtttcccattcaaagrcaatataggcataaaatagatgcagccatagaaatttaaataggggctttccccaaaaaatatttgtgccagtcttttgctctttctccatctttagctctgaaatttaataatcagagcatgggagggctggtctgaagacctgtgagagttaacacagagagatttaagtttacctatcacagagagatttaagtttacctatcagctcgtcattggaaggcaattctccagggatatcttgcatctttgcatgtcttgccagcagaggcactggctgcctttgttctggactatcttttcaa

SEQ ID NO: 871035 - DNA, 640 bp, Homo sapiens
agtactataaagttctggaatctcagattgggaagaggcattaaaggtcatccagcatccagacccagaccctggcataaaaaaaagattatagcagaaaagagagggacaaggagtctagccaaattgcagtagctccaccaagaggggtttaatccatttcacttaaatttaatttacaactgctttggattggtaactttgttggtaaggaaagcctaaaatatgacttagtctttgattccaaatatcaagtttcttcatcccacagagtagtgggtttattttttgttgtaattgagctttgttttaacggctaaatcaaaacatagcacattttctttcattcttttttttgacatcagctgagacttcaaaacacttactatagattttaatagtgaaaagaagccttcagcaaggtagagtacttagcaagggcattggaagcracatgccatataaaagagcatgtctggtttggccaaaatcctgcctttgtctccagagctattttgctgtaaatttagaacagaagtaccctttctggaataaaaatgtagctttgttggctacaagtgcatgtttgctgcttcacaattttagaattagacgatggacttatttagtagacatcgga

SEQ ID NO: 871036 - DNA, 601 bp, Homo sapiens
ctcaccactcacacattggtcagtccaagcatgcaatagcagcaagggagaagggctgcagctagccatgggctggacttcagcagaagagaagactgggattggctgccctttggcaagcttggctgccattcagctaacctggaaggaagtaagaagttaattactttagaagcccacagagcagaatattttagggcagtggttaagccagctctagcatccccaggaatcacctgggaagcatttaaaatgcatattcccaggctactgtctgagtgagtttaatcaagaaatcatatttaaaaactctctcaggttattccaatgtatcatacttggagagactctggtctaagtaaataaaacaccctttactttgtgtgtgtgtgttttgagattccatcccaatatctctgactgagaaccctttcctgattacaaaggttytttactaggaagaaagggagatgcctcagaaaggcaaatgtgggcctgcatgtgtgcgtgtgtgtgcatgtgtgtgcgtgtgtgtgtgtgtgtgtttgcgtgtgtgcaggtgtgtgagcatgtttgtgcttgtgcatgagtgtactgggtg

SEQ ID NO: 871037 - DNA, 661 bp, Homo sapiens
agttttttaaattattctaagaaagtcagtggtagcttgatgggcatagcgttgaatctataaattactttgggcagtatggtcattttcacgatgttgattcttcctatcaatgagcatggaattttttttttatttgtttgtgtcctctcttatttccttgagcagtggcttgtagttctccttgaagaggtccttcacatcctttgtaagttgtattcctaggtattttattctgtttgtagcaattgtgaatgggagttcacttatgatttgactctctgtttgtctattattggtgtataggaatgcttgcgacttttgcacattgattttgtatgctgatactttgctgaagttccttatcagcttaaggayattttgggctgagacgatagggttttctaaatacgcactcatgtcatctgcaaacagagacaatttgacttcctctcttcctgtttgaatatcctttatttctttctcttgcctaattgccttggccagaacttccaatactattttgaatagaagtggtgagagagggcatccttgtcttgtgctggttttcaaagggaatgcttccagcttttgtccattcagtatgatattcctgtgggtttgtcataaaaagttcttattattttgagatacgttccat

SEQ ID NO: 871038 - DNA, 661 bp, Homo sapiens
agttttttaaattattctaagaaagtcagtggtagcttgatgggcatagcgttgaatctataaattactttgggcagtatggtcattttcacgatgttgattcttcctatcaatgagcatggaattttttttttatttgtttgtgtcctctcttatttccttgagcagtggcttgtagttctccttgaagaggtccttcacatcctttgtaagttgtattcctaggtattttattctgtttgtagcaattgtgaatgggagttcacttatgatttgactctctgtttgtctattattggtgtataggaatgcttgcgacttttgcacattgattttgtatgctgatactttgctgaagttccttatcagcttaaggatattttgggctgagaygatagggttttctaaatacgcactcatgtcatctgcaaacagagacaatttgacttcctctcttcctgtttgaatatcctttatttctttctcttgcctaattgccttggccagaacttccaatactattttgaatagaagtggtgagagagggcatccttgtcttgtgctggttttcaaagggaatgcttccagcttttgtccattcagtatgatattcctgtgggtttgtcataaaaagttcttattattttgagatacgttccat

SEQ ID NO: 871039 - DNA, 555 bp, Homo sapiens
taacaatgaacccaggtgaggagagttgactccagccctcatgatcatgcccacacggaagaaccacattaaatgtcttcctatctctctctctctctctctctctctctctctgtcatgcagacacacacacaccccatgcaggactctagagaagtttctagagagtcaagataaggatagcaacattaccacagcaatgtctgaaagaaaaacgatcttagaattaacacagggcactgctttcagagctkcatttacctcccattgaggtctcatctggctcctcatgtaaataaggaataatcacaactacctcttccatgaagtcacccaagtgtattttaggaacgtaaaggcacaaaatctaacttattatcagccactgctgaggaggaaaagctcagaaaggatcaaagacacactggcatccttggggacccaaagatagtggtcagagtagaatgcctgaaactgagatgaagacggggttgccattactgataaggtctgggtatgagtgaggaagcaattcactgaggttggaagataagg

SEQ ID NO: 871040 - DNA, 555 bp, Homo sapiens
taacaatgaacccaggtgaggagagttgactccagccctcatgatcatgcccacacggaagaaccacattaaatgtcttcctatctctctctctctctctctctctctctctctgtcatgcagacacacacacaccccatgcaggactctagagaagtttctagagagtcaagataaggatagcaacattaccacagcaatgtctgaaagaaaaacgatcttagaattaacacagggcactgctttcagagcttcatttacctcccattgaggtctcatctggctcctcatgtaaataaggaataatcacaactacctcttccatgaagtcacccaagtrtattttaggaacgtaaaggcacaaaatctaacttattatcagccactgctgaggaggaaaagctcagaaaggatcaaagacacactggcatccttggggacccaaagatagtggtcagagtagaatgcctgaaactgagatgaagacggggttgccattactgataaggtctgggtatgagtgaggaagcaattcactgaggttggaagataagg

SEQ ID NO: 871041 - DNA, 490 bp, Homo sapiens
agatagttatgattcagtcaagaaattaataattagtgttatttttattattgagacagagtctcgttctgtagcccaggctggagtacagtggcatgatctcggctcactgcaacctctacctccccggttcaagtgattctcctgcctcagcctcccaaatarctgggacagcaggcacttgccaccacgcctagctaattttttgtatttttagtagagacggagtttcaccgtgttagccaggatggtctcgatctcctgacctcaaggtccacctgcctcagcctcccaaagtgctgggattacaggcgtgagccactgcgcccggccataaattattaactgagccaggcacagtggtacacacttatagtcccagatactcaggagactgaggttggagtatccttttttatgttattttatttttaattattatgggtacataataggtgtacatacccatggagtacaagtcatgttctga

SEQ ID NO: 871042 - DNA, 652 bp, Homo sapiens
gttgtaatattatgaaaatagtattttagtcagcttaaaaaccaatgccaaaaaagccaaacatatgatctatttagctactaatgtaaataaccatattatatctattcttattgggaagaggaagaaggggtggagagagagttggggtgaaggtacagtaacaaggccatcctattgtaaaactccagtggatatcattcacagtgcagcctatgtaaacagtccctcctggagttgtacaatgctgtggtttgggtgtatccatccaagatcaagacactatgaccaacatcaaaagtggctttttggttttatctgcctgatgtgctataataaaagggtattatggccaaatccaaggcatgtctatcatgaattaataataggaggagtagcagcatgcatgctagttatttgccattcctgccttagttaaatatgatgtgataaaaccascctttccaactgaaatagtcacctttactgactctcccgcaaatgtctcaaatgaccacattgctctagtctttaaataatatgcaatagttctttggtagaagaggaattatactaattctttctcaaatactagcatcacaagaaaattaattcttgttctctggagagtcacctagtaagtatctggagc

SEQ ID NO: 871043 - DNA, 667 bp, Homo sapiens
ccaggggatataattttctaatgggtcttctggcatcacataatattatacattacaccatgtccatttctctgaatcctttaatcccttcccctactgcctcccataacaatcctagcatttcaaccttgctcagcatgggccatcactttttccagactcctaagagccactccaacagcaagtttacaccattccctgggcaccgtgtcaggtgttaaatcctgtatactgagagactactcccaaattaacaaaactttccttatccagtcttatgttccaatccccttgaccaagcaccctcaagatccattcccacagagggcactcstacagtctctgctgctgcctgctggctactttatgcagcacctttgggatgtagattctttcctccctcttcaggcctgacacattcccagctggtaatgataataaccagcttaactttgataggcccggtgaccaggagaggagaggcacacagctcctaatttgtgagctattgccttgtggggaaaaggcctccccagtatctcttcacagtgccagctctcgttgaagaaagtggggccacttctgcaaggccatgggttcaaaagaagtctgcagagtcaaaaccttcaaggacatctagctagatgtccacatcccatgcatcagg

SEQ ID NO: 871044 - DNA, 619 bp, Homo sapiens
tgctgagccaaacttttttactatcttgggttttacagccttcttgtccttctggttaagtgagagcaggcaactccatctggcatgtaaagaactggaaaaaatttctatggatttttgtacctgtttatttctccttgtacatgttgtagctactggtagaatatttggatttttgccagtttgttagaagagtaaattttactttacatttactttttatgagcaagattgagcatcttgttatatgtttaagtgtcatttgtgtttctttttaaaataattttttattgttacctctcgcccattyttttctatcaggttgttggtcttttctccacttttagaagcctttgtaaattaaggatattagttagctctttgtgtttgttacatgtggcaaatatacttctctagattgtcatttgttttatactttgctactgtaaatgtgttttaatttcacagagctaaatttatcactatttctccttgttgcctctgtgttttgaatcatgattaggaatacttatgcgttttcaggtaattaagaaattcatctctgttttcttttcatatttgtgtggtttcattttttacatttcaatctctaaactat

SEQ ID NO: 871045 - DNA, 694 bp, Homo sapiens
aaatttttacaaaattaaagaaatatatttcttcatattaaagaagcaccttaagtcctgagcaagcaaataaaacaaactgcagaataccaagttacagaaaagtccaatcgccactagagaaaaaagattcacagtaatgataattttctcaatggatacaggatatctgagtctcctgtttcttgctttgttttgttttgttttgtttaagatggagtctcgctctgtcgccaggctggagtgcagtggcacgatctcagctcactgcaacctcctccaactccctggttcaagcaattttcctgcctcaycctcccaagtagctgggactataggcatgtgccaccatgcccagctaatttttgtatttttagtagagactgggtttcaccatgttggccaggatggtctcgatctcttgaccttgtgatccacctgccttagcctcccaaagtgctgggattacaggcatgagccaccgcacccagcctgagtctcctgttttattgtcttcttcctatatacctgttaaaaactgtgctaacataagtcaggctccttttttctctcttgctaataagagaaaatctctgccgaaatctaagagttgttcacactctaagtatttctctttctcttttgactgatgttcaactctgatgaaaatcctaatataatatttagagatgat

SEQ ID NO: 871046 - DNA, 694 bp, Homo sapiens
aaatttttacaaaattaaagaaatatatttcttcatattaaagaagcaccttaagtcctgagcaagcaaataaaacaaactgcagaataccaagttacagaaaagtccaatcgccactagagaaaaaagattcacagtaatgataattttctcaatggatacaggatatctgagtctcctgtttcttgctttgttttgttttgttttgtttaagatggagtctcgctctgtcgccaggctggagtgcagtggcacgatctcagctcactgcaacctcctccaactccctggttcaagcaattttcctgcctcaccctcccaagtagctgggactataggcatgtgccaccatgcccagctaatttttgtatttttagtagagactgggtttcaccatgttggccaggatggtctcratctcttgaccttgtgatccacctgccttagcctcccaaagtgctgggattacaggcatgagccaccgcacccagcctgagtctcctgttttattgtcttcttcctatatacctgttaaaaactgtgctaacataagtcaggctccttttttctctcttgctaataagagaaaatctctgccgaaatctaagagttgttcacactctaagtatttctctttctcttttgactgatgttcaactctgatgaaaatcctaatataatatttagagatgat

SEQ ID NO: 871047 - DNA, 576 bp, Homo sapiens
aaatgatctcttttgactccagatcttacatccaggtcacactgatgcaagaggtgggttcccatggtcttgggcagctccatccctgtggctttgctgggtatatccccctcctggctgctttcacaggctgtcattgagtgtctgtggcttttccaggtgcaaggtgcaagttgtcagtggatccaccattctgggatctggagaaaggtgtctctcttctcacggccccactaagaagtgccccagtggggaatctgtgtggaggctcagaccccacawttcccttctgcactgccctagcagaggttctccgtgagggccctgctcttgcaacaaacatttgcctgggcattgagttgtttccataaatcttccaaaatctaggcggaggttcccaaacctcagttattgacttctgttcactcgcaggctcaacaacacgtgcaagctaccaaggcttggggcttccaccctctgaagccacagcccaagctgcacattgacccctttcagccttgggtagagcgactggggcacagggcgccaagtccctaggcttcacagagcatgggg

SEQ ID NO: 871048 - DNA, 576 bp, Homo sapiens
aaatgatctcttttgactccagatcttacatccaggtcacactgatgcaagaggtgggttcccatggtcttgggcagctccatccctgtggctttgctgggtatatccccctcctggctgctttcacaggctgtcattgagtgtctgtggcttttccaggtgcaaggtgcaagttgtcagtggatccaccattctgggatctggagaaaggtgtctctcttctcacggccccactaagaagtgccccagtggggaatctgtgtggaggctcagaccccacaattcccttctgcactgccctagcagaggttctccgtgagggccctgctcttgcaacaaacatttgcctgggcattgarttgtttccataaatcttccaaaatctaggcggaggttcccaaacctcagttattgacttctgttcactcgcaggctcaacaacacgtgcaagctaccaaggcttggggcttccaccctctgaagccacagcccaagctgcacattgacccctttcagccttgggtagagcgactggggcacagggcgccaagtccctaggcttcacagagcatgggg

SEQ ID NO: 871049 - DNA, 664 bp, Homo sapiens
agacacaatgagaacacttggacccagggtggggaacatcacacactggggcctgtcatggggttgggggctgggggagggatagcattaggagaaatacctaatgtaaatgacgagttaatgggtgcagcacaccaacatggcacatgtatacatatataacaaacctacacgttgtgcacatgtaccctagaacttaaagtataataataataaaaaaattgatataccttttaataaaatataaatagcaaaaaatttttttcctcccattctgtaggttgcctgttcactctgatgatagtttcttttgctgtgcagaggctctttagtttaattagatcccatttgtcwattttggcttttgttgccattgcttttggtgttttagtcatgaagtccttgcccatgcctgtgtcctgaatgatattgcctaggttttcttctagggtttttatggttttaggtcttacatttaagtctttaatccatcttgagttaatttttgtacaaggtgtaaggaagggattcagttttagctttctacatatggctggccagttttcccagcaccatttattaaatagggaattcctttcctatttcttgtttttgtcaggttggtcaaagatcgtgtggttgtagatgtgtggtattatttctg

SEQ ID NO: 871050 - DNA, 664 bp, Homo sapiens
agacacaatgagaacacttggacccagggtggggaacatcacacactggggcctgtcatggggttgggggctgggggagggatagcattaggagaaatacctaatgtaaatgacgagttaatgggtgcagcacaccaacatggcacatgtatacatatataacaaacctacacgttgtgcacatgtaccctagaacttaaagtataataataataaaaaaattgatataccttttaataaaatataaatagcaaaaaatttttttcctcccattctgtaggttgcctgttcactctgatgatagtttcttttgctgtgcagaggctctttagtttaattagatcccatttgtcaattttggcttttgttgccattgcttttggtgttttagtcatgaagtccttgcccatgcctgtgtcctgaatgrtattgcctaggttttcttctagggtttttatggttttaggtcttacatttaagtctttaatccatcttgagttaatttttgtacaaggtgtaaggaagggattcagttttagctttctacatatggctggccagttttcccagcaccatttattaaatagggaattcctttcctatttcttgtttttgtcaggttggtcaaagatcgtgtggttgtagatgtgtggtattatttctg

SEQ ID NO: 871051 - DNA, 603 bp, Homo sapiens
aataattttattccgatcactgccaaaaacattgattttatttcagtaaaaattatgattccaaaacctgttgaaagctaaaactaaataatgcaagtacaggaaatgtccaccacgtaaatagctgtataatttgataaaaaagaaaaattacaaaacaatgataataagaaggtgaagtgagaggcaatgaaagtttaaatgtttaatcatttgtttcttctctaaaatgactctattatgtataatcttcatgtttaataaccaaaaaaaatagttttctggagtccaaagaggctatccaaagtgtgattagaccacaaaattctgcctacgactatgacagtaaacataccagtgttttctatttattttctttttgtttttcacaggtgttaagtasacaatttgagacacagaataacttgaaaaatggcatattgtctgtacacagagatgtacaaaacccagatttctgtccaatatgataatctcattccttggcaatatttaaatatgcacaacagctgcaactattcccagatctgactaacaatttatccacggagagcaactttcatcaggaagaaacactgagaaaat

SEQ ID NO: 871052 - DNA, 542 bp, Homo sapiens
cacagaagtttataatctaagttttaagaaatttgctgttccttaagacataaataatacaaagtaaataaagtaaatatacaatatagatatcaatcaaaatgaaaactgatttttgggaaaaatcatgcaattccgttattaagaaatgaaaaatctaaactacatgtaagagaaatactaagtaaacataaaattttagtcatataggttacagttttgtcttaaaacactgctattaatccatttatttttaattaatcagtttagacacagcaaaataaaggaaaattcargccaatattcttgacgaacatagatgcaaaaatccttcgtaacatactagcaaactgaatccagcagcacatcaaaaagctcatccaccacaaccaaacaggatttctccctgggatgcaaggttgattcaatatatgcaaatcaacaaatgtgactcattacttaaacagaactaaaaacaaaagccacatgatcacctcaatgagtacagaaaagacttgataaaattcaacatcacttcatgt

SEQ ID NO: 871053 - DNA, 519 bp, Homo sapiens
tacagaaaagtgccaagtattttagttatacatgtaccacaagaagaatgttatatttctcttttagtgattttctgggcaatgatttctcctctcacacttgtcttccagttgtgggaaatatctaagattccttcctctgtcctcgctctccacattcacttcaacattaacttactccacccctttgtatttctgcagastaaactgtaggcccagttaaaatgaggggcttctaaactaagataatcatctccaccaaaaaaaaaaaaaaaaagtaataataagctctctgtgggagggatgctcctagagagatattttggggagcttcctgggtagagactgcaccaatggactaactggggctagtaggcttcaggatggccttatcattttaggaggtttttagcaaacacctgatcaatgaacctaaaatactaaatattggggattataattgtctgctacatatgtgaactaaggggtaattttctgggagcatgcccgtagttgttc

SEQ ID NO: 871054 - DNA, 586 bp, Homo sapiens
agatgacttttatatgagctgtaccagtggtccccagcatcactgataaataatggcagcctaaaacctccatcaatgatagcagagaaattaatgaaccattaaatcagcatgtgcattctacctttggagaaaactttgattctgatgactggaatccataccattaatatgagcctcttacaagtcstaggataagagatattttgctggtgtttaaatattgtattttgatggtggtcaggttgtctgataactgtgaattccttagggctttcaggacatgtaaaaaatgctgaaacacatatttaaatgtatatcttgttatatcctaagatcttggacaattaggagggctgcttgggaagctctttttaaatattctcaatgctcttcctctgcagaaagaaccccccaggtccttcaaggacaataagaaaaagaggatttgcttctgtggcctttctgcccaacagacaggagaacattttagaacttaaagcagacatgatttaacgacattatgcaatttgattatggaaggaaaagctgggtttctactccatcccttgaaatccagcctttt

SEQ ID NO: 871055 - DNA, 618 bp, Homo sapiens
cattaggacatacgatgaggaaagttggttattccagggttttacttactaaattccagtacataattcgaaccactgtggtacacagtacattttcccacaggaatgccatagcctgctattccaacaggatcagggaatcaaaagtgagcaaattcaggcggtgcaactgtactatattggacagatggacagatgggcatgactctgcggttagcgggaggagcaccatctgttgcggacacacaagtgcttcttgctctccttgggaaaactcacagatgtttccataacaggtgtgtttgcttcccccatgtagctttcccagacacgtcacacacagcactttcactgagttaccctttctactcaggcaaaggaagtagagaaatgagacctctgccttgataatttagagagaraaaagatgcgacttggttgcttctgaggtgcctgaatgtacttttggcagagagtggggaaatagaaaaaataccaaatactgaagaaagcatatttcttaaaccgtgaataattgttgaattctttatttttataagttccaagggacatgtgcaggatgtgcaagtttgttacacgggtaaacgtgtgccacgg

SEQ ID NO: 871056 - DNA, 561 bp, Homo sapiens
tacagaaacccttgacaggtccagtgatgtatgagcatgcaagggaaaagccaaacctttcatgttaagaacaagtatgacagatctggctaaggtcctcagttggccgaggccatgccaggagcttttttaaaatgattattattgttatcaccttcgtactcagagataatgtcataatgtacagtcagccattgtgtgatcyaaatgattgatgccacttggacatgaattggtggggttaataatggtctttcagtggggcccagcatgggaggaagctctctcagaaaggctgccttcactttgatattctgctcaagacaggaaggtggacttctagaagtcaacactccatcatcctctacttctgaaagcatccccagggccctggtgagaactaggggtggggaaaccacaaaagttcctttctgttctttccaaaagtacatttgcttgtgttcaaccttcagcagtggatgtaatcatagaagttccattgaggtatgcactgttaattctctgatgaaaaaacagctacttttggaaggtatagttcaa

SEQ ID NO: 871057 - DNA, 561 bp, Homo sapiens
tacagaaacccttgacaggtccagtgatgtatgagcatgcaagggaaaagccaaacctttcatgttaagaacaagtatgacagatctggctaaggtcctcagttggccgaggccatgccaggagcttttttaaaatgattattattgttatcaccttcgtactcagagataatgtcataatgtacagtcagccattgtgtgatccaaatgattgatgccacttggacatgaattggtggggttaataatggtctttcagtggggcccagcatgggaggaagctctctcagaaaggctgccttcactttgatattctgctcaagacaggaaggtggacttctagaagtcaacactccatcatcctctacttctgaaagcatccccagggccctggtgaraactaggggtggggaaaccacaaaagttcctttctgttctttccaaaagtacatttgcttgtgttcaaccttcagcagtggatgtaatcatagaagttccattgaggtatgcactgttaattctctgatgaaaaaacagctacttttggaaggtatagttcaa

SEQ ID NO: 871058 - DNA, 651 bp, Homo sapiens
aatatttctatattttagaataataaagtaacaactttattttaaaataattttgtatttatagtttttctcccttatccatagggaatatgttctttttttttttgagttggaaaatttctttttctttctttttttttttttttaattatactttaagttctgggatacatgtgcagaacgtgcaggtttgttacacaggtagacacatacaatgatggtttgctgcacccatcaacccatcatatacattaggtatttctcccgatactatccttcccctagccccccaacaggccctgtggtgtgatgttcccctccctgtgtccatgtgttctcattgttcaactcccactgagtaacaacatgcagtgtttggttttctgttcctgtgttagtttgctgagaatgatggtttccagcatcatcaatatccytgccaaagacatgaactcaccatattttatggttgcatagcattcgattgtgtatatttgccacattttctttatccagtctatcattgatgggtatttgggttggttccaagtctttgctattgtgaacagtgccacagtaaacatacaggtgcatgtgtctttatagtagaatgatttataatcctttgggtatatacccagtaatgggatt

SEQ ID NO: 871059 - DNA, 572 bp, Homo sapiens
gggtgaaatagggtacagtgtgctcacattatctggtccagaaccagaagtcaatgtatattttaaaatgtgtacagtaattgttgcttaggtctaagaagagggaaaagacaggtggatagtgtagaggatctttgatcctacattgaccaaatatacagtttgcctatgtttgaggggttccaacattaaaacaaggcaagtcttgtgcaaactgggacaaactactcatccaattcaatcctcactaagacatgctttatgatgatctccacttatatttatccaagaaagtcctgcatagagaaaacaaggtcaagtaaacttacattctagctaactaatccaaatttcaacccygaactgacaatattaatgaatgggctgatggcgtgggtcacgtttgcctggataataggcaagtgcaagtagcttggcctgtttttcctactttacctgaggaagcttctcgattcagttttgggattcccaaagcatgggtccattcaaagaaaaaggcatgcagatgtgtagatcatttcaaccacagtaaggagagggattccaacaag

SEQ ID NO: 871060 - DNA, 504 bp, Homo sapiens
aacggtagtacactggcaacaaatacattggatgcactatagatataaactctttagttgtttttatgaatcatctgtcatagaatctgatgatatataatacttagtcctttaaaggctaatagcatttctgtgatggactttatatgtttcaaagactttcacatgtattgaaacagcatcttgatatagacaagaaagactagggagatgaaatggtcctgagtcaaccaatacagaaacagaaacaacggctacaaacacataactcaagcacaagtacttttttttgtaaggtatcagatataaagattcaatgtcaaatgaaatttttaaaattaggtttgtgtgccttcccatagaatarataaagtagatcatggtgagtggaagctgagaagaaaacaagtggacggtagagcatgagtttacaaagctaccagattctgttggatcacattttggttttctccagcagggtgtagctgtgtggaagttgggtca

SEQ ID NO: 871061 - DNA, 534 bp, Homo sapiens
cctctcagattactttaagagcctcctaacttgtcttcctatacctagtcttggtcccattcttcacataacagccagaaagttttaaaatctcacctaaaatcttcaaattgttaaccatcaattactctacaaggaggctgactttaactattcaatatcagatccctggtacccagaacactgcctgacctaaggtgagcacatgacaattatttgttgaaggaattaatatatggttctgaaccaggagagcatgacagaaatacctgggattcttcacactgcacacatgaactttcagctagagtctctgttagcttccagacctagagaacagagcctamttttcttggcattgtgtgccgggaccttcctaatctagctgatgtgcacaatcctagcatcagctcctgcaatgccctttaattctgtatcctcaagtaatgacaaattacttggaacactgacacaatgcctcaatttcttgccctgttcatattaaatatagttaacctcctctttttcctttac

SEQ ID NO: 871062 - DNA, 637 bp, Homo sapiens
cgaggcggctggatcacctgaggtcaggagttcaagaccagcctggccaacaaggtgaaactccatatctactaaaaatacaaaaattagctgggcgtggtggtgggcacctgtaatcccagctacttgaacgacaggagaattgttcgaattcgggaggcagaggttacagtcagccgagattgtgccattgcactccagcgtgggtgacagagtaaaactccgtttcaaatacatacatacatacataaatggaagctagaagaaacaggagtctctattcacccttttaaataattcatcattgcctatgatcaaacaatgtaaagagtataaaaattatcttaatactatgaaaaacaaaatataccctttttcaatccttcttttcttcagaattttggctagtttattcagtccacggagactagtggtaatatcatcattcatgtttgctgaatcaattctcaactgagcttcagcataygtcagagatgcctaaaaaagaaaatgtatgttatataattcttataaatgatagaaaaatggttttcaatatgtcctcctactttcactacataaaatccatgatttcagaaaacctaaaatcagtaacaaaatagaaattcttagctat

SEQ ID NO: 871063 - DNA, 667 bp, Homo sapiens
ggaagcatgcgtgggatggtttgggacacgatgggccaagagagggagagacaagttaggaggtgatcgcagaaatctaaggaagaaaataataaaggagattgagaggctattgagatcaacccatcatttcacagtttaaaccaaagctcagagaggttaagtcagttgcctaaagtcacacagctaatgagcagcataaccaatactagaaaagaaagatggaaaagtagtcataatttctgaaggcctgctctgtgctatgcatgctacatacatgtgcagtttcctttcacctcacagagtaagtgtggtggtttcatttcaatgatgaaaatgcagaggctcaaagaagttaggtggyttgcccaaagtcaaacagcttgtaagtgcagtgatgaaacccagatctttgcaccgcagtgtgctgctgccattgggtattgataacttttgcaatgcaaggtgcattattaataggaaaaagggaatagaaaaggactccttgttctttaactcctgggcctttctgactccacattacttggatttcaaaacaactctgttgtttggtactcaggccttttaccttctttcccctctctggtataggcagcaaaagcctttaattagctagcccgcagctcatcagagaaaggtggctgta

SEQ ID NO: 871064 - DNA, 667 bp, Homo sapiens
ggaagcatgcgtgggatggtttgggacacgatgggccaagagagggagagacaagttaggaggtgatcgcagaaatctaaggaagaaaataataaaggagattgagaggctattgagatcaacccatcatttcacagtttaaaccaaagctcagagaggttaagtcagttgcctaaagtcacacagctaatgagcagcataaccaatactagaaaagaaagatggaaaagtagtcataatttctgaaggcctgctctgtgctatgcatgctacatacatgtgcagtttcctttcacctcacagagtaagtgtggtggtttcatttcaatgatgaaaatgcagaggctcaaagaagttaggtggtttgcccaaagtcaaacagcttgtaagtgcagtgatgaaacccagatctttgcaccrcagtgtgctgctgccattgggtattgataacttttgcaatgcaaggtgcattattaataggaaaaagggaatagaaaaggactccttgttctttaactcctgggcctttctgactccacattacttggatttcaaaacaactctgttgtttggtactcaggccttttaccttctttcccctctctggtataggcagcaaaagcctttaattagctagcccgcagctcatcagagaaaggtggctgta

SEQ ID NO: 871065 - DNA, 602 bp, Homo sapiens
tagggcacttaccataaatggaacttacagaactggaacttactctgggtgaatcagtgaatgagtggtgagtgaatgtgaaggcctcgtgcattgctgtatgctaaggtagactttataaacaatattaacttaggctacactaaatttattgaaaatattttttcttcaataataaattaagcttggcttactgtaacytttttactttctatgctctaaaattttttaaactttttgactcttgtaataatacttagcttaaaacacaaatgcacagcttgggcaacacagtgagacttcatctctacaaaaaattaaaaattagctggatgtggtagtgcacacctgtggttctagtacttgggaggctgaggtaggagaatctcttgattccagaagttccaggtacagtgaactatgatcacaccactgcaacccagctgcctgggtgacagagaaataccctgtctctaaacaaacaaacaaacaaacactgcaaacacattatacagctatacaaaaatattttcattttgtatatccttttctgtaagctttttaatttttttatatatttatttctttacttagtaaacttt

SEQ ID NO: 871066 - DNA, 561 bp, Homo sapiens
ttcatttgctaaggataacagcctccagctccatccaagtccctgaaaaggcaaaggacatgatcttgttcttattttttggctgtatagtattcagtggtgtatatgtaccacattttctttatccagtctgttattgatgggcatttaggtcggttccatgtctttgcttttgtgaagtgtgttgcaatgaacatttgcctacctgtgtctttatagtagaataatttatattcctttggktatatattcagtaatgagattgctgtgttaaatggtatttctgtctttaggtctttgaggaattgccacactgtcttccacaatggttgagctaatttacaccttccatcaacagggtataattcctttttctccacaacctcaccagcatctgttattttatgacttttgaataacagccattccgcctggtgttagatggtatcacgttgtggttttgatttatatttctctaatgatcagtgatgttgagctttttttcatatgattgttggtcgcaggtatgtcttcttctgaaaagtgtctgttcatgtcctt

SEQ ID NO: 871067 - DNA, 692 bp, Homo sapiens
tcttgcatggagaaatgaccactgcagagctctcctgctccagaaagaaatgttttctcacccacagcaactaaggatttgaggcaatggctgttttcctaacaaagttgcttagtttggtttcattttctctgagcatccaaaggctagaagagtagttgtctggctgagctgtgtgkccatgggtgggattccttttggcagctggaattaaagggtctgaagactcaaagcgtttcagcgactgccatcagggactgagaatccagcggaactgtagtgaaatcttcaactgtgcccaggaatgatggtgagatctgagagtgtatctacttttcactggagagcacctgcagaacccaacctctttaaaaaagcccaccttggtccagatcttcattcgtagtccactggcagtggggaaaactcttacaggaccccaagcagaaaccaagtgctccatctgtctggattaccttagaggccccattgcattgagtgtgggcataagttctgttgctcccgcatctaagtcttgggaggatctataggaaaggctcccctgccctgtctattataaccaatgccaagaggggccttttaggagatacacccagcttggcaagataatttaaattcccaagctactctacatcaccaggagccatagagtcaggctgggcaagaagcac

SEQ ID NO: 871068 - DNA, 538 bp, Homo sapiens
aatgttatcccttccccctcccccgaccccacgacaggccctggtgtgtcatgttccccaccctcgtgtagagaacatgttcccctgactgtcactagaggtcacttgactaatttccagaagtttgtaacttgcattaattctacagtccttttcattactccaatttataaaacatcaacaytctgtttaccattgcataagaagtaatcactataaaactaagctacagacctttgcatcttttctacagcatgagcattaatctgaaagatttctctcctgagtgtggtgcaggtttgctttgttagttattaaagttttatctaattcgactctataattggaatgtttttgacattcacttgtataccttttatgtaaatgattttgttagggtcctttgggtattccctttcttggtgaagcatgcatgtgtcacagttccttcagtatttcttctatggtatgaaatgcactcattgtttatataatctcactatcagaatcagtcatataaacatatatttataactta

SEQ ID NO: 871069 - DNA, 538 bp, Homo sapiens
aatgttatcccttccccctcccccgaccccacgacaggccctggtgtgtcatgttccccaccctcgtgtagagaacatgttcccctgactgtcactagaggtcacttgactaatttccagaagtttgtaacttgcattaattctacagtccttttcattactccaatttataaaacatcaacattctgtttaccattgcataagaagtaatyactataaaactaagctacagacctttgcatcttttctacagcatgagcattaatctgaaagatttctctcctgagtgtggtgcaggtttgctttgttagttattaaagttttatctaattcgactctataattggaatgtttttgacattcacttgtataccttttatgtaaatgattttgttagggtcctttgggtattccctttcttggtgaagcatgcatgtgtcacagttccttcagtatttcttctatggtatgaaatgcactcattgtttatataatctcactatcagaatcagtcatataaacatatatttataactta

SEQ ID NO: 871070 - DNA, 538 bp, Homo sapiens
aatgttatcccttccccctcccccgaccccacgacaggccctggtgtgtcatgttccccaccctcgtgtagagaacatgttcccctgactgtcactagaggtcacttgactaatttccagaagtttgtaacttgcattaattctacagtccttttcattactccaatttataaaacatcaacattctgtttaccattgcataagaagtaatcactataaaactaagctacagacctttgcatcttttctrcagcatgagcattaatctgaaagatttctctcctgagtgtggtgcaggtttgctttgttagttattaaagttttatctaattcgactctataattggaatgtttttgacattcacttgtataccttttatgtaaatgattttgttagggtcctttgggtattccctttcttggtgaagcatgcatgtgtcacagttccttcagtatttcttctatggtatgaaatgcactcattgtttatataatctcactatcagaatcagtcatataaacatatatttataactta

SEQ ID NO: 871071 - DNA, 608 bp, Homo sapiens
ggaaaaactattttcatagaatctggaaaagaaagatttctgggagtgcattgaggcctgcggtgaaaatggaaatatcttcagataaaaattagaaagaagctccctgagaaactgctttgtgatatgtgcattcatatcacagagttagacatttctgtggattcagaagtttgcaaacactgtttttgttgattaagtgaatggacatttgggagctagttgaggccaatggtgaaaaagtgaatatcccaggataaaaactaataaaaagcttcctgagacactgctttgtgaatggtgcattcaccacgcagagataaaactttcttttcatacagcagtctagaaacactgctttggaagaatctcagaagggatatttaggagcgcattgaggcctaaggtgaaaaagtaagtrtcatcagataaaaattagaaacaagctttctgagaaactgctttgtgatgtgtgcattcatctcaaagggttaagcctttctttggattcagcattgtggaaacactgttgttgtaggctctgcaaaaggatatctgggagcttaataaggccaatggcaacaaagaaagtatcccagggaaaaaaa

SEQ ID NO: 871072 - DNA, 644 bp, Homo sapiens
tgatgtatgcattcatctcacagagttaaagttgtttttcattcagcagtttagaaacactatttttgtagaatctgcaaatgggtatttgggagatcattgaggccaaatgcgaaaaatccaatatctctggacaaaaactagaataagttatctaagaatccacttcatggccaggtgcggtggctcatgcctgtaatcccagcactttgggaggcmaaggcaggcagatgatgaggtcaggagattgagaccatcctgaataacatgaggaaaccccatctctaataaaaatccaaaaattagccaagtgtggtggcaggtgcctgtagtcccagctacttgggaggctgaggcaagagaatggcatcaacccaggagacagagcttgctgtgagcagagattgcactactgccctccagcctgggtgacagagtgagactccctctcaaaaaaaaaaaaagaaaccccttcatgatgcatgcattcagtgcattcgtctaacagtgttaaaggtttcttttcattcagcagtttggaaacacattttggtagaatctgcaaagggatatatgggggcgcattgaggcttaaggtgaaaaaggaaacatcttcatataaataatagaaagaagccttctga

SEQ ID NO: 871073 - DNA, 618 bp, Homo sapiens
tccagcttacttcttttggcttaggattgacttggtgatgcgggcccttttttgttccatatgaagtttaaagtagttttttccaattctgtgaagaaagtcattggtaacttgatggggatggcattgaatctataaattaccttgggtagtatggccattttsacgatattgattcttcctacccatgagcatggaatgttcttccatttgtttttatcctcttttatttccttgagcagtggtttttagttctccttgaagaggtccttcacgtcccttgtaagttggatccctgggtattttattctctttgaagcaattgtgaatgggagttcactcatgatttggctctctgtttgcctgttgctggtgtataagaatgcttgtgatttttgtacattgattttttattctgagactttgctgaagttgcttatcagcttaaggagattttgggctgagacaatggggttttctagatatacaatcatgtcgtctgcaaacagggacaatttgacttcctcttttcctaactgaataccctttatttccttctcctgcctgattgccctggctagaaattccaacactatgttgaataggagtggtgagaga

SEQ ID NO: 871074 - DNA, 588 bp, Homo sapiens
tacaaaaacagtgtttccaaattggtaaatgaaaagataggtttacctttgctagatgaatgcaaacatcaaaaaagggtttctcagatagcttccttctagtttttagccttagatattaactttttcaccatcggcctcagtgagttcccaaatgtccactcatagaatrgacaaaaacagtgtttctgaactgctgaatccaaataaatgtttaactctatgagaagaacgcacacatcataaggcagtttctcagaagcttctttctagtttttatcatgggatgttcacttttttgcaggtggcctcaatgagtgcaaaaatgtagatttgaaaaatggacataaacagtgtttccaaactagtgaatgcaaaaaatgtttaactccatgatatgaatgcagccatcacaaatcagtttctcagaaatttgctttctagtttttatttgaagatgttttctttttcaccatagatctcaatgtactccctaatatcccttcacagattctacaaaaacagtgtttccaaactgatcaatgaaagaaaagtttaactctgcgagttgaatgcacagatcatgaa

SEQ ID NO: 871075 - DNA, 588 bp, Homo sapiens
tacaaaaacagtgtttccaaattggtaaatgaaaagataggtttacctttgctagatgaatgcaaacatcaaaaaagggtttctcagatagcttccttctagtttttagccttagatattaactttttcaccatcggcctcagtgagttcccaaatgtccactcatagaatagacaaaaacagtgtttctgaactgctgaatccaaataaatgtttaactctatgagaagaacgcacacatcataaggcagtttctcagaagcttctttctagtttttatcatgggatgttcacttttttgcaggtggcctcaatgagtgcaaaaatgtagatttgaaaaatggacawaaacagtgtttccaaactagtgaatgcaaaaaatgtttaactccatgatatgaatgcagccatcacaaatcagtttctcagaaatttgctttctagtttttatttgaagatgttttctttttcaccatagatctcaatgtactccctaatatcccttcacagattctacaaaaacagtgtttccaaactgatcaatgaaagaaaagtttaactctgcgagttgaatgcacagatcatgaa

SEQ ID NO: 871076 - DNA, 621 bp, Homo sapiens
aggtgaaaaagtgaatatcccaagaaaaaaataagaaggaagctatctgagaaaccgctttgtgatgtgtgcattcatctcgaagagttaaacctttcttttcattcgacagtttggcaatactgtttttgtagaatctatgaagggatacttgggatcacattgaggcctgtggtgaaaaaggaaatatcttcagataaaaactagaaagaagctttctgagaaactkctttgtgatgtgtgccttcatctcacattgttaaacttttctttggactcaggagtttggagacgctgtttttgtagaatctgctaagggatatttgatggctcaatgaggccataagggacaaaacaaatatcccagtatataaactagaaggaagctatctgagaaaccactttgtgatgtgtgcgttcatctcatagagctaaacctttcttttctttcagcagtttggaaacactgtttttgtagaatctgaaaagagatatttgtgaacgtattgaggctgatggtgaaaagaggaaatatcttcagataataactagaaagaagctttctgaaaaacagctttgtgatgtgtgcattcataagacagagttaaaccattctttgga

SEQ ID NO: 871077 - DNA, 614 bp, Homo sapiens
ttcctaggatattcccttttttgcctttggcctgaatgaggtccaaaatgtccattagcacaatggaataaacagtgtttccaaactgctgaatccaaagaaaagttgaactctgtgagatgattgcacacatcacaaagaactttctcagaaagattctttccagttttattctggagatatttcctttttcaccatacacctcaatgcactgccaaatatccatttgcagattctacaaaaaaagtctttccaaattgctgaatgaaaagaaaggtttaactctgtgagatgaaggcacacatcacaaagtggtttctcacagaagttccgtctatttttttatcctgggatattcgcttttttgccattggcctaaatgagctcccagktgtccctttgcagaatggacaaaaaaagtgtttccaaactgctgaatctaaagaaaggtttaactctgtgagatgaatgaacactacacaaagtagtttctcagaaagcttctgtttagtttttatctgaagatatttcctttttcaccataggcctcaatgtgctctcaaatatccttttgcagtttcttcaaaaacagtgtttccaaactggtgatgaaa

SEQ ID NO: 871078 - DNA, 643 bp, Homo sapiens
aatatcttattgcagattctaaaaaaacagagttcctaaactattgaatgaaaagaaagatttaactctctgagatgaatgcacacatcaggaatcactttctcaaataacttccttctagtttttatcctgagatattctattttttgccattggcctcaataacctcccaaatgtccatttgcagaatggacaaaaacagtatttccaaactgctgaaaccaaagaaaggtttaactctgtgaaatgaatgaacacatcacaaagcagtttctccaaaagcttctttctagttgttatctgaagatatttcctttttcaccataggcctcaatatgckgccaaatatccttttgcagtttctacaaaaacagtgtttccaaactgctgaacgaaaagaaagctttaactctgctagacgaatgcacatatcacaaagtggtttctcagacagcttccatctagttttagtcctgggatatttgcttttttgacattggtctcaatgagctcccaaacgtccattcagagaatgaacaaaaacagtgttaccaaactgctgaatccaaagaaagatttaactctatgaggtgaatgcacacaactccaaccagtttctcatggagcttttttctagttttta

SEQ ID NO: 871079 - DNA, 493 bp, Homo sapiens
taccaagcaaatggaaaacaaataaaggcaggggttgcaatcctagtctctgataaaacagactttaaactatcaaagatcaaaagagacaaaaaaggacattacataatggtaaagggatcaattcagcaaagcagtgtgtagagggaaatttatagcagtaaatgyccacaagagaaagcaggaaagatctaaaattgacaccctaacatcagaactaaaagaactagagaagcaaaagcaaacacattcaaaagctagcagaaggcaagaaataactaagaccagagcagaactgaaggagatagagacacaaaaaacccttcaaaaaatcaatgaatccaggagctggttttttgaaaagatcaacaaaattgatagaccactagcaagactaataaagaagaaaagagagaagaatcaaatagatgcaataaaaaatgataaaggggatatcaccacggatcctacaggaatacaaaccaccatcaga

SEQ ID NO: 871080 - DNA, 498 bp, Homo sapiens
tttggaactcattgagttcaatggtgaaaaagtgaacatccctgcatcaaaactagaaggaagcactctgagaaacccctctgtgacgtgtgcattccctcacagagttaaaactgtcttttcattcagcagtttggaaaaactgtttttgtaaaatctgcaatgggatattcgggagctcattgaggtttacggtgaataaggaaacctcttcagataaaaactagaaagaagatttctgagaaactgatttgtgatgtgtgcattcttctcatagagttaaacctttcttytgattcagcagtttggaaacactctttttgtccattctgcgaatggacatttgggatatctgggagaccaatgataaaaaagtgaatatcccaggataaaaaccagaagaaagctatctgggaaactactttgtgatgtatgcattcatctcatagaggcaaatttttgtttggattcagcagtttgtaaaccctgtttttgtat

SEQ ID NO: 871081 - DNA, 660 bp, Homo sapiens
  misc_feature 545: n = A,T,C or G
cctagaagaaagctatctgagaaactgctttgtgatgtgtgtattcaaatcacagagttaaactttacttttcattcaacagtttggaaatactggttgggtagaaattgcaaagggatatttgggagcacattgtggcctatggtgaaaaaggaaatatcttcagataaaaactagaaagaagctttttgagaaactgctttgtgatgtgtgcattcatataacagagttaaaccattttttggatacagcagtttgcaaacaatgtttttstagattctgcaaagggatatttgagagctctttgaggccaaaggccaaaaagtgaatattccatgataaaaattaaaaggaatctatttgaaaaaccgcattgtgatgtgtgcattcatctagcagagttaaacctttgttttcattcagcaggttggaaacactctttttctagaaactgtgaagggatatttaggagtgcatttaggcttatggtaaaaaggaaatatcttcagttgaaaactagaaagaagctttctgagaaactgctntgtgatgtgtgcattcatatcacagagtaaaacctttctttggattcagcagtttggaaaacactgttgttttagaatttgtgaagggatatttagtagctcatgagaccgtctg

SEQ ID NO: 871082 - DNA, 671 bp, Homo sapiens
aatccaccaagggatatttgagagtgcatagaagcctatggtgaaaaaggaagtatcttcagataaaaattagaaagaaggtttctgagaaattgctttatgatgtttggattcatctcacagagttaaacttttatttacattcagtagtttggaaacactattttcatagaatctgcaaaaagatttctggaagtgaattgaggcctatggtggaaaaagaaatatcttctaaaaaactagaaagaagctttctgagaaactgctttgtgatgtgtgcattcatctcacagatttaaacctttctgtggattcagcattttgcaaacactgttgttgtcgattctgtgaatggacatttggaagctcttagaggccaatggcaataaagtgaatrtcccgggataaaaaactagaaaaaagctctctgagaaaacactttttgacgtgtgcattcacctcacagagttaaaacgttcttctcctatggcagtctggaaacactgttttggcacaacctgtgaagggatatatgagagcacatagaggcctagggtgaaaaaggaaatatattcagataaaaactagaaacaagcttcctgagaaactgctttgtgatgtgggcattcatctcacagaggtaaacctttctttgtattcagcagtttgga

SEQ ID NO: 871083 - DNA, 671 bp, Homo sapiens
aatccaccaagggatatttgagagtgcatagaagcctatggtgaaaaaggaagtatcttcagataaaaattagaaagaaggtttctgagaaattgctttatgatgtttggattcatctcacagagttaaacttttatttacattcagtagtttggaaacactattttcatagaatctgcaaaaagatttctggaagtgaattgaggcctatggtggaaaaagaaatatcttctaaaaaactagaaagaagctttctgagaaactgctttgtgatgtgtgcattcatctcacagatttaaacctttctgtggattcagcattttgcaaacactgttgttgtcgattctgtgaatggacatttggaagctcttagaggccaatggcaataaagtgaatgtcccrggataaaaaactagaaaaaagctctctgagaaaacactttttgacgtgtgcattcacctcacagagttaaaacgttcttctcctatggcagtctggaaacactgttttggcacaacctgtgaagggatatatgagagcacatagaggcctagggtgaaaaaggaaatatattcagataaaaactagaaacaagcttcctgagaaactgctttgtgatgtgggcattcatctcacagaggtaaacctttctttgtattcagcagtttgga

SEQ ID NO: 871084 - DNA, 612 bp, Homo sapiens
cagcacagtgggaacatgtaaacaaacttacctgaaaactcaggaataacaaaagaaaatacatccagaaagaatttagcacaccaatattctgttctacaggcatggctcattcatctgcagtgtggggctcccaaagtgctcaaaaagaacggtttgtggtcccactgttacacatgaggggtctcctttgggcagaaaatgaccctcaaaacacaaattccttttttaattctcaggggtaaacaatgtgtcatttaataaactttcatttatatatgtgatcaagaactatttacaaataacctattgagttattaaatattagatcaaccaacttgggttgttcatttggtattgaataaaattaattataagtttatattcatcaaataagtgactaaatagttggattccctcaagggatttattctacaaataagtctgtgggccatatatttggcagcrttgcaaagctccagctgataattacaatactattattgtaataataataattattaaataattacaatactattattaaatgtacataaatgtacacagaagagaaagggggctttggcttgcctacgaatatagcagtgcaaa

SEQ ID NO: 871085 - DNA, 602 bp, Homo sapiens
acaagcaaatgctgagagattttgtcaccaccaggcctgtcctaaaagagctcctgaagcactaaacatggaaaggaacaatcggtaccagccgctgcaaaatcatgccaaattgtaaagaccatcgaggctaggaagaaactgcatcaactaacgagcaaaataaccagctaatatcataatracaagatcaaattcacacataacaatattaactttaaatgtaaatgggctaaatgctccaattaaaagacacagactggcaaattggataaagagtcaagaccccccattagtgtgctgtattcaggaaacccatctcatgtgcagagacacacaaaggctcaaaataaaaggatggaggaagatctaccaagcaaatggaaaacaaaaaaaggcaggggttgcaatcctagtctctgataaaacagactttaaaccaacaaagatcaaaagagacaaagaaggccattacataatggtaaagggatcaattcaacaagaagagctaactatcctaaatatatatgcaaccaatacaggagcacccagatgcataaagcaagtcctgagtgacctacaaagagacttagactcccaca

SEQ ID NO: 871086 - DNA, 660 bp, Homo sapiens
aaaaaatgaaaagatatctcatattcatagatttgaagaataaatattgtgaaaatgatcttactaccaaaagcaatctacagagtcaatgcaatccctatctaaataccaataacattctcaacagaaattaaaaaatcctaaaatttacatgcacccacaaaagaccctatagccaaagcaatcctgaatgaaaagaacaaagttggaggcatcacactgccaggtttcaaaagatactataaaggtatagtaaccaatacagcatgttacttgtgtaaaatacagattcatataccaatggaacaaaatagagaacctagaaataaattcgtgtatgtatagcctactgatccttgacaaaggcaccaagaacatttattgaggaagagacagtcttttcaataaatggtgctgggaaaattggatatccacatgcataaaaatgaaacccaaacctgtrtctctcaccatatataaaaatcaactcaaaatgggttaatgacttaaatataagacctgaagctatgaaactcctgaaagaaaacataggagaaatgcttcagaacattggtctgggcaaagattttatggagaagacctcaaaggcacaggcaacaaaagcaaaaatagacaaatgggattatatcaagctaaaat

SEQ ID NO: 871087 - DNA, 588 bp, Homo sapiens
ttgagttttcaacctatagtcaagaaaaagcctttatttttaatagttgccttaaaaatttaacacaaaaagttttacttagctaaatctaaatttaatcagtagctttaccccacttccaaacaatataaatactttaaaatgctttcatttgatttcctttccttgcttgctattattttccaggattttaactctgtttgcttggttttatttgtttgtttgttttaagacagagtctcactttgtcatctaggctggagtgcagtggtgtgatcatagctcactacagccttgaactcctgggctcaagggatcctcttgcctcagcctcctgtgttgctgggactacaggcatgcaccaccatgctcaaattattattattattattaktagtagtagtagtagtagtagtagtagtagtagtagtagtagtagtacagaccaggtctcagtatgttgcctaagcttgtctcaaactcctggctggcctcaagggatcctcccatctcagcctcccaaagtgctgggattataggcgtgagccattgtacctggcatacttgtttggttttaagcccacaaat

SEQ ID NO: 871088 - DNA, 618 bp, Homo sapiens
tgttatagcagctccaggctaagatagttggtcattgtaaatgtgagtgggtcaggtgtgcctgctcgctgacagttatcaaaattaggattctgtccttccacagagactgggacacagagatccaaaccttcctgatgattacatttcaaaggagtggctttctggttcttgagaaagacactgctgagttgtaggagatacatacacatctcaaagggacagaggaagaatttacaattgtaaactcttcttagtgctctaagaaaggaaggtyaggggcctatagtcaggtgttggctagaataaacagtaagcttcttttgatagccctgaacttctccagacagactggagctcaaaaggaggctgggtattccagggctgagtggaggtgggctaggctactagaagctttgctagagttggtcaaggctcttagagcaagaatttggatggagttgtttgccaagaattatttacagttctcattagtttgccttggatgttttttgttttcattttagaacacgtagatccaccttattctttttaattgctgcaaagtataccatggtatgaatacatcatagttgtttttagttttagttttttttt

SEQ ID NO: 871089 - DNA, 618 bp, Homo sapiens
tgttatagcagctccaggctaagatagttggtcattgtaaatgtgagtgggtcaggtgtgcctgctcgctgacagttatcaaaattaggattctgtccttccacagagactgggacacagagatccaaaccttcctgatgattacatttcaaaggagtggctttctggttcttgagaaagacactgctgagttgtaggagatacatacacatctcaaagggacagaggaagaatttacaattgtaaactcttcttagtgctctaagaaaggaaggtcaggggcctayagtcaggtgttggctagaataaacagtaagcttcttttgatagccctgaacttctccagacagactggagctcaaaaggaggctgggtattccagggctgagtggaggtgggctaggctactagaagctttgctagagttggtcaaggctcttagagcaagaatttggatggagttgtttgccaagaattatttacagttctcattagtttgccttggatgttttttgttttcattttagaacacgtagatccaccttattctttttaattgctgcaaagtataccatggtatgaatacatcatagttgtttttagttttagttttttttt

SEQ ID NO: 871090 - DNA, 660 bp, Homo sapiens
tatgaaattctgatttgaaaattattttctttaagaatgttgaatattggcctccactctcttctggcttctagggtttctgcagagagatccgctgttagtctgataggcttccctttgtaggtgacctgacctttctctctggctaccctgaacatttttttcctcatttcaagcttggagaatctgacgattatgtgtcttggggttgctcttcttgaggagtatcttagtggtgttctctgtatttcctgtgtttgaatgttggcctgtcttgctaggttggggaagttctcctggayaatatcctgaagtgtgttttccagcttggttccattctccccatcactttcaggtacaccaatcaatcataggtttggtcttttcacatagtcccatatttcttggaggctttgtttgttccttttcattttttttttctctaatcttgtcttcatgtcttatttcagtaagttgatcttcaatctctgatatcctttcttccacttgatttggctaccgatacttgtgtgtgcttcacaaagttcttgggctgtgttattcagctccatcaggtaatttatgttcttctctaaactggttattctagttagtggttcctgtaaccttttatccaggttcttagtgtccttgcattgg

SEQ ID NO: 871091 - DNA, 571 bp, Homo sapiens
aacgacacaagcaattgcaacaaagcaaaaattggcaaatgggatctaattaaaccaaatagcttctgcacagcaaaagaagctatcatcagagtgagcagacaacctacaggatgggagacaatttttgcaatctattcatctgacaaaggtctaatatttagagtctacaaggaacttaaacaaatttacaagaacaaacaaccccattaaaatgtgggtaaaggatatgaacagacacttctcagaagaaracattcaggcagccaacaaacctatgaagaaagctcaacatcactgatcattagagaaatgcaaatcaaaaccacaatgagggccgggcgcggtggctcatgcctgtaatcccagcactttgggatgccaaggtgatcgaatcacttgaggtcaagagtttgagtccaacctggcgaacatggcaaaactccgtctctactaaaaacacaaaaattagccaggcactgtggtgggcacctgtaatcctagctacccaggaagctgaggctagagaatcacttgaacacagaaggtggagactgcagtgagctgagat

SEQ ID NO: 871092 - DNA, 482 bp, Homo sapiens
tatttctcccttagaactgctttcatgaaatgataggagcttttcagctttacttttgaaggaaggtgatgctttgcttccctttcatatttgtctaaaagcacttttgccagcaagccagcatgtgtgctacatgtgaacttttctacagaatctcctaaacaaggtgaaaaaaaatcattagtagtccagatttcaatcttctgcacagctcaggtaacaataaatgagtaatttgcygcccttcactttggcaggctgatgcctaatgattacccagggacaggataatggtaccatagtgattacactatgtttttctaaccactttcaaggcctttgctttcagacctgccctaatgaaaagaaagctctgaaattgggccaggtctttattaaaaatgttctgacaggctctgcttagataaaatgtattcacttctcagatttgaatcttcttcagatttggaaggcatggtctc

SEQ ID NO: 871093 - DNA, 499 bp, Homo sapiens
cttaaatataatgaatttatttcacccagaaagagagggaaagaagctactttcaaaggtaagtgaaaaaaaaaccctatgctggccaggcatcacgcctgtaatcccagcactttgtgagggcgaggagggtgaatcaccttaggtcaggagttggagaccagcctggccaacatggcgaaaccctgtctctactaaaaatacaaaagttcgacaggcatggtagcaggtgcctgtagtcccagctactcagaaggctgaagcataagaattgcttgaacccaggaggcggaggctrcagtgagctgagattgcaccactgcactccagcctgggggatagagcgagactctgtctcaaaaaaaaaaaaaaaaaaaggaaggaaagctctatactttctgatctcagaattcagtgcactatcaaacacaatgtaattaaaatggtaattataatgttagcaaattcattttaacatagtctttctaaaggaatatat

SEQ ID NO: 871094 - DNA, 622 bp, Homo sapiens
tcactaactccagagcaataacagtgccttctcttccaccttctcgtgcaagtgtctctcgttagaagaccctaaatcagagcactacttacaaggagtctagaaaacatagcctttatgtttctgggccttgcttccagggagagtgaagaaggccccatgctgagacaccaacagacaatcctgctccaagttgaaaccagtggaaacagcgtacttttcctctgttttctgcaaatggactcaatccatttaggctgaggcaggcgaattctagcatgacccagtataccaaactgttcttatgaaagaaccagccactcccagaaccaccagtgggtttaacaacctttttttttttacggcgttttcattctcttaataagacaatcccagtcttcttttcactcacattcactgattcctttaaagagttaattctgctgaaaggtcttgctctatgtgtacatttcttaaytggcatccctactaagaatagggagcaatgaggaaaggttgtggaaacaagggaaaattagtttatgcaaataaggcagaatgatattttaccaggctgacactaaatttatcttagtaagattggtattacagtatagtctag

SEQ ID NO: 871095 - DNA, 563 bp, Homo sapiens
cctgaaatttgaatttgactatgaagaaagtattgattgtggggagaaataatgttaattccctaaaacacagggtgagaactttttaatggagtacacattactcatcaaaatatagtcccaaactatattatcaaacatgtctaacccactttacacacatacacacacacacacacacacacacaccaccctacgatgcagttatatgaatctttattgtttamtaaacataatacatttcctccttccccacttacgtgcctttgcacattgtattctttgtatcctcttcctagaatgctcttctttaaattgataaacttatccttcaaaatgcaacaaaaataccaccttttcaatgaagtccttcagaatccccccagtgtcccatagaaatttgcatatcctcttaattcaatgtcctgcaaccttctttgcacattagcacccctgggatttggcatgatcctatcagtaatgctgtctcagtggggttttatatgagaaggggctttctatgggtgaggcaacaatggttctctcttgtgaggttgaaattt

SEQ ID NO: 871096 - DNA, 651 bp, Homo sapiens
gctcttctatcttctctctgaccgtagcctggttcatcagcctttcagctgtttttaggagcgtctcagagtgggatctgttttttaaaactctgaggagatttttaaacctctaaggagaacaattttgaatggtgcctgtgtaactcagggttcttctctttctttcctgacaacattcttaggtttatagaagaaattaattgtgcttgttytggaaaaaaaaaaaaaaagctatattggagtacccagagaagccactttgagactttcgtaaactctttgttatgtctttgtttgtgagagtgttatgatggtcagtttacagaggagttgaggtagatgcattgcaggtcaagttacatctgacctttagctattcatcttctgccttcctattggtactttctctattttggcaaaatctatgaaaccatccctctttgaggtatttttgaatgaacacatactagtttacattgtatatttgtatcacacaaagttttgttcaccaagatattaccactatttttatcgcattttttctttctttctttctttttttttttttttttttagagagacagggtcttgttctgtcacccaggctgaaattcagtggcaagattatagctcactgaaccttgaatt

SEQ ID NO: 871097 - DNA, 667 bp, Homo sapiens
tatgtgacctttcagagaattaaaaatagctgtgttggccaggtgcagtggctcatgcctgtaatcctagcactttgggaggctgaggagggtggatcacctgaggtcaggagttcacctaaatggtgaaaccctgtctctactaaaaatacaaaaattagccaggtgtggtggcatgcgcctgtagtcccaggtactcaggaggctgaggcaagagaatcacttgaacctcggaggtggaggctgcagtgagctgagatcacaccactgcactccagcatgggcaacagagtgagactctgactcaaaaaaaaaatgtgttttgagtttgaagaaactcaaagaaattaaagataacacagagaaggaattcagaattctatcagacaaatttaacaaaaagactgaaataattaaaaagtatcaatcagtatttctagagctgaaaaactcaattagcatactgaagaatgyatgagtcatttgatagtagaataggtcaggcagaagaaacaaccaatgagtttgaagaccagctatttgaaaatacacagtcagaggaaacaaaagaaaaaggaattttaaaaaatgaagcacacctataggaactagaaaatagcctcaaaaaggcaaatctaagagttattggacttaaaaaggagttgct

SEQ ID NO: 871098 - DNA, 506 bp, Homo sapiens
attggctctgaggcagttactgaaaagagcagctataatcaacagctgtgtcctgatgttttgccaatctgtgctcataaaacatgatgtttggtaacatatttccaacacagtttgcctttgtcttttcaacaccaaaattcccacttctgtattttctttcatctaagaatttctaaatagtttgagggcattaattatgccatacaaaatcctstcacagtaattactgatgttcctgcttcctaattatgtgtaataccaacaaatccactttctatactggattgcaccaacgctacctagaaatatctgctgccttgttgacaaataaagagctctcaaatgtagagtacagaatcttctctgctctgcatcttgcttttgcacattagattttggtgctgagcttctctatgtaaaatgcctcttctgtacacagtacacactttcccctttgaataggaattaagtttactggctacatttcttgatcaatttcagac

SEQ ID NO: 871099 - DNA, 506 bp, Homo sapiens
attggctctgaggcagttactgaaaagagcagctataatcaacagctgtgtcctgatgttttgccaatctgtgctcataaaacatgatgtttggtaacatatttccaacacagtttgcctttgtcttttcaacaccaaaattcccacttctgtattttctttcatctaagaatttctaaatagtttgagggcattaattatgccatacaaaatcctctsacagtaattactgatgttcctgcttcctaattatgtgtaataccaacaaatccactttctatactggattgcaccaacgctacctagaaatatctgctgccttgttgacaaataaagagctctcaaatgtagagtacagaatcttctctgctctgcatcttgcttttgcacattagattttggtgctgagcttctctatgtaaaatgcctcttctgtacacagtacacactttcccctttgaataggaattaagtttactggctacatttcttgatcaatttcagac

SEQ ID NO: 871100 - DNA, 664 bp, Homo sapiens
ttgacattttttttggtggctcgccatcattttctgtatgtgttttttaatttttgagtttttgtggaggtggggtgtcactatgttgcccatgctggtcttgaactcctgtcctaagggatcctcccacccctgtctcccaaagtgctagtattgcaggcgtgatctaccatgcccagctttctctgtgtgttaaactctccaggatacaggcatgctgcacagatggtgactttaagcaaatatgtgacctctagtccctttttcttcaaaagggcattgtgacacaggtagatggcgggtgtttgcctcttgacttgaacctgctccctctgtgggaatcttttctttcctgttctaagaattaggtttagtttccaattcttagcagtttktccacagagccctttattgggccttaaaaacatgtcagctccctaatgtagaatctgaatatgcgaattaacttaaagataaataaaaagaaaatctgcacctcttaatttactctgtagagagcattcgctaagaaatgtgaatcaaaaggaattgtttcctataatcaacagaaaaaagtgctgacggtcaccttaactttacagataatgagatctttagggaagctttaatctttcaaagtttccagaagctatgcaaagagcct

SEQ ID NO: 871101 - DNA, 639 bp, Homo sapiens
tgttgggattacaggcatgagccagtgcacccagttctatctcatgtatttaaacatagatttattaaccagctactttcagtatgagagcacagagtcactgtctttggttcctaaagcttatgaggtgtctggctgtggtaaaaagtgtcttgggtatgaattctagctttgctactcactcactatatgacctracaaatccttcaagcccctgtgcttactgaggtttcccctaagcatgaggatgataacacctgtcttgcatgctggttgtgggaatcaatgagataaaagcacataataagaattcaataaattctagctaagtgtaattaaataatcaaaagaacattcaacaagtgcataattatgtctcacttaggaattacacaaagtgaacttcataggtcttggaatttcattttctcttaggcatatccaagttcagaccaattaagaccttttaaactagctacaagctgaactgaacccttgtcctagcttgcagtgggatttttaatctttgattttcagaaacatgtggacatacatcttcagtgcatatggacaagagtgtagtaggacaatctacaaagatatatggctagattttttttcctttgaataaaatctata

SEQ ID NO: 871102 - DNA, 650 bp, Homo sapiens
tatttctcatggtcttatttatctcctttgacaataggaggaattctttcattcattcctgttaattaccattcaagttataatgaatcttgaagcactgtctctaattaaaatcctttcctgacatctatactgcttacttattaatgcctccacttggatgtttccaggacacttaaaatccagccactcgaactcaatcagtgccctccttcccttargttacctttctcagtaaactgcatttccaccccctccctttctcagtccctctcacttgattactaaatcttagtgagtctacctcctgaacaccctgcacctctgctgcttctggccacctgctgcctccgtgctaggagctaggatactgcagccctctcaggtggcttcttcttcctggttggctccctctaatttatccccctaccacaactagaaatatttttaagggcaaaatgggtcatgttacatctctgtttaatacccttaaatgatttccttttgcttcaggaaaaaaaaatgatccaaacttcatcattgggctaagacatatcagaagtttggggatctgcagtactccttacagtgcttacatttcttcactcactgcagtcaagctggaaagcacacagggcctttagcaggac

SEQ ID NO: 871103 - DNA, 598 bp, Homo sapiens
attacgacagctcaaatggttttattaaagacacagagaaagaaatacagtatcagtattcagttcatgttagataatcatgacctgggaacctaccatctatcaacttgcactagaacttctattaggtataagcaaggttcagctcctgccttcaaagaacacacattgaaatgagtctgacaaatgcttactcacagttgtacttatgtgagaagagtactaatagagattgataaaatattgcatcaggattccagagaattcaaccattttagtctggaagctgatttaagttaattgtggaaactgtcagtgtggagagagaaaagaaataagtaaggagaggagaggaaaggaaaggagagaaagragaggggaggagaagagagaaagactcttgctagcaaaataaataaaaggtgcagatatagaataataaatacaggtggtaagtttgggaaccaaagaatgtaagcatatttgagtgtatgcatgagggacatgaaagaaaggagggggatctttcatgtttaaagcatggaggaggaaacactgggacattttaacgtgatataggtgaaattttcctttgtga

SEQ ID NO: 871104 - DNA, 612 bp, Homo sapiens
taataattttctctctcaggaggtaccttctgcttctgtttttccacacaagtaattcatattcattgtagaaaaatcagaacacaaacaagaaaaagaaggtaaatcaaccatgattcatcaccccaccccccagagataactttttttttgtattttcagagctatctttgagaatgttatattaatatttatacatattcatgtattttatttttaaaagtggaatcatactcttataaaacatcatgcttttcttgccaggcaatatattatgaatctttccatgaatataaacayttaaaatataattcttacaggctactaggtattttcaacataagaatataccatcatttattccctcagtcccctcatcactggacatttggctttatttttcctttatcccccatcttctgtatttcccctcttttcttccaggtgtttgcagccatcaccacctgttggctttaggtcagccatgctacagtttatggctcctagccccatggatgctctggggggatgctttggttccagaatgccatatttccgcccatatgattaattacttagatctctgggtccttctaatcaggacactggata

SEQ ID NO: 871105 - DNA, 519 bp, Homo sapiens
gttttgataacagaataatgttatctaacacatacatctcaacaggattgctctggctgctgctttgacggtcaactaaagatgggtgacagtggcatcaggtagaatgtagacaacagatgatggcagcaggggagtagcagtggaaatggtgagaatagtcagattttggagatatacacacacttatctccaatataatattttatacatatgcacatatactatttaatacatacatactattttgaggatagaacagacaggatttgcagacagactgaagtatgagagatactkaagatcattctaaagtttttgccctgagaaactggagggcaggagatgccataaatttagaggggaagactgtggaaggagcgggtttgggcgggtgagggttggggatgagtggagatcaggaatttcgttttgggaacaccaagtctgagatgtctattaaacatcctattggagatattgaataagcagttaggtgtttgagtctggagatcaaag

SEQ ID NO: 871106 - DNA, 590 bp, Homo sapiens
agaagttttctatgaattctttgagtaaaaatctattttaaaagataacaggcaataatttgtgactaggaaatttcagagtggccaggaaaaacatgctaaaaatagaaactgtttgtttactctgtgctccacccagtctaaaacacagccatgtggttgcagacttggggaaggccctgtggtaacttggaaggtgttttttccccsctgagttgcagagtttaagagatcattcttataacttctgaatcctgtttcctttctttagcaactcagataaattatttttgcaagctgttatctgaaaatgagtttgaccatgttcgtttagtttttagtgtcttatcatcctcctttctacttatatatttaatttaagccctgtttcatgaaaggaaattttgagattggaggttttactaataacttatacctcaaaatttgtcagtttatagtttaaactttccggtgtttttcatgatagtctaaaaaaatagccacttatttgttcattttgttacaaaaggggctagattatgaatttagttcttgggtaggcttatcacctaggaacaacacaactttat

SEQ ID NO: 871107 - DNA, 602 bp, Homo sapiens
ctatgttgaataggagtggtgagagagggcatccttgtcttatactggttttcaatggaaatgcttccagcttttgcccattcagtgcaatattggctgtgggtttgtcataaatagctcttattattttgagttatgttccatcaatacctagtttattgagagtttttaacatgaagggatgttgaattttatcaaaggccttttctgcatccattgagataatcatgtggtttttgtctttggttctgttcatgtgatagattatgtttattgatttgcatatgttgaaccagccttggatcccagggatgaacctgacttgatcatggtggatatgttttttgctgtgctgctggatttgatttgccagtatgttattgaggattttyacatcgatgctcatcagggatattggtctgaagttttctttcttttgttgtgtctcttcctggttttggtatcaggatgatgctggcttcgtaaaatgagttagggaggagtccctccttttcaattgtttggaatagtttcagaaggaatggtacaagctcctctttgtatttctgatagaattcagctgtgaatccatctggtcctgg

SEQ ID NO: 871108 - DNA, 634 bp, Homo sapiens
gaggtggggtgggctgccatctttgctgttttgaaaccttagctgttcttgccttcaggctttggagagtccacagtgactaggagctggagtggacctccagcacagcacagttgccccgtgaaaaagcagccagamtggtttttcatgcaggtcccaatcctattcctcctcactagacaggaccccttgaatgggatttcctgctacccctgccagtgtttttcagccaggagcatttccaaattccatggaatggagctcccaaagggagtgatgggccatcatctatgctgtttagcagccttagctgttcttgcctttgggctttggagagtccaatgcaaatgggggctggagcacaccccaagcaaagcacaacacagctgctctaccaaaaagcagctagactgcttttttacacaggcccccattcccgtttctcctcattgggtgggctctccagactagggtctccagccacctcctgcaagtatgttctgaccagcaacagatccctacctcgctggaacagagctcccacatggcagtggccggtcggggggggcaggttgtcatttttgcagtttggcaatctttactgctgatgccttcaggtactggaaaattcaag

SEQ ID NO: 871109 - DNA, 594 bp, Homo sapiens
gggaggctgagagctagtatctgacatttaacagcattttttagtgagagactggctctgcctctcaactacacttatgaaaatcacaaagcttgtgtaacctggttaaccttcagaatttagtctctgtcagtgttcattaacaaagcaagatctgtttttcaaagagagaataattacttaatgaaaagaacatggctttgctccaaaaccctaggtatttccactctgattctcctatctaccacaggctccattgaacatctcaatttgtttcagacactttgaccactactggttgcattcmccacctagtaagagtgaaagaattacttttacagcagtttagacttgttggggtagcttcttttgctctaaacgccaccaaaaaaaaaaaaaaaaaaaaaaactggtagcttttgttatcatgagtcatatgttgcatacattgattccaaaatacaaagagcccttcaatcacttcttccttatcgatggagggtaaaaagcctcacaatttttttttccaatttgaagacatttccagacaattctcagaccactagagcttcagaaatttcaccagagttacag

SEQ ID NO: 871110 - DNA, 644 bp, Homo sapiens
gaccttgtctaaaaaaaaaaaaaaccagaaaacaaatcattctaccaaaaagacacatgcactcatcacagcgctgttcaccatagcaaagacatgaaatcaacctaggtacacatcaatagtggattggataaagaaaaggtatatatacaccatggaatactacacagtcataaacaacaaaatcatgtcctttgcagcaacatggacacagctggaggccattatcctaagcaaattaacccaggaacagaaaaccaaataccacatgttctcacttatgagtgggagctaaacattaggcactcacrtggacataaagatggcaacaacagacactggggactactagagcagggagggagagagaggggaaaggattggaaaaccctttgctcgctacctgggtgatgggatcatttgtaccccaaacctcagcatcatgcaatatacccatgaaacacaccagcacatgtaccccctgaatctgaaataaaagttgaaattataaaaaaataaaaggaaggaaggaaggaaggaaggaatcaatcagtgattttctaattttagtatatatcagaatcatctggggtacttataaacacagattgctgggccctaatatatgagttcctaactcagta

SEQ ID NO: 871111 - DNA, 597 bp, Homo sapiens
cttgctgctgtagaagtgaggttcccttttgttggctatctgctgggatccccatcaacactttctgttcacttgattccctgttgtattgtacacttcatcttcaaatggcagcagcctcttagtcttcctcactcttcaagtctctctgtgaacgtacaagatacaattttgctaagcttcctgccactgtattataaggatcccatttcttctggtttccaataccaagtcactcacttccctctgakccctggctagtagtatccttcaagtacagatgtctactaacagtctgtttactgcaatttaggctttttctaaggtgatttctaagatttttctaaaattctccttattttcctcaacagtgtccctatttaatagtctgttcaaaggcacctaggagttttctagcatgctttccaaaattcttccagcctccactcactgcccaattccaaagccatttccatcattttcaggcatagagaagtagagggaatgccaagtactggaaatagcaagggcagcgaactaggatggctttgaaaaattctgggaatagacaataatctgatattgcttaataaagtg

SEQ ID NO: 871112 - DNA, 603 bp, Homo sapiens
atctaagtctcaagttggttagttagatttaacagagctaatcctcatccatgacttatcagcatttatatgtaaaagtaaggctttgtacttgctttggcagcacaaatactaaaattggaacaatacggagaaaattagctttgttaagcacttcatattttgcagtcaggggaaggtcatttgactgtttgctggctagctaagtcacagtttgaayagaaacaaaatgggtggccccttatatttgaattgtgatttttcactacaaaaacatttgtgtaaggtgatctataaactgagaatggagataagtaacacatagggtgttgtgtaaatattttgttagtatgtatcttggaaatgagaaaatgtcaactttcatctacttcatagaacttaaaaaaaatgaaagtagggttttgtcttccatgtcagttggagataacatcactgatggagattaaccatcattctagcaaacatctgctggttcagttagagtctgtagagaagtaatagtggtagcccaggcaagatcttgacatctgttagttttctgcccttggaattgatgagctcaataatagtgaacaatcatct

SEQ ID NO: 871113 - DNA, 603 bp, Homo sapiens
atctaagtctcaagttggttagttagatttaacagagctaatcctcatccatgacttatcagcatttatatgtaaaagtaaggctttgtacttgctttggcagcacaaatactaaaattggaacaatacggagaaaattagctttgttaagcacttcatattttgcagtcaggggaaggtcatttgactgtttgctggctagctaagtcacagtttgaacwgaaacaaaatgggtggccccttatatttgaattgtgatttttcactacaaaaacatttgtgtaaggtgatctataaactgagaatggagataagtaacacatagggtgttgtgtaaatattttgttagtatgtatcttggaaatgagaaaatgtcaactttcatctacttcatagaacttaaaaaaaatgaaagtagggttttgtcttccatgtcagttggagataacatcactgatggagattaaccatcattctagcaaacatctgctggttcagttagagtctgtagagaagtaatagtggtagcccaggcaagatcttgacatctgttagttttctgcccttggaattgatgagctcaataatagtgaacaatcatct

SEQ ID NO: 871114 - DNA, 575 bp, Homo sapiens
cagagttcaaggggaggaggaaggaaaagcactttacaggtgggtcattccaagcccaaatccagcaaacagatcggctgataaacaaaaccaagaaatgagagagaagaacacccccctcctcctcctcctcctcctcgtcctcctcctcctcctccttccacccctccccctcgtcccttagggatggtctagtaggaaaagtcactcaggaatggcaccacgtactttcaggaaagaggraaaaaaagagagagagagaggtcagtcagtgctatagcaatgcgattaacaagagaaaaaacttgatccaccggttccttaagaatcgaccaaaagctaagacaagaaaactgaaagaaaagggggggggggcgggtagaggggagggacagtcaggcagaacccagctaggaacccaggccaacttcacaggactgtttttggcccttggcaaaaaagaaaaaaaataaataaatcttaattccatctctttcgcccatactagaacctgtcaaagtgatttaactgctgcctgtttacatgtgtcataccagggtttttggttttttttt

SEQ ID NO: 871115 - DNA, 582 bp, Homo sapiens
tattttgctgaattctatcaagtctgatgcctaagatcactaatgatcacactgtatctgtcccttgcatgcttcattttaactgtgaaaccgcagagttttcaggaagagaaaggacaaccctgattctgatatgaaagtcaaataactttttctactaacttttcttcaactcttttttataataaaatcttctatgactaataatgcacaaatctccatgaattaattctggaatgaaggatagaaagattgggcacacatcttgtgattcagaattacaacagtcacagcttggccaacatggtgaaacctcatctctactaaaaatacaaaaattaggcgggcgtggtggcacgcacctgtactcccagctactcgagagcctgaggcaggagaattgtttgaactgggaggcagaggttgcagtgagctgagatcacacygctgcactccagcctgggcgacagaaagactgtgtcaaaaaaaaaaaggaattacaacagacccactgggaaatggactttgagaaatcatgaactatgaatctactttaagattcttatcccaaaagaagagccc

SEQ ID NO: 871116 - DNA, 613 bp, Homo sapiens
taaaaaaaagaaaggggagaaaaccatacagtataaaaaacatgggaattggtaaaaagacatggcacaaatttaattggaaattcagaaaggatgaagacaaaaaatagagtaggtaaaatgttaaaatatctgagaatttttccaaacaaaaatattaagtcagattctataagcactacaatctgtaaatctataaaacacaaagaaaatcacatataggcacatcgtaatgaaacatctgaactccagagacaaaggggaaatttaaaaagcagaagagaaaaaaaaaatacattagattcaagtagcaaagaatagatccagctgccttctcaacataaatgattgaagccagaaaataaggcaatgatacctttaaaatattggaggggttggttgggaggcrgtgacggggttacaaacctgtcaaactagaatgttatatcagtaaaaatatcatttaaaagtgaagtcaaagtaaaagaatgtccattaaagcaaaactgagaaaatttttcacgagcaaatctatactgaaaagcataatgaagaaaattatttgaacagaagaaaattgatcccagaaagaaatacaggaagaagaaacaat

SEQ ID NO: 871117 - DNA, 595 bp, Homo sapiens
cctgaaaatcaatacccttgttaaaaaaaaaaaaaagttgggttgactcctcaaaccaacgtcagcaataatgacatctgctggctttttagcgcatttgcttccagctgaacccaaggaattaactttactgggatctcaccgtctggtttcaagtgggaaagcaaagtccccttccatggagaccaagtgccagcgtgaagagttttatcctcaagaacctgagcctcaggagctcggtaaagaagcccagcatgctctgctagaagattcaactaccagtcaggttgaatgtgatggctaagcacagctgggtgatgcctgagagcaaggaatttgggttcaggaaaagaaatgaggagtggtagtgacaacttctaggggcaagctttctatctgccttgcactaggtggactagaagaattggcccttggcttatgaacaagacygtagggctgggccattgaagacggtgagaaggtaagaaacccagtcaggtgatatagaaggtaagttagaatcactagattttggcaggctttctgggtgctctacgcttagcctaggcaagctaaataaaaaagcatcatatct

SEQ ID NO: 871118 - DNA, 646 bp, Homo sapiens
atcactgaagttttagaatatataagaacaagtattccttccaggaaggtaggaatattacatttcttctacttacatgttttattaccaattcacacttaacattggtgaagtaagcatgatctttcatgtatcacagacttcatttccttgacaaacgacttaattataatactttattccaccactttttttgagacaagatagcagtatttgaaggcaatttgagaagttggcaagcttacaaatttatgagcttatgaaatttatgtgttacattgatacarctgacgtcatacatattttataagaactgccctaaacatagacgtcatcattcataatgaattaatacttaaaggaaatttaaaaaaaaaaaattcagctaagagagtactgttttgatatgaaataatataagactttataaggattgttgtttaaaaacaagcaagttgtttttaaaattagaattttgcatgatatatcaattagaatgctttgggttgaaatagaaacttcagcctaaactgtcctaggcaagcaacaagacaatgtctgggctcacaaatgataattccagagaataaggaaagcatgctgcagttggggctgtactggagctccattaaggtcacctgttctg

SEQ ID NO: 871119 - DNA, 646 bp, Homo sapiens
atcactgaagttttagaatatataagaacaagtattccttccaggaaggtaggaatattacatttcttctacttacatgttttattaccaattcacacttaacattggtgaagtaagcatgatctttcatgtatcacagacttcatttccttgacaaacgacttaattataatactttattccaccactttttttgagacaagatagcagtatttgaaggcaatttgagaagttggcaagcttacaaatttatgagcttatgaaatttatgtgttacattgatacaaytgacgtcatacatattttataagaactgccctaaacatagacgtcatcattcataatgaattaatacttaaaggaaatttaaaaaaaaaaaattcagctaagagagtactgttttgatatgaaataatataagactttataaggattgttgtttaaaaacaagcaagttgtttttaaaattagaattttgcatgatatatcaattagaatgctttgggttgaaatagaaacttcagcctaaactgtcctaggcaagcaacaagacaatgtctgggctcacaaatgataattccagagaataaggaaagcatgctgcagttggggctgtactggagctccattaaggtcacctgttctg

SEQ ID NO: 871120 - DNA, 646 bp, Homo sapiens
atcactgaagttttagaatatataagaacaagtattccttccaggaaggtaggaatattacatttcttctacttacatgttttattaccaattcacacttaacattggtgaagtaagcatgatctttcatgtatcacagacttcatttccttgacaaacgacttaattataatactttattccaccactttttttgagacaagatagcagtatttgaaggcaatttgagaagttggcaagcttacaaatttatgagcttatgaaatttatgtgttacattgatacaactgacgtcatacatattttataagaactgccctraacatagacgtcatcattcataatgaattaatacttaaaggaaatttaaaaaaaaaaaattcagctaagagagtactgttttgatatgaaataatataagactttataaggattgttgtttaaaaacaagcaagttgtttttaaaattagaattttgcatgatatatcaattagaatgctttgggttgaaatagaaacttcagcctaaactgtcctaggcaagcaacaagacaatgtctgggctcacaaatgataattccagagaataaggaaagcatgctgcagttggggctgtactggagctccattaaggtcacctgttctg

SEQ ID NO: 871121 - DNA, 543 bp, Homo sapiens
tgagtaagttctcatgtgatctaacggttttataagtgtctggcatttcccctgcttgcagttctttctctcctgcctccttgtgaataaggtgcctgtttcctcttctgccgtgattgtaagtttcctgaggcctcccaagccatgtagaagtgtgagtccattaaacctctttcctggccgggggcagtggctcacgcytgtaatcccagcactttgggaggccgcggcgggcagatcacaaggtcaggaaatcgagaccatcctggctaacactgtgaaaacccgtccctactaaaaacacaaaaaattagccgggcgtggtggtggggtggtgggcacctgtagtcccagttacttctgaggctgaggcaggagaatggcctgaacctgggaggtggagcttgcagtgacccaagatctcgccactgcactccagcctgggcgacagagcgaaactctgtcaaaaacaaacaaacaaacaaacaaacaaaaaaccccacctctttcctttatgaattaccaagtctcaggaaagttctt

SEQ ID NO: 871122 - DNA, 543 bp, Homo sapiens
tgagtaagttctcatgtgatctaacggttttataagtgtctggcatttcccctgcttgcagttctttctctcctgcctccttgtgaataaggtgcctgtttcctcttctgccgtgattgtaagtttcctgaggcctcccaagccatgtagaagtgtgagtccattaaacctctttcctggccgggggcagtggctcacgcttgtaatcccagcactytgggaggccgcggcgggcagatcacaaggtcaggaaatcgagaccatcctggctaacactgtgaaaacccgtccctactaaaaacacaaaaaattagccgggcgtggtggtggggtggtgggcacctgtagtcccagttacttctgaggctgaggcaggagaatggcctgaacctgggaggtggagcttgcagtgacccaagatctcgccactgcactccagcctgggcgacagagcgaaactctgtcaaaaacaaacaaacaaacaaacaaacaaaaaaccccacctctttcctttatgaattaccaagtctcaggaaagttctt

SEQ ID NO: 871123 - DNA, 543 bp, Homo sapiens
tgagtaagttctcatgtgatctaacggttttataagtgtctggcatttcccctgcttgcagttctttctctcctgcctccttgtgaataaggtgcctgtttcctcttctgccgtgattgtaagtttcctgaggcctcccaagccatgtagaagtgtgagtccattaaacctctttcctggccgggggcagtggctcacgcttgtaatcccagcactttgggaggccgcggcgggcrgatcacaaggtcaggaaatcgagaccatcctggctaacactgtgaaaacccgtccctactaaaaacacaaaaaattagccgggcgtggtggtggggtggtgggcacctgtagtcccagttacttctgaggctgaggcaggagaatggcctgaacctgggaggtggagcttgcagtgacccaagatctcgccactgcactccagcctgggcgacagagcgaaactctgtcaaaaacaaacaaacaaacaaacaaacaaaaaaccccacctctttcctttatgaattaccaagtctcaggaaagttctt

SEQ ID NO: 871124 - DNA, 553 bp, Homo sapiens
cttgtagtatagcttgagatcaggtagcatgatacctccagctttgttctttttgtttaggattgtcttggctatacgggctcttttttggttccacatgaaatttaaagtagttttttttctaattctgtgaagaaagtcagtggtagcttgatgagaatagcattgaatctataaattactytgggcagtatggccattttcacgatattgattcttcctatccatgagcatggaatgtttttcgatttgtttgtgtcctctctcattttcttgtagttctccttgaagaggtcattcacatctcttgtaagttgtattcctaggtattttattctatttgtagcagttgtgaaagggaattcactcatggtttggctctctgtctattatttgtgtataggaatgcttgtgattatcagcttaaaaagactttgggctgagacaatggggttttctagatatacaaaaatgtcatctgcaaacagagataatttgacttcctctcttcctattagaatatgctttacttctttttcttgcctgatttccc

SEQ ID NO: 871125 - DNA, 638 bp, Homo sapiens
attggctgctgtaacaagtgaccccaagttgggcagcttgaaacaacacaaatttgttatctcacagttctcagtgtcaaaagtctgaaatgggtctcactagactaaaactgaggtgttagcagggcagatttctttctggaggttcgagggatggattcatttactcgcctttttcagcttcttgaagctgctagcatttctaggctcctggtcccctaccacctccaaagccagtgatggccagtctagtcacctcatactgcctcactctgagacwaactcttctgcctcccctttccacatttaagaacccttgtgatcacattcatcctacttggataacctagaatctagaatagtccttatcttaaagttggttaattagcaaccttaattccatctgtgactttaccttccctttgctactgagcattgcatattttcaggttccaggagagaggatgtgggcatctttaggggccatttcttttctgcctaccacagtgcctgaagaaaaaaatgagtgaacaggaggaaggtgcttggtctgcgtggagatcagcaacatgaagcaaaggcagtggaagaatcatcagtgtttatctaacaaagtctataggtagagacaccagatt

SEQ ID NO: 871126 - DNA, 614 bp, Homo sapiens
agttgtgtggttttattggtctatgtgtctgttcttgtaccagtgccatgctgtttttcttactgtagccttatagtataatttgaagtcaggtagtgtgatgccttcagctatgttctttttgctcaggattctcttggctacccgggctgttttttggttctatatgcatttcaaatagttttttctaattctttgaagaatgccaatgttagtttgatgggaatagcattgaatctataaattactttgggcagtatggcctttttcacaatattgattcttcctatccatgaacatggaatgtttctgcatttgtttgtgtcatctctgatttctttgagcakttctttgtagtgctccttgaagaggtccttcacgtcccttgttagctgtattcctaggtattttattctttttgtagcaattatgaatgggagttaattcatgatttgggtctctgcctgcatggtgttggtatataggaaggctagtgatttttgcaagttgattttgtatcctgagactttactgaagttgcttatcagcttaagaagcttttgggcagagatgatgaagtttttagatataggatcatgtcatctgcaaaaaaa

SEQ ID NO: 871127 - DNA, 614 bp, Homo sapiens
acactatttagctattaatatttttaaaaaattaatttgaagtccagtttaaatggtttatactactggcagagtagcattgttatgttgattccaatataaatacaaggttaaaatagtttctctaagccattctttactctagagacgtttccactttccttttaagtatatttatcactgagtcatcaaacggcatacataattatcatgtatttctccaacctgaactgcaggaacagtgagaaatttaatgccttattgkcattttactctcaaaaaattaaaaatacttccaggaagttacttttttctctttatttgaaagcaatgaaatggttttctatttatctaaaaaggccatgacgtaacaccaacagtgaaccctaacataaactatggacttggggtggttatgctgtaccagtgtaggtttataaattataacaagtgtaccactccgatggggaacattgattaaggtggaagctgtggaggtgaagggtaggggaaatgtgagaaatctctgtacttttctctaaattttactgtgaacctaaaagtgctatttaaaaaatagtcttaaaaaagattatcacaacttcacagtccat

SEQ ID NO: 871128 - DNA, 602 bp, Homo sapiens
aagaatttttggctgggcatggtggctcatgcctgtaatcccagcactttgggagactgacgtgggtagatcaccagaggtcaggagttcaagatcagtctgggtaacacggtgaaaccccgtctctactaaatatacaaaattagctgggcatggtggcacatgcctgtaatcccagctactcgggaggctgaggcaggagaatcacttgaacccaggaggtggaggttgcagtgagccggaatcaagccactgcactccagcctctgtgacagagtgagacttggcctcaaaaaaaaaaaagaaaaaaaaaaaaagaaaagaaaagaattttcaaygcagaatttcatatccagccaaactaagcttcataagtgaaggagaaataaaatcctttccaaacaagcaaatgctgaggaattttgttaccatcaggcctgccttgcaagagctcctgaaagaaccactcactaaatatggaaaagaaaaactggtaccagccactgcaaaaacacaccaaaatatgaagaccaatgacactgcaaagaagctgcatcaactagtgcacaaaataaccaaagagcatcatgatgacaggatca

SEQ ID NO: 871129 - DNA, 606 bp, Homo sapiens
atggctttgacaaaagtgctaacagtgatatgaacaataaggttcaggctgaggtagtcttagatggaaatgaagaacttgttgagaactggagcaaaggtgactcttgttatgttggagcaaagagactggcagcatattgcctctgccctagagatttgtggaactttgaacttgagagagatgatttagggtgtctggtatctggtggaagaaatttctaagcagcaaagcattcaagatgtgacttgggtgctgttaaaggcattcagttttataagggaagcrgagcaaaaaagtttggaaaatttgcaggctgacaatgtgatagaaaagaaaatcccattttctgaggagaaatccaagctggatgcagaaatttgcataagtaatgagaagctgaatgttaatccccaagacaatggcataaatgtctccagggtatttcagaggtcttcaagacagcccttcccatcataggcctagagggctagaaggaaaaaattgtttcttgtgccaggcccagagtccccatgctgtatgcagtctagatacttggtgccctgtgtcccagctgctccagccatgtctaaaaggggccagagt

SEQ ID NO: 871130 - DNA, 606 bp, Homo sapiens
atggctttgacaaaagtgctaacagtgatatgaacaataaggttcaggctgaggtagtcttagatggaaatgaagaacttgttgagaactggagcaaaggtgactcttgttatgttggagcaaagagactggcagcatattgcctctgccctagagatttgtggaactttgaacttgagagagatgatttagggtgtctggtatctggtggaagaaatttctaagcagcaaagcattcaagatgtgacttgggtgctgttaaaggcattcagttttataagggaagcagagcaaaaaagtttggaaaatttgcaggctgacaatgtgatagaaaagaaaatcccattttctgaggagaaatccaagctggatgcagaaatttgcataagtaatgagaagctgaatgttaatccccaagacaatggcataaatgtctccagggtatttcagaggtcttcaagacagcccytcccatcataggcctagagggctagaaggaaaaaattgtttcttgtgccaggcccagagtccccatgctgtatgcagtctagatacttggtgccctgtgtcccagctgctccagccatgtctaaaaggggccagagt

SEQ ID NO: 871131 - DNA, 569 bp, Homo sapiens
aaatcagaatgtttatatctcttaattaattttttctccaacctgaaatgccctcccttctcatttttgccaaattcaacttctctttcattttcaacaacacaaaaagctctcacgtcataaccttattgttctgtttttttctatacctgtagactagtacaagtagtactcaccgtgtggtatcagtgacttccaattgacaactcaaggactatactatctgtactccaaatcacctggaaaacatttaaaatatatcttccaaattgctccccaccctgcctctcccactttcaagacttgagtcagtaaattagaacatctaargaatctgcagtctttaaaaatattttctggcctggtgtggtggcacacacctgtaatcccagcactttgggaggtggagtcaggtggattgcttgagctcaggagttcgagacgagcctgcacaacatagcaaaacccagtctctacaaaaaatacaaaaagtagctgggcgtggcagcccacacctgtagtcccagctactcgggaggctgaggtaggaggatcacttgagccctgga

SEQ ID NO: 871132 - DNA, 569 bp, Homo sapiens
aaatcagaatgtttatatctcttaattaattttttctccaacctgaaatgccctcccttctcatttttgccaaattcaacttctctttcattttcaacaacacaaaaagctctcacgtcataaccttattgttctgtttttttctatacctgtagactagtacaagtagtactcaccgtgtggtatcagtgacttccaattgacaactcaaggactatactatctgtactccaaatcacctggaaaacatttaaaatatatcttccaaattgctccccaccctgcctctcccactttcaagacttgagtcagtaaattagaacatctaaggaatctgcagtctttaaaaatattttctggcctggtgtggtggcacacacctgtaatcccagcactttgggaggtggagtcaggtggattgcttgagctcargagttcgagacgagcctgcacaacatagcaaaacccagtctctacaaaaaatacaaaaagtagctgggcgtggcagcccacacctgtagtcccagctactcgggaggctgaggtaggaggatcacttgagccctgga

SEQ ID NO: 871133 - DNA, 587 bp, Homo sapiens
gccacgggggccttggcgggctcgtacgcgtacttgcggtagcggccctcgggcccctcgtcggcggccttgcgcttcagcgacagcccggattcggcacccggcgcggccgtggggaagccataggcggtgggcggtgccggcgcgggcaggggcgtgggcgcgggcaggcccggggtcaggtagggggccgggggtgggcctgggggcggcgggagcgcgccatakccgggctgcgctgcgtagccccctgcgggatagttgtacagcggcgctgagggcccgtaccccggaggcggtgggggctgcaggagcgcggccgggggcggcgggggcagcgcggcgcccgtctgcgcgcagtaacccggcgccaggtaccccccgccgtagccggccgcgtactcgggcgccgccgatgggcccccgcacgcattgccggcgtagaggggttcagggaggttcccggctaaaactggggagccccccagggccccggaaccgccgccaccgcccgatttggttcctgggaggccttcgtggagtgaggccaaggggtagggtggctccggccctggccagggctcggg

SEQ ID NO: 871134 - DNA, 599 bp, Homo sapiens
aacccagtgccacttctactctgtgtgtgtgtgtgtgtgtgtgtgtgtgtgtgtgtgtgtgtgtgtgtgttggggagggggttgcagtggagggagagtccctagaaaagaattctctaagggtgcttacttccccacatatgtgcaaagaatgagactataactagactgaccttgagaatatctcaagtaaaaaaatgaattaactgctttcatctgccttaacaacctctgtttattcctgttttctttaattaccatcggggttattgtctgatagaacatcttcaagctttgtagcttatactttgagattgtgggcaaataactgcaggtcctaagaattccaagctaagaaatcctagcytaagaactttggctaattttattattcacatagagaccaagacaggatttctctgggtatctgtggcagttgagaaagaaaaactaacaacctccaacaggtgcattttattattggtagagacatcagaacagcagaactatcaatacagtgcaacagttatttatttattactgcattggcttagcacaggtcccagcaaaagtagatgctcaaacaatctttgtcaagc

SEQ ID NO: 871135 - DNA, 585 bp, Homo sapiens
ccttctgctgtgaggaatgtggatatccaagctgagacagtgaatccttgtgttgcacttgagggaaatgaggccgagaagaggcagagttacttgtcctaagcacatagtcagctttgactgaggcgggagcaaagcacagtacattccttactgccaattcagtgtcctgtccccttgttacattggcttgctgaaaagtagaccagtcagcacattcttcaccctgcttatatgttgctgtgtaacaaatcaactcaaactttgtagcataaaatatgaacaaacaccttttattgktatctcttctagttttgcgggttactgggatcagtgaagtggtccttactcagggtctctcgtgcagttgccgttaaatgatggctgaggctggggtcatctcaaaggctttcctattcccatgtgtgatggtggatgctgcctgtcgctggaaactcagcaggggctgctggccagaacacctgctgacagccttccaaggtgacctgggtttcttcacagcttggtggctggattccaagggcaaatgtgcccatgcacacccttttatgacctagccttgga

SEQ ID NO: 871136 - DNA, 584 bp, Homo sapiens
gtttcgatctcctgacctcgtgatccacccgcctcagcctcccaaagtgctagtattacaggcgtgagccaccgcgcctggccttttttttttttttttttttttttttttgagatggtatcttgctctgccacccaagctggagtgcagtggtgtgatctcagctcactgcaacctctgcatcccgggttcaagtgattctcttgcctcagcctccccagtagctgggattacaggcacccaccaccatgcctggctaattgtttgtatttttagtagagacagggtttcaccatgttagccaggctggtctcgaactcctgacctcaggtgatctgcctgcctcggcctcccaaagtgctggcattgcaggcatgarccaccacacctggccccttatgacttttttgtttccttatgaatgtctatgcataagacactgtctggaacattaaatcatcttgaaagtgcatgtctgtgggatcatatctggactctcagttaacagaaaacttgtaaataatttacgatttatctttttaaaaagttagagcagattcatatttatccctacaatgacttat

SEQ ID NO: 871137 - DNA, 623 bp, Homo sapiens
caaggacctggagtctctccttttgtgttagtgtgggatgtatcagaataatggtcctcgcagcaggctggtgcttccagtggcatttttctcaggctaatgttaaagttaatttgcattccctgatcccacccagactcttctttccagggkcagtgaggtggaagggggagtgggttgaagctgtcaagaagctctgtagacttgtccttgtataagtggtcttcacatttttcttttactgtcatactttctaaaagaattttgaaaacctatatgcatttgcacatttttaagttgacatctataatatttcatcattaagcagctgcaaatcatgtaatttatggtacattgcccatattaatttttaaaattaaactgacatatgattattgtaaatgtatccagtgggatgtaaatattctacacctcaattcccaccatagtcttatgaagtactgtatgtatgcaaatctatgttagctgacaaacatttaacattgttgcttgctcttcttaaatttcgactttcatttcattccacatactgtattttaacctagtatatcattttaacctattttaaagaaacttattactcaatatcttttccgcagcaa

SEQ ID NO: 871138 - DNA, 623 bp, Homo sapiens
caaggacctggagtctctccttttgtgttagtgtgggatgtatcagaataatggtcctcgcagcaggctggtgcttccagtggcatttttctcaggctaatgttaaagttaatttgcattccctgatcccacccagactcttctttccagggtcagtgaggtggaagggggagtgggttgaagctgtcaagaagctytgtagacttgtccttgtataagtggtcttcacatttttcttttactgtcatactttctaaaagaattttgaaaacctatatgcatttgcacatttttaagttgacatctataatatttcatcattaagcagctgcaaatcatgtaatttatggtacattgcccatattaatttttaaaattaaactgacatatgattattgtaaatgtatccagtgggatgtaaatattctacacctcaattcccaccatagtcttatgaagtactgtatgtatgcaaatctatgttagctgacaaacatttaacattgttgcttgctcttcttaaatttcgactttcatttcattccacatactgtattttaacctagtatatcattttaacctattttaaagaaacttattactcaatatcttttccgcagcaa

SEQ ID NO: 871139 - DNA, 630 bp, Homo sapiens
aatttccaaaagctacacttgcctttggttacatctttttagcaatacagtggtggagtcttccacttaattccttaaaaaaagttaacattgtgtgttcttagcatcacaagttctgagtgacaagcagcattaaagggcatttatttgatgtctgaatttcctctgcaacatstaacaaggctcacctctgtttgaacaaagcatctcattccctcctcggaaagtgggggctgtaagattgagtctctggttactaggcgaaaaatgtcagtattagattggcaaggtaggtgttggcccagccaagtcacatggaatcagcatctggacatgtgacatactttagttactaggattagtgttgaaaaatttattttgtctttccctcatctgttgagcgtgttagccactaaaatataggaatgtaaacttccaacagagttttctattccaccctttgcattcttcccccaaggggaaagagtctaccttggactggcaggattccaaaagacagagcttttccaaaagacattatcgagccgttattgatgattagcaatgataataagctaatgtttctttatacactgtcaggcactgtgttaagcatttttaaggcattct

SEQ ID NO: 871140 - DNA, 554 bp, Homo sapiens
gttttcttctattcattttttccctcctgaaaaaatgtttcttttgctacacactgaatttaactcttacctgctacaattctttactagccttctcaattattagtgatttcagaaattttaggagtgaagacagataggagcaccatgctgaaatcacccgacaaaagctgacagttactctgaagctactagcatgctgttcatgtaagtggatgcagctgactcgccttttctgttttggaatcaaaggcgattaagtatcaaacttgaaatctagaggaaaggcaattttaaaagttaatacaacctttcagtcttttgcaaatggttttcctttccctaccattctcaggaaaaaaaagaaaagaaaaaagaaagaaagaaaaactcaaaagwagcctatctcttttagaaactctagaagctgttgaaaagtggatcatattttggagaactggattctaatcacctctacgtatatttgggagaagacagtgcctatgttggaaatattcataaaaactttcaaggtgatacaagatctggataag

SEQ ID NO: 871141 - DNA, 655 bp, Homo sapiens
agcaagagcactactgacaagcagggcgttggattgcacataccaagtgggtatgggaagtggggaagaggttggtagagaacagagaagggaaacttctgggtagggaaagtgtggggtccaggtgctaaagccagtcccattttaccctgtcctgatgacatcaggcttctaatgcagccattcaggacttctggttgcagcttcaacrtgtaaaggaaccctacttggagattatcttgacatgaggcagagcaggaaattgaagggggagagagggctcttattgtgccttttggcaccaggcctgacgagtcagaggtagaggtagtaattttgtgggaaaagcttaagataagtgttatgtgttttcacatgtcttttacaaattttcagttcaggcgtgtgaaaagttgggttggcccttacatttactgtggccttgaattccatagtcttgttcggttacatctcactggaaaattaattcaatgtctttttcttctatcataacacagattttcttaggcacaatgtattcattcacttatttatttattttaacaaataattattgctatgtgccggcatttcctgggtgctggggatgtggtagtgattatagctgcctttgtaaagtttacaatcccatggg

SEQ ID NO: 871142 - DNA, 659 bp, Homo sapiens
tgatcaaacaggaatattatgaaaaaatataaagaatgataaaatgatgaattatttttagatttgtttttaaatttttactatttacatgattttataggtataatccaactacacaatacaaacaaatatccttgatttcttatgtatggaaatcagtgggctacacggtgaggttggatgaatttagcaaaacatagagctagctattttacatgctaccatctgaaaaggaaatatgtcaagttattctccaagcataagttgaagcctaagcctttttttaatgccttaatctcatgccttctttgatgcatagtttataaggcaagcaatctggcaaactttaactgtattaagagttttcaagaaagataaaatttacactgagtaaaactatacattgcaaagcccagaactatatcatgagttatttatgttgaagtttcgatcatgtcttcmatatgcataacacatgcatatcctcttaaagcgttcctctggttaaagaatgttcttccatgtttttcagtcacacagacctttattcactatacctagagtgctggaaaatgaatatacctttctttatgcttttctgaggtaaaacagataacattatcaccaggttttcatttagaaaatattcaaacatatca

SEQ ID NO: 871143 - DNA, 577 bp, Homo sapiens
cttttcctgaatcctaggacttttgaatctacattatgttacccatttatgaaggaaaaatgagatttgccattcttaatttgaaatatatatccagttcttaaaacagacaaattggtcaggtctacactgtaaattaaagtggaaaattatttcaactgtctgtgtaattaaagttcaatcaagcaacgaaagaagtatttttaccttgaataatcctgcaattaccttaattatccatattcttttgcactttctataacaaaaaatatccaaaacaataaattctatatctgattatctttaataaaatgaattaaatatgcttctgtttaaaaaaaaaactatgataatccctttgctgaatatactgaatctgaagaggtagartcacttgtccattggaaacactaaaaaaagtaaagagaaatattcaaaatgcattacaaaatgccaataccacacatgtaacttgttaatacttttttctgtcatgttcacattatgtttctgaacataagatggctttggctcctttaagagcccaattgttagactggaaaaatgtctctgcagc

SEQ ID NO: 871144 - DNA, 605 bp, Homo sapiens
aaatacattcctaagtaaaaacaaaatctcttttggcatgtatgacttagaatctgaataactggttgtttatggaaacatgcaatacataatttaagatagaaaaaaaggagagatgaatgacttagatataggcatattcatgttatggtttattagggaacaaaatctgcctgtcttcatgtttgtatttataattatatcaggcttaacaagcgggagtaaagtkcaacataaacaaaaacataattgctttttttctttccaatatctgaacattaagaccataggaggtttgcagttgcacattgaaataaccacatcatcataaagactccttatttctaactggtaaatgtcagtctgaattagatcctatgctacatggattattagtgtttatgcttctattgctgactaagtacaatactaatatagacaaatggttattaactttgaattagttcagggggtcacttaattgattatgaatataggcaacaagccatagtcatattcacagtatctgttttggtcactaaaagaaatcatagatattttcgtatcaattaatattgccacagataccttaatataccatttat

SEQ ID NO: 871145 - DNA, 605 bp, Homo sapiens
aaatacattcctaagtaaaaacaaaatctcttttggcatgtatgacttagaatctgaataactggttgtttatggaaacatgcaatacataatttaagatagaaaaaaaggagagatgaatgacttagatataggcatattcatgttatggtttattagggaacaaaatctgcctgtcttcatgtttgtatttataattatatcaggcttaacaagcgggagtaaagttcaacataaacaaaaacataattgctttttttctttccaatatctgaacattaagaccatargaggtttgcagttgcacattgaaataaccacatcatcataaagactccttatttctaactggtaaatgtcagtctgaattagatcctatgctacatggattattagtgtttatgcttctattgctgactaagtacaatactaatatagacaaatggttattaactttgaattagttcagggggtcacttaattgattatgaatataggcaacaagccatagtcatattcacagtatctgttttggtcactaaaagaaatcatagatattttcgtatcaattaatattgccacagataccttaatataccatttat

SEQ ID NO: 871146 - DNA, 605 bp, Homo sapiens
aaatacattcctaagtaaaaacaaaatctcttttggcatgtatgacttagaatctgaataactggttgtttatggaaacatgcaatacataatttaagatagaaaaaaaggagagatgaatgacttagatataggcatattcatgttatggtttattagggaacaaaatctgcctgtcttcatgtttgtatttataattatatcaggcttaacaagcgggagtaaagttcaacataaacaaaaacataattgctttttttctttccaatatctgaacattaagaccatagkaggtttgcagttgcacattgaaataaccacatcatcataaagactccttatttctaactggtaaatgtcagtctgaattagatcctatgctacatggattattagtgtttatgcttctattgctgactaagtacaatactaatatagacaaatggttattaactttgaattagttcagggggtcacttaattgattatgaatataggcaacaagccatagtcatattcacagtatctgttttggtcactaaaagaaatcatagatattttcgtatcaattaatattgccacagataccttaatataccatttat

SEQ ID NO: 871147 - DNA, 641 bp, Homo sapiens
aggtggggggaggggagagggatagcattgggagatatacctaatgctagatgacgagttagtgggtgcagcgcaccggcatggcacatgtatacatatgtaactaatctgcacattgtgcacatgtatcctaaaacttaaagtataataataataaataaaataaaataaaataaaawaataaatgctcattatcactaatcagagaaatgcaaatcaaaaccacaatgagatatcatcttacaccagttagaatggcttttgttaaacagtcagaaatataacagatgttgttaaggctctggagaaaatggaacacttgtacactgttggtggggatctaacttagttcaaccaccatggagagcagtctggaaatttctcaaagaactaagagttgaactgccattcaacccagcaattccattactgggtatatacataaagaaaaaaaattgtatcaaagagtcatatccacttgtatgttcattgcagcaccattcccaatagcaaagacatggagttaactcaggtgtccatcaacagtgggttgcataaagaaaatgtggtacatatacaccatgggacactatgcagccataaaaaaatgaaattatgtcctttgcagcaacatggatgca

SEQ ID NO: 871148 - DNA, 451 bp, Homo sapiens
attcattatagacccaggccatgcagccagaatgaatagattataattccagctcattattgattatctataaaactgtggacaattcaaatgaatggtctggcacaataccttgtctttttttttctttttttttttttctgagatrgagtcttgctctgtcgtccaggctggagtgcggtggtgcaatcttggctccttgcaacctttgcctcccgggttcaagcaattcttctgcctcagcctccccagtagctgggattacaggcacctgccacaacacccagctaatttttgtatttttagtagagatggggtttcaccatgttggccaggctggtcttgaactcttgacatcatgatccacctgcctcggcctcccaaagtgctgggattacaggcatgagccatggcgtctggccctatccattatttttataattaaaaattg

SEQ ID NO: 871149 - DNA, 576 bp, Homo sapiens
tatccttggaagtgagggtaggaagtgaaaggaggcaattcacgtgtttttccttgaagctatattttaagactgtgtagaacatcttgaagtttggaaacatatttgcttttgcaggtgatggcattttctaaaatattattacaaaatatatgaaaattgcattgtagttgtcacaataaatcaaacatcttacataataatgtaataaaatctagtttaacattataattttattcaattatttcatccacattgagatatttactaagtcatgaagtttatatagatcatgagatgtaaaagatctgctattactaatttgatttaaaaatcccatgttcattataataggtagtgctgcttaaaatgtctgtgtaatgatmtacactattatctgcagcacaatgatgttttcacagctgctgtttgcctggaatcagccatgtcctttgtgaaaccttgcctcggcatgggctcttattcctaacatttgccttttaaaatctctatagagatctaacagaaaattcacaagaacagcatcttttgtgcttctctttctctgaaaatacc

SEQ ID NO: 871150 - DNA, 635 bp, Homo sapiens
acaaatgtgcactacaacaaactccagaaagggtctgggggtgaagtttggatataaatttctcccttctgtaaagaggacccaagagtaaatacttgtactgttttccccttggagtatcaagaaggcaagggtgtaaagtgggaatataaatgctagcatgccttatctagatcytaaagggctaatgatccctgggattttgttgcctaagtgatgaggaagaggctgtggttcctttgggctataggaggcctggaagttagtcaggagtgacagccagcaggacaggtaatcaccaagaggtcccctgggagggcgaccagattaaatgccaaggaaagggcgtggcctgtctatggaaacataaaggtgtggctacaattgccatggcaatgacctcagaagagtcagtggctatgcactagagtaatgccatcttcattcacacctctagaatggaagccaagtcagctcttcagaaaatgacagacatgtcccccagtgtcatgatgctgtgtaagtctcccctggaccaacaagctcccctggaagtaaaggcgaaggaaaaatgggaggggcagcaatacttaaactgagtaagttttaaaccagggtagacttggtttagatta

SEQ ID NO: 871151 - DNA, 497 bp, Homo sapiens
gcaaggcatatatatatattctttggagatggagtctcgctccgttgcccaggctgaagtgcaatggtacgatcttgcctcactgcaacctccacctcccaggttaaaacgattctcctgcctcagcctcccgagtagctgggattacaggcacctaccaccacatccagctgatttttgtatttttagtagagacggggtttcaccatgttggccaggctggtctcaaactcctgacctcgtgatccacccaccctggcctcccaaagtgctggtattacaggcgtgagccaccacggttagttggcatatatatattttttaaatgytgtaagtgattctaaagtatagccagggttaaaaaccactggcttaatcatgcagctaacatatagctcacatgaggaaaggcttttcattaggagagaattatatgtaattatccccgctcaccccatctctttgatttctgccttaccagttcaccatatccacct

SEQ ID NO: 871152 - DNA, 599 bp, Homo sapiens
ttggggaggtcattatgggaatttatttcattttgaaagaatacaggcaaatgcttgtatttagggtgtgaactaattggcgatatgcatatagtggcataatttaacatctctttctattcagtcagtgattcttagcctgttttggatcacagacacctttgaggagttatagaaagccatagaccctttcctccccacttcacccctgacccaaatcacataggcactaaaggttgtattcagttccaggggattcactgacctagttttagaatccttattctagatacatggctcccgactgkacaatgtttcccttgggggacatttagaatgtctgaaatatttttggtcttcacaactgggaaggcactactcacatcaaatagacagttgtcaaagacatctgctaaatagcctatcatgagttgtgctgcccccttaaccaaatacgtttttgttcaaagtctctgaagtgccaaggttgaaaacacctgctacgaatctgcactgtccaatacagtagccaggagctacacagagctcttgaaattgtggctagactgaattgagatgtactagaagtacaaaataca

SEQ ID NO: 871153 - DNA, 516 bp, Homo sapiens
caaaatttctgactttcagcacttgtgggagaagagattcaagtggccccaggataatcctccaaagaaaattgtctgtgtgagctgttagggacaaaggtcatttgagagctcagaaatggtaaacagcatctgaggatgtttatatggagcacagacggtgtccattacagtttggaatccccacttagacatttactatttttacatttgcctttgaggtatttctaaacttcttggtctcaaatgcctatatccttttagttaattgggaggattaaatgaggtgggtgctagttctcttccccttcggggatggagtgaaagaaaagatagaatgyggagatcaaatgtattttagaggttaaattgatgaaattgaagaaagtcacagctgctagtctgtatttctaaggttatcagcttaaaagtgaataggttaagttttgctgaagctattgtagcaaatattttccacaataatgaatcaaataattttccagcaacatgagacta

SEQ ID NO: 871154 - DNA, 634 bp, Homo sapiens
tgtggaaagagtaactacagataaagaagaactatgatataaagctttttgtttggcttcatggaagcatttcttcctcttccattattactttgttgatgacagtaaagagaaacattgtcagtaggtccatttttaggctcacrtttaatgagcatttactctatggcgggcactgtgttaggtattttacatgtaccatattgctttaatctttctcaacccctattaggaaacagctattaatattattttccagagtgaaaaagaggctggataactcttctaagcagttaggtaggctagttgagctgggatataaatggaaattgggttgatgccattttcaagcaggcagacctattttggcgttctgtttgcacccaaggactattttaaaagtttggcacacatcaggacatttgccaatccaaattcttctaagatgcacttgccttgttgtaattagggaagggcctctgacactcacatctgaaatacagggaagacatttagatgaaacttttaaaaagactacatttgttctctcaactctgtcttgttttagatctgcttgtgcctccagtcatgttgtaaatgaaatcaattattacccctgctttctgattttcca

SEQ ID NO: 871155 - DNA, 659 bp, Homo sapiens
cttccacaatggttgaactaatttaaactcccaccaacaatataaaagcattcctatttctccacatcctctctagcacctgttgttttctgactttttaatgtttgccattctaactagcatgagatggtatctcattgtggttttgttttgcatttctctgatgaccagtgatgatgagcattttttttcatatgtctgttgactgcaaaaatgtcttcttttaagaagtgtctgttcataatctttgcccactttttgatggggttgtttgtttttctcttgtaaatttgtttaagttctttgtagattctggatattagccctttgtcagatgggtagattgcaaaaattttctcccattctgtaggctgcctggtcactctratgatagtttctttttctgtgcagaagctctttagtttaattagatcccatttgtctgttttggcttttgttgccgttgctttttgtgttttagtcatgaagtctttgcccatgcctatgtccagaatggcattgcttaggttttcttctagggtttttatggtgttaggtcttacatttaagtctttaatccatcttgagttaatttttgtatatggtgtaaagaagggatccagtttcagctttctacatatggctagccagttttccca

SEQ ID NO: 871156 - DNA, 659 bp, Homo sapiens
cttccacaatggttgaactaatttaaactcccaccaacaatataaaagcattcctatttctccacatcctctctagcacctgttgttttctgactttttaatgtttgccattctaactagcatgagatggtatctcattgtggttttgttttgcatttctctgatgaccagtgatgatgagcattttttttcatatgtctgttgactgcaaaaatgtcttcttttaagaagtgtctgttcataatctttgcccactttttgatggggttgtttgtttttctcttgtaaatttgtttaagttctttgtagattctggatattagccctttgtcagatgggtagattgcaaaaattttctcccattctgtaggctgcctggtcactctgatgatagtttctttttctgtgcagaagctctttagtttaattagatcccatttgtctgttttggcttttgytgccgttgctttttgtgttttagtcatgaagtctttgcccatgcctatgtccagaatggcattgcttaggttttcttctagggtttttatggtgttaggtcttacatttaagtctttaatccatcttgagttaatttttgtatatggtgtaaagaagggatccagtttcagctttctacatatggctagccagttttccca

SEQ ID NO: 871157 - DNA, 659 bp, Homo sapiens
cttccacaatggttgaactaatttaaactcccaccaacaatataaaagcattcctatttctccacatcctctctagcacctgttgttttctgactttttaatgtttgccattctaactagcatgagatggtatctcattgtggttttgttttgcatttctctgatgaccagtgatgatgagcattttttttcatatgtctgttgactgcaaaaatgtcttcttttaagaagtgtctgttcataatctttgcccactttttgatggggttgtttgtttttctcttgtaaatttgtttaagttctttgtagattctggatattagccctttgtcagatgggtagattgcaaaaattttctcccattctgtaggctgcctggtcactctgatgatagtttctttttctgtgcagaagctctttagtttaattagatcccatttgtctgttttggcttttgttgccrttgctttttgtgttttagtcatgaagtctttgcccatgcctatgtccagaatggcattgcttaggttttcttctagggtttttatggtgttaggtcttacatttaagtctttaatccatcttgagttaatttttgtatatggtgtaaagaagggatccagtttcagctttctacatatggctagccagttttccca

SEQ ID NO: 871158 - DNA, 659 bp, Homo sapiens
cttccacaatggttgaactaatttaaactcccaccaacaatataaaagcattcctatttctccacatcctctctagcacctgttgttttctgactttttaatgtttgccattctaactagcatgagatggtatctcattgtggttttgttttgcatttctctgatgaccagtgatgatgagcattttttttcatatgtctgttgactgcaaaaatgtcttcttttaagaagtgtctgttcataatctttgcccactttttgatggggttgtttgtttttctcttgtaaatttgtttaagttctttgtagattctggatattagccctttgtcagatgggtagattgcaaaaattttctcccattctgtaggctgcctggtcactctgatgatagtttctttttctgtgcagaagctctttagtttaattagatcccatttgtctgttttggcttttgttgccgttgctttttgtgttttagtcatgaagtctttgcccatgcctatgtccrgaatggcattgcttaggttttcttctagggtttttatggtgttaggtcttacatttaagtctttaatccatcttgagttaatttttgtatatggtgtaaagaagggatccagtttcagctttctacatatggctagccagttttccca

SEQ ID NO: 871159 - DNA, 593 bp, Homo sapiens
gctgcacttactccatagaggaagggggtttgtgctacagggtgaccagatggaaggcaaaataataataataataataataataataataataataataataaaggagtgactcagattcttcttcacccctctagaaagacaaaattgcaacaaatttagatctaaatggcttttatgcagaatttatgattcaggacagactccattctacaaaatagaatgagacctctcacggggcagtggcagaacagtgaggtctgtaaggggggagcaaggaaacagaataatagaaaaaaaagctgattggttaacatcaaattacttttttttttttttgtaagggttaaagcmgagagaactttcttaatacttggactcaggtagactggagtctcctgttttcaagaaaactattctgtttggggatccatctacttccttaaagcttcagtttgatcatgtggcatttagcatgagtgacttcattttggtttggtctgttggggcctagtgcaggagctcagtcccaagcaatggcctcctcctgtgccccaattaaacaaattttgccaaataactgtatttcttct

SEQ ID NO: 871160 - DNA, 647 bp, Homo sapiens
gggcttgtgagaagcccagcatacatataggcccactcagttttaggatctccctctcctgctaacccttcttcaatatgtatgccccagtccaaggactgggcttctattctggttcatggtttcctctctagtctctgctgtgagactgaagtctctttttggagactgaagcctttggatgggtcaaggatatactttgccgggatacaccctattcccttgggtgaggacatgagtcaatccagaatcttccttcccccataaagtatctgcctatttgaaaacaaaggtaacaggcaatgatrtgacccatactggcctggtaggacaagaattgactccacctccttgtacattctgagaggcaacaccagcagcctcctttgtgacccattccttcatccagggtcagctctttcagccctggactccctcaactctggcatacacttcccaggctgccccatggccctgggacgcttcatagctatgactagtgcccattctccagtacagtagcagatacagaccctcccccatcctgctaccacccctgactttccactcaaggcgacgtccccttcagatcactgggagaattctgcagagcgggcaccccctgctctgcctgccactagcaaagg

SEQ ID NO: 871161 - DNA, 608 bp, Homo sapiens
agtattaatctccaatgtaatggtattagaatgtggggatttggaaggtgattagttttagataaggtctggagggtggaggccccaagatggaattagtacccttacaagaagaggaagaggctgggttcagtggctcacacctgaaatctcakcactttgtgaggtcaaggtgggagaatcacttgaggccaggggttctaaaccagcctgggcaacatagtgagaccctatctctaaaaaaataaaaaataaaaaaaaaaagaaaaagaggaagagaccagagcctcttcaccacatgaagatacagcaagaagatggccatctataagccagaaagtgaaccatcaccagacatcaaatctgtcagtgccttgattttggacttcccagcctccagaactatgctgttgaagctacccagtttatagtatttgattagagcaacttgaactaagacagaccttcccatgaaaacatagtcaataaatactgttaaaggttgtggaaccctaattcattacagcaaaaagcacatggcaaggctttgaaccttgtctattgtctgtctccatctatctgtctgtttatctatgtatctatttacc

SEQ ID NO: 871162 - DNA, 653 bp, Homo sapiens
aagaaaatgtaattcattgtcattttagtttacattactgtacattacattacattgttaattacttctcattggctagcaagattgaacatctgtgtatgtttgtatgcataagattttctcatctgtcaattgcttacatgtgtccattatatatttgaaaggcttttcatattctctggatacaattctcttttttggtaaaaaaaatatattttttagtatattacttgtattttaatgttgattatactatgttttattatatgagttataaatgataatgtagccatatttatcaaatatttcctttattattcatacaaattttgtcttgtgaaataaattattctccatcccaaggyttgggatgctaggttttgtttgcataaattttattcaggattatatacatatatgagtatataaatattatatatacatatatgtacaaatacacatacatttcatacatattatatatcaatgaagacatgtaatgtactatgcatataaaatattgacaaatattacaataattatataattggtcatttaactcaaataactaaaaaactgacaaattattcccaactctttgtgttgctgttgtcttacatataaaacggagattatttatcttaatgtgtttt

SEQ ID NO: 871163 - DNA, 467 bp, Homo sapiens
agcaatcacaccagatttcaatgcctgcagataaccctcagaatggcatcttctggtgctttccccaggaagcaaataactcagattaacaccaaactttttagcataatacttcctagtgtctgacagactgtgaaactggtaccagtgcaggtcacctttgggtcatgatagcccatgtcattaggaatcttaaagcaaaatgaggctccrctagttctggacctcacgaggtgtgcgtcagcaaaactctccatgtctcagacccttctctgtctcagtaccttggtcaccactgtccctacgtaccttttcctcagtaattcagaactcaaagcttggattatctgagacactttccctcctccttccttctggtcccacttgtgtgtgtgtgtgtgtgtgtgtggagcggggtgcacaataactgctggcaagtggggaaggcccaagaatgctcagcaaga

SEQ ID NO: 871164 - DNA, 654 bp, Homo sapiens
agaaataaataaagtgtattcaaatcgcaaaagaggaagtcacattatctttgtttgcagatgacatgatcctatatctagaaaatcccatcatctcagcccaaaagtttctcaagctgataagcaacttcagcaatgtctcaggatttaaaatcaatgtgcaaaaattgctagcattttacaccaacaataggcaaacacagagccaaatcatgaataaacacattcacaattgctacaaaaagaataaaatacctaggaatacagctaacaagggaagttaaggacctctttaaagagaattacaaaccactgctcaaagaaatcagagaggacacagatggaaaaacattccatgytcatggataagtagaatcaatatgtgaaaatggccatactgcccaaagtaatttacagattcagtgctattcccattaaactaccattgacattcttcacagaattagaaaaaaactattttcaaattcatatggaatcaaaaaagagcccaaatagccaagaaaatcctaagcaaaaagaagaaacctgggggcatcatgctacctgacttcaaactacactacaaggctacaataacaagaacagcatgacactggtacaagaacagacacagaccaatggaacagaacagag

SEQ ID NO: 871165 - DNA, 686 bp, Homo sapiens
taactatctggtatataataaaatctatatagtaaatgagatatttggaaaaggttaaattagattagtatcacattccaaatatattctaaatgaattgaagggttaagtgtaagaaaatgaaaccataaaagaagcaaaagtaaataccccatgtttattgcagtcttattcacaatagccaagatatggaatcgatgtgtctatcaatggacgagtggatgaagaaaatatggtacatatacacaatggaatatcagctattgaaaaaagcctgaaatcctgtcatttgcagcaacatgcatgaaactggaggacattatgttaagtgaaataagccaggcacactaagacaagtatcacttgttcttactcatatgcgggagctaaaaagagctgatctcttggaggtagaaagtagaatggtggttaccagaggcttgaaagtgtgtatgtgtsgggggtagggagtgtagacaggttagttaatgggtataaaaatacagttagatagaagaaataagttctggtgttcattagcacagtaggatgactacacttaacaataatttattatacatttcaaaatagctggaagatttggaatgttcccaacacaaataaatgataaatgtttaaggtgatggatatctcaattaccctgatttgatcattatatgttgtat

SEQ ID NO: 871166 - DNA, 659 bp, Homo sapiens
ctttgaatagccattgcttttattatgcttgtaaggagccaatgttgtgaattagcaacatttcttggagtcctcactagggtgctatatttcttataatgggagtgtgcttccaataccctgccacttataactattcaattttatgtactagacttttaaataaagcattcctgaaatctagttctaccttactcctctggcccttgttggtccatactaactaggtcatgatactctttgaggtggagtcccttttctcagttattggcaccagaacgtttgggctggttcgtgttataggcctagggagtggaatgggagaaggagggaggtggggcasatcctataggaggataatgtgctatattgtgggcaaaaggcctctgcattttttctaagcaagtggcagtgggtggggggttgcaattattagcatagagggatgggtagtttctgcaagctaagagttgaaaggattctgaatatataaaattttcagaggcatatacccagatgtgtctacccaaagtgccaaggtacaatttatttttcagccaggcaagagccagcacttttgcatcacagaactgccttggttgggcatttaaccttctctggagttaaggcactctattaagtactggtcctcatcctcg

SEQ ID NO: 871167 - DNA, 659 bp, Homo sapiens
ctttgaatagccattgcttttattatgcttgtaaggagccaatgttgtgaattagcaacatttcttggagtcctcactagggtgctatatttcttataatgggagtgtgcttccaataccctgccacttataactattcaattttatgtactagacttttaaataaagcattcctgaaatctagttctaccttactcctctggcccttgttggtccatactaactaggtcatgatactctttgaggtggagtcccttttctcagttattggcaccagaacgtttgggctggttcgtgttataggcctagggagtggaatgggagaaggagggaggtggggcacatcctakaggaggataatgtgctatattgtgggcaaaaggcctctgcattttttctaagcaagtggcagtgggtggggggttgcaattattagcatagagggatgggtagtttctgcaagctaagagttgaaaggattctgaatatataaaattttcagaggcatatacccagatgtgtctacccaaagtgccaaggtacaatttatttttcagccaggcaagagccagcacttttgcatcacagaactgccttggttgggcatttaaccttctctggagttaaggcactctattaagtactggtcctcatcctcg

SEQ ID NO: 871168 - DNA, 659 bp, Homo sapiens
ctttgaatagccattgcttttattatgcttgtaaggagccaatgttgtgaattagcaacatttcttggagtcctcactagggtgctatatttcttataatgggagtgtgcttccaataccctgccacttataactattcaattttatgtactagacttttaaataaagcattcctgaaatctagttctaccttactcctctggcccttgttggtccatactaactaggtcatgatactctttgaggtggagtcccttttctcagttattggcaccagaacgtttgggctggttcgtgttataggcctagggagtggaatgggagaaggagggaggtggggcacatcctataggaggataatgtgctatattgtgggcaaaaggcctctgcattttttctaagcaagtggcagtgggtggggggttgcaattattagcatagagggatgggtagtttctgcaagctaagagttgaaaggattctgaatatakaaaattttcagaggcatatacccagatgtgtctacccaaagtgccaaggtacaatttatttttcagccaggcaagagccagcacttttgcatcacagaactgccttggttgggcatttaaccttctctggagttaaggcactctattaagtactggtcctcatcctcg

SEQ ID NO: 871169 - DNA, 651 bp, Homo sapiens
catattaccaaaaggcgtaacagtggtaccaagggagttaacaattgcaaaggtgcattattgttctcttattacttggttgggctactaatttttttttttttttttttttttgagatggagtctcactctgtcacycaggctggagtgcagtggtgcaatctcggctcactgcaagctcagcctccagggttcatgccattctcctgcctcagcctcccaagtagctggggctacaggcacccgccaccacgcccggctaattgtttgtatttttagtagagacggggtttcaccgtgttagccaggatggtctcaatctcctgacctcgtgatctgccctccttggcctcccaaagtgctgggattacaggcatgagccaccacgcctggcctgggctactgatttttaaaaattagaatgtattaaagtaaacacacaaaatgaaatgtagccatataaaatatagactttaagttttgaccaatgtatgcacctttctagtcatcaacatgatcaatgttgtgtttactgtacattcagtaagatatttccatcacaataaaagtttttctcatatctatttgccatcagttccccaacctcttgcctcaggaaaccagcagtctgctttttgtcaccattgattc

SEQ ID NO: 871170 - DNA, 651 bp, Homo sapiens
catattaccaaaaggcgtaacagtggtaccaagggagttaacaattgcaaaggtgcattattgttctcttattacttggttgggctactaatttttttttttttttttttttttgagatggagtctcactctgtcacccaggctggagtgcagtggtgcaatctcggctcactgcaagctcagcctccagggttcatgccattctcctgcctcagcctcccaagtagctggggctacaggcacccgccaccaygcccggctaattgtttgtatttttagtagagacggggtttcaccgtgttagccaggatggtctcaatctcctgacctcgtgatctgccctccttggcctcccaaagtgctgggattacaggcatgagccaccacgcctggcctgggctactgatttttaaaaattagaatgtattaaagtaaacacacaaaatgaaatgtagccatataaaatatagactttaagttttgaccaatgtatgcacctttctagtcatcaacatgatcaatgttgtgtttactgtacattcagtaagatatttccatcacaataaaagtttttctcatatctatttgccatcagttccccaacctcttgcctcaggaaaccagcagtctgctttttgtcaccattgattc

SEQ ID NO: 871171 - DNA, 651 bp, Homo sapiens
catattaccaaaaggcgtaacagtggtaccaagggagttaacaattgcaaaggtgcattattgttctcttattacttggttgggctactaatttttttttttttttttttttttgagatggagtctcactctgtcacccaggctggagtgcagtggtgcaatctcggctcactgcaagctcagcctccagggttcatgccattctcctgcctcagcctcccaagtagctggggctacaggcacccgccaccacgcccggctaattgtttgtatttttagtagagacggggtttcaccgtgttagccaggatggtctcaatctcctgacctcgtgatctgccctccttggcctcccaaagtgctgggattacaggcatgagccaccacgccyggcctgggctactgatttttaaaaattagaatgtattaaagtaaacacacaaaatgaaatgtagccatataaaatatagactttaagttttgaccaatgtatgcacctttctagtcatcaacatgatcaatgttgtgtttactgtacattcagtaagatatttccatcacaataaaagtttttctcatatctatttgccatcagttccccaacctcttgcctcaggaaaccagcagtctgctttttgtcaccattgattc

SEQ ID NO: 871172 - DNA, 579 bp, Homo sapiens
catggataggaagaatcaatattgtgaaaatggccacactgcccaaagtaatttatagattcaatgctatccccatcaagcaatctttgactttctacactgaattagaaaaaaaactactttaaatttcatatggaaccaaaaaagagcccgtatagccaagacaatcctaagcaaaaagaatagagctggaggcatcatgctacctgacttcaaactatactacaagcctacagtaaycaaaacagcatggtactggtaccaaaactgatatatagacaaatggaacagaacggagacctcagaaataataccacacatctacaaccatctgatctttgacaaacctgaaacaaacaagcaatggggaaaggattccctatttaaaaaatattgttgggaaaactggctagccatatgcagaaaactgaaactggaccccttcattacaccttatacaaaaattaactcaagatggattaaagacttataagtaagacctaaaaccataaaagccctagaagaaaacctaggcaataccatgtaggacgtaggcatgggcaaagccttcatgactaa

SEQ ID NO: 871173 - DNA, 579 bp, Homo sapiens
catggataggaagaatcaatattgtgaaaatggccacactgcccaaagtaatttatagattcaatgctatccccatcaagcaatctttgactttctacactgaattagaaaaaaaactactttaaatttcatatggaaccaaaaaagagcccgtatagccaagacaatcctaagcaaaaagaatagagctggaggcatcatgctacctgacttcaaactatactacaagcctacagtaatcaaaacagcatggtactggtaccaaaactgatatatagacaaatggaacagaayggagacctcagaaataataccacacatctacaaccatctgatctttgacaaacctgaaacaaacaagcaatggggaaaggattccctatttaaaaaatattgttgggaaaactggctagccatatgcagaaaactgaaactggaccccttcattacaccttatacaaaaattaactcaagatggattaaagacttataagtaagacctaaaaccataaaagccctagaagaaaacctaggcaataccatgtaggacgtaggcatgggcaaagccttcatgactaa

SEQ ID NO: 871174 - DNA, 557 bp, Homo sapiens
tatatacccagtaatgggattgctgggtcaaatggtatatctagttttagatccttgaggaattgccacactgtcttccacaatggttgaactagaggacacaagcaaatggaaaaacatttcatgctcatgataggaagattcaatatcatgaaaatgctatttccatcaagctaccattgactttcttcacagaataggaaaaactactttaaatttcagatggaaccaaaaaagagcccatatggtcaagacaatcctaagcaaaaagaacaaagctggaggcatgaygctacctaacttcaaattatactacaaggttacagtaaccaaaacagcatagtactggtaccaaaagagatatatagaccaatagaacagaacagaggcctcagaaataacatcacacatctacaacctctgatctttgacaaacctgacaaaaacaagcaatggggaaagaattccctatttaataaaagatatcacttcttaagctattagctaaagacctggaatcaatagaaagtggtgtctgagtaaagataaggggttgt

SEQ ID NO: 871175 - DNA, 616 bp, Homo sapiens
cctattccctgcctggcgatagcacgagtaaaaataagttaatgaaacattaaagggaaacaagcagctgctcttgccttttaaaaaaacagtgattaaaagcatggactggaaattcaggtacttcgcatctccatttccttctacctcagcttwaacataagcaaaaacaaaacttgaatttaggttaatgccatgactttttgaaatttcagggaactcttgaaaaagcagaactgattctgaaaaaaacaatatcattaccttactaaacaataaaatgttccccatagtctacacacagtccctagcttgtagttaatatatttatataaaatgtgtttactatttctcctcctatgggtaatgaaaagcaaaatcttctttctaatgcagtggtatctaacattgctttttaattttatattttaatttttgtgggtacacagtaggtatatatatttatgggatgtatgagatattttgattcagggatgcaatgcataaaaatcacatcatgtaaaatagggtatctgtcctctcatttatccctgtgttacaagcaatccaactatactcttttagctattttaaaatgtataattaaattattatt

SEQ ID NO: 871176 - DNA, 616 bp, Homo sapiens
cctattccctgcctggcgatagcacgagtaaaaataagttaatgaaacattaaagggaaacaagcagctgctcttgccttttaaaaaaacagtgattaaaagcatggactggaaattcaggtacttcgcatctccatttccttctacctcagcttaaacataagcaaaaacaaaacttgaatttaggttaatgccatgactttttgaaatttcagggaactcttgaaaaagcagaactgattctgaaaaaaacaatatcattaccttrctaaacaataaaatgttccccatagtctacacacagtccctagcttgtagttaatatatttatataaaatgtgtttactatttctcctcctatgggtaatgaaaagcaaaatcttctttctaatgcagtggtatctaacattgctttttaattttatattttaatttttgtgggtacacagtaggtatatatatttatgggatgtatgagatattttgattcagggatgcaatgcataaaaatcacatcatgtaaaatagggtatctgtcctctcatttatccctgtgttacaagcaatccaactatactcttttagctattttaaaatgtataattaaattattatt

SEQ ID NO: 871177 - DNA, 660 bp, Homo sapiens
agcaatagcaccatcaatgaaaaggcattgagaagacatttttttttaaaacaaagttcactttattacattaattttacacactaaaataatatgaaatgcagacttgtttaaattctcttgctgattctcttgaagacaatgtcacccaatgtcatggtctgaaagccagaaaagaaattatgaagtgttcatctgatgttgtattgtaaaaaacaaaattaagcataaaaaacaaaattaagcttaaaaaacagcaccaaatatgttggcatatgaaacaattcaaaaattcrtctggtttcctgtaggaccggaggaaaggttggcaatgttttccaaaatcctatgccaagtctttgtcacttctcctcctcacctggaaagtcctcctgcctttgactgaattcttttctacatcaatgactgttatagcaagaccatccaaaccagcccaatctaatttctcaaaatttcattgagtacctactatgcaccaaatacatgttgagcaccaaggatacatgtacatggacacaactaggcacacagcctggaaggcagtgggtagtgcataattgtcctcctatagctgtgaagcatataaaaacagtggatgcatcagcttttgagtttttaaggatgtttcctccacccctg

SEQ ID NO: 871178 - DNA, 548 bp, Homo sapiens
gtaccttggggttgtctttcacccccaggaagaggtcatccttcagttttttctggcagtgttcacatgtgcagtcaaagtagtactgcttcttcagctgcctcttgcgttcttcactaacgttgaggaagtcgatataggacacagtcagctcctctccttctgagatcttgcctagggcccgcagttcaattctgaagcagggtgaaaggaaaaggtgaatcgaagccaggcctactggaatgggatccgtgctctccaaggcttcatggagttgggtctcaaagacaatgactttcactgacactcagaaactccsattgaccccacaaaaggagaaatgtgacctaaaggatgattttctgggtaattctactctattccttagaaccgtctgatccattccattcagttaactactgtggaatcagctcaaatagactcctagtagagagctgggcttggtcataaaaccagacagaatgtccatgcccgtaagcctccctttactttttagctactgattgtctgtaacaaaggaagggaga

SEQ ID NO: 871179 - DNA, 610 bp, Homo sapiens
taaatgcttagtgctgaatgcaactgagattttcatttgtgactgcagtaaatagactgtggtgccaggaaatatgtattgatacatccaagaatttcaacaatcactaaaatttggaaactatctagtatacagattagtatactacagacctgtgggccaaatctggccagctgtgggattttttgtaaataaaattttattggaatacagccacactcattcattacctattatttacagctgcttacttgccacaatggcagtgcttgctgagtcctgatctactctaaagtcttcaatttcaccataataaaaagtagactcagaaagaatacctatattttccaaagttacagagtagagattctgttagtactcaggcccttatattcttaatgcaatattgttttcacagagacacaaattttttaacaatatttgaaagttattatttgaaaaaaagaagyctcaggaaatattttcattttgttccctatttttaaacctgctctaaactagttttctggttgagaaaaaattaacagatttatgtcaaggttattaatcaaaaaaaaattttttttttgctctttctccaagctttatt

SEQ ID NO: 871180 - DNA, 671 bp, Homo sapiens
attcagctgggaatccaggtgttccagggctttatttgcttcatgggtttttattactgatttaatttggaacttgttattggtctgttcaggttttcactttcttttagttaatttttgagaggttgtgtgtttccaggaacttatccaattcctttagattttctcattcgtggacaaagaggtgttcatattagtctttgaggatattttgcatttctgtgagattggttatactgctatctttcacaacacccacagactcaaagtaaaggaatggagaaagatctaccaagcaaaccaaacacaaaaaaatagaaggagtcactattgttatattagataaaacagactttaaaccaacaacaatcagtaagaacaaagaaaggcattayataatgataaagtgttcaattcaagaagaagacttaactatccaaaatatatacatgcctaacagtgtagcacccagattcctaaaacaagtttttcttgacctatgaaaatatttagacagcacacaataatagtgagggactttaataattgagacagaaaactaacaaagaaattgtgaacttaaacttgtcagttgacaaattggacctaatagacatctacagaataccacacctaacaaccacagagtatacagacttctcatctgcaca

SEQ ID NO: 871181 - DNA, 661 bp, Homo sapiens
tgatgacaaaactatttgcataaacaagctagcacaaaaaatactaattaaaaactccacaccttaacttagtccccatgctttttaaatattttgttgtttttatttatcttattgtactgaatatatctgaaaaagttgtagttatttttgattggttaattgtttagtctttcaacttagggtagagtagtttacacagcagagttacagtgttataatagtctgtgtttttcaataagttttgtaacttcagttgattacttattgctcattaatatccttttctttctgattaaattactccttttagcacttcttgttggatgggtttagtgttaatgaaatcctcagcttttgtttgggaaaattttatttctccttcatgtgtgaagaatatttttgccagatatactattatagggtgaaagtcattttttttcagaackttaaatatgtcatgccactctcttctggtctgtaacatttccactgagaagtctgctgccagatgaactggagctgagagctacttccactcaataaaacctttcagtcattctccaagcccatgtgtgattggattcttccagtacaccaaggcaagaaaccctggaatacagaaagccctctgtccttgagataaggcagggggtctaat

SEQ ID NO: 871182 - DNA, 647 bp, Homo sapiens
cagattcaggaaatacagagaataccacaaagatactcctcgagaagagcaactccaaggcacataattgtcagattcaccaaagttgaaatgaaggaaaaaatgttaagggcagccagagagaaaggtcgggttaccctcaaagggaagcccatcagactaacagcggatctctcggcagaaactctacaagccagaagagagagggggccaatattcaacattcttaaagaaaagaattttcaacccagaatttcatatccagccaaaataagcttcataagtgaaggagaaataaaatactttacagacaagcaaatgctgagagattttgttaccaccaggcctgccctaaaagagttcctgaaggaagcactaaacatggaaggaacaactggtaccagccactgcaaaatcatgccaacatgtaaagaccatcgagactaggaakaaactgcatcaactaacgagcaaaataaccagctaacatcatcatgacaggatcaaattcatacataacaatactaactttaaatgtaaatggactaaatgctccgattaaaagacacagactggcaaattggataaagagtcaagacccatcagtgtgctgtattcaggaaacccatctcatgtgtagagacaca

SEQ ID NO: 871183 - DNA, 700 bp, Homo sapiens
catgaaaaactaattatggaaagggaagaccattaccagccagtacaaaaacacaatgaagtacacagacaagttacacaataaagcaaccacataaacaagtctgccaaataaccagctaacatcatgatgacaggatcaaatccaaacatatcaatactaactttaaatgtaaatgggctaaatgccccaattaaaaaacacagagtggcaagctggaaaaagaaccaagacaaatttatatgctgtcttcaagaggcttatctcacatgcaatgacacacataggctcaatataaaaggatggagaaaaatttaccaagtaaatggacaacagaaaaaagcaaggaatgcaatcctagtttctgacaaaacagactttaaaccaataaatatcataaaagacaaagaagggcattatataatgctaaagagttcaacccaacaagaagaacttactatcataaatatatatgcacccaacacacgagcactcagattcataaaagcaagttcttagagaccttckaagatacttagactcccacacactaataatgggagacttttacaccccactggcaatattagacaggtcatcaagacaaaaaattaacaaagctattcaggacttgaacttggcagtagatcaaatggacattatagaaatatatagaactttccaccccaaaacaagagaa

SEQ ID NO: 871184 - DNA, 566 bp, Homo sapiens
gactgtgatgtgaagggctgctctgaaggtctctgacatgccctggagacattttcccaattgtcttggtcattatcactgggctccttgtcacttatgcaaatttctgcagcaggcttgaattttccccagaaaatgggtttttcttttctatcatatcttcaggctgcaaattttccagttttaccctctgtttcctcttgaacactttcgrcttagaaatttcttctttcacatatcttaaattgtctctctctagttcaaagttccacagatttctagggcaggggcaatatgctgccagtctctttgttaaagcataacaagagtcatctttgctctagttcccaacaagcttctcatctccatctgagaccacctcagcttccaggaaattccaaattctcccacgtcttcctgtcttctgagccctctaagtctctagggagttccaaactttccctcattttcctgtcttcttctgagccctccaaatggttccaacctctgcctgttacccagttacaaagtcatttccacattttcaggtatctttacagcagcac

SEQ ID NO: 871185 - DNA, 681 bp, Homo sapiens
taacattggatctttctgcagaaaccctacaagacagaagagaatgagggccaatattcaacattcttaaaaaaaaaaaagaattttcaatccagaatttcatatccagccaaactaagcttcataagtgaaggagaaataaaatcctttacagacaagcaaatgctgagatattttgtcatcaccaggcctgccttacaagggcttttaaaaggaagcactaaatatggaaaagaaaatctggtaccaaccactgcaaaaacataccaaattgtaaagaccatcaacactatgaagaaactggatcaactaatgggcaaaataaccaactaacatcataatgacaggatcaaattcacacataacagtattaaccttaagtataaacgggctaaatgcccccagttaaaagacacagactggcatattggataaaaagtcaagatccatcactgtgctstatttacaagacccatctcacctgcaaagacacacatcagctcaaaataaagggatggaggaatatttaccaagcaaatggaaagcaaaaaaaagcaggggttgcaatcctagtcgctgataaaatagactttaaaccaacaaagatcaaaagagataaagaagggtattacaagatggtagaggtatcaatgcaacaagaagagctatctatcctaaata

SEQ ID NO: 871186 - DNA, 671 bp, Homo sapiens
ttcaaattactattataataagaaatatttgttgttcaacaacattttattttaacatggagtttgtactttgactgatattttttaaaaaattctctctaaagacataaaactttcatttcagtagagtgagatttttgataacatgttatttgtagatgacacagaacaaatggaaagccatttggctaagaaatgtatactaactctgatttatagaaaatatctattttcatatccagatagaagaattcagtagttatgaaagcaatcttataatttaaattcatccatcagtcatgggatcgtttgatgtggttattttgctggactatctaaatatctgagstgtataaagaattaacatagattctctggaaaacgtgcttttgtgggaatagctgtagcactcactgagaacatctgagtcaataaatagtgtattccaatttgttacttaaaatatgatggcaagaagagactgcctacacaataaatggaaggaaggaaaaagctgtaaaaataagattcataagtttatgttccgagcttaataaatgttaccaccagtattttatcaacaacttgataatctaatgacatatttcttaggagccaatttggttttaaagcattataacttacagcaccaccctttgacactagcaagg

SEQ ID NO: 871187 - DNA, 680 bp, Homo sapiens
taaaacagactcaaatacacatagactttctttctggacttgacggagcatattaaatggcatgggtcatgtggaaaggacccaagagtaaccactagatgctgagagtggcctttagccaataactagcaagaaaattaggacctcaattacataaccacaaagaaatgagttcttccaacaacctgagtcttcttaaaataagctctattaatccagccacccartgaagacacagctacccaacaccttaattttaaccatgtgagactctgagaagaggacttgtacaataaacagtatttgtctggcttttattatcagattctgagaggtaggtagcctctaaatctttgggttttgccaagtgatagaagggtcttcgttattcatggtgacccttcggctcacacttgaaagtttatactgacaaggtgactcatggtgggctcctagattagtttgtgttaaggagatgactcaggatgggatctggtcaagctagaaagaacaaccatgtgataagagggttggggctttgagcctgactgcttgggatgggagaagggctgaagactgagtcatatggccaatgactcaatcatgcataggtaatgaagtcatacttaaaattctggacaccagcactgggcgagcttccctgattggctgtaatctga

SEQ ID NO: 871188 - DNA, 680 bp, Homo sapiens
taaaacagactcaaatacacatagactttctttctggacttgacggagcatattaaatggcatgggtcatgtggaaaggacccaagagtaaccactagatgctgagagtggcctttagccaataactagcaagaaaattaggacctcaattacataaccacaaagaaatgagttcttccaacaacctgagtcttcttaaaataagctctattaatccagccacccaatgaagacacagctacccaacaccttaattttaaccatgtgagactctgagaagaggacttgtacaataaacagtatttgtctggcttttattatcagattctgagaggtaggtagcctctaaatctttgggttttgccaagtgatagaagggtcttcgttattcatggtgacccttcggctcacacttgaaagtttatactgacaaggtgactcatggtgggctcctagattagtttgkgttaaggagatgactcaggatgggatctggtcaagctagaaagaacaaccatgtgataagagggttggggctttgagcctgactgcttgggatgggagaagggctgaagactgagtcatatggccaatgactcaatcatgcataggtaatgaagtcatacttaaaattctggacaccagcactgggcgagcttccctgattggctgtaatctga

SEQ ID NO: 871189 - DNA, 609 bp, Homo sapiens
caactgaacattcctgtcttagtattggctgctgtaacccaatagcataacttgatggcttacacaacaagcatctatttatcacagttctggagtctaagatcaagatcaagatgccagcagattcggtgtctgatgagggtccgcttcatggcttgtaggtgaccagcttctctctgtattctcatgtggcagaaagaggatgagtgagctctctgggggttccttttataacggtgctgatcccattcatgagggctacaccctcatgacctaagcacctttcaaaggccccacctcctaatatcataccttgagggggttagcatttcagcatttaaattctatggggacacaaacattcaggtcatcgcaactactgagaaatttaatacctgtctttatcctcttggcaaatacatgtaaaagatgcttatttgggaaagacagaagcatcttyggcatgttggcaagggtaggggtggaggagagaagctgcagagctgagatgagaaacagggaagaaccttgaaggcagcaggacattttcactaaagagcgaactgcaatgcatttgcctcagtgccaggaaccccagagaagaaaaga

SEQ ID NO: 871190 - DNA, 653 bp, Homo sapiens
caaaagcagaagctgccaggccagttaagggctgcaccccacactggtccagggtcattttagttctattctactagtagaagcaatcttagggcccacacaagttcaaaggagtggggagactagaaaagcggggtgactagattccaactcttaatagggatgtcaaggcaacattgcaggggaacatatagaatgggaggtagtgttgtggctgccattggaaaataaaatctatcacctcagaggtactgaaatcagtaataataatgacagaactagtgtagaagggagagagagtgaaccaggttctaaaataatgattaggcaaaaaactcagagctccacagatgtctgtaactaggaagaatagatggcaataagcttgctgacatgagcaagacaagggcttaagggaggagaacgggacaatggtgggcatgtcttaygaaaaggtgctttcacccccatccctgttttagctagtcctcaatttggtacagtgtgtgaggcccacctccagagttgagtcccacctcctgcttcagcttgagaacacctctttcctttagccctcgcatatgtggatattttctttcctcctgtgttacttggcctgggagcgaggcaggtagcctttttgttcctctctg

SEQ ID NO: 871191 - DNA, 650 bp, Homo sapiens
cctgggcaacaaaagcaaaactccatctcaaaaaaaagatttaaaaaaatcttgcttactgaatgcatggacaaaagtaagtgatagaaatggcacctctgactcctcctaccttttctcctatttctggtcccaaatggaaaactcctgtgatgtgagcttattccccctctttaccctccaagattcattaaggcctttgtagtgttaatgtttttttctgtatactggcttagctatgtggggcccatctttcctatcscagaaagaccatgatggatggatcttgaagcatcgtcccactgggatgtgatcagggcttacacatttcataaacactgcttttcttctcacatccctctgaatgaaagcaggaccaagtctctttgatggcttctctccccaaccccctaagattatggcatcaaaataaagacaagtatgttctattgtatttttgctcctgagatgtattgagttgctgcaatttacacaaggctaaattgaatgagaatcttcactattttattattggttcaactacctacttgatgtgacttgagaggcagtattttcttttcttttttttttgtagacggagtctagctttatcgcccaggctggagtgcagtagcacgatctcggctcac

SEQ ID NO: 871192 - DNA, 619 bp, Homo sapiens
tgctgaatcacatggtagttccatttagttttttgaggaactgccagttatccacaatggctaaactaatttacattctcaccaacagagtgcatgggttccctttcctctacatccttgacaaaaacatcttcctctttttgatcacagccattctaacaagtgtgaggtgatatctcattatgttttcaatttgcatttcccttatgattagtgattttgagcattttttaatatacctgttgggcttttgtatgtattcttctgagaaatgtctattcagctcctttgcccatttttaatcaggttacttattttcttgctattgagctgagttccttatttattttagatattaacccctgagatgtgtggcttgmaaatattttctctcattgtgtaggttttctcttcactccattgactgtttctttggatatgcagaagctttttagtttaatgtaattccatttgtctgttttcacttttgttgcctgtgctttgggggccatatccaaaacgtcattgcccagaccaatgtcatggagttttcttctgtgatttcttctaccagttttacagtttcaggtcttacatttaagtcttaacccattttgag

SEQ ID NO: 871193 - DNA, 612 bp, Homo sapiens
gattccatgatttattctctaactatgctaagtcaaagattctgcagttagctttctccccaaaactcaggctgagtttgagcaggtcctaaggtgttgatccctttagctcacctagttaatgggacatagagtacttttggcttgactactccatgctttttcctatcaaagcagaccaagacaatcaaaaccttgatttttaaagcttacctgaaatagagtcttatgtaacaaaaggatggctaagtgtacaaggcagttgaacatgttagtggtagatgatgcatttaactgtcaaaatgctactcacagcaaaggggaaccaattcccaggagaaggtctggagaagaggagggagaagagcytgaggcttggtgtgcacattctgagaccagtcctggctctgccactcagtgggtgcctgtttgcaagtcatttcttgacctctgtgagtcttgtcttgtctttttttccaattataaaatagaataataattcctgcctcccagttttgtcatgaagattaaataaaataatgtttgtgaaaacaagtagacagaataggtgctcaatcaacaataacattagctggacacgatggctcacgc

SEQ ID NO: 871194 - DNA, 608 bp, Homo sapiens
acaggaacacttagacatgcaacccactcccaccctccgtcttgggggaggaaagcacactactgtcccaaagaactaatactgaaccagtgctgccttgtggagagaggcatggccaaggcgttcagagacctgggcctggtcccaccgctgcccacagcactcagcctctgagcacagcctggggtcatctgtgtgccctctggccaaggctgayggtagttctctgagtaattgagagtcattgcctgtctgtgcagtattgtgaaaacaagtcaccttttaactttaaaactactttaaaaaactttaaagttttaaaaaaacttctttaaaaactactcatgagatgacagtttctctgaccctcagaggaaggctgggctgcgcatacgtgaggaatttttacatgaacatcccaggacttgctgttcgcaggtgataaactgcacctccccaggactcccgctgcactcacatgcagctccctggacttctggtatctgacccggcccatttctgtgtttcaggggagaatttggcttgcgggagtactcagaagttaagacggtgacagtaaagatcccccagaagaactcctaagaagg

SEQ ID NO: 871195 - DNA, 673 bp, Homo sapiens
tgactacagatggataatcagttagagagagcaaatacctgcttaatttctccccgtaaagggtagccttcaactagaatacttgggaaggagacaaaagggttatctcatgaccacttttgagcaatgaaaaagtgggtggctgcttctctctctgaattggaaatttctcccaccactcttcattctgtttcgctcaaggcccacagctggatgttattgcacaattatgcaatactagtttgattcacaagagtcttgatgttgtttcctttacaacactatccattatttcctgccatggtacccartggagccattgtctctgaccataaatcctaagctttgacccttttacgatggcagtgcctaattatgatgataaataataatcattactatgacctatggaacacttttttacctgttacattatcgctaatgttatagcagccctaaagaaaagtattgttttctccattttgagtatttttaacctgtattcaaatcctcttctctcacgtctacaacctctttgtgatgaaggaaggatcaacgcttggttttcatttacttagggagaaatggaagttaatttgtattgccttagatttttctctgtagcaagtgttgattttactgattttatgtaagcagaaaaaaatgtccatgt

SEQ ID NO: 871196 - DNA, 621 bp, Homo sapiens
ggtgtctgagagatatatccagaaatatgctatgtccagtgttaggcttctaccagctttcatgcacggttgagtaggatgttttttcaagtttatttctgtttgtttttttttttttttttttgcagccaccaaagttctccctttgcattttttttcctaatctaaactttctgggagtgaccatgcttttttctttcagatggagactattttacctttacaagacatgaacccattggagtgtgtggacagatcatcccagtgagtgtatttcctcgcacctcgtatttattttcatttgacccagttytcttaaagacacataaaacatggtcctcagcgatgtgtgttttccattactggaggaaaaaaaactgagctcatgttgttgacatatctttaacagcctccctgcaaatgcttatttgaacaggttaatagggtttcagctctgttaccaggagttgaattctcaagtcatggaattctcatgattaaaataagcaaagcacagtgtattaataacctgcccttggttattatgtccattctgcttatggaaaattaatgctttgttatagttgtttattttttagaactgtgactcaccatccttcc

SEQ ID NO: 871197 - DNA, 644 bp, Homo sapiens
tctcctaactaggccttgctggaacctctcacaaggccatttcagtcaaagctttgaagaaataactaattcttccaaagagttcccattataaatgaaacaggtacttattagccatatgcaaataaacacattgccatgaattcacaagtagttttaaaattgtggagaaattaggcagagagagagagagaaataagcttcaaattctgtttacaaaagggtagtctactcaatacacttcaagtgcacttaaaggttacaaataagtctaaagaaaaaaattctccagaccctaaaaaacaaaaagaatcagtaatggttcaaaccaaaaaagtcataaaaaattatttcattccttcattagtctggtccatgcaatcaactcctgctgtgctttatattgggttagcaatctttacaaacacatcagctatttaattagaagcctggtagttttctctctaatccagtggcgcaatctccaaatttaccagaaaccttcaytcaagagtccttttcatgaactcctcctaagaagcaagccctggactgtagctgattgtaaatcactttttgagaagaatcaatgcaaaacaacaattgtagatgacaaaagtattaggacagccataattaaagac

SEQ ID NO: 871198 - DNA, 621 bp, Homo sapiens
aaccaaaaaaagccaaggaccagagagattcacagccaaattctaccagagatacaaagaggagctggtagcatttttttctaaaactattccaaacaattcaaaaagagggactcctccctaactcattttataaagccagcattatcctggtatcgaaacctgtcagagacacaacaacaacaacaacaacaacaacaacaacaaaaacttcaggccaatatccctgttgaacacctgtgcaaaaatccacaataaaatactggcaaactgaatccagcagcacatcaaaaaactcatccatcgtgatcaagttggcttcatccttgggatgcaagtttggtttamcatatgcaaatcaatcatacaattcatcacataaacagaaccaaagacaaaaaccacatgattatctgaatagatgcagaaaaggcctttgataaaattcaacatcccttcatgttaaaaactctcaagaaactaggtattgatgggacatatcttgaaataataagttctatttatgacaaacccatagccaatatcatattgaataggcaaaagctggaagcattccatttgaaaactggtacaagacaaggatgccctctctcaccactc

SEQ ID NO: 871199 - DNA, 621 bp, Homo sapiens
aaccaaaaaaagccaaggaccagagagattcacagccaaattctaccagagatacaaagaggagctggtagcatttttttctaaaactattccaaacaattcaaaaagagggactcctccctaactcattttataaagccagcattatcctggtatcgaaacctgtcagagacacaacaacaacaacaacaacaacaacaacaacaaaaacttcaggccaatatccctgttgaacacctgtgcaaaaatccacaataaaatactggcaaactgaatccagcagcacatcaaaaaactcatccatcgtgatcaagttggcttcatccttgggatgcaagtttggtttaccatawgcaaatcaatcatacaattcatcacataaacagaaccaaagacaaaaaccacatgattatctgaatagatgcagaaaaggcctttgataaaattcaacatcccttcatgttaaaaactctcaagaaactaggtattgatgggacatatcttgaaataataagttctatttatgacaaacccatagccaatatcatattgaataggcaaaagctggaagcattccatttgaaaactggtacaagacaaggatgccctctctcaccactc

SEQ ID NO: 871200 - DNA, 621 bp, Homo sapiens
aaccaaaaaaagccaaggaccagagagattcacagccaaattctaccagagatacaaagaggagctggtagcatttttttctaaaactattccaaacaattcaaaaagagggactcctccctaactcattttataaagccagcattatcctggtatcgaaacctgtcagagacacaacaacaacaacaacaacaacaacaacaacaaaaacttcaggccaatatccctgttgaacacctgtgcaaaaatccacaataaaatactggcaaactgaatccagcagcacatcaaaaaactcatccatcgtgatcaagttggcttcatccttgggatgcaagtttggtttaccatatgcaaatcaatcatrcaattcatcacataaacagaaccaaagacaaaaaccacatgattatctgaatagatgcagaaaaggcctttgataaaattcaacatcccttcatgttaaaaactctcaagaaactaggtattgatgggacatatcttgaaataataagttctatttatgacaaacccatagccaatatcatattgaataggcaaaagctggaagcattccatttgaaaactggtacaagacaaggatgccctctctcaccactc

SEQ ID NO: 871201 - DNA, 655 bp, Homo sapiens
atgtgaaatctttagcagcaagctaagaagtgtcagattaacttgcccaaagttaaaacatggtacggggcaggagcaagacttatgtctttcagatgcaaagggttgcactcctaattgttatatttcctaccttctattatagttttatcatagtgaaaatccaacataaggtatcggtgaagtagatgatggtggaggcctgagtgaggaaggggaatgtgcaaatcttgggaaytgtaaattgctactgccaggacttacactgaatattctttttaaaatatttctttcctatatgcctcaaagaataaatctttctcactgttttttttcctgtcttagcagcgctaacaacactgcaactagttagcacattacctgccagtttaattgccatcattatcaccagcagatatccttcccgccctatttcacagcactgctatatataagtcaagtggagcccatctgtgatctgtgcagagtagggcctccaaatgttggtgtgatagattcaagagctcattatgagtggcctatatctcaaagtggcagcacgctttctccagcacaattattttcccattaggtgccgtgataagacataaataaaatataaggaagtaataaaggccaacatttattgagtact

SEQ ID NO: 871202 - DNA, 576 bp, Homo sapiens
ctgccatctatgtaagatgagacttgctccttcttgccttctgccatgattgtcaggcctccccagccatgtggaactgtaagtccattaaacctctttcttttgtaaatracccagtcttaggtatgcctttatccacagtgtgaaaaaagactaatatagtaaattggtaccagtagagtggggtgctgctgaaaagatacccaaaaatgtggaagtgacttttgaattgggtaacaagcagaggttggaacagtttagagggctcagaaaaagacaggaaaatgtgggaaagtttggaactccctagatacttgttgaatggctttgaccaaaatgttcataatgatatggacaatgaaatccaggctgaggttgtctcagatggagatgaggaacttgttgggaactggagcaaaggtgactcttgttatgctttagcaaagagactggtggcattttggcactgcctgagagatttgtggaatttcagactcaagagagatgatttagggtatctggcagaagaagtttctgagcagcaaaacattcaagagatgatttgggtgctgttaa

SEQ ID NO: 871203 - DNA, 576 bp, Homo sapiens
ctgccatctatgtaagatgagacttgctccttcttgccttctgccatgattgtcaggcctccccagccatgtggaactgtaagtccattaaacctctttcttttgtaaataacccagtcttaggtatgcctttatccacagtgtgaaaaaagactaatatagtaaattggtaccagtagagtggggtgctgctgaaaagatacccaaaaatgtggaagtgacttttgaattgggtaacaagcagaggttggaacagtttagagggctcagaaaaagacaggaaaatgtgggaaagtttggaactccctagatacttgttgaatggctttgaccaaaatgttcataatgatatggacaatgaaatccaggctgaggttgtctcagatggagatgaggaacttgttgggaactggagcraaggtgactcttgttatgctttagcaaagagactggtggcattttggcactgcctgagagatttgtggaatttcagactcaagagagatgatttagggtatctggcagaagaagtttctgagcagcaaaacattcaagagatgatttgggtgctgttaa

SEQ ID NO: 871204 - DNA, 682 bp, Homo sapiens
acaacatataatgatcaaatcagggtaattgagatatccatcaccttaaacatttatcatttatttgtgttgggaacattccaaatcttctagctattttgaaatgtataataaattattgttaagtgtagtcatcctactgtgctaatgaacaccagaacttatttcttctatctaactgtatttttatacccattaactaacctgtctacactccctacccccsacacatacacactttcaagcctctggtaaccaccattctactttctacctccaagagatcagctctttttagctcccgcatatgagtaagaacaagtgatacttgtcttactgtgcctggcttatttcacttaacataatgtcctccagtttcatgcatgttgctgcaaatgacaggatttcaggcttttttcaatagctgatattccattgtgtatatgtaccatattttcttcatccactcgtccattgatagacacatcgattccatatcttggctattgtgaataagactgcaataaacatggggtatttacttttgcttcttttatggtttcattttcttacacttaacccttcaattcatttagaatatatttggaatgtgatactaatctaatttaaccttttccaaatatctcatttactatatagattttattatataccagatagt

SEQ ID NO: 871205 - DNA, 625 bp, Homo sapiens
tcaatttgatgggcttaagaaaatgtgcctctttcaaaagaaattatgaccttcctctgacctttattattcatttaacatttattgagcaagtctttcatatcgctcagaaaagaataaggaaatggtgaggcagtagatggagtctattctgaatctcaaaagccttttgatttcatccctcaagggtttgtgaggagacattgatagtccagcggtgaagtacaaagcacaggactttatcacagaagattaaatcactgaaaactatgctgggaatctactgagttctctttttgaatgagaaaaatggtatttttaagggcaaagtagagaagggtaaatttgcttgtattaattatasaattaggacatcaatattaaatagtccaagtgcacttaagataatagtggcgttcacagaaatgaagtgacgagatttcagaagtttggattaccaggccacaaaagcaatagcaaccccctttcttttcttttttagcaaaaagcttttgaccattcatttccatttaagagactcaaacatatggcattacccattgctcggcaggcattttcttaattggaaaacacgtgtgcctttctttcggattcgtcaggatac

SEQ ID NO: 871206 - DNA, 644 bp, Homo sapiens
tcaaaaccatggaggaaggtgaaaggcacatctcacatggtggcaggcagacaagagaagagagtttgcgtggggaaactcctgtttttatataaccatcagatctcgtgagacttattcactatcatgagaacagcccrggaaagtcatgctccaatgatcccattacctcccattggatccctcccacaacacgtgggaattcaagatgagatttgggtgcggacacagccaaaccatatcatcactctagagtggagagtgaaacaatgacagattttatattgttatttctactagtttgacatgagctggataaaaaatattttcataagtaatgaacattcattcattatctcttgaaagtaggaatctatcatccattttctttatatactcagtatctgatacagtgtctggcctatagaaggtacataacaaatgttttttcaactgaagtactacttaatcattatctcagtatcccacgaaaatcgcaaaaacattaaagtccagatggtcagatgacctctgcttgtagaggaagatccacatattgttaatgaaatacgctgtgataaaatatgaatttttccttgtgaattaagtagatgatctcaggtcaaaaacagagtggctactta

SEQ ID NO: 871207 - DNA, 644 bp, Homo sapiens
tcaaaaccatggaggaaggtgaaaggcacatctcacatggtggcaggcagacaagagaagagagtttgcgtggggaaactcctgtttttatataaccatcagatctcgtgagacttattcactatcatgagaacagcccgggaaagtcatgctccaatgatcccattacctcccattggatccctcccacaacacgtgggaattcaagatgagatttgggtgcggacacagccaaaccatatcatcactctagagtggagagtgaaacaatgacagattttatattgttatttctactagtttgacatgagctggataaaaaatattttcataagtaatgaacattcattcattatctcttgaaagtaggaatctatcatccattttctttatatactcagtatctgatacagtgtctggcctatagaaggtacataacaaatgttttttcaactgaagtactacttaatcattatctcagtatcccacraaaatcgcaaaaacattaaagtccagatggtcagatgacctctgcttgtagaggaagatccacatattgttaatgaaatacgctgtgataaaatatgaatttttccttgtgaattaagtagatgatctcaggtcaaaaacagagtggctactta

SEQ ID NO: 871208 - DNA, 706 bp, Homo sapiens
gtatgtgagtctgagtggagcaggccagaaagatctaccctcagtgtttcagtgcttcagagatcacagagtaagtgaaaatgcaggtgaaaaatacaagagatctcctctgccaaattattcaattgtgtacaatttatgcctcttcacatataacaccgtggttgccttcgagcatgtgacaccgtttgtcagagaattaaaagaatttgacaagctcagcaaccttctgaaccagacatttgctgatattgagattcctccaatgtcataaccacataaaatggtgaactactcttggttaaagatttgactgtcaagaaagatagacttcttatatttaccactaaatctaacatagaaaaactagtgcgtgtttcgctttggctattggatggcactttcaagactgtccctactttttaaaatcagtgatatacaattcatgcccctgttggatctggaaattctaaaayttatctacttctttatatattaatgactggaaacaaatgaagtattttataatcacttatttgaagatttggtggactgtgcagaagaaaatggatttcttggaactcccaaaccaaaatgacaggtttggaattaagtgtaatcaaagcttctaaaagtgaacctgaaagagttatcaataaaaattttttttcatgtagtctaacacatgtggcagaaattcagatga

SEQ ID NO: 871209 - DNA, 606 bp, Homo sapiens
atatagtttggacaaatgtccccacccaaatctcatgttgaattgtaatcccctgtgttggaggtggggcctgatgggaggtgattggatcacgggggtggatttctcaggaatgatttagccccagccccttggtgcagttcttgttatagtgagtgagttcttgtgagatctagttgtttaaaagtgtgtatcacttctctccttcctctctcttgctcctgctctggccatgtgatgtgcctgctcccccttcaccttctgtcatgactgtgagtttcctgaggmctccccagaagctaagcagatgccagcatcatgcttcctgtgcagcctgtggaaccatgagccattaaacctcttttctttagaaattacccagtctcagttatttctttatagcaacgtgagaatggactaacacagggtccaaactccttggtttgtcctcagaatgactgtactttatgctctgtgatactaatgatacatggagctggattgggacagacagacatcaaaaggactaaaattaactctgagtcctatataccttcactgtttttcatactatctcaagccaacttttaccttgtaaaccaaaaa

SEQ ID NO: 871210 - DNA, 574 bp, Homo sapiens
tgtcaatattagatcaacgagatagaaaattaacaaggatattcaggacttgaactcaactctggactaaacagacctatctacagaactctccaccccaaatcaacagaatgtacattcatctcagcaccacatagcacttactctaaaatagaccacataattggaagtaaaacactcctcagcaaatgcaaaaggagaagaatcataacaaacatccactcagaccacagtgcaatcaaattagaactcaggattaagaaactcactcaaaactgcatgtctacatggaaactgaacaacctgctcctgaatgactactggtaaatgacaaaattaaggcagaaataacgaagttctttgaaaccagtgagaacaaagatacaacgtwccagaatctccaggacacagctaaagcagtgttcaggggaaatttgtagcactaaatgcccacatcagaaagcaggaaaggtctaaaatcgacacactaacatcacaatttaaagaaccagaaaagcaagaccaaacaaattcaaaagctagcagaagacaagaaatagctaagatcagagca

SEQ ID NO: 871211 - DNA, 670 bp, Homo sapiens
aatctgaattggctacgcaatagaaacactagtcagtttctcatcatgctccacaacatcaaaaatgttttagtaatagcagatctgcaagtatacaaaataaaaagtaaacaagaaagtctatcagccctttgctgaaggttaacacatataaaagtagttaaaacatgttacattatcataactcaaarcttaacagtgataactccaaatgaacatgaaatcaagcaaatactaacaagtttatttattgttgttgaattatgagctgggtggctttattcagaaacacaaatttcaaagtaagatttctgttttacccagtgccaattttaagcaaacaaggaaaagtaaacacatcaaaggacagtgatatgtgattacttcgaatacatcttaattaaaatgcatcatcttgtctttgaagttttcaaatattcttcgaactgttttcaactcagatgctagggtgataatcacattgcagtaaccagtgaatgaacaaaataacaaacttcccaattaacttttagggagtaaataatgtttatcaaatgcatataattggcatgggcacaagaggcataacgtaagagactatggacgataaattcatatacgagcagctgaagaacaagtttttttctacagtgtcactatgtaaagtaca

SEQ ID NO: 871212 - DNA, 670 bp, Homo sapiens
caagatacatgtgcaggatgtgcagatttgttacataggtaaacatgtgccgcggtggtttgctgcacctatcaacccatcacccagatattaaacccagcatgcattagctatttttcctgatgctctccctctccatgccccactcgacaggtctcagtgtgtgttgttcccctctgtgttcatgtgtttggatagttcagctcccatttataagtgagaacaygtggtgtttggttttctgttcctgtgttagtttgctgaggatgatggcttccagctccatccatgtccctgcaaagaacatgatcttattgctttttatggatgcatagtattccttggtgtatatgtaccaatgatagatccagtctatcattgatgggcatttgggttgataccgtgtcattgctattgtgaatagtgctgcaatgaacataagtatgcatatatctttctaatagaatgatttatattcctttgggcatatgcccagtaatgggattgctgggtcaaatggtattcctggttctaggtctttgagaaatcaccacactgtctttcacaatggaactaatttacattcccaccaacagtgtaaaagggttcctatttctctgcaacctcaccagcatctgttgtttcttgactttttaataattgccattct

SEQ ID NO: 871213 - DNA, 614 bp, Homo sapiens
gtttaaacatgcagtggcatttcctatgtaattaaatttctaaatgtacaagcaaactttgtctacatattggcatgtataataaattattaattagaattgtcaaaaaccattaatttgaaatctgtagagcaagtcttcagcctcttgactgtaccatgagattcatttagaaattatttaaacacattaattaaaactaagtttaaatattctaaaattaatactgataaagaaggaaaattaaatcttcaagttatgttctgcttgtatttcatgatggagcagttatttgcacctggaataatttaaatagtaaaggtatatgaataaaacaaactttataattattatgtggtattttggggtggacatttccaattacagagtaaraaagattaaaaaattctctcattactattagaattagacaaagatagaagtctagcttgagctattaaggcacgtttaaaatatatctaaaaaatgaaaatggttaatttttctaaattaacaacattcaaacttttcaatcccatagtttatgaaattggaggagcccttttatatgacaatctcaatttacaacatactttggttaattcatgtatgta

SEQ ID NO: 871214 - DNA, 641 bp, Homo sapiens
gccatttgggaccaactgaacataacctgcttaaaagttccacctaaattattggaatccttttatatctatcttagacaaaatcacctaaattgtatctttcggagttcagagttagtaataatggcaaatatttcatctcctaaaakaaaaactattcaggaaaataaatcttgagcatgaaacttcaattttctgatttcactgaacgcgatatcgaagatgcaaaagcaaataacaattctaaaccttgatggaatatttacttcgattggctttcacccaaaagtggccatggattactgaaaatattttcagagctctctgtataactttaatggatagtggccaagatgcaaccgtggctataattagtttctctgtttatacatttcaggcacggtgaaatgtgttaataaaaaattaaaaagacacaggtttgtggtgattaagtaagattaagtaaattgttagatctatattacatttgtgcataaatattctaatgctaacttgaagaatatatgaaatattcattaattgaatattctaatctgttaaaatgaccttaataatttccattcctcaataattttactttcatttcaaaaaagattaattgaataccttttttttttttc

SEQ ID NO: 871215 - DNA, 593 bp, Homo sapiens
tcttgataccaagacctaaaatatttagtttaaactagcagacttttgtcatcattctataaatatttagtatggaattaagttagtgtatatgcctgagggatgcagtcagcattctgactcagtattaccatcatattacgtactaattasaaacatggcttattgaatttactgcctcttttttctaagcagttctacccccaaagaaattcaaaacacaaacagacatcactcctttttaaaaatataattactgtttttttcttctttgagacaaggtctcattgtgtcacccaggctagagtgcaatggcgccatcttggctcactgaaacgtcagcctcccaggttctagcgattctttctctgcctccggaggagctggagttacaggcatgtgacatcaaactcaggtaatttttgtatttttagtagagatgggtttttgccatgttaaccaggctggtctcaaacccctggactcaagcaatctgcccatctcggcctcccaaagtgctggcatttacagcctgagccaccactcccagactaaaaatatgtttgattttcatcctttcaaaacttattacc

SEQ ID NO: 871216 - DNA, 678 bp, Homo sapiens
ctgtattagttggctcaggctagtgtaacagaataccacaggctggatggcgtaagccatggaaatctatttcctcaccgtcctggaggccgcaagcctgagattgaggtacaggcacggtcaggttctggtagggtctgtcttcctggcttgcagatagctccttttctctctgtcttcacatgacaaaggggataggtagatggagagagagagagagagagagagagagagaactttcttataagaccacaatcttattggataaggatgctgctcttatgacctcatttagccttaattattgcctaaagatcctatacagtcacattgggggttagggctttaacatataaattttgagagaatatagttcagtccagagcaagtacctttgacacaaattgagttacataagcagaagagaggactgaatttttctcttcatsaaaatttaagagctctttgcctataggctttggccacttctgttttctccaagagttgctcatattaaatctagtaaataataaaaatgcgtttcaaatattaaaagatgttctatgttctggcgctaatctctactcttaattatcttaaaaaacgtacaagaaatttactattgattttattaatcgctcatgaacccacttatttacgtatttaacattgataggt

SEQ ID NO: 871217 - DNA, 653 bp, Homo sapiens
ctatgtgcacagcatttctagcatgtggctcttgcaaacaattaattagtaaaagatgcacttaggcagagaattttcaatttgtgtataacaaaacaggtgatcctaacagctctcctacatcgtgggaggggcattatttctgaataagggtctctatgagcagcttgactttgaaagagaccttgtctctctcatgagtgcatctatgactgctaaattttaaataaaaggcccctagatgtagaaagaatgggaggagacactggacacratttctttgtaaattagaaagaactattctgttgtttcttgtttttatcagtttaataatcctgttggggtttttgagaaaacttgagcccaatgtcttatgactccagtgatttttcttggtgttcaccggaggggaatgagaaagacaatgtgtagatttaatcagcatttgatttttcctcaatccctttgcatgtagagaggagcagctggttgtaggtaatcttgctcttgggaattatcaagtaaaagaaagagacaagcagcagcttctacaaaggcagcttttatgaggctgagctagaaaatcaccagagaagcagctgggttcaccattttcatccaagtaattactggaagagatagatggttttcaa

SEQ ID NO: 871218 - DNA, 664 bp, Homo sapiens
gaggcagaggttgcagtaagccaagatcgcgtcattgcactccagcctgggcgacagagcgagactctgtctcaaaaaacaaaaacaaaaacaaaaacaaaaggcctggaagtgcagcactgcataggcatcttcagttaaaggagtttggattatattctatggataagtaggaaccacagaaggctgtgaagtacaactggctgaaatgtgacttgaaaagaatacaaaacagaggctacaggtccagttacaacctgatgaagttgtctaagtgagaaatgaattagatttagatttatatagcaggtattggagagaactggatggattctaatgacatttagaagttagattcaaccggattggtggagtgataaactaagtggattagagtaaacgagatggaatcaagatgactttcagatatttgtggggytgtgtggctgacagggtgattgccttactattttctccacctgttcagattctgtggattctcatgacttatctcccattatggtccccattctagaggccctgatggcaagagacaccattctaattgaagaatactacaagtggcatccaggatattattctattcaatctcaaattgcttgaggattgaatttagagacagactaataaatgaaattaattc

SEQ ID NO: 871219 - DNA, 519 bp, Homo sapiens
agataaagataagttcatattggaaggctagagaatgccaacagttagctttctttgggcttaagtggaatatatcagttaggacccctggtatatacattacataaaagaataacttttaaatctcattaattctggagttaaaaggagaagagtagttgggccagtgtgatggctaaaataatgatagatggagtaagatgtggtgtcaggaatttaactttattttcatccccttaacaggracttgatgggaattgtcatgtgcttcttgagtatgaagtcatttctttccttgctcctgcatgctattcacacagaggccactccagggaaaagcatattctcattcatgaaataaacttctggcctgaatccctgtcttctttttttctcattagatgatggggtctgtcggctggcatttattaggaaattgatgtgatttagagcaatcagaggatgctctgatcaaatttaacttcttccagttccttgaatggcacaagcccttttttg

SEQ ID NO: 871220 - DNA, 643 bp, Homo sapiens
ttactcagtatgatttgcatattattctattctttatcaaatataacaggttaaccattattgtcaaccatgctgtactatatactatatgacaaatggtccttcgagtattcttatagaagaacaataattagtgctttattatgcacaatatagtaaaattcaggttcaaaaataacctaggctttttagataattggtctaaataaaaaaaatcagaggtcaagttgaaaaatagtaaagataactaccaaagcacaggctttaaaataccagcaagaaagagtacagcaartgacacacaaactaccagcagcttagtcctaattggtaaaacagtcacattaatgtgtaaatgtagcactgaagtaaaacatacaaatgccactacattttagcttatccactggggacaggaaaaagtagacaccaaggctattagcatctgaaaagtcaacacgtaatattttatggaggtacttaacgctctttttagttaataaaaatttttaaaagatgggatatgaagaaagtagttccctccaaataaatgggcctgttcagaatggattcaatgactactctcagagtaattacaaataatcaccatggaaatttaagctccagcaactgcagcttaatt

SEQ ID NO: 871221 - DNA, 617 bp, Homo sapiens
tatccagtgtcctgattagaaggacccagagatctaagtaattaatcatatgggcggaaatatggcattctggaaccaaagcatccccccagagcatccatggggctaggagccataaactgtagcatggctgacctaaagccaacaggtggtgatggctgcaaacacctggaagaaaagaggggaaatacagaagatgggggataaaggaacaataaagccaaatgtccagtgatgaggggactgagggaataaatgatggtatattcttatgttgaaaatacctagtagcctgtaagaattatattttaartgtttatattcatggaaagattcataatatattgcctggcaagaaaagcatgatgttttataagagtatgattccacttttaaaaataaaatacatgaatatgtataaatattaatataacattctcaaagatagctctgaaaatacaaaaaaaaagttatctctggggggtggggtgatgaatcatggttgatttaccttctttttcttgtttgtgttctgatttttctacaatgaatatgaattacttgtgtggaaaaacagaagcagaaggtacctcctgagagagaaaattattagtgtt

SEQ ID NO: 871222 - DNA, 520 bp, Homo sapiens
ctttgatctccagactcaaacacctaactgcttattcaatatctccaataggatgtttaatagacatctcagacttggtgttcccaaaacgaaattcctgatctccactcatccccaaccctcacccgcccaaacccgctccttccacagtcttcccctctaaatttatggcatctcctgccctccagtttctcagggcaaaaactttagaatgatcttmagtatctctcatacttcagtctgtctgcaaatcctgtctgttctatcctcaaaatagtatgtatgtattaaatagtatatgtgcatatgtataaaatattatattggagataagtgtgtgtatatctccaaaatctgactattctcaccatttccactgctactcccctgctgccatcatctgttgtctacattctacctgatgccactgtcacccatctttagttgaccgtcaaagcagcagccagagcaatcctgttgagatgtatgtgttagataacattattctgttatcaaaact

SEQ ID NO: 871223 - DNA, 680 bp, Homo sapiens
taagggccactatctcaatagattgatattgcaataggattgagatcttactaccttaatggaggtagtattttttgttgttatgtgttttttttgtttgtttgtttgttttgagatggagtctcgctctgtcgtccaggctggagtgcagtggcacgatcttggctcactgcaacctccacctcctgggttcaagcaattctcctgcttcagcctcctgagtagctggtactatagacatgtaccaccacgcccggctaattttttgtatttattttagtagagatggggtttcrccatgttagccaggatggtctcgatcccctgacctcatgattcgcccaccttagcctcccagagtgctgggattataggcgtgagccactgcacctggccgatagtatgttttaaactgctgtatcattttgaagaaaaaattcttgaatatgtcaggtttaagatttttttgttgtgtctttgctgtgagggcattcttattgtgttgtaccagttagacgtctatgtagttgaaatgtgtattatcaattaggtattatcatgtaagtgtcagttgttttttttgtttgttttttttttgtttttagatctgactgacttttaaactttatgtctttagagttcactgcatccaagaagaggagaaaacactgaacaaagag

SEQ ID NO: 871224 - DNA, 650 bp, Homo sapiens
gaggagtccttctttttctatttttcagaatagtttcagaaggaatggtaccagctcctctttgcacctttggtagaattcgactgtgaatctgtctggtcctgggctttttttggttcattggctattaattactgtctcaattttggaacttgttattggtctattcagggattcaacttcttcctggtttagtcttgggagggtgtatgtgtccaggaatttatccatttcttctagattttstagattattttcatagaggtgtttataatattctctgatggtagtttgtacttctgtggcattagtggtgatatcccccttatcattttttattgtgtctatttgatccttctctcttttcttctttattagtctggctagtggtctatctactttgttaatcttttcaaaaaaccagctcctggattcattgatttttttgaagggtttttcgtgtctctgtctccttcagttctgctctcatcttagttatttcttgtcttctgctagcttttcagtttgtttgctcttgcttctctatttcttttaattgtgatgttagcatgttgattttagatctttcccactttctcctgtgggcatttagtgctataaatttccctctaaacactactttaagctgt

SEQ ID NO: 871225 - DNA, 650 bp, Homo sapiens
gaggagtccttctttttctatttttcagaatagtttcagaaggaatggtaccagctcctctttgcacctttggtagaattcgactgtgaatctgtctggtcctgggctttttttggttcattggctattaattactgtctcaattttggaacttgttattggtctattcagggattcaacttcttcctggtttagtcttgggagggtgtatgtgtccaggaatttatccatttcttctagattttctagattattttcatagaggtgtttataatattctctgatggtagtttgtacttctgtggcattagtggtgatatcccccttatcattttttattgtgtctatttgatccttctctcttttcttctttattagtctggctagtggtctrtctactttgttaatcttttcaaaaaaccagctcctggattcattgatttttttgaagggtttttcgtgtctctgtctccttcagttctgctctcatcttagttatttcttgtcttctgctagcttttcagtttgtttgctcttgcttctctatttcttttaattgtgatgttagcatgttgattttagatctttcccactttctcctgtgggcatttagtgctataaatttccctctaaacactactttaagctgt

SEQ ID NO: 871226 - DNA, 694 bp, Homo sapiens
agacattcagaggtcagatttaagggatgagatgagattctgtgtctgattcttcttgtggctatctccccctgcccctcaaaacctaccgagttgagaactgatcttgatgatgaatttgtttttaatagaccctgagcagraagtgaactgaggtggaaaaaatgttcttattatttgagggagaaccatagccactcttcacctctcagctgggtcagctgatgccagaatgttcttcacgtaccaattaaatgcaatgtgagatatatatatatagctagatatatagatagatatatagatatagagcacctactgcatgccaagcaaatgtgcaggaccaaaaaaggcaataaaaagttttgattttcattggaatttaagtttcatgtcttgctgctgaatgcctttaacatgcctggcacagtttagatgttcaataaatgttgaataaatgaataaataatgcactctgtaaatcaatctcataagccaacccagatagattggtagcagctgcccagagggctgtaccaagaaaaatcctgaggctatatttaagctcagtgggaaatgtgacctggttgattagcagtgtctgtcaagggcagaagaggggtgaaatcaagtgtgtgatatattcgccttttgggggctaaacataagtaatatagctattcttaccctccct

SEQ ID NO: 871227 - DNA, 634 bp, Homo sapiens
acttcatatttgcttttgtttagagagtaatatttaaatgatattacaaataaacaaaatcagattatgtttttcagaatacaaccatttaacaatttacaataatactatacatgtgaagggcataataagggcttatgctgacaagttggacataaaattgagatctgagattttaagtataaaatagtacataacacatcacaggagaaataagcaaagtcatgttgaaatacataaagtgttcagggtcaatataaaaaatttattttaaggagatgcattagcagtagaagtcaaaaataagtattggagagccatgttttggcaaggatcactgaagccctgtccaaargaaatggcttcactgccaatggctcaatcacaccaggtcctctggtaaatctagtcctctcatattcagatgccaacaaatatctggatcgtaagactttcctgccctgcttcagcaaacttcaacatataatttggcttccaatgtagaccagcttaaagggaaagattgtgctggctacgctcctgtaaatatgcatgcacacatgatagctctatttatttttggaaattagcatattgacattctggttttaaattttttgcgatgtataatttg

SEQ ID NO: 871228 - DNA, 624 bp, Homo sapiens
catgggtaggaagaatcaatatcatgaacatggccatactgcccaaggtaatctatagattcaatgccatccccatcaagctaccaatgactttcttcacagaattggaaaaaaactactttaaagttcatatggaaccaaaaaagagcccacatcgccaagtcaatcctaaggcaaaagaacaaagctggaggcatcacgctacctgacttcaaactatgctacaaggctacagtaaccaaaacagcatggcactggtaccaaaacagagatatagatcaatggaacagaacagacccctaagaaataacgccgcatatctacaaatatctgatctttgacaaacctgagaaaaacaagcaatggrgaaaggattccctatttaataaatggtgctgggaaaactggctagccatatgtagaaagctgaaactggatcccttccttacatcctgggcattacttttaaccagactatcccctacttaaacagcaaacattctgaaattatatgcagatatttatctatatgcatcttttacaacttttttcctaaggaagaatcaatatttctcaccagtttctcaaggaagtccatgacccccatattttctctaaaggtag

SEQ ID NO: 871229 - DNA, 699 bp, Homo sapiens
ttcagtcctcattttgtctttttcagcagcatttcacactgttgatcacttacctccttcttaaaatattttcttcctttgctctatgacaccacacttttatagattccttcctaacttctctggtcaccccatttaagactgtattgttggcatccaccactatcagttcatcaaatattagagattctccgttcataattcaaggtccttctttctttcagtatcatccacattcatgacttaatacatttctatataccaatgctttgccaaatttatatctctagccttgatctcccctctggatgccamacccatctaataatccatgattttacagagttttattgagctctttctatgcacctggcactgttctaggcagcaaatagagtagtaataagacaggcaaggtccctgttttcatgggatgtattgcggaaagacataaaatacaccattgtctatataagtagaataatttcaaataattcctacaaagaaaaaaataaaggtgacaaaataaggaatggcaagtgagagcatagttaactttacattgggtggtaagagaaggtccctttgaagaggtgacattaaagctggaggtgcaagtggaagaggagtccttcattataaaaggtgcagaaagagcattccagcaagagcaaaaaaagtttcctttgagatattaac

SEQ ID NO: 871230 - DNA, 654 bp, Homo sapiens
ttgccattctaaattatgtggtttactaagaaaatacttaacattatatgaataatgtataattaattataagtagtttttaaatcttcaagatttatctcatgagtgaaatggttgctttgttcttaaggagaaaattaatttatttcccacgtatccatgtacaataagtagtgctgttataaacatataagaaaatgagctatcatgataagtatacagcatagagttaagtttattagaataccctcatattctataatatacaaaattactaacgtgcagtgaaatcatatagaattctgaagtagtgaattgtttccttactgtttaacacattcttgcagtttgtctttttaaaattaaaatcaggaattctgggcagttagttgtttttgaagacaatgtcatttatctttgctttaagaaggaaacagtctacatttaacraacaattcattttctacatattaattgagcagtgaaaatatggttggcaggtctgaagaacagggaaaaagacagtgtagttagagtgtagttggagggtggcatacaaggagaaaagggataggaagtaagaagttactgaggtccagataatgtagggcctttaaaacacagtaaagatttgcatttcattctatgtatgat

SEQ ID NO: 871231 - DNA, 620 bp, Homo sapiens
catgtgtagcttaatgttcaacaataggcttcagaggaccttatatacatttctggaactttttctctagatagctatctcttttctagtactctgccccatgaattctagctgcctcagctttaatatctcttccactcagggaggccatgatagtctacttgtcttccctttccatgtactttagcctgagaagtgccctcagaaaggtatccagggtaattgcagggctcagttgatttacgtcatttctctcaagatcacagtcatgygctgattattacctagtaccagaaccagatcttgcatatattttacccaattctttaattgtttatgaaaggaagaaaatttgatactaattactccagcatggttagatgtttctttttaagatgatatatagaccacctttttaggaataactctattgagaaaaatgaattacttaatgtgaatgtatattccatgattaaagagaatgcaaacaaaaatgagatacactaaactttttattgtgaataactataatagtggaagtaaaaataaactcttctaggaacagaatttgtcaggaatcagaaattttcaggagttaacctatttttccttgggcttta

SEQ ID NO: 871232 - DNA, 594 bp, Homo sapiens
gtagagatatgttactgtgaagtttaaggagtttctttaaaaagaccttttacccctagcaaactaatgcaggaacagaaaaccaaacaccgcatgttctcatttataagtgggggctgaacaatgagaatacatgaacacagggaggggaacaacacacactggggcctgtaggggtagggggccctgggggagggagagcatcargataaatagctaatgtatgcagggcttaataccttggtgatgggttgataggtgcagcaaaccaccatggtgcatgtttacctatgtagcaaacctgcacaagtatcctggaacttaaaataaaatttaaaaaaactaaaatgtaatacttaggtaagacatacttattacaaataggacttttatgaaaaatggagggtatccttacagctagacgtaggaagggacatagggttattgcttatccccacttgctgtagtgtgagcagaaacaagctgttcacaacctccttaattttccccatcaagcttttgctgacacaattccttccacttggctcatccttccccaattctaaccatctgtgaatgtgcaacccagttgaa

SEQ ID NO: 871233 - DNA, 603 bp, Homo sapiens
ttcatgcttaacatttttgcaaagttgatattttggagctaaaaataaaagcatttgttcacaaaagaatcttgtttgcatgtccctcaagtataaaagttacattttgtggaaaaaagtatgtattctactagttcactaacaccagctagacgttaatatgtagtttaatacattttctgtcttcccactaccttatgaagatactggataacagtttcctggtctttgggataagcaccattttcaagcacatacaattggaaatcagtaggaaatcacctctcttccaattacatagcccatggttattcagtatggctctgagtagcaggaaagaagcccctaaaattaattatctacttgtacyttgaacctgagcaaagaaaactaaagatggcaccacaaggacaggggaaaacaatggaaaactgatgaaaagtaaaagaggtaaataatatgagggcattagatagtaaacaggaatttgaagaaaaaatgcaagggaacaaaaaaattaaggagtgaggtaagaatatcacttttacatcctgaatcttggggttcttcgtggttagatctgggtcagctgtgtgatgttgg

SEQ ID NO: 871234 - DNA, 668 bp, Homo sapiens
aatattgtcatattgggttgatctttgaagagtcacagacattatgttgcaatatgtgacattttcttcccccaaaagacaattttcacccccttaggggtgatagtgcccctttgataatacatggcttgttgcttccattgatgycttttttttttttttttttttaaggcagagtcttgctctgtcatcaggctggaatgcagtggcacaatctcggcttactgcaacctccgcctcccaggttccatcaattctcctgcctcagcctcccgagtagctgggattacaggcatgcaccacaacgcccagctaatttttgtattttaagtagagacagggtttcaccatgttggccaggatggtctcgatctcctgacctcatgatccaccagcctcagcctcccaaagtgctgggattacaggtgtgagccaccgcgcccagcctgatgctaacttttaaagagtcattcaagatcctcagacgctggccttcctttatttgacaacatcatctttcactgtttcaagtgcattcatagtatgccttgtggtgctttgttgtctccattacacaattagggtccactcatcttgtaagatccacctcatctatgatgccttcctctcactatcctttcctgattgttcttcttgctgaactcacc

SEQ ID NO: 871235 - DNA, 648 bp, Homo sapiens
actttgtgtgttttaattggggcatttagtcatttacatttaaggtaactgttgatatgtgtggattttacactgtcattatgacgttagctggttattttgcagacttgtttatgtggttgctttatagtgtcactggtctgtgtaattcagtgtgtttttgtggtgtctggtgctggtctttcctttccatatctagtgattccttcaggagctctggtaaggcaggtctggtggtaataaattccttcagtgtttgcttatctgaaaaggatcttatttctccttggcttatgaagcttagtttggctagatatagaattctggtttggaatttcttttctgtaagaatgttgaatattggcccyaaatctcttctggcttgtagggcttctgctgaaaggtccatttttagtctgattggcttcctttgtagttgatctgacctttctctctagctgtctttagcattttttctttcatttcaatctttaaaaatatgatgattatgtgtcttggggatgatcttcttgtgaagtaccttactgtggttctctgcattttctgagtttgaatattggcctcactagttaggttggggaagttctcctggatgatatcctgaaatatggtttccaagttagttcc

SEQ ID NO: 871236 - DNA, 534 bp, Homo sapiens
ctgacttggcaattggcaggatgatactactattcactgagaggagagacataaaacagggtacaaatttgaaaggaagaatgtacaggggatggtaacaaattgagttttagacatgttgagtaagaggtacctgtgaaacatcaaagatattaagtaggcttttggcttagtgggtttgacagtgacttgggagattttagttgtagacagatattgggagtcattgggtgtataatacttgattctgtctcattaggaatgggagaatagaaatatcaagtatacttttaagttatttttgaataaaggtattatgtttaatttgcatgacaaatctgtaagaaayctctaggacagggaaacattattgcacatagaagtggctagtggcttgaagggttgcctaatatgtaaagacatccaaatttttaaaaggtggagtaggtagagggaaattttaacttatttttttaaatatggcaagaattgtcagattgggttaaaaaatcaagacccaactctatatgctat

SEQ ID NO: 871237 - DNA, 595 bp, Homo sapiens
caaggattggaggaatatacagagcaacatgaaatttcatacactgcatataagaaagtgaattcgtatagtctctctattaaactctttgccagtgtctattaaactagaatatatacataacttgctccagcaattggattaatagaatcaatggacatacataccatactgatttaaatgaaattaatcaatgagaaccaggacagtggttatattttgaaagttaatggctagacaggatcataaaggaggcttctggagttctggttccagttatatctctatccattgttggctacaaagatggttagctttggcaaattctttatccccttaagatyaatgcattttacagtatatatgctattcttgaaatgcaacatttaaaaaaatgttgagcaatttagtacatagaaacctatagtttaaatgctaaatattatctttatatgattctaaaaattaactaagtttcaaaaaacaattcatagatattactaaaagaacctctttcctgagctggaagcagggtaagaattatagtaaatcatgttttggtggccgtatacagacagactcttaaagtgtaact

SEQ ID NO: 871238 - DNA, 623 bp, Homo sapiens
ctcagtatatatttatttttatttttattttttttattttactttaagttccgggatacatgtgcagaatgtgcagatttataacgtaggtatacatgtgccatggtggtttgctgcacctgtcaactcatcatctaggttttaagctccacatgcattagatatttgtcctaatgctctccctccccttgcctggcaccccctgagaggccccagtgtgggttgttcccctccctgtgtccatgtgttctcattgttcaacttccatatatgagggagaacaagcagtgtttgrttttctgttccagtgttagtttgctgagaatgatggcttccagctttatccatgtccctgcaaagacgtgaactcattcttttttatggctgcatagtattccatggtatatatgtgccacattttatttaaccagtttatcattgatggacatttgggttagttacaaatctttgctattgcaaatagtgctgcagtaaacatatgtgtgcatgtgtctttatattagaatgatttgtaatcctctgggtatatacccagtaatgggattgctgggtcaaatgatatttctggttctagatgcttgaggaatgccacactgtcttcc

SEQ ID NO: 871239 - DNA, 695 bp, Homo sapiens
caggatttggctagatgacttctgagaatccttctaatgtaatatgttcggactttgtgaattaagccccaaagcataccttatacttaaaagcacttatccatcactaaaaattataaactgcattctagtgaacaactctggtaatgttgatccacatatatggacatttcctagatataaagttgaactttttagccagaagatttatatattggtacatctcttccttccttttctttccttcttttcttcctttttgctttctttccttcctttcttctgccatccaaccatctatacatcctttagttgctctcaaaagcaactcattatgcttgtttttaaaaactgctggaaatatttgcaactactaacattttattagaaaagacacaattatcaaaagttttcacagaaatatgattcacatgtttaagaaaaaatagatacaaaatttgtttttsctttaggatgagcattttcccagattagaattagatttgttaagtatatctaatatctttaattttaaatattctgccatcttatctgggctgggagggtttatttatatgtttcaactcagtggaaacaggtgaaatataagaatacctttcaaaattatttcaatattgactaatgtttcagcaatttgaggagatgataaggattatcaaggccttacccactga

SEQ ID NO: 871240 - DNA, 655 bp, Homo sapiens
accaagaggaaaatgtcacagcagagccaattccctttttccaactcatttaaggacccacccactattgtgtttagacaccccgtacaccaaaaggctaaggttgcttctgtacaacatattcaaataaaccattccaaggtagacttcattttacttgtagaaagcaacattttgcagatgagttttgtttggtttgtctccgtcaatcaattttaagccaaatgtataaaccattttaacaagagatgaatcatgaggcacctgagaagtaatacaaatataccagctacaatgaatttatttaaccttcacagcagtagttactgttactatcctgctttaacagaggaagaaactattttgcaaggggtttygaggaatttgtttaagatgcatacagctaagaattggcagaggagggatttgaactcaccttgctgatgccaaatccaagtacttgatcattaggctgtaccacctccccagtaatgttacacaggtaaaaattaatcacgtgcctagtgtgtgctgggaactgtgttaagccctttatatacattaccatgttaactttgatagttgagacatttggacacaggtaagagggataacaaaagaaccactaggtcgactgttctatgtgtctttggca

SEQ ID NO: 871241 - DNA, 652 bp, Homo sapiens
aataaaatactaagaagtagtattcattaatactaacaaatagataagttttaaataatgtgtttaggacagggcaattaagagtcattgacaagagagtgaagatatggttctggccttgcaaaactttttaagagtgcttcattctggagataaaagaaacacaacttgcaaatatataaaccggtgggaaaacctaagattaaaactatttcactggtataacaaatagagtagagttttataaggaacctcttcaaatgatcagtggctcagttttgaatcattttgggatragcaattctacatagatcagaaatcagctggctgttaatccagatcttatgttggttaatatgagaaagtattgggtgtttgtttgtttcttgaatcagtgaaaacctttataatcctgggatggcatcaacataaattctagtataattttcaggttaaattaaaacaaatatttttataaccctataaagctatttaaaaacatatgtaggaataataaagaaataaatcagagcatagattattttgaatagtataattataggaataagtttagtaaacattacaattatagttattttgtctactttaaggtatttatagtgttcaaacgtttcagccacattaaaattct

SEQ ID NO: 871242 - DNA, 611 bp, Homo sapiens
gagattggggtggggacacagccaaaccatatcattccacccctggctcctcccaaacctcatgtcctcacatttcaaaaccaaccatgccttcccaacagtcccctgaagtcttaactcatttcagcattaactcaaaagtccagtccaaagtctcatccaagacaaggcaagtcccttctggctaggagcctataaaatcaaaagcaagttagttacttcccagatacaatgggggtacaggcaatgggtaaatacagcctttcccaaatgggagaaattggccaaaacaaaggggctgcaggccccatgcaagtctgaaatacagcagggtagtcagaggtcttcacagcagctcctcccatcacaggcccagaggcctaggaggaaaaaatagtttcaygggccgggccagagtccctgtgctgtacaagtgcacagaagtcaagaattggggtttgggaacctctgcctagatttcggaggatgtatggaaatgcctagatgtccaggaagaagtctgctgcaggggcagggctctcacagagaacctctgctacagcagtgcagaagtgaaatgtgggatcagagctctcccagagtccctactg

SEQ ID NO: 871243 - DNA, 668 bp, Homo sapiens
attttaaacatataaagacaaagcacagtgaacccccacatacttatcaatcagcttcttctattgtcaacttgtggccaacttggttacttctattcctactcattccttcaatataagattattttgaagcaaatccaagacatcatagcattttatctgtgaatattttaatacatgtctctgagaaataagaaaccaaaaaaatctgagccaaccattatcagatccaaaaaattaacagtaacttcttaaaattaacaaattttgtggttcaaatttttaagaaacatttttaaaagggagagaatagtgaaatcatctaactttttgttacttctgaaaaccaacttcatccttgtgataggcagaataatcggctctgcaaagatatacatgtcctagtcccccaaacctggaaatatgtgaccttttatggaaaaaaaggggggctttgaagatgtgactaagttaaagatcttgaggtgagaagataattcyggatatccatttgggcccaaagtaaccacaagggtccttaaaagagggaggcgggggggggggggggggcgtggtggctcaagcctgtaatcccagcactctgggaggctgaggcgggcagatcacttgaggtcaggagttcaagaccagcctagccaacatggtaa

SEQ ID NO: 871244 - DNA, 606 bp, Homo sapiens
gtttagttcattcctggggggcaggggatgactttctttcgatgaattgatatagattgaaatactaaaatctgaaaaaaattcaaaatttcatgcaggtcttggtataggcatttatgaaatgaagggggtcaaggaatagtttaaagaacaggaaaggtccaacatcagtcactgcatcaattagcttttatcacaacaatgctatgtaacaaaccactctagacctcagtagcctaccatagyaggcatttatctttctctcccatgtctgcaggtgacctgatctaatttgggctcactaggacttggcactagccagtattgggttcaggtctgcaacattgagtttttcacttttctgggaccactgagctaccctcagaagcacttctcaaggcagaagcataggaaggcaaacccaaccacacaactatattttatgccacagcggctaacattccattggccaaagccaataacatggccaaatacaaagttggtaggcagcaggggtagacatcaaccatggggccaaaataagacccagggcccagccccacattggtggagcaaggaagcacacttcccccatggaagtgtggt

SEQ ID NO: 871245 - DNA, 663 bp, Homo sapiens
agaaatctacaatcttgctggaactcactgttccaacctacaagcccccttactttgtcccttctccttccttaaagccttccagttctgctttaagtctgaaatatagaaaaaatttggatgtgcttggcagatgcccctggtcccttactcattagcttggtttcaggcaagttttggtttaagactcagagtgatagttttatcatcagtcaaatgtggtaatagcatgaatttgtgggggcagcagtaaccacattaatcatatttgttaaacactcacttcacagtgggagctcaraattgcttctctgacattgattctgaacttggtgacatctctgatttgtgaacttaacatccaacttcagcttgtcccctgcccacccaggccatgggcatcttactgcctcttcttttactttcaaactacgtatattattaaatttgaagtaagttcttcatagacagaaagtagttgggtcatgatctttaatccactctgccaatatctggcacatttagatcatttacatttaatgtaattattagtatgttagccattttattcttctgtctgccatgttatttttttgtttgttctctgtgttgtttgtttctgtttttaatgttttgttttcttgtgagttacttaaacatttt

SEQ ID NO: 871246 - DNA, 592 bp, Homo sapiens
tttgtctagttgtgggctgtctaaacgtgaaactctgggttcaaaccgtgtccaggagtgtagaattttaaaatgtacaatgtggagcttcaaaagtgcacaagatttcttttttttaaaaaagaagacattccagtttaagtgaaattcaaggctattgttatgtaccttgaattgatttattactggaaaagactgcctagatacagacaaaatacaaacttgaacctgtaaaaattcaatatttcaaaatggaaaaaatggagaaaaactttgtataagtgagaataagctaggttttgctgaggctgtatgcaaccctaatactacaacagctttgtacctgaaaaagttcatttctttctcatactccctgaccactgtgkttgccagtccacctctttgtttccatgattgcttcagcaaaagcaaggcataatggtgaattggccattggatcttacgggttctgtgtaggagtgacacaagccacttcttcaatttcactggtcaagcaaagccatgtggccagatccaactttaaaagagatctggaaattgaagagttggaactaactgatcagtagccata

SEQ ID NO: 871247 - DNA, 652 bp, Homo sapiens
taccagtggcatgtgtcaggattcaaacctagaaaatgtgactccaaaaacaataatgtccttttgttatacttcaactgtaaagtcaatgatgattcaggatatgatgtatctgattttataagcaggaattattacagtcaccattgtgtatttgcttgtattttaaagcaagaacacagtatctctaattgacgggaacaggaggcagagaaattctaggcagaaaagggtgggtcgctggcaaaaaccccaccctcaagccaamaagcctgaaactgtggcccaaagtgagaacttctatccctgttttcccactcaaatgttgccttttcctcaaccacctacactgtcccatcatatgcctataaaaaccccagcctcagctggtagacaggactacggctggatgttggagagaagcagcttgacttcaaagggatggtttgatggtgcaactttggagaagaatctggccagagacggtcggacttcaggggaagattacctacccaccccgtccccttttcagctccccttcccactgagagccactttcgtagacaataaaatcccctgcatttaccatccttcaatttgttcatgcaaccccatttttcccagaccaccagacaagagcttgggagccacg

SEQ ID NO: 871248 - DNA, 478 bp, Homo sapiens; identical to SEQ ID NO: 869514

SEQ ID NO: 871249 - DNA, 615 bp, Homo sapiens
attgttgttcttgctccttttatgtagggagaacctttctcatgtagggtgtataatatgcattttcctcactccacttcatcccattttatttttgttaagttatagggttgcagtgaagtaagtgtatgatatctatgtgtaatacacattactaagcttgatagggtggcttttctgaataaggacaaaaatcatttgtttataaatatttttcatccttccacatcttctgcctcagtatcctgagtagctgggattacaggtgtgtgccaccatgcccagatgctttttgtatttttagtggtgatggagttttgccatgctggccaggctgatctcgaactactgatcttaagtgatccacccacctcggcctcccaaagtgttaggcatgagccactgtgcccagcctgactttgacctgtaactttttttcagcttcacgtatgtgtaggaggagctgaagcagctgggcygattcatttagtcttttgtgggtataatagcatgatggagtgtagacgcctgggacatgcagattaaggctattggaggtcagagtttctcaaaagcaaattttgtacagaaaattaataacaacaatgaaacaga

SEQ ID NO: 871250 - DNA, 634 bp, Homo sapiens
ggtgggaggatgggtgggaagatggaaatctctcatttttttgtctttatgaacctgggaccaaaaaaaaaacgaggaactttacctataaattagattgtgttgtgattcataaaccatgctaattttataatttaaaacattggaattagttatgattttaaaaatttttaaatagaactcaaaaagaaatgttttcctcatatgattgatgttttaagtgtggccattgtttccaagcaaaaatgacatttattcaattgtattaaatgagatttcttagtaggctatttttacttgattctatgtcagtaacatgtgaaataagcattagaggtgtgattaaattattggagagaaaatagtwatgtgaatatttgttttcttggacacatttgaattactatatttttcccaagcacactttgaagtacattttaaaaaataatttaacatcagggttgcactacctctctatcttgtaattccatgttacattggagctttttaaacacttatttgactctctcttctggaaactctttcttcagttgtttttcatcttattattctctcttgttcctccttattccaagggtcactctatcattggctctttggctgattcatatat

SEQ ID NO: 871251 - DNA, 634 bp, Homo sapiens
ggtgggaggatgggtgggaagatggaaatctctcatttttttgtctttatgaacctgggaccaaaaaaaaaacgaggaactttacctataaattagattgtgttgtgattcataaaccatgctaattttataatttaaaacattggaattagttatgattttaaaaatttttaaatagaactcaaaaagaaatgttttcctcatatgattgatgttttaagtgtggccattgtttccaagcaaaaatgacatttattcaattgtattaaatgagatttcttagtaggctatttttacttgattctatgtcagtaacatgtgaaataagcattagaggtgtgattaaattattggagagaaaatagttatgtgaatatttgttttcttggacacatttgaattacyatatttttcccaagcacactttgaagtacattttaaaaaataatttaacatcagggttgcactacctctctatcttgtaattccatgttacattggagctttttaaacacttatttgactctctcttctggaaactctttcttcagttgtttttcatcttattattctctcttgttcctccttattccaagggtcactctatcattggctctttggctgattcatatat

SEQ ID NO: 871252 - DNA, 607 bp, Homo sapiens
cctaggcatttgataataagcaaatgtttccattttgtcagtctcacttgcttcactttcaaagtagaactaataatatctatctcaagtgattttatgaactttgaatgctattatataacagatataaaagtgctggcacttcaaaagactcaataaacatgaaccctttttctgcccttttcacttagtaaaccctcctttgcctctctctatatattattgacaatktttagttgctaccttagtttttgtgatgtgtagataaagctttaataactagttccttttatcaggccattgtgaatgtaaatttgaatcaatcaaaaggcattattttagtactttgtacacaactacaagtacatagtcattctgtatcatgtcatccataaaatccccaaagtctcaaagttgagaaaaaacaaaacatctgagtggaacaaaaaatggcaatgccttcactaatctcgggatttcatttgtaatacttaaattctaaacaatgactgacggtactggggagaagtgaaatgtcaataactcctgtagttcatcaaaagtcttgttgctatgtaaagcagagggagaatgaaacttatcataa

SEQ ID NO: 871253 - DNA, 450 bp, Homo sapiens
agacagaaagttaacaaggatatccaggaatttaactcagctctgcaccaagtggacctaatagacatctacagaactttccaccccaaatcaacagaatatacattctcagcaccacatcgcacttatctcaaatttgacgacacagttggaagtaaagcactcctcagmaaatgtaaaagaacagaaattataacaaactgtctctcagaccacagtgcaatccaactagaactcaggaataagaagctcattcaaaaccactcaactacatggaaactgaacaacctgcttctgaatgactactgggtacataacgaaatgaagccagaaataaagatgttctttgaaaccaatgagaacaaagacacaacataccagaatgtctgggacacattcaaaggagtgtgtagagggaaatttatagcactaaatgcccacaagagaaag

SEQ ID NO: 871254 - DNA, 618 bp, Homo sapiens
aataaacaaataaacccagggattaggatgacataatacagggaaaaggtaaagagagagaagagtgccaaaaaccaagcctttgactacatcatttttttttttttttgtagttacaattagcctgatatatatacattaagttctgggatacatgtgcagaacatgcaggtttgttacataggtatacacatgccatggtggtttgctgcrcccatcaacccttcatctacattaggtatttctcctaattctaaccctcccctagcccccccacccctcgacaggccctggtgtgtgatattcccctcccggtgtctgtgtgctcttcttcttcaactcccacttatgactgagaacatgtgatgtttggttttctgttcctgtgttagtttgctgagaatgatggtttccagcttcatccatgcccctgcaaaggacatgaactcatcctttttaagactgcatagtattgcatggtgtatatgtgccacattttcttcatccagtctatcattgatgggcatttgggttggctccaaaatctttgctattgtgaacagtgctgcaataaacatacgtgtccatgtgtctttatagtagaatgatttatattct

SEQ ID NO: 871255 - DNA, 568 bp, Homo sapiens
ggaggttcccaaatcccagctcttgacttctgtgcactggcaggctcaacatcatgtggaagccaccaaggcttgaggcttgcaccctctgaagccatgacccgagctctacattggccactttcagccatggctggagcaggtgggacacaggggaccaagtccctaggccgcacacaacacggggaccctggatctagcccctgaaaccatttcctcctaggcctccaggcctgtgatgggaggggctgctgtggagacctctgacatgccctggaaacattttccccrttgtcttgggaattaacatttggctcctcattacttatgcaaatttcttcagctggcttgaatttttcctcagaaaatgtgtttttcttttctatcacattgtctggctgcaaattttctgaacttttatgctctgcttcacctataaaactgaatgccttcaaaagcacccaactcatctcttgaatgctttgctgcctagaaatttcttccactagatactctaaatcatctctctcaagttcaaagttccacaaatctctaggctggggcaaaa

SEQ ID NO: 871256 - DNA, 601 bp, Homo sapiens
aatttgcatttgctgtcttctgatgtttctccttttccatgtcttctaatttatacaattctgtatttcatgtttaatgagctcttggcagagatgctataatacgaagtcacaaacatcaatttctctcagtggttatattattataaattagtaatatgacactgtacctgaactagatttatttttattgacttgttttcttgttccgtgggtaacatggacaaatatatgatgcaaagcaccaaattggctgcagcacattctctcctgttatctgttttaccagacaggctcaaccacagtttataccacctattggaattatcmcaaaaaaaaactaagcagtttatttttcttaaggcaaagtgttgattatgagaatcatcagcatatacagcctagtaaggagtacccatcattgttcgtcatggatggacagactgcggttggtcatatataaatcttagaagtgggtttggcaagtttagatcagtgtctcaaagaaatccagacctggccctgtaaaattaaactatgagcagagtttctctggcagtcagccacaggactgcttttttaaaaattttttatcttctac

SEQ ID NO: 871257 - DNA, 615 bp, Homo sapiens
tgagattccatgatttattctctaactatgctaagtcaaagattctgcagttagctttctccccaaaactcaggctgagtttgagcaggtcctaaggtgttgatccctttagctcacctagttaatgggacatagagtacttttggcttgactactccatgctttttcctatcaaagcagaccaagacaatcaaaaccttgatttttaaagcttacctgaaatagagtcttatgtaacaaaaggatggctaagtgtacaaggcagttgaacatgttagtggtagatgatgcatttaactgtcaaaatgctactcacagcaaaggggaaccaattcccaggagaaggtctggagaagaggagggagaagagcytgaggcttggtgtgcacattctgagaccagtcctggctctgccactcagtgggtgcctgtttgcaagtcatttcttgacctctgtgagtcttgtcttgtctttttttccaattataaaatagaataataattcctgcctcccagttttgtcatgaagattaaataaaataatgtttgtgaaaacaagtagacagaataggtgctcaatcaacaataacattagctggacacgatggctcacgc

SEQ ID NO: 871258 - DNA, 592 bp, Homo sapiens
acaggaacacttagacatgcaacccactcccaccctccgtcttgggggaggaaagcacactactgtcccaaagaactaatactgaaccagtgctgccttgtggagagaggcatggccaaggcgttcagagacctgggcctggtcccaccgctgcccacagcactcagcctctgagcacagcctggggtcatctgtgtgccctctggccaaggctgayggtagttctctgagtaattgagagtcattgcctgtctgtgcagtattgtgaaaacaagtcaccttttaactttaaaactactttaaaaaactttaaagttttaaaaaaacttctttaaaaactactcatgagatgacagtttctctgaccctcagaggaaggctgggctgcgcatacgtgaggaatttttacatgaacatcccaggacttgctgttcgcaggtgataaactgcacctccccaggactcccgctgcactcacatgcagctccctggacttctggtatctgacccggcccatttctgtgtttcaggggagaatttggcttgcgggagtactcagaagttaagacggtgacagtaaagatcccccaga

SEQ ID NO: 871259 - DNA, 647 bp, Homo sapiens
cttgcatcctaggaatcaagcctatgtgattgtgatgaattaactttctaatatgctagtatttcgttgaggatttttcatctgtgttcttcagggatattgacttgtagttttattttctttttttgtggcatctttgcctggtttgggtatcaaagtgatgttggcttaatagaatgagtgacggaggagtcctacctccttgattttgtgtggtagtttcaatagatttggtgacagatcatctttgtacatttggcagaattagcctgaaaatccacctggtctggcactttttttggttggtaggttttttttattactggttcagttttggaactcaatattggtctgttcaaggtttcaatttcttcctgattcaatcttgggaaattgagtrtttccaggaatttatccatttcctccagatcttccagtttgtgtgcatagaggtgttcataatagtctctggggatctttcatatttctatgtgatgagttctaatgtcacctttgtcatttctgattgtgcttctttgcatctttttttcttttaatctgctaatggtctaccttgtttaccctttcaaaaaccaacttttaattttgtggattctttgtatggatttcagggtctcaatttcatt

SEQ ID NO: 871260 - DNA, 539 bp, Homo sapiens
tctgtacaaattattgagtaataatagtatctcttataggattggtataaagacttaaaaagttaatgtcatgtaaaatgctttagcataatacctgactcagagtaaaggcttaataaaccctagctgatcttactgtcagaatcartaatattactatttgtaatataattaccagacttaacaaatgggagaagtattaaccatctgcaggaataagtaccagagcctgcatcaaaatagtttatattcaacatgaagtctttaaattggcaaaagcactcagtttaatatatacctgttaagaaaattttaagagacagtcatggtttttagctggatactctgggaaaccaaataaagcagataattgtacagtatgataatcaaaaaaaggatgtctttataaatagcttgaaatagttccccagatgcaacttgaataaaggaaataaatagccgacttgctctaacttgaggttagagcagaattccttagtctgattcactggatgctggaaacccctgccccacatttt

SEQ ID NO: 871261 - DNA, 599 bp, Homo sapiens
atttgactttatttggacgtaggtcttcacagatgtaatgagttaagatgacatcatactagattaaggtaggccctagatccaataactggtgccttaataaggaccacacaggcacaaagtgaaggaaatgtgaagacagagtgacactgctatataagccaaagaatgccaaggattgacagatgccaccagaaactaggacaaggcaaggaagaattcttccctacagtcttcagagggagggagcatggccctgctgacactaatttcagacttctagcctccagatctctragagaataaatttctgttgttttaagtgacccagtttgtagtcatgttacagcagttctaagaaactcatatagcaggcttgactagtgagcttctccctaaggtgaatgtgtgacaagcctgacaagaaaccaaatgctaatatctgaaatattttttctgggtcttttctggttctctggagaaagatcctccagctgggagggcaataagtctaactgtaaacaagagaaaagagcaggtagaaggggtctcagtttactgtacagacttactagcttccattttcaggctcacatccc

SEQ ID NO: 871262 - DNA, 646 bp, Homo sapiens
cagtggctcacacctgtaattccagtactttgggaggccaaggcaggaagatcccttgaggccaggagttgaaaaccaaccagagcaacagagcaagactccatctctataaaaaaactttaaaaattagccaagcattgtgatgcacatctgtagacccagcyactcaggaagctgaagtgggaggatcgcttgagcacaggagttcgaggctacagtgagctacaatcatgccactgcactccagcctgggcaacagagcaagagcctgtctctgtctgtctgtctgtctgtctgtgtctctatttatttatatatatatgtgtgtgtatatatacacacatatacatatatatatacaagtacatatacatatacatatacacacatatatatactggtaataaaaatagtatttttaatacacacatgcaaagaagaaagtttggaaaactaaataacaaagataatgcagatgatttttacttccttaaacttatttacatatttttaactttctaacataaagatgtattcactgtttaactttttagttttaaagaagttaacagcatgagttaaaagatccactctacagtttcttctcttgagtaggtggatgctgtttttctaccctgtataccac

SEQ ID NO: 871263 - DNA, 595 bp, Homo sapiens
gcatttttctcaaatcacaaacatcttatcctcaagtaacagaagctaaatgctgtacttttaaactttaatttggggtatcttattttgatttaaagtaagtgtactactattctggtatcagtaattcttcaattttattttcctaggaaggagaatttaagttcctgcctgctcatttatttctggaaacagagaagcawttttcccattatcctttcttattgaaatttgttctgctaagttttatccactgcaaaaataaagttaatcatttgaagaataaaatataacagggaagtaaaaagaagtttaatatatgcagctctttaaaagatacacagatttatgtttaaatttgaatgatgcataaattaggaatttaatatctgtctacttcttctgattttgctagaaccagacatcaatattatcatctctggggctttttatgttatattttcaaaatgaacaatgaatacaaagtacattttctgatgcctcaaacattacttgaaaaataataaggctgtttttaagtgtcaactgagaattttcaagttacatcactgttctgactttgcttactgatata

SEQ ID NO: 871264 - DNA, 648 bp, Homo sapiens
ggtatgatgttaatataactcagattatatataactatttttcccacactttttggccgtgtatgtccagcttaacacgaagttcactgacacaagccaatgcagtgaactgcacgggactgctgcactgttcatggcgctcattcatgccactctgttgctacttcaatttggtcacttactatgtcctggtagggctttttgcatagcacttcctcattttttgtgtactttgtcctaatcttcggcagtctatcagcctcaaaccttcaatgcatccctttccatcagcaaccaccacctttaaagataaaatcctawatttactgtaatatttctttacttattaggactctgacatgttttttaactaactgtttttaactaactgttttactagactgctattgcttttattagtgatctggatataatgctgtatagattttgagtgatttgtgcaactccatttttcccagacctttaatttctagtatatgatggttacaaccacaagatttctcagaaatgtatcacaattatagcaaaaacaattgtataaaaatgtttttgaaccaatatcaatatttactatatattcctttagagccagtcagatctttcaagtttttctgcagaataaaattg

SEQ ID NO: 871265 - DNA, 744 bp, Homo sapiens
atctctacaaggaaaactgcaaaacactgctgaaaaaaatcactgatgacacaaacaaatggaaacacatcccatgttcgtggatgggtagaatcaatattgtgaaaatgaccatactgccaaaagcagtctacagattcaatgcaattcccatcaaaataccagcatcattcttcacaaaactacaaaaaacaattctaaaatttatatggaaccaaaaaagagcccacatagacaaagaaagactaagcaaaaagaacaaacatggaggcatcacattactcaactkcaaactatactacaaggttatagttacagaaacagtatggtactggtatttaaaaaaaggcatgtagaccaatggaacagaataaagaacccagaaataaagccaaatacttatggccaactgatcttggataaagcaaacaaaaacataaattgggtaagggatacctattcaacaaatggtgctgggataattggcaagccaaatgtagaagaatgaaactggatcctcatctctcaccatatacaaacatcaagtcaagatggatcagacttaaatctaagacctaaaaccataaaaatttagaagataatatcagaaaaactcttctagacattggcttaggcaaagagttcaagaccaagaacccaaaagcaaatgcaacaaaaacaaaaattaataggcaggacctaattaaactaaaaagcttccctacagcaagagaaataatcacc

SEQ ID NO: 871266 - DNA, 522 bp, Homo sapiens
gtcctcatgtataaaaattatctcaagacagattaaatatttaaatgtaagaccccaaactataccaatcctggagaaaaatctggggaacccctttctggatatcaaccttggggaaaaatttgtgactaagtcctcaaaagcaattacaacaaaaacaaaaattgacaagtagaacctaattgaactaaagagcttctacacracaaaagaaactatcaacagagtaaacagacaatctacaaaatgggagaaaatatttgcaaactatgcacctgacaaatgtctaatattcacaatctataaggaaattaaacacttgaatgaggaataacacacagccccattttaaaatgggcaaaagacatgagcatacacttctcaaaaggagacattcaagaacccaaaaaaaagtgaaaaaatgctcaacatcacaaattatcagagaaatgcggatcaaaccacaatgagataccatctcacaccagtcagattggctatgatttaaaaagtcaaaaaaca

SEQ ID NO: 871267 - DNA, 638 bp, Homo sapiens
atgtgggtgtcggaagaggaaccagaaaaaaagaaatgacaacatccaattttgccaccttctgtcccaagagaaacccacagtgacactgatgagtactatctttagccaacagacaacaaacaaacaaaacccaccaaataaagaatgaatgtccttccctgaagggttttacagttagaatctagctagagaagatgggtggtacaggtggagaagttcatatgtgcaaggaactgattgacagttaagcacagacggggtgacagattatttaaccattctgttatctttctagtcactcagtacttcaaaaaccaaggataaccccccaaatagagaggaccacattactctcatcagagatgtggataccaaaaaagtgatacagagcagtgcttctaaaacttgtattatgcatttgaatcaactaggagtcttgttaaaatgcagayactgatttgacaagcttgaagtgggaccaaagattctgcatttctaataagatcctagttgatgctgctggccccagaccatatttttttgaggcattattaatttttttattaaaatattatctacctcaaactaaaccacactaaatatttgttcatgtcttctttccttgaaaaaaaaaa

SEQ ID NO: 871268 - DNA, 523 bp, Homo sapiens
gccatttacaaaggaaagagctttaatggagaagtcacatttccacgtggctcaaaatcatggtggaaggcaaggaggagcaagtcacatcttacatgaatggcagcaggcaaagaacgagcttgtgcagggcaactcccatttttaaaaccatcagatctcatgaggtccattcactatcataaaaacagcacaagaaagacccacccccataattcaatcatcttcyaccatgtctgtcccacaatacatgagaattatggcagctacaagataagatttgggtggggactcagagagccaaaccatatcacttcctgagttgactatgtcctctagtacactggccaatggaaatgggattactttgactcttgctagaacttatatgcttactggttattccactaattcatcaattagtgaatgacatgtgtcctaaaatatatatgcagactgactaattatcagcatctacactgactcaagttaccaccattctatttctaggtatttgcaaatt

SEQ ID NO: 871269 - DNA, 626 bp, Homo sapiens
agcctccagatctatccatgtcagagcaaagaatataatctcattcattataatggctgcctacttttccgtggtgaatatgtaccacattttctttatccagtctaccattgatgggcatttaggttgattccatgtctgtgctattgtgaatggtgctacaataaacatacatgtgcatgtgtctttataatagaacaatttatattcctttggatatatactcagtaatgkgattgctgggtcgaatggcagttatgtctttaggtctttgaggaatcaccacactcttttctacaatggctgaactaatttacactcccaccaacagtgtataagcattcctttttctccagaacctcgccagcatctgttattttttgactttttaaaatggctagtctgactggtgtgagatggtatctcattgtggttttgattttcatttctctaatgatcagtgatgttgagctttttttcatatgattgttggccacatgtatgtcttcttttgacaaatgtctgttcatattctttgcccaccttttaatggtgttttttccttgtaactttaagtttcttataatgctgtatattagattttttgtcagatgcatagtttgcaa

SEQ ID NO: 871270 - DNA, 643 bp, Homo sapiens
agagataggggtcaagctttattcttttgcatatggatatccatttttcccagaactatttattgaagaaactctcctttccccaatgtatgatattggtggcttcatcaaaaattagttcactctagatgtatgaatttgtttctgagttctctatgctgttccattggtctttttgtttgtttttatggcagtaccatgctgttttgcttattatagctctgtgctataatttaaagtcaggtaatgtgattccttcacttctttagcttaggatagctttggctattctggggcttctgtggttcaatataaatttcaggattgttttttccatttctgtgaagaatgtctggtattttgatagggattgcactgaatctgtagactgctttgggtagtatgaacattttaacaatattgattcttccaatscatgaacatgaaatgtcttttcatttttttgtagcatcttcaatttcttgcatcagtgttttatacttttcattgtagagatctttcacttctttggttaattccttgggattttattttattttatttgttgcttttgtaaataagattactttcttgatttctgtttcagattgtttgctgttggtgtatagaaatgctactgatt

SEQ ID NO: 871271 - DNA, 659 bp, Homo sapiens
agaaaataaaatactaagaaatagaaaaggattgacaaaagtaaatatttgaaggtactgcgactgattcccaagagagtattcagtaagcatgaaagattgagagctgtaattagacatgaactgtgggagaaaaatggcaagttactggaaacagatacatctacacagggatggaaagatcaaatatttgagaaacttcatcgatcttagattaccagccagataacaattgtcaggtgttttttgaaagcatgaactctgaggtcagaatgccatatcagttccactatttcttgtccatggccttgggaaattattatatatctctcttttcatcaatttcctcatctgttgagtagaacaataatagtattataataatagtttttaactcataggactattgagaaggatccattaaataatgtttgtaaaatatgtatacatgcttataatmgttggatgctaagtttcatccatttacacttagctcttgttcctgaacacaattatatgcaagactctttgctctgttcccagagaatgactagctttggagaacagtcaactgatgacttgatgggaattactagttaacccctttcattttcccctcaagtcagctgctatgatgtctcttagaggtccccaatggg

SEQ ID NO: 871272 - DNA, 617 bp, Homo sapiens
acatcaatattctcctctacagtgctgtcttcaaaaatggcatctgtttctgtgaactccttcacgctgggctttacttggacttttccagaaattatgtgatttggcaggtcatcactgacagttggatgctgacttaaagccctgtatgtaaaaataaaagtcctgagtaagcaaatatacaaaaagaaaataatgcatatgagaagggattgaagccaacaacttctatttttcctctgactctgtacctatcctactttttgcctctaatggcagaagtgggtaattttacacctaagtgctttagtggctacctcagctctacattttttctagtcttacattgtcttgaaaactygtgtatattttgattctgtgccataatgcttatttgttttagtgctaaaatattttaaactacttagaattgagggaaaaatgatatatgactatggatcccagtttgaaaagatgtcataaattattattagccttctctccaccttattttctaccaaattcttatcatttgtaggcaaaatcagtactcaagttagatatataataaatatgtctgtagcagaattagctataaagttgcctgatataagtac

SEQ ID NO: 871273 - DNA, 681 bp, Homo sapiens
tctcttcccctgtgcctatatctatacctatgactatatctatatctatacctatatagatgtagataacctattctattggttctctttctctagagaacactgacaaacatagattgtggttctggaggaacagaattwtaaggatgagtttcctacattggttttggagtttctgggactagttctctaatctgattagacctcaaaacgctaagaactctactcctaatagtacagaaaacactaatagtccgcggtgtgagctattatagagctacacaaaataactgtatttgatactgcttttttttttttgagagagagagagggtctcactctgttgcccaggtgggagtgcagtggcacaatctcagctcactgaaacctccgttttctgggttcaagtgattcttgtgcctcagcctcccaagtagctaggactacaggtgtgagccaccacacctggctaatttttgtatttgtattttttatattttggtaaagacagggtttcaacatgttggccaggctggtctcaaactcctgacctcaagtgatctgcccaccttggcctcccaaagtgctgggatcacaggtgtgagccagcatgtatttgatactcttaatcaaccacttataagaggcaaggaacttgataactctttatataatactttc

SEQ ID NO: 871274 - DNA, 640 bp, Homo sapiens
gagaaaataagattggaaaaattacttagtttaagatttgattcattttcagaggtttgaaaaaatgtattttttatgccgcttgaagtcgctaagagataagcagcatagcatattcatcaaggaacttaggaacaattatttttaaaaataaatagtggaaatataatattttaattgttattgaaatataccttctaatcttagaaacctttttctttatctargcacttcatttgtccttttaagaaactataacattattagttgtatcaatttataatttgccgtgcatctgccttacttaccatcttttcataattatctattaaaagttcaaaacataaccgtattgaaatattattataatagttaatttaagaaccataataaccaggttaaatttaaaaatttgatgctcctagcatttctgcttacaaggcatgtatgctaaagagattgttgagccctgattatgtttaatttgttaaatctagtacttcttttaacttacatgtttagttttctacagcattgttactgtgaaccagagttcttagttttgagcaatgtaaatcatcatacacctcttccaagtaaaggagtagtttttacctaccatacaggttacaggaaattg

SEQ ID NO: 871275 - DNA, 631 bp, Homo sapiens
ccttatctccatctgagacctgctcagcctgagcttcactgtccatatcactgccaatattttgttcaaaaccatttatcaagtctctaagaagttccaacttttccctcatcttcctgtcttcttctgaggcctccaaactgttccagtctctgcccattaccaagttctaaagtcgcttctacattttcaggtctctttattccaatgtcccacttctctggtaccaatgttctttattagtttgttcttgcactgctacaaagaactacytgagagtgggtaatttataaaggatagaggtttaactgactcacagttccacaaggctgtatagggaatgacttgggaggcctcaggaaacttacaatcatggcagaagagtgaagaagcaaacatgtcttcatatgatggcagaagaaagagagcaaagggagaagtgctacacactttcaaacaaccatatctcacgagaactcactatcacgagaacagtgagggagaaatccgcccccatgatacaatcacctcccaccaggtgtctccctcaacatagtggattgcaattcaacatgagatttgggtggggacacagtgccaaaccatatcaaggaatcttaactactatttt

SEQ ID NO: 871276 - DNA, 611 bp, Homo sapiens
tgttatttctaaaattcatgttgaaacttaatttcaaatccaatggtattaagaagtgtggccttagcaggtgattgagtcatgagaactgtgccctcatgagctggattaatttctttcataaaaccttcgatgaagggatttcatctctttttgcccctttcacctcttccatcatgtgagaacacagtgttcctcccctccagggtrtgcagcaacagcacacaatcttggaagaagagagcagcctgcactagataccaatcctgctggtactttgatcttggatttcccagccttcagaaccatgagaaataaaggtctattgtttatatgaattactgtatgtgatattttgttacagcagcacaaacagactgagacattgagacagagcttgacatatttgaaaagtacttaccaatttgttttgtagaatatccctcagtttagttttgtctgacattttctcataattagatgatggaacacacatttaacaagcattaggtataagtgtattatccctgtattatataagggagtaaatgatgtctatatggttcattactggaaatattaaccttaatgacaagtggttgccttctaat

SEQ ID NO: 871277 - DNA, 596 bp, Homo sapiens
tctgaaatcacaagtttggcagaagaaaattcccaggtaacatttccacggatacaagttacatcacttagtccttcaaggagcatggatttggaaatgaagcaattgcagtataaactaaaggtgattataaaatttattaagcatgaaaacatacattatgcttgaatcctgcaagacatatttatatgaacactaatttattctaataaaggtaaattatgttatagataatccaaaaaattattaatattgccttcatcrttaatttttagcctggtagattcttatctggtaatcaatactaccattctctgaaaaagacaagataccatgaaatcctaatttaggagctgatttaaactggccaatatctgctactctaatacttctttctgcccccatgcctccctccagctgaacagaatcctttcaggcatgtaatgcgtcaacataaacagaattgcttttctctacatacttccagcaagttaaacttgagaatgaaaccaacccacttttgctctctgcttcttctccctcccatttatctcctccttctctgtctccaaccaacaaccaacttaaaatagtag

SEQ ID NO: 871278 - DNA, 596 bp, Homo sapiens
tctgaaatcacaagtttggcagaagaaaattcccaggtaacatttccacggatacaagttacatcacttagtccttcaaggagcatggatttggaaatgaagcaattgcagtataaactaaaggtgattataaaatttattaagcatgaaaacatacattatgcttgaatcctgcaagacatatttatatgaacactaatttattctaataaaggtaaattatgttatagataatccaaaaaattattaatattgccttcatcattaatttttagcctggtagattcttatctggtaatcaatactaccattctctgaaaaagacaagataccatgaaatcctaatttaggagctgatttaaactggccaatatctgctactctaatacttctttctgcccccatgcctccctccagctgaacagaatcctttcagrcatgtaatgcgtcaacataaacagaattgcttttctctacatacttccagcaagttaaacttgagaatgaaaccaacccacttttgctctctgcttcttctccctcccatttatctcctccttctctgtctccaaccaacaaccaacttaaaatagtag

SEQ ID NO: 871279 - DNA, 683 bp, Homo sapiens
acataaaatgagacaatgtgattcagaagctgataaagagataagcttgaaatatgataaaaattaaaggtgttaaatggaggggttcaaatattggccttaacaagtcaccagtaacctgaatgcgagcattggagcaacaacagtaactgggacaaaagccaagtgaagggtatatgaaaactaattattaagtataaattgtcaaaacctaaaagtacagtggttagaatgtagcaggttaaacaacaaaaaatcctgtcatatcaatctttaatttttctaatgaggtactgaagttatatacgaaatatagttatcttggctttaataaagagataatcctcttgcaatttgagcagtgagacattccccgttactggtcatatttaagctagctgtcagggaggttgcagatctgaagatctccaaatttccttctaactctaagattttgattccaggaaaaaagatacgaactaaataatttcccaaaaaaygtaatgcctaaccaaaatattaacgaattattgatattaagcataacactatagtacctacaaaactgtaaacaaacaaaactaggaaaactttatcaatgaataataaaaatgagtatcatttatccttataaaataatctctagaatttttgtgtgtgggtacacagtagatgtatctaca

SEQ ID NO: 871280 - DNA, 605 bp, Homo sapiens
agtgtcctttgatcttaagattgttggcattggggaaaaatgggaccaactgaagcttgtagcttccttgatagcattctttttttttttgagatggagtctcgctctgtcatccaggctggagtgcagtggcgtgacctcggctcacygcaacctctgcctcccaggttcaagcgattctcccacctcagcctcccaagtggctgggactacaggagggcgccaccacgtctggctaatttttgcatttgtagcagagatagggtttcaccatattggccaggatggtctcgaactcctgacctcaagtgatcctcccacctcggcctcccagagtgctaggattacaggtgtgagccaccacgcctggccttgatagcgttcttttgacaagagagtctgcatggtgacctcttggaaacccatgtcatcaccttcttccttgccgccttgtttgtggaacaggtttctgtgtaattattgaatgatgtgaaaataaatttcccagtctctaatgactgatgcaattgtacgtttttacgtgcaaaatgaaaagttagactttcattagtttctagaacagtgttatctgagctggtcagata

SEQ ID NO: 871281 - DNA, 603 bp, Homo sapiens
aacctagagcttaaaattagtttagtggaggttctgcaaaatagcatgtactagttttaattgacaccttcatcatagttcatatctcaaagcatggagaatctttaaattggctgaaatcttaccagttgggaggaaactctgcagaagtgactttgccaagtgtacatacattttgaatgataggctgaacccaaatttcccaactcagagagcaactcattacactgatttttcaaacatctgaataatttctggctgatcagttatacacattgagacagacttaagtctccatggagacttaagtggacatccgcaccaacctaaactatgccatttcatacccctygcaccccacagcagcttttcaatccaccaagactctgcaaaatgaaggatagggccgcaaagaaattttaattattgcttatgcacctgttctgttggattcagtagactaagaaagcatagtttctggcatacctgatgtttaataaaatttaaaattgccagccaggtgtggcagcacacctgtagtgccaccagctcaggagactgaggcaggaggatcatttaaccccaagagatggagactgtagt

SEQ ID NO: 871282 - DNA, 620 bp, Homo sapiens
cctgtaatcctgaaactttggaaggctgaggctggaagattgcttgggcccaggagttcgagagaagcatgggcaacatagcttgctctctacaaaaaaataaaaaatagcttactctggtggcatttgcctgtagtcctatctactcaagaggctgagaagggaagggagaatcacttgagcccaggaagtctaktctaccttgatctgtgattgtaccactgcacctcagcctgggtgacagagcaagatcctgtctctaaataaataaataaacagaagagtaaagtctatttttgatgggagaaattttggtacttctttaatctttgtactcactattggtttattcaggttttcatgtaattcgtgattcagtataggtaagttgtatttttccaagaatgtatccattttttctaggttttccaatttgttagcatataggaattcatagtagtctctaacaatcttttgtatttttgtgttatttattgtaatgtcttctttttatctgtgattttgcttatatgtgtcttcttccttcttatactagataaatgtttgttcatctttttaaaaatattatttttgatttgttgatcttttgtaatatttta

SEQ ID NO: 871283 - DNA, 620 bp, Homo sapiens
cttgagcatccatgaattttggtacctatggggggtcttgtcactaatcctgcatgataccaaggatgattatatttgttacctatctaccacgtgctagtcatgggggatacataatttttaaaaaagaaaggaagaaaccacttcataactctccaacaaaaacctgacctccatgaagscaagtatttattttctttacacctgctagaggaagtcacttaatagagcagattggtaccaccccatcaaaacaggcccccacctgctggcagttgtacgatagttctctgataatttgttcgctcatgctcttcgactacagtattttcaaccattgctactccccacaaaccttcaatccacctattttttctcccactctcagaagatgatcttgtcttttattttgcaaagaagttaaaaattatttgtcaatacttctttattttccaccttctaaactcataagtctgtctttatctgcacccattccctcccctccaaagaaagagacaagttgcttctattgcttaatttttttcattaaaaaatgtaagttttatccatatttcttttagatgctactttcttgcctctcttttaatatttgtatgatt

SEQ ID NO: 871284 - DNA, 647 bp, Homo sapiens
ttattaccaggtatgtggtgctgttgggggtggggtggaaaatgattttcttaatgggtcttctacagatttagggacttgggagatcaaggtggggaaggggaggaagaaaatctgaagacatggaatattggaaggggtttgctggtgctgcttaaaggtaatacagaacagcctcacagaaaaatataatttataaacacacattatacatgattaattatgttaattcaggattaaaggagaggaggggtgtgtttttccagtgtgtatttatctgcaatcaggtcacctagtgcttgcaataagtttggagaagtcatttaactttagcagctccatgctatttcccaccctcatcccttaaccccacaaaaacagaacttttcctgctaaagaactagcagggatagattcagagccagagaactaaattttcaaaagtcaagaagacccatatctakagatgtgatcaggaagtatcacgccctccgaaagtttcactttgtagaccatgagtgcttaatttaaataaatcacccatttatgttccttcctgatacataaattctaccaagagactgactatgcaatacacactttggagtcagagagaaagatttttgtcagaattcctccaccattca

SEQ ID NO: 871285 - DNA, 624 bp, Homo sapiens
aaaatgcaacatacaaagtgactaaaaagaaaaaagagctagcatatttgtgaagaaatctaatatgtattagactctccataaaataaaagacattgaaacttcttattgtgtaaatgtcaaggttctgaggtaaacattaatttttctgtgagtcttacaggttagaaaattaatatacttttcattttctcatatcaactaaacatcaaagttgaatttggattcaaactgccatttagcaactggttgagaaaaaatgatttttttcgaagttaaaaatgaargaagattctttgtagagctaactgaatggaaatggcaccataaatttgattccagctctcttgaaaagaaattccacatttatgtgcttctgtaattagttccaatcagcacactataaatatgtaaggattttacccatctattacttgcatctttggtttaaagctcttcagttgaaatggcaaacacaaattctgagcaggtaatacatcaatgtggatttgtctaagacttaaaagctacagacaattcttcctttgttcttgagttttagtcttatttatccttctattgaatacagtaatcatttctgtctaaaataagagatagtaaaag

SEQ ID NO: 871286 - DNA, 675 bp, Homo sapiens
cacccattctctctctcgactatgtgcacctgggccttaccgagtcaccttagtccctactggctggggcaggcctcatcactccattttgttaaattctctaccctggtgttgccagaactctggagccaatgcctcttttattaagggagattttatatacaaggaaagcttggaagaggtcagccagaggtgaattcctggagcagggggattttaagctgagcttcacaggcacagggtcaggaattagaggagggaagagagaagcgtggtgttccagacagaagcaggagagagtgggctgtgagtaggtgacagggaggggacagtccgcaagtggacacccacaggaagtgagatagatattattctgaggaattggtcttgggaagggaggtggcattggtggttgggttggcyagttagacccagaaaaccctgattcagagcagctggagataacttgacctatggcatgagaggagaactcaagagtctcaacttccagctctgtttttgtttttgtttttgtttttaacggtccagaagtcttttatttatttattttgtgcctattatgctatgaattcatagggaacaggttccagcagctcagacgccttaccattggttttcacaatgtgtgcttctctgggtggagcaggctggcgc

SEQ ID NO: 871287 - DNA, 619 bp, Homo sapiens
gaagaaaaatgagaagaaaaaccatacaaaaggtcaacgaatccaggagtttgttccttggaagaaattagactgctagctagactaataaaaaaaagagaaaaacacaatcagaatgacaaaggggacattaccaatgataacccagaaatagaaaaaaaaaaaaaacaccctcggagactactatgaatacctctatgcacamaagccagaaaacttagaagaaataaattcctggcaacatacaacatgttgagatttaaccaggaagagattgaatccctgaacagaccaataacaagttctgaaattgaatcagtaataaaaagcacaccaaccaaaaaaagcccaggaccaaaaacgcagctgaattctaccaggtgcataaaaaagagctggtaccattcctactgaaaatacttcaaaaacaatgatggggatggactcctccctgactcatgatgccaccgtgatgttgataccaaaaccttgcagagacacacacaaaaaaagaaagtttcaaggcaatatccttgatgaacatagatgcaaacatcctcaacaaaatactgttaatattatagtaaacaaagtccagcaacacatcaaaaagctaatc

SEQ ID NO: 871288 - DNA, 626 bp, Homo sapiens
tgcagttggccaccttcagaggatgcccacatatcctgcagaaccatccataaaccaggcctgagtctcctcttcctcggtcacctgatagcagggaactccctgtgagccatgggtgcttgaagagagaaggcagggttgcaggagtggggaccttcakcatttgggccacttcatgtcacttacttctgccttcagggcctgctctggcctggccatgtatctaccacttctaggtgatgatggggtgctgctgtgcacacccaactttatggcttggcggtcaaatcgcacccagttcatgatgagaagctcaagtcacatggtaatttggttgtccacggttaggtgttcagtctccactaaggccctgttctgaaccttacccaaaactagtagctttttaggtcactcggtaaatgggctggagtaactaacacacccagataaggcatatgttgcctccacactgggcattgtgcctcttttttgcttgcaggagaggcgtagtgcaacaatttatctttcaccttcaaagagacatctggacaggccccacaccactggactcccagaaatttcgctgataaagaactctgaattttactcatatttatttctaacct

SEQ ID NO: 871289 - DNA, 641 bp, Homo sapiens
agggggtttgatagggtgtgaggtagtgtctttactgtgctcatttgatcatatgtatggaggtgagatgatgtcacttttagtaattagtgaattactcaaagtcttcttgagctgtttgtttgatagaaagcagctgggctcaccttccagtttgaattctaattgctttggttataataaagaaactgaaactcacctgttcaggggttatatctgatgagggaaacattaccttaagttatctgattaagcataatttgggtgagagaaactggccatcattgacttgctccaagggctggaggatgccctttggctttacttgtaggctgaaacagaagaagacytgagcagtgcagatttccaggagaggagaaaggaaggtttggtgtactgaaaagaatgctggtctgaaaatctagaaatcaggatttcagcaacaaggaggtggaagaccttggcaaattggcctctcttctttttttttttctttcccctccctccctcgctccttctctctctctctctctctctctcttccttccttccttcctttctttcttatgttttttcaagataggatttcactgtgtcatccaggctgaagtgcactggcatgatgatggcttactgcagcc

SEQ ID NO: 871290 - DNA, 553 bp, Homo sapiens
cagttaaggctgatcctgtgatgcttgaagacattgtaatgacttcaaagaacatggtgctaagactccccctgccttgctctgctacttcacctggcatctgaaggtagatcccagtatgctcttggggataaattcaacaaaccaaatccagatgtggacttatacatttcaacattttacaccagcaaaagaccttggatatgtatgagggaatttgtcctaaggatgctagaccaaagaggggaaattatattttacatcaggttgaaaatgtctatattggcgcacttacaataaattytggatttaacgtactaggtcaaactagcccaaatagctggaagtagatttagtaattttcttggactttttttattattaaagctggaccaaatggtagtctatagcaaatgaagtgaagatatcagaaatgctttggtttaatataaatcaagaaatccaaagtcttaggaaaatattggagttgggggtggatttaatcacatgtgacttattcatcctttcaaaacatctagtccttcctgaaaaa

SEQ ID NO: 871291 - DNA, 587 bp, Homo sapiens
gtttttctctgaccttctcccaccctcctgtctttgagtctctttctccttgaaggttaaccatagaagttctcttccccaagatgggtcataaaaaccagaatgctttctccccaaaggtcaccataaaacctaaaaatcttactctaacttcccccccacccaccacctttcaggtaaaatctggccatttgccatcccattactgtgtatatacgcaaaggattataaatcatgctactataaagacacatgcacaygtatgtttattgcgacactattcacaatcgcaacttggaacaaacccaaacgtccatcagtgatagactggattaagaaaatgtggcacatatacaccatggaataatatgcagctgtaaaaaaaaggatgagttcatgtcctttgcagggacatggatgcagctggaaaccatcattctgagcaaactatcacaaggacagaaaaccaaacactgcatgttctcagtcataggtggaaattgaacaatgagaacacttggacccagggcagggaacatcacaccctggggcctgtcatggggtggggggctgggggaggaatagca

SEQ ID NO: 871292 - DNA, 669 bp, Homo sapiens
ttattctattctaatgtgatgatggcatagcagctggctcaccatatggcgagaagccaacacttaataaatactagattttttttctactgccatgtagccaagcttctacatggaattctagatttccagggtctgaacttgatctgagctccagggttctgacagtgatgccactgctgtggagtggagtccacagcagtcctacttaatagtacggttcttgaccactgccctgcttcagcttctattagcagagacattgaatcttaattcacttcagagctggcacccaacactactaatgcaagcatttttttaagtctgactcagtaactttctgccaaatccagyttccagatgttaataataatatgtaattaagaaatataggaaacatggctgagtgtggtggctcacacctgtaatcccagcactttgggaggctgaagtgggtggatcaggaggtcaggagatcgagaccatcctggctaacatggtgaaaccctgtctctactaaaatacaaaaaattagctgggtgtggtggcacacacctgtggtcccagctactcaggaggctgaggccggggaatcccttgaacccaggaggcagaggttgcagtaagcggagactgcacccctgcactccagcctgggcaacagagtga

SEQ ID NO: 871293 - DNA, 617 bp, Homo sapiens
acagctggaataaaagtggggtgagataaataatataaagattggaggaaagcataacattaatagattaaatagggcctccaagaggtgatatgattcagagaaaagctgggaggaatttagaccaaatagggatatgtgctccaccgtaagcagatgagatgaataaagggaatttatttaatagaggccagtaagactgccaggcgtttatcaggaactgaggagcccctgccagctgttcccatggtggagtgggaggtgaggtgatttgctttgagtgatgaggaatatggcaggtcagaaactaarggaaatagaagaggcttgaaaataagcaaaaataaactcataaaacataaaagtaattctgggaagcatttctgagttccagataagattgcaagtgcttctaataaaatacatttataagtttgtgagtgtgtttctgagagagagacaatgtgtgtgtgtgtttctgaagtatatgtgttcatcagaaccaaaaaagaatgtgcttgctttacaataccactactactattaaaaataattaataataatgacaaagatgtcagtgccattccacaaatattcagaacttcctaagagcaagg

SEQ ID NO: 871294 - DNA, 597 bp, Homo sapiens
tgtggcaatgagaagaatgtatatactttttttggtgtgcgggggaggttggagatttctgtaaaggtctatcagatccatttggtccaatgctgagtttaagtcctgaatatctttgttaattttctgcttcgaggatctgtctaatactgtcagtggagtgttgaagtctcccgctattattgtgtgggagtctatgcctctttgtagggctctaaggacttgctttatgaatctggatgctcttgtgttgggtgcatatatatttaggagagttcggttttcttgttgaattgaatccttaaccattatgtaatgctcttccttgtcttttttgatctttgttggtttgaaatctgttttgtctgaaattaggattgcaatccctgcctttttcctgttttccatttgcttggtagatttttckccatttctttattttgaccctatgagtttcattacatgtgagataggtctcttgaagacagcataccattgggtcttgtttttttatccaactggccattctgtgccttttaagtgaggcatttagcccatttacattcaaggttagtattgatatgtgtgaatttgatc

SEQ ID NO: 871295 - DNA, 527 bp, Homo sapiens
cagaggatccctcacgtaactgtgtgtccacaacacacagttatgtgaggagcttcattaaggacattagatatttctccagcttcacctgagatgttcaaatatttgtcacttgaaatggaaaatcaagtgtgtgcgtgagtgtgcaggagctcgccttgaaggcaccttccctcaytggcctggagaccttgggccaggagagatctggaaggaattgttcttggactggctcaggagctgagggtcactcaaacctgagaatgtttgaaaggtgaaatcgcccatctgctgtaggagggcacccattgttctgcctggacagtttctgggaggaaacagtttcctctgactttcctcagcctggatcaaggcactgagattggtgattcccactctcatactggaaagcagagtctgaggccccgctgatctctactttttctctccccaagtcaggagccaggccagaggctttgtaagcttcactgagttcacatgctctggaggggtcagcggtggaggcc

SEQ ID NO: 871296 - DNA, 578 bp, Homo sapiens
aagggcctgctaccaaaggaccatgttttccttgatcatgtgggagctctctcacagcttgggctctcagtcatcgcttccacagagtttggggtacaaggtatccttttgcgtatctactccagtggctgtaaagtattatggctctcatggccggtctgaggggatggagggcacagaatctaactgccagcatccttgtcctccttcctctgtgcatgaaatcccctgcacttccagaaagttgtcacttgtgccttccaagcagctgttgaaaaagtcagctctcacacccgacggtgtatggtctgcaagagtcccagtggtaagggaggcacatgacctkagtgagatgacggttgaggccagggctctccactgagcaagcagctgagaggcagggagggctaaactgactttagagatgcataaaaattgacatgcttctgaaagcataacttttacaaagctcacaggcatcatatatatatatatacctatgataatggctataactatgaatattctacactaattgtctcttgatagtcatatcaagccttaacattagcacattc

SEQ ID NO: 871297 - DNA, 626 bp, Homo sapiens
cccgtcaatgataggctggataaagaaactgtggcacatatataccgtggaatactattcagccataaaaaaggatgaattcatgtcctttgcagggacatggataaagctggaaaccatcattctcagcaaactaacacaagtacagaaaaccaaacaccacatgttctcataagtgggagttgaacaatgagaacacatggacacagggagggaaataccacacactggggcctgtccaggagtcgggrgctaggggagggatagcattaggagaaatacctgatgtagatgacgggttgatgggtgcagcaaaccaccatggcatgtgtatacctatgtaacaaacctgtatattctgcacatgtatcccagaactataattaaaattttttaaaaaatttaaataaatgaagtggctgaaatgtaaaaaaaaaatgtctccaagaaacaggtcagggtttcaacaaaagaatctttagtctgtaaatatacttgtatgtaaatccaagctaatactacctgtggtaagtatatcacagtatgaaagtgctatgtgatttagaagtgataattgtaccaactgtgacccatagctttgattttgatcataacttgtaatatac

SEQ ID NO: 871298 - DNA, 626 bp, Homo sapiens
cccgtcaatgataggctggataaagaaactgtggcacatatataccgtggaatactattcagccataaaaaaggatgaattcatgtcctttgcagggacatggataaagctggaaaccatcattctcagcaaactaacacaagtacagaaaaccaaacaccacatgttctcataagtgggagttgaacaatgagaacacatggacacagggagggaaataccacacactggggcctgtccaggagtcgggggctaggggagggatagcattaggagaaatacctgatgtagatgacgggttgatgggtgcagcaaaccaccatggcatgtgtatacctatgtaacaaacctgtatattctgcacatgtatcccagaamtataattaaaattttttaaaaaatttaaataaatgaagtggctgaaatgtaaaaaaaaaatgtctccaagaaacaggtcagggtttcaacaaaagaatctttagtctgtaaatatacttgtatgtaaatccaagctaatactacctgtggtaagtatatcacagtatgaaagtgctatgtgatttagaagtgataattgtaccaactgtgacccatagctttgattttgatcataacttgtaatatac

SEQ ID NO: 871299 - DNA, 595 bp, Homo sapiens
agatacacctaatgctaaatgacgagttgatgggtgcagcacaccagcatggcacatgtatacatatgttacaaacctgcacgttgtgcacatgtaccctaaaacttaaagtataataataataaaattaagaaaaaaatacatgtgtaccacatgcaaaaaacatgttttgtttcttaaatgttacttcatagtataatgctgtttygtgactcgtttattttcttggttttttgggacatctttctatgctaataaagataagtgctacttttagtagctgtacactgtcttttaaaaaaatgaatagcctttattgtgaccgggtcgtgaccatgaatatgccataatttattttaaaaattgccagtgttaaatatccaaatgacacataggtcatttaaattttttcagtgttttcagttttatagtaaacaggcttatatgtgtcttctggctgcttatttctgttggataaaatttggtaatgaaaatcctggtttaaaaggcatgaatattttttaagactttgaaaaacatactgctaatcgactcctttacattttatttcaaactgtggggtatatgagtgctt

SEQ ID NO: 871300 - DNA, 595 bp, Homo sapiens
agatacacctaatgctaaatgacgagttgatgggtgcagcacaccagcatggcacatgtatacatatgttacaaacctgcacgttgtgcacatgtaccctaaaacttaaagtataataataataaaattaagaaaaaaatacatgtgtaccacatgcaaaaaacatgttttgtttcttaaatgttacttcatagtataatgctgtttcgtgactcgtttattttcttggttttttgggacatctttctatgctaataaagataartgctacttttagtagctgtacactgtcttttaaaaaaatgaatagcctttattgtgaccgggtcgtgaccatgaatatgccataatttattttaaaaattgccagtgttaaatatccaaatgacacataggtcatttaaattttttcagtgttttcagttttatagtaaacaggcttatatgtgtcttctggctgcttatttctgttggataaaatttggtaatgaaaatcctggtttaaaaggcatgaatattttttaagactttgaaaaacatactgctaatcgactcctttacattttatttcaaactgtggggtatatgagtgctt

SEQ ID NO: 871301 - DNA, 580 bp, Homo sapiens
aatactgtcaaaatcaatggatctttcagatgtactattttgtaaacaaatgcctggatatccactcttcccaattttttttttggaattcctactgcccactctccatgtgcacttacagaaaaaacagatatcttttctcactgaaggctatgttagtcactatggtttattaaatatagcctggactcaatcccccattccccctcccaaaaaaaccttctgtaataagtcataatatagttatttaattatttaatagtcttacttttattatattgactattcttacaagttagatggtcattttcatggattttatcacattgttgctgaccaacagccttgtgctaaatgcgttgtaaacctcaggatgctttatcctgtctatctgtgccttgcattactgtacacactaaatccttcagggactattcgggtatayactgtgaaactgggaaggtgttaggagaggaacatcttcttatttctgcagtttcttggaaaaattagctagatggtttgtgaggctgttcttcctactgtgtcattttgtgccataaaaagccttctggtgttt

SEQ ID NO: 871302 - DNA, 464 bp, Homo sapiens
gaggcggatcatctccagatctctggaattccctctttagctctcccctttacaattctctgccctatgaactctaggcaccttggtttgcccaatctcttagtctccagtcagggaacccactgggctctgcgtggattgcctctggtatggtttaaaagwttttcaaggcagaaagagcaatcatgggcagcttgtttgtttcccatctctcaggatcattttcctcagttgcctaatgtcttggaaaccattccttacatgtattttgtctagggttttagtttcggtgggagagtaaatctagtccctattaatccatcttgggtgaaagaagaaattgatataacagttttcaaaaagtaataatcataccttacatgattgccatggtcttgggccttgtcactgcaccaaactcataagagaaactatttctttaaaaaaagattacggtaattctg

SEQ ID NO: 871303 - DNA, 636 bp, Homo sapiens
tgctggaggtccactccagaccctgtttgcctggatatcagcagcggtggctgcagaacagcagatattggtgaatcacaaatgctgctgcctgatcattcctctggaagttttgtctcagaggagtacccagccatgtgaggtgtcagtccgcccctastcgggggtgcctcccagttaggctactcaggggttagggacccacttgaggatgtagtctgcccgttctcagatctcaagctgcgtgctgggagaaccactattcccttcaaagctttcagacagaaacatttaagtctgcagaggttactgctgtcttttgtttgtctgtgccctgcccccagaggtggagcctacagaggcaggcaggccttcttgagctgtggtgggctccacccagttcaagcttcccgaccactttgtttaccgactcaagcctgggcaatggtgggcgtcccctcccccagcctcgctgccgccttgcagtttgatctcagactgctgcgctagcaaggagcaaggctctgtgggcataggaccctccgagccaggtgtgggatataatctcctggtgtgccatttgttgagtccattggaaaagcacagtattagggtgggagtgacccaattttccag

SEQ ID NO: 871304 - DNA, 636 bp, Homo sapiens
tgctggaggtccactccagaccctgtttgcctggatatcagcagcggtggctgcagaacagcagatattggtgaatcacaaatgctgctgcctgatcattcctctggaagttttgtctcagaggagtacccagccatgtgaggtgtcagtccgcccctagtsgggggtgcctcccagttaggctactcaggggttagggacccacttgaggatgtagtctgcccgttctcagatctcaagctgcgtgctgggagaaccactattcccttcaaagctttcagacagaaacatttaagtctgcagaggttactgctgtcttttgtttgtctgtgccctgcccccagaggtggagcctacagaggcaggcaggccttcttgagctgtggtgggctccacccagttcaagcttcccgaccactttgtttaccgactcaagcctgggcaatggtgggcgtcccctcccccagcctcgctgccgccttgcagtttgatctcagactgctgcgctagcaaggagcaaggctctgtgggcataggaccctccgagccaggtgtgggatataatctcctggtgtgccatttgttgagtccattggaaaagcacagtattagggtgggagtgacccaattttccag

SEQ ID NO: 871305 - DNA, 473 bp, Homo sapiens
tagtgctagtgctgcaatgaacatacttgtgcatgtgtctttatatgtctttatttctttaggtgtatacctactaatcagattgctgggtcaaatggtatttctgcatctaggtctttgaggaatcaccacactgccttccacgatggctgaattaattrcactcccactaacagtgtaaaagtgttcccttttgttcgcaacctcaccagcatctgttgttttttaactttttatgaatagccattctgactggcatgagatggtatctcactgtggttttgatttgcatttatctagttattagtgatgttgaacttttttccatgtttgttggttgcatgtatgtcttcttttgagaattgtctgttcaatttaccctttattgactatgaatgtgtttctccttaggtctttggctagagaattttaccaactcctcaatcccttttactgacaatgataatggacaa

SEQ ID NO: 871306 - DNA, 578 bp, Homo sapiens
aagtgcatacaaattagaaaggcagatgttaaattgtctgtttgcagatggcatgatcttatgtacagaaaaccttaaagtctccaccaaaagacagaaatcatgaacaaattcaggaaagtttcaagatacaaaatcaacatacaaaaatcaattgtgcttctatatgttaacaatgagctagttgaaaacaaaatcaacaaaataatcccatttaaaagagcatcaaaaataataaataggaataaagtttaacaagatgatgaaaaatctatacactgaaaagtacaaaataatgatgaaagaaatcagagaagatacaaataagtggaaagatacmccatttccattgcttggaagaatgaatattttttgaaatgcccacactaccaaaagcgatctacagattcagcacaatctcaatcaaaattctaatagtatttgtaacaggtacagaaaaaatgttaaaattcacatggaaccacaaaagacccataatagctaaagcaatcttaagaaacaagaacaaagctggcataatatctgatctcaaattatgtttcaaaggtatagtaatg

SEQ ID NO: 871307 - DNA, 666 bp, Homo sapiens
ttgctagtgtcaaagggtggtgctgtaagttataatgctttaaaaccaaattggctcctaagaaatatgtcattagattatcaagttgttgataaaatactggtggtaacatttattaagctcggaacataaacttatgaatcttatttttacagctttttccttccttccatttattgtgtaggcagtctcttcttgccatcatattttaagtaacaaattggaatacactatttattgactcagatgttctcagtgagtgctacagctattcccacaaaagcacgttttccagagaatctatgttaattctttatacasctcagatatttagatagtccagcaaaataaccacatcaaacgatcccatgactgatggatgaatttaaattataagattgctttcataactactgaattcttctatctggatatgaaaatagatattttctataaatcagagttagtatacatttcttagccaaatggctttccatttgttctgtgtcatctacaaataacatgttatcaaaaatctcactctactgaaatgaaagttttatgtctttagagagaattttttaaaaaatatcagtcaaagtacaaactccatgttaaaataaaatgttgttgaacaacaaatatttcttattataatagtaattt

SEQ ID NO: 871308 - DNA, 613 bp, Homo sapiens
ggagatttttgggctgagaagatggggttttctaaatatacaatcatgtcatctgcaaatggaaatttgacttcctcctttcccaaaagaaacatcttttatttttttttcttgcctgatgccctggccagaacttcccaccctttgttgaataggagtagtgagagagggcatccttgtcttgtgccagttttcaaagggaatgcttccagtttttgctcattcagtatgatattggctgtgggtttgtcataaatagctcttattattttgagatrcattccattaatacctagtttattgagagattttagcatgaagggctgttgaattttgttgaaggcttttctgcatctacttttctccctctttcttactccaattctcttttctctcaattatttctcacctttttcttttttcttttttttttttaaatggagttttgctcttgttgcccaggctgggagtgcaatggcctgatctcggatcaccacaacctccacctcccaagttcaagtgattctcctgcctcagcctcccaagtagctgggattacatgcatgtgccaccacgcccggctaattttgtatttttagtagagatggggatt

SEQ ID NO: 871309 - DNA, 518 bp, Homo sapiens
gacttctaactcaaactccacctcttaagtttgtggttcaccacttccagcctggtgacttcatgctgattaagacttggaaataagacaagctccacccaagctgggaaggtccctatcaagtgctcctgaccactgagatggccctgcaaacagctgaatggaggtggactcactatattcgagtcaagggactggtaaaagagatcccggaagggagggaaaaagatcagtggaaagtgcccgagtctaactttaactctwaactttaaggaacccttaaagtgaactctaagaaaaatctaaaaagaaaacatgagctggccccatttctggaaattaacatggctgggatgggctaatatacaaagagcagaaggtcaaaatggaaactggcagcagactcttctctacccagtcaggttggtgattaatgtgaccaagacagtagcaccccagactataagatttaatgcctgccaggttttaccttgtggaaatttaaaaaatcagagaca

SEQ ID NO: 871310 - DNA, 606 bp, Homo sapiens
ccagttcatttttgcagctacagagagaaatttattagtctgtattgccgcctttctgctgttgtggagctggattctctgaacacccaacagtccctcagggaagcaatctcagacagcgaggttgcagctgccaaacaaagacaccagcaagttttagatttcattcaggtaattgtttgttccttctggggtaaaaggaagggagaagaggcagggtggaaagggtgaaaagccaagcatgggaaaggacagcagtccaggctgattcaaagaacacggtgtgtaagttgcctattgagttggttaaaatgtggmgctcaggcagataagttttcaaacaaagccttaagaaaaagttacagataattcacaatattactaagaaatgttatcagtcaccatggtgggtagtggtagctttccatacgggagagaaaaatcaccccccagaagcagtaactagaatattattcttaccttgtagcccattgacaattctaatggaaagaaaaattgtattaattaattcaatatctcagagaaaaagaaaataaaatgacctaccagtttatgttaacccagatccaattagaactaaaattc

SEQ ID NO: 871311 - DNA, 647 bp, Homo sapiens
tcaataaatatcaccttcaatcctggaattctctctctacaccttcttccttttcatttttacctcaaatttataagtcattccatcataatttcatttgacaaatattacccaatacccactatatgccaagcactgttgtaggcagtgggactcagcagtgtataagacaagtccttgtcctcatggagcttatgttctaattgtgaaacattgacaataaataagaaaatacattcaagaaatttggtggcaataactgtatctcaaatattatatctcccaaaatatttctccaatattgtcacttctctgcacatccattgccactcctttagtctaaaatcttccctgccacagtctcctaacttaactctgtagcgggtccaatctttcyccatgcagcactcaaagtgaagggtggattatgttccttctctgctgaaatccttcagtgacttcctactgtgcttagaagaaacctagacttctaagaaacctggagggccccacactatcaagtcctcacctaccctccatcttcttctcctaacaatccctctgcctctacacttgggccgtcttggctttgcagtttcttgcaggcaccagtttcctatattggggccttgtatgtctctaaggct

SEQ ID NO: 871312 - DNA, 647 bp, Homo sapiens
tcaataaatatcaccttcaatcctggaattctctctctacaccttcttccttttcatttttacctcaaatttataagtcattccatcataatttcatttgacaaatattacccaatacccactatatgccaagcactgttgtaggcagtgggactcagcagtgtataagacaagtccttgtcctcatggagcttatgttctaattgtgaaacattgacaataaataagaaaatacattcaagaaatttggtggcaataactgtatctcaaatattatatctcccaaaatatttctccaatattgtcacttctctgcacatccattgccactcctttagtctaaaatcttccctgccacagtctcctaacttaactctgtagcgggtccaatctttccccatgcagcactmaaagtgaagggtggattatgttccttctctgctgaaatccttcagtgacttcctactgtgcttagaagaaacctagacttctaagaaacctggagggccccacactatcaagtcctcacctaccctccatcttcttctcctaacaatccctctgcctctacacttgggccgtcttggctttgcagtttcttgcaggcaccagtttcctatattggggccttgtatgtctctaaggct

SEQ ID NO: 871313 - DNA, 694 bp, Homo sapiens
gttatgagttactgcacctttcatctctgacatctgcccccaagctcatcacatattccaggttcgtacttcctcttttatgcacaggcatattaaaatctctgtctatatttaagttgttcctcacctaatcaggtacagttatactcaaattcatttatccatccattcatttaaccattatttattgtgtaccttctaattacaaggcactatgccaggcaccatataagattaaaagatgaataagacatggttcttgttctcaagacatttgcagtctagaaggagatttaagacactgtcagatagctatagcaggaaaacgggtgctatgtgcaaccatcagcagagtcagtggcaatgaaagtgcagaagaggtaataataatatttccaactagaggtttcagggaagcttttatggagaagatggcatctgagtttggccttgatgggtgggaggaatttagacagccatagatggtaggtagtgtcccagatgaaaaagcagagtaaacaatgtgtagaagcagaaaaacacagagcatgtagaasaatgattggtccattacctaggttatgtgtaggggagctgtaaaggcaaggatggagcatgtgaaattttgatctttatttgattttgctggggagtcaacaaatattgttggacagaggaataaaataagagttaa

SEQ ID NO: 871314 - DNA, 652 bp, Homo sapiens
aaggagcttcctttatacttggggaggtaacatctggaatatttagagaggaatataagatgatgggtagcaaagtgccaactggcgagaattcgaatatgctgtgaaaggtgggggcagggggaggttagtctggaaaggattaggtgtattctctttgtcatgggagatacaccaaacagtgactgtgggagagccagagatgctccaagcagtggaaaccacagatgttgccctgcaactggtagcttcatttttttcttttgctaagcctgctccaagagtggaggggtctcgttgtcgtcatggttttgatgatctctggagacattagccttggggagagaccttatggggcatggggtggcagaggatgaatccagaaagaagtagagggkagaatgagaataatcaagggagccaatgaagcaaccccaataattaggcattggctcagttggttggatccttggtggccatcagaacttaagttctctcctgccttctgctcctctctagagtgctcaggactgtagatggcgtggttcttgggactggctgtttaattctggcttcattttaattcccaagattatttttcttgctgtagcttgtgttgaagaccatatgggcatttcagacatcccatgcc

SEQ ID NO: 871315 - DNA, 607 bp, Homo sapiens
tacttctgtctttttgtttgtctgtgccctgcccctagaggtggagcctacagaggcaggcaggcctgcttgagctgtggtgggctccacccagttggagcttcctggccgctttgtttacctaagcaagcctgggcaatggtgggcgcccctcccccagcctcgctgccgccttgcagtttgatctcagactgctgtgctagcaatcagccagactccgttggcgtaggaccctccgagccaggtgcgggatataatcccgtggtgcgccgttttttaagcctgtcggaaaagtgcagtattcgggtgggagtgacccgattttccatgtgggtctgtcacccctttctttgactcagaaagggaactccctgaccccttgcgcttmccaagtgaggcaatgcctcaccctgcttcggctcgcgcatggtgggtgcccactgtctagcgctccctagtgagatgaacccggtacctcagatggaaatgcagaaatcacccgtcttctgcattgctcacgctgggagctgtagaacagagctgttcctattcggccatcttggttcctcctctcttccacatttttatcaattactcaagttgtttt

SEQ ID NO: 871316 - DNA, 604 bp, Homo sapiens
gtaaaatgttggcttctaagtgctattgttctctaaataccaaaaaacggacatgacctagggaaaacagaaatataagggatgctaaggggctaaatgtagttctagactttgaagaaagaaggctagaagacctaacagagattcagaattgtaaytttgttagaaatatggagtacacattctgctgctgtatccccttgcaatttagtttcagagatcatagtgtgagtattggttttgatgggaaaatgatttggctggggtaagagaagctaacagagtatgtttaccactgctttgaagacccatctccacaaaccactagggacccatgagacatctgaccaccagaactttagagactctgtgcttctagacttccttgtccaaaagatggcacagatggatgcagactctgaagaactaggtgtttattgccagaaacaaaaatagaaagtgtcaatgagattgatgaaagataggcagaagcagctcccagaacaaagaacttcatgagccagtttcctgcattgatactttgcactgcctttttaaagcataaaataaactttatttttagaacagttttaggttcacagca

SEQ ID NO: 871317 - DNA, 604 bp, Homo sapiens
gtaaaatgttggcttctaagtgctattgttctctaaataccaaaaaacggacatgacctagggaaaacagaaatataagggatgctaaggggctaaatgtagttctagactttgaagaaagaaggctagaagacctaacagagattcagaattgtaattttgttagaaatatggagtayacattctgctgctgtatccccttgcaatttagtttcagagatcatagtgtgagtattggttttgatgggaaaatgatttggctggggtaagagaagctaacagagtatgtttaccactgctttgaagacccatctccacaaaccactagggacccatgagacatctgaccaccagaactttagagactctgtgcttctagacttccttgtccaaaagatggcacagatggatgcagactctgaagaactaggtgtttattgccagaaacaaaaatagaaagtgtcaatgagattgatgaaagataggcagaagcagctcccagaacaaagaacttcatgagccagtttcctgcattgatactttgcactgcctttttaaagcataaaataaactttatttttagaacagttttaggttcacagca

SEQ ID NO: 871318 - DNA, 615 bp, Homo sapiens
ataagaagacttctaaaaatatggataaaagtgaaaataaaaacacttgccaacacactaccaagtaacagttattatcatattgtaatttattatgatagcattttctgcatgaatatatatacatttcttcctttcaagaatagatttttactcatgaatcccttttcacttaaaacatcatgactttttaatgtcattaatattatcttataatctgcattagaataactatatatcattctatgaatgcaccattaattgactccagttgttcatttagacrtttagagacttttaatgagtattccttatcattgtgtgtatgtgttatttctctgtttaaaatggggggtttgcttctgaatttctttgggaacttaatttaatagtatattactagtagggtttcaactttttaatttactcatatattacaatttcaaatttcaagaaacaataggagttaggttttggttgtgtgagcataataaaagaaggtacaccacgaactcctcacattcttactaacttatagtcctttgcatttattttgcatatgtttttaaacagaaaagaaaatgagtttctttcttattgtcaagtgaatatatt

SEQ ID NO: 871319 - DNA, 444 bp, Homo sapiens
aaggttgacagaaatgaattttgagtgtccaacaacattgtcttaccaatttgccttgtgaaacgtgattagacactccaagtttccataaaataaactaagatgacaaatcttcttatataatgagattaccttacttttgtttaaggaatatatgttctggtgtgtagaatgtagaatgatccttaggataataagaaggtataattttactttaggggcttttgctgaatgtcagcttatgcatasagtttaaaaattataaagaagaggaggaatttatcctatcagtgcgatggaaaattcattgttagggatttggaattttaaaaatgtacctgaaagatgtttaatatccctaacaactattaagacttttatctgccctcaagggaaatactgtagattttcattcatattaaaatgaaatgtagacatttaact

SEQ ID NO: 871320 - DNA, 614 bp, Homo sapiens
gccttcatcaccttagaatattcctttcagtacctcatatgtctaaactttattagaggcatgaaagacagacaaggcaaagtatttaatagtccagagtgagtaaatgaccagggtttctttcagcttggtggtaagaatagctccccatctgttctcttactcatctttccccttcgctccttgctcagtcttcctcgatctcagcctctttcttactaatggggcatgtgccaatcatatcctggcctcagggcctttgacctcgggctcattttacctggaaaattctctcctcaaaagttgcatagcttttgcrtggctacctccttcacttcaggtctctgagccaaatgtcaccttattgcgtagtccttccctgaccagcccatgtaaaatacaactgcttccttcctccacatcctcctgccttatgttcctttgtagcatttatcactacctggtatgctgtattttattcattttttgtttactgtctatctcctgctcctgaaatgtaagttccatgaaagcaggaatttgacctgttctgtttctcttctagattccacagtctgaaaaagtgcctaggatataggaggcattcaataaac

SEQ ID NO: 871321 - DNA, 594 bp, Homo sapiens
cctacagagttggttaggtaatattattactgccattatcattattactgcctaaatatttgggtaatgaaatcaaagtcaaatgttctgggagaagctgaggaatggctttgaccctccacgttcctatttagtggagcctattctgggmaggctgccttcgcttgctgcaaaatcaagacaagttcaggagctgcaggatgattcagcatggggtcccaaactccagtcatttgctagtttttgtcatatctacctataacgtttgctattatttatccaatattgtgtagaaaaaaattgcttgtgcttttaaagctttttaaaaactatcttttggagaaatttaaaatataaagaaaagttacaaaaatgatgcagaatttttgtagacctttcacctagtttcctgcattgttggcattttactgcattgaccttactatcattctctctctacacacacacacacacacacacaactgtatattttttctcattcgagagtaagttgcagatatgatgccccatttccccttaatacttcagtgtatatttcataaaagacaagattacttttcttcatgaccaaag

SEQ ID NO: 871322 - DNA, 700 bp, Homo sapiens
tctgcagattttctagcagtgccatctccaaaatgtgttttaaactctttatttttttaattattattagtattattttgagactgagtcttgctctatcacccaggctggagtgcagtggtgcaatctcagctcactgcaacctccgcctcccaggttcaagcgatttcgtgcctcagcctcccgagtagctgggattacaggcacccaccaccacgcccagctaatttttgtatttttagtagaaatggggtttcaccatgttggccaggctggtctcgaactcctgacctcaagtgatccactcacctcggcctcccaaagtgctgggattacaggtgtgagccaccatgcctgggctaaactctttaagtctctagtaaatgcagctagattcaaatgggctgataaccaaattttaacacatcagcattcaccaccaggtttacttttattttcagattggctcattttgtgcagaccttagagcaaagtttcctttatggtatctgtgtacgtatccaaacttcttttaattgttcacagattttaaaagcrgtagcaccacatggttgtgtagatcagacctgtgtatttagatcagacctgtgtatcacgtaagtgtgtgagtgcagtgcagatgagcaccatttagttatatgtgctaggcaaatctccaacacagttgatgtgtagtctt

SEQ ID NO: 871323 - DNA, 673 bp, Homo sapiens
aatagacatctacagaaccctccactccaaatcaacagaatacacattcttctcagtgccacatggcgctttttctaaaatcaaccacatagttggacgtaaaacactccttagcaaatgcaaaagaagtaaaatcataacacagtctctcagaccacagtgcaatcaaattagaactatttaagaagctcactcaaaaccacacaattacatggaaatcgaacaacccgctcctgaatgactcctggataaataatgaaattaaggcacaaatcaagacttttttgaaaccaacaataacaaagagacaatgtatcagaatccctaggacacagctaaaacagtgtcaggacggaaatttagagcaccaattgcccacactagaaagctagaaagatctcaaatcaacaccctaacatcacaattaaaagagctagagatgcaagmgcaaactaatccaaaagctatcagaagacaagaaataactaagataagagcagaattgaaggagatggagacacaaaaaaaccctccaaaaaaatcagtaaacccaagagctggttttttgaaaaaattaacaaaatagatagactgctacctagactaacaaagaataaaagagagaagaatcaaatagacacaataaaaaaagaaaaaggggatatcaccattg

SEQ ID NO: 871324 - DNA, 589 bp, Homo sapiens
tctttagcacacaataagataatatttttgtcacatagtgttaaatgtgcattaatcatgaggcagctcaccttcctcataaatcacacatgaaaaatgacaggtgatattctcattttagtggtattatctttattaaaagccacataatgccttggtaataagaaaatttattctggaataaattaaaacatttctatgcactctgaaaattaatttccttttgtttcaattcatattcayaccccgatcattccagtctagatgtataagcttgacttattctggtcaccattaagaatatcctcaaggagaccaattttggttcctctggaagaataatataaatttagatttctgggaatggtgtgaacagaccctggagaataagatgctgaaggtttagttttacaacataatagaaaaaagaaaacttattttcttgtcatacctaagtaccagttgcctgggctacgtcacagaatggtaaagcagtcaataaaattaaatattgtatgatactttttatactttgcaaagtgttttaatgctaataatctcaatgagaaaaaatatagagatacacatt

SEQ ID NO: 871325 - DNA, 597 bp, Homo sapiens
tttattttgctgcgcagaagcactttagtttaattagatgccatttgtcaatttttgcttttgttgcaatggcttttcgtgtttttgtcatgaaatctttgcccatgcctatgtcctgaatagtatggcctagattttcttctaagttttttatagtttggggttttacatttaagtctttaatccatcttgagtttatttttgcataagatgtaaggaaaaaaaggaaatctattccccattscttgtttttgtcaggtttgtcaaagatcagatggttgtagatgtgcagtcttatttgtgagttctctattctcttccatcagtctatgtgtctggttcttgtaccagtaccatcctgttttggttactatagccttgtagtgtagtttgaatcaggtagcgtgatgcctccagctttgtttttttttttttttgcttaagattgtcttgaatacaaaggctcttttttggttccatatgaattttaaagtagttgtttttctaattccataaagaatgccaatggtagttcgatgggaatagcattgaatctatcaattacattgcacagtatggccattttcatgatattga

SEQ ID NO: 871326 - DNA, 597 bp, Homo sapiens
tttattttgctgcgcagaagcactttagtttaattagatgccatttgtcaatttttgcttttgttgcaatggcttttcgtgtttttgtcatgaaatctttgcccatgcctatgtcctgaatagtatggcctagattttcttctaagttttttatagtttggggttttacatttaagtctttaatccatcttgagtttatttttgcataagatgtaaggaaaaaaaggaaatctattccccattccttgtttttgtcaggtttgtcaaagatcagatggttgtagatgtgcagtcttatttgtgagttctctattctcttccatcagtctatgtgtctggttcttgtaccagtaccatcctgttttggttactatagccttgtagtgtagtttgaatcaggtagygtgatgcctccagctttgtttttttttttttttgcttaagattgtcttgaatacaaaggctcttttttggttccatatgaattttaaagtagttgtttttctaattccataaagaatgccaatggtagttcgatgggaatagcattgaatctatcaattacattgcacagtatggccattttcatgatattga

SEQ ID NO: 871327 - DNA, 605 bp, Homo sapiens
acttaaatgtcccagtctaacagctttgaagagagtagtggttctcccagcacacagctggagttctgagaaygggcagacagcctcctcaagtggctccctgacccccaagcagcctaactgggaggcaccccccagtatgggcagactgacacctcacatggctgggtactcctctgagacaaaacttccagaggaatgatcaggcagcagcatttgcagatcaccaatatccactgttctacagccacggctgttctgcagccaccgctgctctgcagccaccactgctgatacccaggcaaacaggatctggagtgcacctctagcaaactccaacagacctgcagctgagggtcctgtctgttagaaggaaaactaacaaacagaaaggacatccacaccaaaaatccatctgtacgccaccatcatcaaagacaaaagtagataaaaccacaaagatggggaaaaaacagagcagaaaaactggaaactctaaaaagtagagcaccgctcttcctccaaaggaacgcatctactcaccagcaacggaacaaagctggatggagaatgactttaacgagttgagagaagaaggcttcaga

SEQ ID NO: 871328 - DNA, 605 bp, Homo sapiens
acttaaatgtcccagtctaacagctttgaagagagtagtggttctcccagcacacagctggagttctgagaatgggcagacagcctcctcaagtggctccctgacccccaagcagcctaactgggaggcaccccccagtatgggcagactgacacctcacayggctgggtactcctctgagacaaaacttccagaggaatgatcaggcagcagcatttgcagatcaccaatatccactgttctacagccacggctgttctgcagccaccgctgctctgcagccaccactgctgatacccaggcaaacaggatctggagtgcacctctagcaaactccaacagacctgcagctgagggtcctgtctgttagaaggaaaactaacaaacagaaaggacatccacaccaaaaatccatctgtacgccaccatcatcaaagacaaaagtagataaaaccacaaagatggggaaaaaacagagcagaaaaactggaaactctaaaaagtagagcaccgctcttcctccaaaggaacgcatctactcaccagcaacggaacaaagctggatggagaatgactttaacgagttgagagaagaaggcttcaga

SEQ ID NO: 871329 - DNA, 605 bp, Homo sapiens
acttaaatgtcccagtctaacagctttgaagagagtagtggttctcccagcacacagctggagttctgagaatgggcagacagcctcctcaagtggctccctgacccccaagcagcctaactgggaggcaccccccagtatgggcagactgacacctcacatggctgggtactcctctgagacaaaacttccagaggaatgatcaggcagcagcatttgcagatcaccaatatccrctgttctacagccacggctgttctgcagccaccgctgctctgcagccaccactgctgatacccaggcaaacaggatctggagtgcacctctagcaaactccaacagacctgcagctgagggtcctgtctgttagaaggaaaactaacaaacagaaaggacatccacaccaaaaatccatctgtacgccaccatcatcaaagacaaaagtagataaaaccacaaagatggggaaaaaacagagcagaaaaactggaaactctaaaaagtagagcaccgctcttcctccaaaggaacgcatctactcaccagcaacggaacaaagctggatggagaatgactttaacgagttgagagaagaaggcttcaga

SEQ ID NO: 871330 - DNA, 642 bp, Homo sapiens
agttgattcttttgaatgggcaaagaaagtggtttcttgagatggaatctactcctggtgaagatgatgtggacattgttgaaatgaaaacgaaggatttagaatactacataaatgctgtttataaagtagtggcagagactgagaagatttacccaaattttgaaagaagttccactgtggaaaaatgctatcaaacagcatcacatactacaaagaaatactttgtgaaagaaagaattaataatggagcagacttcactgttgtcttaagaaactgccacagccaccccagccctcaccaacttccactctgatcagtcagcaaccatcaactttgaggcaagaccctccaccagcaaaaagattatgactcacagaagactaagatgatcattagcaatttttagcaataaagcattttttaattaaggtatacrtatttttcagatgtagtgctgtttcatacttacagactacagtataatgtaaacataaattttatatgcattaggaaaccaaaaattctgcatgactcactttctttagctattcactttgttgtggcagtctggaacccaacccgcagtaactccaagggtatgtctatatccctgaaaattaaagcattttgcattcagg

SEQ ID NO: 871331 - DNA, 673 bp, Homo sapiens
ctattagcatttggctcctctttacttatgcaaatttctgcagcctgtttgaattcctcccctaaaaatgggctcttcttttctaccacatggccaggctgcaaatttttcaaacttttatgctcttcctcccttttaaatacaagttccagtttcagaccatatctttgcttacacatatgaggaaaggttgctagaagcagccaacccatatcttaaacacctttgctccttaaaaatttcttccaccagttaccytaaatcatctctctcaagttcaaagttccactgatccctagagcaagggcacaatatagccaggctctttgctaaagtacagcaaaagtgagctttactctagttctcagtaagttcctcatttccatctgagatctcctcagcctagatggacttcattgtccacatcactatcagcattttggtcacaaccattcaacaagtctctaggtagttccacactttccctcatcttcctgtcttcttctgagccctccaaactgtttcagcttctgcctattaccgagttccaaagctgcttgcacattttcaggtatctttatagaaatgccccactccttagcaccaattttctgtattagtcaattgttacactgctataaagaaatatcagagactgggtaatttataaaga

SEQ ID NO: 871332 - DNA, 605 bp, Homo sapiens
ttcattcatttcgtcttccatcgctgataccctttcttccagttgatcgcattggttactgaggcttgtgcattcgtcacatagttcttgtgccatggttttcagctccatcaggtcctttaaggacttctctgcattggttattctagttatccattcatctaattttttttcaaagtttttaacttctttgccattggttcgaacttcctcctttagctcggagtagtttgatcttctgaagccttcctctttcaactcatcaaagtcattctcaatccagctttgttccattgctggtgaggagatgcgttcctttggaggaggagaggccctctgatttttagagtttctgrtttttctgctctgttttttccccatctttgtggtttgatctacctttggtctttgatgatggtgacgtacagatggggttttggtgtggatgtcctttctgtttgttagttttccttctaacagtcaggaccctcagctgcaggtctgttggagtttactggaggtccacttcagaccctgttttcctgggtatcagcagcggtagctgcagaacagcggatattggtgaaccgcaaatgctgctgcct

SEQ ID NO: 871333 - DNA, 621 bp, Homo sapiens
tcatccaaaaaacttttatcatgggacacagtcatagctgaaaggaagacacggataattatcactccctcataaatttctattcagttgcacatatattgggtatctattttgtgccaggacctctgtaaggaaatatcaagatttttttaaaagacatagattctctccttgaggacttatcaagtctgaaagggaacaatagccatgagaaaataagtataagacattacttgaagtacattaaaaccacacatagaaagttaatgatgacacagaagaaggaacttgaagggatraaggaatgatcctcagaaatgaggtaatacttgagttgcactttggagaatcaatcagtttgtcaggcaaagatagatagaaagtaaggaaattctcaacaaagaaaaaggcaggcagaaaatcatcaaagggtaaaatagtaggataggtttggaaaactgcaattagtttaatattggtgaagttaaaattgttaggcaacagagaagaaggaaggggccaaaccatgaagtggcttatatgccctgcttggtcctaaacctgcaggcgattaagagttttcccaacaagggctcagatatgccatccccttagcttctc

SEQ ID NO: 871334 - DNA, 619 bp, Homo sapiens
cttagcagttgcaggagatttccagaagggcattgcagagggtgccagtgccctgccatagccccttagcacttgtcacatacatgtcagcagcttcttgttgcaagactgctaatctcccctctctgcctgagacagcatgcttggccagcacacaagaaaggacaaaaagacccaggagtggatgcccagaggagcagctctcaaccaaaaaggggtaggcatgggtagcctgagcacctcagtgtcttttccccaagtaggaaacctctaaggtatatcctacagtgtccctatgaagtccagtgatgctgaacccctgttgccaaagcagtaaygtgttcattacaacacgttccagaggttttctttcctgtcttaattccccatcttctatgagtgtttctggatagactgcctcaataaatttcttgcattcaaatcttcatcacagggtcagcttcaggaaaatctcaacataaaagaagtgatcagaatcttgaaagacatgtagaattctttctacatgttaaaaaaaaaatctgaagagggcaggatctccatagtgcacgagaagaaaatcaaagctctgttttccactaagctgcctttcctctag

SEQ ID NO: 871335 - DNA, 633 bp, Homo sapiens
agagaaatgcaaatcaaaaccacagtgagataccatctcatgctagttagaatggcaatcattaaaaagtcaggaaacatcaaatggtggagagaatgtggagaaataggaatgcttttacactgttggtaggagtgcaaattagttcaaccgttgtggaagacagtgtggtgattcctcaaggatctagaaccagaaataccatttaacccagtaatcccattactgggtatatacccaaaggattataaattactctactgtaaagacacatgcacacatatgtttattgtggcactgttcacaatagcaaagacttggaaccaaccaaatgatagactgaataaagaaaatgtggcacatatgcatcatggaatgcagccatgaaaaagaatgagttcatgtcctttgcagggacatgkattaagctggaaaccatcattctcagcaaagtaacacaggaacagaaaaccaaacaccacatgtactcactcataagtgggagctgcacaatgagaacacatggacacagggaggggaacatcacacactggggcctgctggtgggtggggggctaggtgagggatgtcattaggagaaatacctaatgcagatgatgggttgatgggtgc

SEQ ID NO: 871336 - DNA, 619 bp, Homo sapiens
tcttaaagaaaaaagttagttatacagaaattagatttctattctcaaaatagtcattttgagaatagcacaccttaaatgtgtgctattactatggatgtgaaagtgattcttgtttcattataacgtaaagcttgccctctagtggtttcaggctagttatttattcagggaaaacaatttaatggaagattcactactcaaaactcaacaatggtatacttcttctatttcttcaggactagcatgctaataatgtaaatattatgagcaaaatacagcaactcctaagaaatatatattagaaaagtatgtcttctatagacrccaccaataattttttaaaaccaaatatatttttaataaacatggaatatttattaaaagttaaattaaaatgttaggcttcatttttttgttttaattgtcaacagctctactaatattgtgattgacagtattgtctcagtcctttcctgggcatgtgcacagtcctgagtatgtgtgtagcctcctagatttcttggttatgtttagctttgcaaagtttcttatgatcatgtcagtcctcagtattttcttttgtattttggtcaagttcttgttcctcccaacaaat

SEQ ID NO: 871337 - DNA, 590 bp, Homo sapiens
ctatcacagttaatatgcaaaaacttcttgctattaggaaatgaaccaagatatagtattatgaaggctataacccttaaatataaagtaagcttcaaatgtggtactagattaaggaggtatatttttcataactctatatcgagcatctcctcatatcttaaattgaaaggcttaaaacagaatcaggtaactttaggctacccaaattcctaggcccacaacattcttgcactaaaaataaataaataaaaagcaggtcataaacagttcctgtgttttgagctaaatttatagctgaactaagtatgtagcagatgctcagagcattcttgttttactatcacaaatggcaaggaaaaaatcctgctaggataaattcaagtacagcagtccagttggtggatatttcaagtcaaggcccgcttgcagmagcacagctgcacagctgcacagctgtcttcctgacatcattccagaatctcaaagtagccaaagagtagtcatacctgcagttaaaatcaactaggttgagtgtgcaaactcctgagggaggcttcaattacattaatagagctgagcttcagtat

SEQ ID NO: 871338 - DNA, 602 bp, Homo sapiens
ggtaaattctggtattattccttctgttcttaaaatacactttgtagtttgttttagatagattatatttcaattgctttacatctatttgttcactgcattattagacacttgagtaaaagtactaagcctttacagtacttagcataggagaggttcaataaatgtgaaaacataccaattaattaatacaatatttttattcttaatactttgtttaattctgtaaggcaggggaataaaagcacatagtctgatcatttaaaaatataccccaaataattgataaataaaagattttattctataactagaaacaagtatgtactcttagttctaactaaatgattttttaagaatattattttccttgtaaagattgaatttgtaatttataccttataagatattatcaatkgtctaaatgggttttgaatttataagtgttcctttaaatattagatgtattacatcagatgccttctattacctttttgaactaccatgtggcttctgtcacaaagaaaaacattgtagacataaatcaaaatgttacattatgttatttacatgagactttatatatacactacttcatacta

SEQ ID NO: 871339 - DNA, 651 bp, Homo sapiens
cctgctcggaagaaaagattcttttcaaaatattactgctcattgacagtgcccctattcacccaagagctctaatggagattgatgaatgttttcatgcctggtaacacagcatccattctgcagtccgtggaccagggagtaattttgactttaaagtcttattatttaagaaatacatttcatggctgggcacggtggctcatgcctgtaatcccaacactttggtaggctgagatgggcagatcatgaggtcaggagatggagcaagtaaataatgcctgaggacatgggcatcctggctaatatggtgaaaccttgtctccactaaaaatacaaaaaattagcagggtgtggtggtgggcgcctgtagtcccagctactcgggaggctgaggcaggagaatggcgtgaacccagaaggcagagctcgcagcaagccaagattgcaccactgcactgcagcctgggcaacagagtgagactccrtctcaaaaaaaaaaaaaaaaaaagaaatacatttcataagtctgtagctgccatagatagtgattcctctgatggatctgaacagagtccattgaaaaccttctgaaacggattcatcattctacatactattgagaaatttgtgattccaggagtttacatt

SEQ ID NO: 871340 - DNA, 527 bp, Homo sapiens
gctgtattcttaggtattttattgcctttgtagagattgtaaatgagagttcattcatgatttggctctctgcttgtctattgttggtataaatgaatgcttgtgattttttcacattgattttatatcttgagactttgttgaagttgcttatcagtttaaggagtttttgggctgagatgatggggttttctgaatataaaatcatgtcgtctgcaaacagagacattttgacttcctttcttcctatttgaatacactttacttctttctcttgcctgattgccctggcaagaacttcyaataccatgttgaatagaagtggtgagagagggcatccttatcttctactggttttcaaagagaatgcttccagctattgcccattcaatttgatattggctgtgggtttgtcataaatagctcttattattttgagatattttccatcaacacgtagtttattgagagttttaaacatgaagtgatgctgaattttatcaaaggccttttctgcatctattgag

SEQ ID NO: 871341 - DNA, 682 bp, Homo sapiens
ttgttgttgttgttgtttttcatgtatcacaagtgcttttttcatgattttttttcaaaatacctcatctaaaggtatagaattagggatttttcaggtaaagtaagaaatgcaacagccattatgggaaaaaatccatatacccacttttgatttttagcccaggcacatcagaactgactacatttctaattaaacttcaagaaataatgttcacattaaataagtctgtaaaaccaaagcactggaagataatgtaaaatattattcataatattatattcaaaatgaaaatttataaggccaatatttatctattgtcttttctaaataatgttttcagagacargatttgtgctctttccattttgctttctgggcaaatatatttggaaaaataaaatggtttcctatatctaatatttaaaaactaatagaaatgaaattcaaatgatttcccaactagttgtcaatagtcttacaaagtccctttaaatgtatttttcttgtaaaatacattttacaagatgtaaaaatatattgtaaaatatatttttaatcttctgagtgttcataatactgataagctaaatagtatataattttcaaaaacattcaaggacgtaaatttgatttttttttacttttcctgctccattgtcgttagtcaagaactattgaa

SEQ ID NO: 871342 - DNA, 575 bp, Homo sapiens
cagaatgtgcagaagagtcttgactgagtcatggaacaaaattgtccctagactaaatgctactctagtttcacctaagaaatcttaaaagcaagactcaaaagtatcaaacagttctaagagcttaactgtgtcccagaacaaagttcaagaatatttatagaaatggaaaaatatccaatacamaatacagtaaaaattcacaacatttgacatgcaataaaaaattaacaggcatgtaaggatgtaggatagtatatgccatgataggagaaaaaaacaatttggaaccaatactgacagtgatattaattagcagaaaaaaatacttaaaaagttataactgcatttcatttgtgcaaaaagttaagtggagacatggaagatgttttttaaaagatagaaattcaatttctagagatgtcaacaacaatgtctgagatgaaaagtacactgaatggattttttttctttttttttttttgttgttgttttactttaagttctgggatacatgtgcagaatgtgcaggtttgttacataggtatacatgtgccatggtggtttgctgcatc

SEQ ID NO: 871343 - DNA, 584 bp, Homo sapiens
cctcataatcatagaaactggcagaatgtgcagaagagtcttgactgagtcatggaacaaaattgtccctagactaaatgctactctagtttcacctaagaaatcttaaaagcaagactcaaaagtatcaaacagttctaagagcttaactgtgtcccagaacaaagttcaagaatatttatagaaatggaaaaatatccaatacaaaatacagtaaaaattcacaacatttgacatgcaataaaaaattaacaggcatgtaaggatgtaggatagtatatgccatgataggagaaaaaaacaatttggaamcaatactgacagtgatattaattagcagaaaaaaatacttaaaaagttataactgcatttcatttgtgcaaaaagttaagtggagacatggaagatgttttttaaaagatagaaattcaatttctagagatgtcaacaacaatgtctgagatgaaaagtacactgaatggattttttttctttttttttttttgttgttgttttactttaagttctgggatacatgtgcagaatgtgcaggtttgttacataggtatacatgtgccatggtg

SEQ ID NO: 871344 - DNA, 615 bp, Homo sapiens
agtccatcaactagtcaaaaactaaacttagcagttattatgcgaatatatacttgtccgtcggaaatgtgcacaacataacattataaagcaatctagtagtaatcaacaagcataggaagacagaaccaaaaaaggttttaaaaatgattagtagtagtatataaaaaaataactagaactgaggcctcatactgcttctgcyactaaccgcatagcagaataacaatgcagaatacattatatggcaagtgagttaaacttagctaaaatcttactgctgtaagtcctcactaaaaatcattgataggttcttagaaacagcaactttaagcaaaataaagtacagggaaaccagtttcaccacaggctaagtgatataaacaagggttaagttcctacagtacaattctggtcacagaaacatcactaatgttctaaataaaaatccaaaacactttaatgtaaaacactgaagtaaatgtaaactatacatacgtttaagaaagattaataaaaacaagtaagataattatttacccaatattttgggaatcaatgagaaacttcacacttgttttaactgggacaagttaaaactgttttaactgtgca

SEQ ID NO: 871345 - DNA, 628 bp, Homo sapiens
aataagaaggaaccaaaaaacaatgctggtaatatgacaaaacatggttctttaataccgccaaaagatcaaatcagctcaccagcaatggaccgaaaccaagaagaaatctctggattgccagaaaaaaaaattcagaaggytaattattaagctactcaaggaggcaccagagaaagatgaataccaacttaaataaagttttaaaatgttacaggatatggaagaaaaaatctccagggaaatagttaccataaataagaaacaatcacaacttctggaaatgaagaccacacataaagaaatgcaaatacactggaaagtctcagcaatagaattgaacaggtagaagaaaaaacttcagagcttgaagacaaggcttttgaattaatccaacacaacaaagacaaagaaaaaatttttcaaaatgaataaagccttcaagaaatttggaattatgttaaatgaccaaacctaagaataattggtgttctggaggaagaagataaatctaaacatttggaaaacatatttgaggggataatcatggaaagctttcccagctttgctagagatctagatatcctaaaacaacaagctcaaaggacacctgggaaattcattgcaa

SEQ ID NO: 871346 - DNA, 628 bp, Homo sapiens
aataagaaggaaccaaaaaacaatgctggtaatatgacaaaacatggttctttaataccgccaaaagatcaaatcagctcaccagcaatggaccgaaaccaagaagaaatctctggattgccagaaaaaaaaattcagaaggctaattattaagctactcaaggaggcaccagagaaagatgaataccaacttaaataaagttttaaaatgttacaggatatggaagaaaaaatctccagggaaatagttaccataaataagaaacaatcacaacttctggaaatgaagaccacacataaagaaatgcaaatacactggaaagtctcagcaatagaattgaacaggtagaagaaaaaacttcagagcttgaagacaaggcttttgaattaatccaayacaacaaagacaaagaaaaaatttttcaaaatgaataaagccttcaagaaatttggaattatgttaaatgaccaaacctaagaataattggtgttctggaggaagaagataaatctaaacatttggaaaacatatttgaggggataatcatggaaagctttcccagctttgctagagatctagatatcctaaaacaacaagctcaaaggacacctgggaaattcattgcaa

SEQ ID NO: 871347 - DNA, 480 bp, Homo sapiens
catgagatctgttggtattataagggggaatttccctacacaaactcctctcctctttgcctgctgccatccatataaaatgtgacttgccctcccttgccttccaccatgattgtgaggattcccccatctatgtgaaactataggtccaattaaacctctttctcttgcaaattacccagtctyggtatgtctttatcagcagaataaaaatgaactaatacagtaaattggtaccagtacagtgggatgctgctgaaaaaaataccccaaaatgtggaagcggctttggaactggttaataggcagaggttagaacagtttggagggatcagaagaagacaggaaaatgtgggaaagtttgtaattccctagagacttgttcaatggctttgaccaaaatgttgataatgatatggacaatgaaattgagactgaggtggtctcagtggagatgaggaactcctcaggaactggagc

SEQ ID NO: 871348 - DNA, 472 bp, Homo sapiens
ctgtttctaggcaaccttgaatttccggctccctgagctccattttgcacatgcatctttctctcctctgttattacgtgtttgttgatctgactgatccttttggacaggtgtcataactaagccctttcctatagagttctcacttatgcaacactgcaagtatagcctttgttgacttgtatcggagttgccatctatacatgttaatrtatttgatacaaaatcatgcaccatgatataatgtgaaatacatagttattctgtgccctagatttctggctcagagcttctaacattctgtaacttcctgaatgataggagtgataggagcatcttttggtttatatacatacattttgttataatatttgattgtagtccttagatcctaacacagagcttctaagaatgtctttttgtatattaacaaagtgactggtggctgaaagcccctaggtaaccagagaaa

SEQ ID NO: 871349 - DNA, 472 bp, Homo sapiens
ctgtttctaggcaaccttgaatttccggctccctgagctccattttgcacatgcatctttctctcctctgttattacgtgtttgttgatctgactgatccttttggacaggtgtcataactaagccctttcctatagagttctcacttatgcaacactgcaagtatagcctttgttgacttgtatcggagttgccatctatacatgttaatgtatttgatacaaaatcatgcaccatgatataatgtgaaatacrtagttattctgtgccctagatttctggctcagagcttctaacattctgtaacttcctgaatgataggagtgataggagcatcttttggtttatatacatacattttgttataatatttgattgtagtccttagatcctaacacagagcttctaagaatgtctttttgtatattaacaaagtgactggtggctgaaagcccctaggtaaccagagaaa

SEQ ID NO: 871350 - DNA, 702 bp, Homo sapiens
ctatactatcaaatggccagcaaccacaaagaataaaagtaatggtatcttttgcctttgagtctagtgaatcttgataaaatagagttcagctttaaattacatagtacttaacaaaactttatgttagttgctcagaaaacatattatgtaagcagctatagtgacaagaacagagattcaaattctatgatgaccaagataagacattaaataaaatgtgtggtttctccaaactttgcttgaatacaacaagcttgtgcacaggtgttgaggactactgtagcaaagggaacacatgtgacaatacagtgctcagaaaaaagacaaaacactaccaccatgacaaagacactggacttggtgaaaaattacactgctctagactgtttgcttgtaaaagatggcttagtaggacctcttccattccccaagcaaaggtttcagttcaaatgttgtatttgttttcascagcaaatccaggtgcatttttaaaagctgctcaaaaaagattctctttttaaaatgtactccaaggaatgggtggaagaaaaagtgctgctcctggcaaaacgttccatgcatgactaaagaaaagtgtcatttggttggtggttccctaagagttttgaaatgaactcacattttttttttttttttttttttttgcacaggaatgcacactcttctcttaacccttac

SEQ ID NO: 871351 - DNA, 603 bp, Homo sapiens
ccacaaaatctcttctctacacagcctattctcgctacggcacttgtgaccattgtaaaacacaaatgaaataattcttttgttcaaagccttctaactttgaataaaagtcaaagtcctcatatatcacttagaaggactttacaaggtttgatccccagcagttcccttttttgtctccatctgctataactctcccactttctgcatcttctccagcctgctattgtcttgaacaaaaaagccctcttccccctcagagactttgtatttgcygatgcctttacttgaattttcttcccccaaatatccatctcattcctgtctccaaatgtcacttcctcaatgaagccttctctgaccagtgtatttaaaattgttacctcttgccatattcttcacctccctgtatgtctgttaactgttaacaactgcttcattttacacagtaagaaaccatatcatagaacttgcatgacttggcaaaggttacacattaaccataagctacataagggcaagggacatgcctgtcttgctcacccatgggatgccaggaccaatgcaagtgtcagataatagtaatcagccagggataattgt

SEQ ID NO: 871352 - DNA, 636 bp, Homo sapiens
attgacaaggcatataactcctttgactaggaatttgagtggatacagtgttttaattggatgtaatcatatatgatgtggtaaacttgtatcccacttttacatcttctgtggaaacttgaaacattttctaactcagtagatgttttataatttccatttgataattttgatagttttgcttatgtggaaacatttcatgggagacatttaagttttgtttgataatgtatagattcccatagattttgatagctctcataatgctgactattcacaatgaggtcactcattctgtgtattcttgcctgcattttaagtgtccaagtgaattttgttcactgtcctaaatgcaaccctaagacaaaatttattggtttctatgctgatatagcatatccttaattggatattactgttatccttgttctktttactgacaatgttctgtggccagctgtgtttatgcagaatttacatttgataaatgtttcataacaattcataataatgtaccattcttggtacaccataacaggcacataaactttcgaactgtgtttctttttctagtaatatatttggacacattcacttctaggttcccttaggattccaaatgcaaactgagtctaa

SEQ ID NO: 871353 - DNA, 689 bp, Homo sapiens
ccttcactgactctcttttcggactcagccctcctgcacccaggtgaaataaatagccatgttgctcacacaaagcctgtttggtggtctcttcacacggatgcgcatgaaagaagatataaaaatctaagtgatcacagaagccaaattagtggcttcctaataaatgagaggtccataaatgattctyctccctcaggttgattaattctgtgtgttgattagctcagcaacacacattcatctttctgagttgtctttgctcttaaagaaaaatttcatccagcacatccctaaatgataaggagaaatgattgcttatacaaatcaggatatcagaaaagctggccagatgggggctgtgtcaactccctccccactccaattgtgctactaaatctttttaagtgtctctgtctaaaatcttctctcttaagtaccactccctcctaataaggtcattttatcccaaacagccttctaagtagtatgaccagccatccagaaaaggtgtgaacattcttgcagtctatctagaaagtgcagtgcagtacacaacccagactctcttcctttatgtcccatacaccctctggttaccttaattttaattattaacttagtgtgtctcccttttcttatgcccagactgggtgttctcaaagaagactgggttttgtgccctttag

SEQ ID NO: 871354 - DNA, 600 bp, Homo sapiens
cagacactgtttgcctgggtaacagcagtggtggctgcagaacagtggattttcataaactgtgaatgctgctgtctgatcgttcctctggaagttttgtctcagaggagtacctggccgtgtgaggtatcagtatgcccctactgggggtgcctcccagttaggctgctcgggggtcaggggtcagggacccacttgaggaggcagtctgcctgttctcagatctccagctgcgtgctgagagaaccactgctctcttcaaactgtcagacagggtcatttaagtctgcagaggttactgctgtctttttgtttgtctgtgccctgcccccagaggtggagcctacagaggcaggcaggcctccttgagctgtggtgggctccacccagtttcagcttccyggctgctttgtttacctaagcaagactgggcaatggtgggcgcccctcccccagcctcactgccgccttgcagtttgatctcagactgctgtgctagcaagcagcgagactctgtgggcgtaggaccctctgaggcatgtgcgggatataatctcctggtgtgccgttttttaagcctgtcggaaaagtgcggtatta

SEQ ID NO: 871355 - DNA, 619 bp, Homo sapiens
attcctccagcaatgagttatgaaaacacaagattttgtgtcttctataatttctttcagcagtgttttgtagtttttcttctaacagtctttcatctccttgtttatgtgtattcccaaatattttatttttgagttgtcttgtctaccaatgaagctcattcgagactcagtgctcaggatttatattcgggatcccttacaaataaccctctgcttagcaggtagcaaaattccagactcctaaaaggaaagcagatattcagcaaaagccatattgwtttgcataaactttttaggcagactgagccactctgatctgtaaggacactgtgggaattctcctgaaatttaagtttccagatgccaatcaatggccagcctttaaagcaggcctaaggttaactgctgtgctaattctcatgtatggttgtcaatctgaaaatctgatgacaacctggcaagatatgtaaaagttagcccacgagtggtgagaaaagcaactgtactataacactggctgaaaaactgccagttttgcaagtgatataacttctttaataggtagctctaagtaccttgcttctggcttcttcatagcacattcggataactagag

SEQ ID NO: 871356 - DNA, 652 bp, Homo sapiens
caagcctgggggtgctgcaggagaccagggcgtgtttcatccctatctacaactgcacaaggcagccactccaagagcggccattttagaggtctccccctgggagtgtattcttttcccagggctgttaattattaatattctttactagggaaggaattcagtgatatttctcttaccygttttcagtaataagagaaatatgactctgtcctgcccggctcccaggcaatcagacctaatggttatctcccttgttccctgaacatcgctgttatcctgttcttttttcaaggtgcccagatttcatattgttcaaacacacatgctttatgaacaatttgtgcagttaatgcaatcatcacagggtcctgaggcgacatacatcctcagcttatgaagataatgagatgaagagattaaattaaagacaggtataggaaattataagagtattgattggggaagtgataaatgtccatgaaatcttcacagtttatgtttttctgccatggcttcagctggtccctctgtttggggtccctgacttcccgcaacagatggcatgaagtaatgtaggtaaagttcttgctatactatgatccgttaataaatgctagtttcttttttttccttacttgagatagtgcct

SEQ ID NO: 871357 - DNA, 537 bp, Homo sapiens
gtctctgtctccttcagttttgctctgatcttagttatttcttgtcttctgctaacttttgaatttgtttgctcttgcttctatagttcttttaattgtgatgttagggtgtcaattttagatctttcttgctttctcttttgggcattcagtgctataaatttccctctacacgctgctttaaatgtgtcccagagattctggtacattgcgtctttgttctcattggtttcaaagaacatctttctttctgcctttatttcgttatttacccagtagtcattcaggagcaggttgctcagtttccatgtagttgtgtggttttgagagagtttcttaayactgagctctagtttgattgcactgtggtctgagagactgtttgttgtgatttctgttcttttgcatttgctgaggagtgttttacttccaattatgtggtcaattttagattaagtgcaatgtgctgctgagaagaatgtatattctgtagatttggggtggagagttctatagatgtctatttggtctgcttgg

SEQ ID NO: 871358 - DNA, 683 bp, Homo sapiens
aagaaatacccgagacttggtaatttataaagaaaagaggtttaattgactcacagttctgcattgctggggagacctcaggaaactttcaatcatggcagaagtcacctcttcacagggcagcaggaggcagaatgggtgcygagtgaaaggagaagccccttataaaaccatcagatcttgtgcgaaatcactcactaccactagaactgcatgggggaaactgcccccatgatgcagtgatctcaacaggatcctgcccttgacatgtggggattattataattcaaggtgaaatttgggtggggacacatatcaccgaaaattatttttatttctggcatatagaaatgcagttatttttgtagattttgtagaaatctttcaaaacttattaatttttttagacttttattttaggttcaggggtacatgtgaaggtttgttttgtaggtaaagtcatgtcatgggggtttgttgtatagattatttcatcaccaaggtattaagcctaataaccattagttattttttctactgctctcctttttactaccctccaccctcaagtagacccaagtatctattattcccttgtttgtgtttatgtgttctcctcatttagctcctattgacaagtgagaacatgcagtatttggttttctgttcctgtgctattttgc

SEQ ID NO: 871359 - DNA, 683 bp, Homo sapiens
aagaaatacccgagacttggtaatttataaagaaaagaggtttaattgactcacagttctgcattgctggggagacctcaggaaactttcaatcatggcagaagtcacctcttcacagggcagcaggaggcagaatgggtgctgagtgaaaggagaagccccttataaaaccatcagatcttgtgcgaaatcactcactaccactagaactgcatgggggaaactgcccccatgatgcagtgatctcaacaggatcctgcccttgacatgtggggattattataattcaaggtgaaatttgggtggggacacatatcaccgaaaattatttttayttctggcatatagaaatgcagttatttttgtagattttgtagaaatctttcaaaacttattaatttttttagacttttattttaggttcaggggtacatgtgaaggtttgttttgtaggtaaagtcatgtcatgggggtttgttgtatagattatttcatcaccaaggtattaagcctaataaccattagttattttttctactgctctcctttttactaccctccaccctcaagtagacccaagtatctattattcccttgtttgtgtttatgtgttctcctcatttagctcctattgacaagtgagaacatgcagtatttggttttctgttcctgtgctattttgc

SEQ ID NO: 871360 - DNA, 642 bp, Homo sapiens
attcttttttatggctgcatagtattccatgctgtatatgtgccacattttctttatgcaatctatcactgatggacatttgagttgattccaagtcttagctattgtgaacagtgccacagtaaacatacatgtgcatgtgtctttatagtagaatgatttataatcctttgggtatatacacagtaatgggattgctgggtcaaatggtatttctagttctgcatccttgaggaatcaccacactctcttccacaatggctgaactaatttacactcccaccaacagcgtaaaagcattcctatttctccacatcctctccagtacctgttgtttcctgactttttaatgatcgccattctaactggtgtgagttggtatgtcatcgtggttttgatttgcatttctctgatgaccagtgatgatgagctttttttcatgtttgttggccacataaatattttcttttgagaagtgcctgttcatatcyttcacccactttttgatggggttgtttgatttttttcttgtaaatttgtttaaattccttgtagattttggatattagccctttgtcagatggatagattgcaaaaattttctcctattctctaggttgcctgttcactctgatgagagtt

SEQ ID NO: 871361 - DNA, 589 bp, Homo sapiens
aactctccactctttgaaactaacaaacaaacaaaaaaaaaacaaaaaaataaaaaagatagttctcatgagctttggtcatttaaaagtgtgtagcgacagggcacggtgactcacacctgtaatcccagcactttgggaggctgaggctggcggattgcttgaggtcaggagttcgagaccagtcaggccaacatggtgaaaccccacttctactaaaaatacaaaaaaatttgccaggcatgttgacgtgtgactgtaatcccagctactcaggagrctgaggcaggggaattgcttgaaccggggaggtggaagttgcagtgagccgagattgtaccactgcactccagcctgggcgacagagcaagactcagtctcaaaaaaaaaaaaaaaaaaggtgtgtagcacgccgcccccaacatcgctctcttgctcccgcttttgccatgtctagtgactgctcctattttgccttcgaccatgagaaaaactccttgaggcctccccagaagcccagcaatgctggcgccatgcttgtacagcctgcagaatcatgagccaattaaacctctttctttataaatta

SEQ ID NO: 871362 - DNA, 613 bp, Homo sapiens
caatattactttcttttgtttctcattgttctagcttctgccattgtgagctctttcaattggctcctgttgacatatcccaccactgtggaatgttgttgttgtttctgagaactttcatacattcttccactttattgcttttttattcaattcttcatgtcaaatatattgcccattgaggggaaacccaacataagtttctgatttcctgtccatgagtaataatttatttggtccatgacaaataagcactatgagaaaacatatgtgattaactaagatctctaattgtagtcctttttgtgacaatgaaaaaggtgatcttatcgaggtgaagataaaataaatcagtatgtagaatataatttttaaaaataatttttagataagttattttctgtagcaaaaacacytcaatagtattttggaagtataagaatgtctagaccaggcatggtggctcatgcttctaatcccagcactctgggagaccaaggcaggcagatcacctgaggtcaggagatcgagaccagcctgcccagctggccaagatggtgaaacccagtatctattaaaaatattttaaaaattagctggacgtggcagtggg

SEQ ID NO: 871363 - DNA, 506 bp, Homo sapiens
tggctcttatattatccaaaataatcgcattctttttttttcctttttatttgttctttttttttttttaattttttttgagacagagccttgctctgttgctaggctggagtgcagtggcgtgatctctgctcactgcaacatccgcctcctgggttcatgcgattctcctgccccagcctcccgagtagctgggactagaggtgcgtgccaccacacccagctaatttttgtattttttttggtttgttttttgagacggagtctcggtctgtcatccaggctggagtgcagtggcgtgatctccgctcactgaaagctccacctgstgggtttacgccattctcctgcctcagcctcccgagtagctgggactacaggtgcccaccaccacgcctggctaattttttgtatttttagtagagacggggtttcactgtgttagccaggatggtctccatttcctgacctcgtgatccgcctgcttcagcctaccaaagtgctgg

SEQ ID NO: 871364 - DNA, 545 bp, Homo sapiens
tgcctggacatccaggcatttccgtccaacctctgaaatctaggtggatgttcccaaatctcaattcttgacttctgtgcacctgcaggctcaacaccacatggaagctgccaaggcttggggcttgcaccctctgaaaccatggcctgagctgtaccttggccccttttgtccacagctggaacagttgggacacagggcaccaattccttactatccacacagcagaatgaccttgagcccagcccagggaaccatttttccctcctaggccttcaggcatgtgatgtgaggggctgctgtgaaggtctctgacatgcctrgagacattttccccattgtcttggtgattagcatttggctcctcattacttatgcaaatttctgcagctggcttgagtttcttcccagaaaatgggtttttcttttctgttgcattgtcagcctacaaattttccaaacttttatactctgcttcctcttgaacactttggcacttagaaattacttccaccagataccctaaatcatctctctcaagttta

SEQ ID NO: 871365 - DNA, 589 bp, Homo sapiens
ttgccttttggcctgccacgcccccatcctatacccatataaaccctaaaccccaggctccataagcagacaaagcagatgaacagaagagcaaaagagcagtgcagcagagaaggagagaagaggaggagggtctgaactgcgagaggagtttagctggggatgatcagagagatcagccgctggacagccaaattctagggaaagatcatcttcccactccatctcttttctagctccccatccatcccgmtgagcaccacctccctccaccactcaataaaacctccacagtcactgtccttcaagtccatgtgtgatctgatttttcctggatgccagacaagagtttgggatacagaaagctgtcacactggccctatgcacttgtgaaaaggcagagggtcctctgagctgtttaacacttaagccatccatggatggcaaagttaaaagagctcactgttgtaacacatgcccacttgggcttcaggagtcccaggcacccacccctagatgctactatggggccggagcctgtctcctgcactggcctgtctgcatgctctttcttccataggggtttcag

SEQ ID NO: 871366 - DNA, 622 bp, Homo sapiens
agtatctgcaagtggatatttggagcactttgaggcctatagtggaaaaggaaatatcttcacataaaaactagacagaagcagtctgagaaacttctgtgatttgtgcattcatctcacagagttgaacctttcttttgattgaacagtttggaaacagtctttttgcagaatctgcaaagkgatatttgggatccctttgaggcctctgatgaaaaacggaataccttcacataacaactggacagaatcactctgagaaacctctttgtgatacgtgcattcaactaacagagttgaacctttcttttgattgagaagttaggaaagtgtgtttttctagaatctgcaaagggatatttgggagccctttgaggcctatggtgagaaaggaaataacttcccatgaaaactagatagaagctttctgagaaatatctttgtgatgaggacattcacctaacaaagttgaaacttccttttgattgagcagtttagaaacagtctttttgtagaaactacaaacggatatttggagtgctttgaggcatatggtgaaaaaggaaatatcttcacataaaaactagacagaagctctctgagaaatttctttgcaatgtgt

SEQ ID NO: 871367 - DNA, 635 bp, Homo sapiens
aaaagcctttttgtgtaatctgcaagtggatatttggagtgctttgaggcctatggtggaaaagaaaatatcttcacataaaaaatagaagcattctgagaaacttcttcatgatgtttccattcatgacccagagttgaacctttcttttgattgagcagttttgaaacaggctttatgtagaatctgcaagtggatatttggagcgctttgaggcctatrgtggaaaggaattatcttcacataaaaacagggcagaagcattctgagaaacttcttcatgatgtatgcattcatctcacagagttgaacatttcttttgattgaactgcttggaaacagtcattttgtagaatatgcaaagagatgtttgttagccctttgaggcctatcatgtaataggacataacttcacataaaaactagacagactcattctgagaaactgctttgtgatgtgtgcaattcatctcacagtgttgaactttcttttaattgagcagttttgaaacaatctttttgtagtatctgcaaatggatatttggagcactttgaggctttcagtggaaaaggaaatatcttcacatgaaaactagacagaagctttttgagaaacttatttgtgacgtgtgta

SEQ ID NO: 871368 - DNA, 635 bp, Homo sapiens
aaaagcctttttgtgtaatctgcaagtggatatttggagtgctttgaggcctatggtggaaaagaaaatatcttcacataaaaaatagaagcattctgagaaacttcttcatgatgtttccattcatgacccagagttgaacctttcttttgattgagcagttttgaaacaggctttatgtagaatctgcaagtggatatttggagcgctttgaggcctatggtggaaaggaattatcttcacataaaaacagggcagaagcattctgagaaacttcttcatgatgtatgcattcatctcacagagttgaacatttcttttgattgaactgcttggaaacagtcattttgtagaatatgcaaagagatgtttgttagccctttgaggcctatcatgtaataggacataacttcacataaaaactagacagactcattctgagaaactgctttgtgatgtgtgcaattcatctcacagtgttgaactttcttttrattgagcagttttgaaacaatctttttgtagtatctgcaaatggatatttggagcactttgaggctttcagtggaaaaggaaatatcttcacatgaaaactagacagaagctttttgagaaacttatttgtgacgtgtgta

SEQ ID NO: 871369 - DNA, 622 bp, Homo sapiens
aaaagagtgtttcaaaactgctctattaaaagaaagattcaactctttgggctgaattcactcatcatgaagaagtttctgaaaaagcttctgtctattttttatgtgaagatatttcctttttcaccatagccctcaaagyactccaaatgtccacttgcagataccacaaaaagagtgtttctaatctgccccatcaagagtaaggttcatctctgtgagttgaatgcactcatcacaaagaagtttctgagaatgcttctgtctagttttatgtgaagatatcccgtttccaacgaacacctctaagcggtccaaatatacgctagcaaattcagcaaaaagagtgtttcaaaactgctctatgaaaagaaaggttcacctctgtgagttgaatgcacacatcacaaagaactttctgggaatgcttctgtgtagtttttatgtgaagtgatttcgtttttctcctttggcctcaaagcgctccagatgtccacttgcagattctacaaaaagattgttacaaaactgctctatcaaaagaaaggttcaattctgtaagttgaatgcatacatcacaaagaagtttctgtcaatgcttctgtctagtttttatgtgaag

SEQ ID NO: 871370 - DNA, 653 bp, Homo sapiens
cacaaagaagtttctgagaatgcttctgtctagttttatgtgaagatatcccgtttccaacgaacacctctaagcggtccaaatatacgctagcaaattcagcaaaaagagtgtttcaaaactgctctatgaaaagaaaggttcacctctgtgagttgaatgcacacatcacaaagaactttctgggaatgcttctgtgtagtttttatgtgaagtgatttcgtttttctcctttggcctcaaagcgctccagatgtccacttgcagattctacaaaaagattgttacaaaactgctctatcaaaagaaaggttcaattctgtragttgaatgcatacatcacaaagaagtttctgtcaatgcttctgtctagtttttatgtgaaggtattccttttccaacgaaggcctcaaagtggtacaaatatcaacttccaaattccaccaaaacagtgtttcaaaactgctctatgaaaaggaacgttcaactctgtgagttgaaagcaaacagcacaaagaagttcctgagaatgcttctgtgcagtttttatgtgaagatatttcctttttcactataggcctccaagcactcaaaagtccacttgcagattctacaaatagagtgcttcaaatccgctctatcaaaagaaaggt

SEQ ID NO: 871371 - DNA, 565 bp, Homo sapiens
cacataaaactagatggaagcattctccgaaattttttgtgaagtgtgcattcaactcacagagatgaagctttcttttgatggagcagttttcaaacaatcttttagtacaatctgcaagtggatatttggagcgctttgaggcctatggtggaaaaggaaatatcttcacataaaaactagacaaaagcattctcagaaacttctttgtgatgtgtgcattcaactcagagttgaacatttcttttgattgagcagttttgaaaaaatctttttgtagaaagtgcaagtggatgtttggagcactttgaggcctatggtggaaaaggaaatatcttcacataaaaactagacagaagcattctcagaaaattcyttgtgatgtgtgcattcaactcagagagttgaacatttcttttgattgagcagttttgaaacactctttttgtagaatgtgcaagtggatatttggagcgctttgaggcctatggtggaaaaggaaatatcttcacataaaaactaggcagaagcattctcagtaacttctttgagatgtgtgccttca

SEQ ID NO: 871372 - DNA, 515 bp, Homo sapiens
ttccaaactgctcaatcaaaagaaagttcaagtctgtgagttgaatgaacacatcacaaagaagtttctcagaaagcttctgtctagtttttatgtgaagctattccctttttcatgataggccttaaagggatcccgaatatccatttgcagattctacaaaatgagtgtttccagactgctcaatcaatagaaaggcacaactctgtgagatgaatgcacataacacaaagaagtttctcagaaagtttatatctaagaatgatggtttccagtttcatccatgtctctaaaaaggacatgaattctycattttttgtggttgcataatattccatggtgtatgtgtgccacaatttcttaatctagtctatcgttgttggacatttgggttggttccaagtctttgctgttgtgaatagtgccacaataaacatacgtgtgcatgtgtctttatggcagcatgatttataaacctttgggtacataccaagtactgggacagctgggtcaaa

SEQ ID NO: 871373 - DNA, 538 bp, Homo sapiens
gctcagaaatatccctttgcagattctttaaaaagactgtttctgaaatgctcaatcaaaagaaaggttcaactctgtgagatgaatgcacacatcacaaagaagtttctcagaaggcttctgtctagttattatgtgaagttatttcctttttcatcataggcctcaaaggggtcctaaatatccccttgcacattctaaaaaaacactgttttcaaactgcacaatgaaaagaaaggtacaactctgtccgttgaatgcagacatcataaattactttctgaggaagtttctgtctagtttttttkgtgaagatatttggtttttcaacataggcctcaaacggctcagaaatatccctttgcagattatacagaaagactttttccaaattcctcaatcaaaagaaaggttcaaatttgggagttgaatgcacacatcaaaagaattttctcagaaagattccgtctagtttttatgtaatgatatttccttgttcaccataggactcaacccctcaggaatatccttttgcaga

SEQ ID NO: 871374 - DNA, 586 bp, Homo sapiens
gaatagcttcacataaaaactagacaaaagctttcagagaaacttctttttgttatggacattcaaatcacagacttgagcacttcttttgattgtgcagcttggaaacagtctttttgtagaatctgcaaagggatatttaggggccctttgaggcctgtggtcaaaaagggaatatattcaccaaaaaactagtaagaaaatttctcagaatattctttgagatacgtgcattcatcttacagagttgaaagttgtttcttttgatggagcagtttggaaaccacctttgtgtagaatcagcagagggatatttttgagcrttttgaggcctatggtgaaaaaagaaatatgttcacataaaaaccagacacaaactctctgagaaacttatttgtggtatgtgcattcatctcacagagttgagcctttcctttgattgagcagtttggaaacagtctctttctagaatctgcaaagggatatttctgagtggtttgaggcctaagatgaaaaaggaaatatcttcatatagaaactagacagaatctttctcagaaaattctttgtgatgtgggcattcatc

SEQ ID NO: 871375 - DNA, 624 bp, Homo sapiens
cctttgattgagcagtttggaaacagtctctttctagaatctgcaaagggatatttctgagtggtttgaggcctaagatgaaaaaggaaatatcttcatatagaaactagacagaatctttctcagaaaattctttgtgatgtgggcattcatctcacagagttgaagttttcttttgattgagcagtttggaaacagtcttcttgtagagtctgcaaagggatatttctgagcggtttgaggcctatggtgaaaaggaaatatcttcacgttaaaactagacagaagctttctgagaaacatctttgttatgtgtgcattcttctcacagagttgaaactttcttttgattgagcagtttggatatagtytttttctagtatctgccaaagggatatttctgagtggtttgaggcttgtggtgaaaaaggaaatatcttcatattaaaactagacagaagttttctgagaaacttctttgttttgtgtgcattcttctcacagagttgaaccttacttttgattgagcagtttgcaaacagtctttctctactatctgcaaagggatatttctgagcggtttgggaccaatgatgaaaaaggaaatatcttcacataaaaact

SEQ ID NO: 871376 - DNA, 598 bp, Homo sapiens
tcagaacgcttctgtgtaatttttatgtgaacatattaacttttccaccataggccacaaaccactccaaatatccacttgcagattctacaaaaagagtgtttcaaaactgctcaatcaaaagaaagcttcaactctgtgagatgaatgctcacatcacaatgaagtttctcagaatgcttctgtctagtttttatatgaatatattaccttttccaccacaggcctmaaagcgctccaaatatccacttgcagtttctacaaaaagagggattcaaagctgctcaatcaaaagaaagcttcaactctgtaagacgagtgcacaaatcacaaaaaaatttctcagaaaacttctgtctagtttttatgtgaagatatctcctgttccaccataggcctcaaaagcactccaaatatccacttggagactctacaaaaagagtgtttcaaagctgctcaatcaaaagaaaggttcaactctgagagaataatgtgcagatcatgaagaagtttctcagaatgcttctgtttagtttctatttgaagatatttctttttccaccataggactcaaagcgatccaaatatccacttgcag

SEQ ID NO: 871377 - DNA, 657 bp, Homo sapiens
gtaggcttcttttggccattgtagaagtttggggtgatcagttttttagaaaggaatatagagttagagctatcacagagaaacttggaattcattttctacatatcctgctaatcccaggaacccacagaattttcttttggtcatgggggcaggaaaagccgttgcttctattctttggggatcaagcaaaagactgtcttaaatacttgtgagagagttggtagcttttcttatgaaactttgtgattttcttttctttttttaattaaagcagagtctcactctgttgcccaggctggagtgcagtggcatgatctccactcactgcaacctctgccgggatwcttctgcctcaacttcctgagtagctgagattacaaacacgcaccaccactcccagctaatttttgtatttttagtagaaatgagttttcacaatgttggccaggctggtctcaagctactgatctcaggtgatcagcctgttttggcctcccaaagtgctgggatcactgcaccctgcccccccgcaccttgttttcaagaactgaaaataaagggacagagttcagtgggttccttgaggattccctctttagtagttttttccaatgctagttgcatttcccccttttgagagaaagacacatgagc

SEQ ID NO: 871378 - DNA, 642 bp, Homo sapiens
tccttgagtcatgatttcagtttacgcattgcacattatgggcaactatctcatctttgagaaaaaaataaacataaatgattataaattggcacatataatacaaaagtgatattatggtcactatgaggctttttttgagaattgagtaaagtcatgaatataaaacatcaaaaacagtgtctgtcatataagggacattcaaaatatggtgtcattattcagtaggtgctctcagattgccaaacttttatttgctaaggaattatgattaattcattcaatagagcttgaaggttrtatttgaaattagtatttatttctcaatctaagcctatctcaagatgatcccagctccagcttcttgatcatttttgtatttcccttatgtgcaagaggcacagaatctggttttaccaatcccatagtgtccagtgtaatgctaagatacaggaatttaagcaagtgttccatcagctcaaaagataattttctttttaagagatgatctccaggtaattttatttttaacatgtgcttgtattgagcaaatatttattgggcaaatattatatgccagcaattcagcagcaaacaacatatcaattctctgctgtcactgagccttactttgcagtgggg

SEQ ID NO: 871379 - DNA, 542 bp, Homo sapiens
agtggtttcattttcaaggtcacaatataaatttatcaaacacaattcaaatggtgtatgacaatgaaaagagggcatcctctgtctctcttccagagccagtcttaattttgtgatactattctggacagagaaaggtccttcttaatttagctaaaatctgagcctgaatatccactctaccttatagaaaaaaaaaaaaaaacaaaaaaccctcgttttctttgaaagacttcattgcacaagggatcaagttaagtctttcctaaactcacagatacaatcagcctccaatatgctccacatacacaaactctgagccatttcaagcataaattttagaagtaaagaaagttccagtgaatgcytaaatagataggaaaaaagagtattcttcttccaagaacacttttctgattcaaactttcttccccaaaattagggcagtgacaaccattagtcatattagcttatttgggatataaactgttttaatatgtacactaaaacaaaacaaaatgtgtcctctttatagcataaga

SEQ ID NO: 871380 - DNA, 585 bp, Homo sapiens
aggaaacacattgaactgagtctcttaacaatctgagaatgattgacaaatgagagaggaaggcatttggatggagggaaaggtgtgccatggaggcacaccctgagggacgtggggtagcccacagggtcttggatacttgtaacctcatgtacccatttctctcctcacaggctacccagatcctgcttgctctaatcattgtgggctttggaactatatttgcacttaattacatcggtttctcccaaagacttccccttgttgtcctmacaggatatccattctggggagcacttattgtgagtactgtcgattagaagctttggagaaattgctataaagatagatttgaactgcttcacgtcctagggtaatgaattccataaatatggccctccaggagaccaaaaaaggcagctcccttcacggcaaaagaagcaactccatttggtcactgcactaccatcatcattgtaataactactctcaggtgcttaaaatttgtttccaaagcccttgtgtgtatagtaagacatttgctcctcaataccaacctgggagactagatgcacaaatatccta

SEQ ID NO: 871381 - DNA, 585 bp, Homo sapiens
aggaaacacattgaactgagtctcttaacaatctgagaatgattgacaaatgagagaggaaggcatttggatggagggaaaggtgtgccatggaggcacaccctgagggacgtggggtagcccacagggtcttggatacttgtaacctcatgtacccatttctctcctcacaggctacccagatcctgcttgctctaatcattgtgggctttggaactatatttgcacttaattacatcggtttctcccaaagacttccccttgttgtcctcacaggatatccattctggggagcacttattgtgagtactgtcgattagaagctttggagaaattgctataaagatagatttgaactgcttcacgtcctagggtaatgaattccataaatatggccctycaggagaccaaaaaaggcagctcccttcacggcaaaagaagcaactccatttggtcactgcactaccatcatcattgtaataactactctcaggtgcttaaaatttgtttccaaagcccttgtgtgtatagtaagacatttgctcctcaataccaacctgggagactagatgcacaaatatccta

SEQ ID NO: 871382 - DNA, 600 bp, Homo sapiens
ttttctttagatcctgcccaaggtctggaagaaagagtttgggcatcaatgctggattgttctaggattgaaccaaggctatcactcacttctgtgttaacctgaagggaaaagtgcctacttctaagggttattttgagagtttaatgagacattactgataaaaggcaagatgatgcttaaatgttcatactcctttctaaccactctgatcttgtttaaggtcctggggatgtgggcctctctgaaagtcagttgaactctgttcttatggtcctctgccagtttcctctagggatagttacaaggcatagagacattctgaggggagggcagataaatgtttccatccctgcttatggaaatacatgcagacaatgcagaygaagccccaaatgctgttctccctgtattgacttccttccagagctgagaaataaactatgggtaaggaaaacctactcctgactcactgagagctatgcagatggaggtgtgcaggaatgatggaggcaggatgctgaaccaggcatcagaagacctggcttttcatcacagcccttccacaaaccgtgaaagtgattgctcacagtcacttac

SEQ ID NO: 871383 - DNA, 600 bp, Homo sapiens
ttttctttagatcctgcccaaggtctggaagaaagagtttgggcatcaatgctggattgttctaggattgaaccaaggctatcactcacttctgtgttaacctgaagggaaaagtgcctacttctaagggttattttgagagtttaatgagacattactgataaaaggcaagatgatgcttaaatgttcatactcctttctaaccactctgatcttgtttaaggtcctggggatgtgggcctctctgaaagtcagttgaactctgttcttatggtcctctgccagtttcctctagggatagttacaaggcatagagacattctgaggggagggcagataaatgtttccatccctgcttatggaaatacatgcagacaatgcagatgaagccccaaatgctgttctccctgtattgacttccttccagagctgagaaataaactatgggtaagraaaacctactcctgactcactgagagctatgcagatggaggtgtgcaggaatgatggaggcaggatgctgaaccaggcatcagaagacctggcttttcatcacagcccttccacaaaccgtgaaagtgattgctcacagtcacttac

SEQ ID NO: 871384 - DNA, 595 bp, Homo sapiens
gcaagatcccattcatgtaagggagataaaacactaaacaagactctatgctcccataggaacactcatatttcctagaagatctggaagcatactcctgactgtggttttcattgagaaaaggcttggaacttgcagtaaaggaaaagtttagcattacctgaatgtttgattttttaacaccaagactatatttgggtattcatatcaaaataacttaagtttaaatgagaaaaattggctaggtgcggtggctcacacctataatcccagtgctttgggaggccaaggcaggaggattcctygggcaacatagtgagacctcgtctctacaaaaataaaaaataatcagccagagctgtgatctcaccactgcactccagcctgggtgacagagtgagaccctgtctcaaaaaaaaaaaaaaaaaaaagagagagaggtagaaagagaaaaggatggtgcaatagtttcttagtcttaaccagactcattaacaaaaatagtagggtctattttgtttgacaacatccaccaaaggttcaagttctattagttttcatatacttaaaaaaaaatccctcagaaacatcccct

SEQ ID NO: 871385 - DNA, 606 bp, Homo sapiens
gctggtgcagttttgagggcctgggagttgcttaggggttgaatgattactggcttttgagggtaagcttgtgatttatttggatagaattcccttaataatttagtagatttcctgtttatttgcttcccatcagttgcatgtgtaagtaactactgccaaagatcttgtttccatatagtttccaaaccgaactctgtgctctatgcaaccctcctctcaatagtgaccttgaagttgtctaaaacaacaggctttggggataatcctgggtaatcttaccattcctaccaggctagaacatgtcatctgctagggatcccgtaatgaaagatttttgagcagagatttgggaccaaagttttatatcttgctaattccargacttcaagtcattacttaaaactgcttcagtttggagtttaggagaaattggtttttgtttgtttgtttgtttgtttttagccctgtaagggttactaaactctcagtctactaaaattgaagactacaagcagaaaatgttcctcctggagaagctgtattcccttccaagggcttgcagcccatcccattgtaaactggcggtcatctgtctcttgtggg

SEQ ID NO: 871386 - DNA, 656 bp, Homo sapiens
ataaagggacttttcaaaatctggaaattttctggctcctcacatgcatgtcatgcatatcaattttttcaggcaagggttgcatttatcgttgtgttctcaatgcctaacagtgtgagaaacagaatagtcacttacgaaatgtttgctgagtgaagatcccttcagatagaagctagttagatcagaagtctgtaaaggtttgtcacccgagaaaaaacagggtttatttgcctggcgagtaacatgagaatgcagattttaatcaataggagttttattacttgtcacaagtaaggagagcactacaagtgttctccaaagcggtgtctccccaagggaagcgacaggagggttttatgggggtgagagaggaaagggtggatcatcgcatatagaggacaggccccatttgkgcagatgtagtgagtcatcctgccagcaacacgggtctcatgttatgctaatgaagctgtagcccctcccacggtggagaatttagcatggaactgaggatagttcacttaggttcatgtataagttgttggggtctgtcaggagctggtttcaatagacgatgtggctgcattccacacagaatttgggggaaaaccggctgtcagctgggaggatgtaaaacagtctgattgctcaag

SEQ ID NO: 871387 - DNA, 637 bp, Homo sapiens
agttttacattacatgggagactccagaaatgaagattcaaagaaagagaaaaaactatttttatgtttagctttgataaagagtaaacagttgtgcagaagtatgagtggacaatgggggtatgacctaatagtaataaactggggaaaacttagcaaagcctgtttgtttagatccttcttgatttctccgtgtcctcaaggataagaatgtttctttcctccaggtatagggagggcacctctggaaagaagtttttatgatctacttcaggagaaggtcagcttcaagggagaagcgttgagaggaaggtgagagtgacctgcttacttctgctgttttctcaaattccaaggtgctatattatggggtrgcatgttctgaacccaatcactggcttccgaagaccttgtatgcttctactcacttggaaatccgtagtcatatatacaggcctgggttagcctgctgggtgttgggagacacatggcctagtctgtctgttgcctcaggaacagccaaccaaccacagacatgggtaagggcatcctacatctgcctctcaatggcctaaacctggccttacctgacctgcataagtaagcctggcacaaactggcaggtgagcccagctga

SEQ ID NO: 871388 - DNA, 549 bp, Homo sapiens
ccagctgttaaaggctttattgtaaagaaatagagagttcacaggaatgttgggaaagctataggcttagcctcaaaatgtggtcaagaactagaagaagctagatagttggaaaatacaactaatgtcacactgcagggacaatctgtttcacggtcagagcgccagacaactaccgcaggattgtcaatgccaacagcgttgcatgcggccactgaattctcgaagctgtcattgctgctgggctctcaatatggacaccatgaaatggtatctctaacatcttttgtttttttaattttacattccaggatacatgtgcaggatgtgcatgtttgttacataggtagatacgtgccatggtggtttgctgtacctatcaacccatcacytagatattaagcccagtattcattagctatttttcccaatgctcttcctcctcccaccccactccctgacaggcctgagtgtgtgttggtccccaccctgtgttcatgtgttctcattgttcagttcccacttacaagtgagaacatgtggtgttta

SEQ ID NO: 871389 - DNA, 683 bp, Homo sapiens
attgcccacaaagcctgaaatagtcgctatctggtccttgatagaacaagtttgctaactcctattatagagtaataagtaactttaagaaatttttttttactccttttgtttctggcaacactactacggaaaaaaaaattgtttgctaaaattatgtctccatagaaataaagtattttgtccttgaaaatattcaagsctttttcaaatattcatgtaaacatttttatacattccaccctttcagtgttgacaacaatatataattatttttaacagaaaacagaacaaaatattaaataatgatttcatcagatatgtatcgtacaaacatttctcttttctgcaaactccacttttctttcttttttttccaattgtgtgatttactatcaatgttaaatctccagattatttagcacttctatatatgttttctatataatattcaccattctactactacctcctttttctcttttatttcttagttttatacatcctttattagaggtataacttctaactactttatttcccaagcatttagccaactattttccaaactattttgcaattttaatctcttgggcaagtgatttttctgacttctccaacttttcttttgctcttgaccaagtgtaatgtattgaactgaattgtatttttctatttttttc

SEQ ID NO: 871390 - DNA, 683 bp, Homo sapiens
attgcccacaaagcctgaaatagtcgctatctggtccttgatagaacaagtttgctaactcctattatagagtaataagtaactttaagaaatttttttttactccttttgtttctggcaacactactacggaaaaaaaaattgtttgctaaaattatgtctccatagaaataaagtattttgtccttgaaaatattcaagcctttttcaaatattcatgtaaacatttttatacattccaccctttcagtgttgacaacaatatataattatttttaacagaaaacagaacaaaatattaaataatgatttcatcagatatgtatygtacaaacatttctcttttctgcaaactccacttttctttcttttttttccaattgtgtgatttactatcaatgttaaatctccagattatttagcacttctatatatgttttctatataatattcaccattctactactacctcctttttctcttttatttcttagttttatacatcctttattagaggtataacttctaactactttatttcccaagcatttagccaactattttccaaactattttgcaattttaatctcttgggcaagtgatttttctgacttctccaacttttcttttgctcttgaccaagtgtaatgtattgaactgaattgtatttttctatttttttc

SEQ ID NO: 871391 - DNA, 683 bp, Homo sapiens
attgcccacaaagcctgaaatagtcgctatctggtccttgatagaacaagtttgctaactcctattatagagtaataagtaactttaagaaatttttttttactccttttgtttctggcaacactactacggaaaaaaaaattgtttgctaaaattatgtctccatagaaataaagtattttgtccttgaaaatattcaagcctttttcaaatattcatgtaaacatttttatacattccaccctttcagtgttgacaacaatatataattatttttaacagaaaacagaacaaaatattaaataatgatttcatcagatatgtatcgtacaaacatttctcttttctgcaaactccacttttctttcttttttttccaattgtgtgatttactatcaatgttaaatctccagattatttagyacttctatatatgttttctatataatattcaccattctactactacctcctttttctcttttatttcttagttttatacatcctttattagaggtataacttctaactactttatttcccaagcatttagccaactattttccaaactattttgcaattttaatctcttgggcaagtgatttttctgacttctccaacttttcttttgctcttgaccaagtgtaatgtattgaactgaattgtatttttctatttttttc

SEQ ID NO: 871392 - DNA, 556 bp, Homo sapiens
atgtattgtgagagggacctggtgggagataattaaatcatgggggtggtttccctcatactgttctcgtgttagtgaataggtctcacgagatctgatggttttataagggctttccctttgtacttggctctcattctctctttgcctgctgccaccatgtaaggcatgcctttcaccttccgccatgactgtgaggcctccccagccatgtggaactgtgagtccatcaaacctctttcctttataaattacccagtctcaggtatgtctttattagcagtgtgagaacatactaatacaaggttcttcagcttccttgaaacccgattgggttgctagacattttggctttaatttctagggaagstataagaagcctatagcattttgtgtgttggtctctgaacctgagcctggcacagatgtgagggtttctaccattaacacccgccccccttaggctcactggcttttctctagggctctgcttctgaccctggggagggagagtcaggcaagacctttcaaggcttccaaaagtgaccaacacact

SEQ ID NO: 871393 - DNA, 614 bp, Homo sapiens; identical to SEQ ID NO: 866600

SEQ ID NO: 871394 - DNA, 669 bp, Homo sapiens
gtaaattttcaatgctgatttaacagaaaaatctgaaagttggtaatatgatcaacacgaacagtgacataataaaaaggggggaggtaaagaatagccaagaccactctgaagaaggagggggaggaatgacttgtcccacctgccattatgacttacaaagcagtaacaatggaaacaatatggcggcagtgcaggtrcagacagacaaggaaaggcaaaccctacagctggcccaagaggaaagaaacagcctagacacagccccacgttatttgggagcttttgaaagaagggactacaataaatgccaacagctccggtttgttacccgtacagaaaaaggccacctcaggtaacacataaaaataaactcaagctcacttaaaacccaaatggaaaaagcagagcagctttcaaactttctgaagaaaatacaggtgtgcataaatgacctcgggttacagaagatttcttaaataagacaaaatccaaaaactacccacccccacaaaacccacaaaccacaaagaaaaagatggatacatctgacaacatgaaaacaaaaaacttctgtacaccaaagccacaaaataaacaaatgaatggcacagactggagggtatctgcagcagataacaaaggattgacgtgcagaaaatatataaa

SEQ ID NO: 871395 - DNA, 669 bp, Homo sapiens
gtaaattttcaatgctgatttaacagaaaaatctgaaagttggtaatatgatcaacacgaacagtgacataataaaaaggggggaggtaaagaatagccaagaccactctgaagaaggagggggaggaatgacttgtcccacctgccattatgacttacaaagcagtaacaatggaaacaatatggcggcagtgcaggtacagacagacaaggaaaggcaaaccctacagctggcccaagaggaaagaaacagcctagacacagccccacgttatttgggagcttttgaaagaagggactacaataaatgccaacagctccggtttgttacccgtacagaaaaaggccacctcaggtaacacataaaaataaactcaagctcacttaaaacccaaatggaaaaagcagagcagctttcaaactttctgaagaaaatacaggtgtgcataaatgacctcgggttacagaagatttcttaaataagacaaaatccaaaaactacccacycccacaaaacccacaaaccacaaagaaaaagatggatacatctgacaacatgaaaacaaaaaacttctgtacaccaaagccacaaaataaacaaatgaatggcacagactggagggtatctgcagcagataacaaaggattgacgtgcagaaaatatataaa

SEQ ID NO: 871396 - DNA, 622 bp, Homo sapiens
gtatttggttttctgttcctgcattaattagcttaagataatggcttccagctgcatgcatgttgccgcaaaggacataattttattcttttttatggctgtgtagtattctacagttattttctttatccaattcactgtcgatgggcacctaggttgattccatgtctttattattgtgaataatactgcaatgaacatacaagtgaatttgtctttctggtagaactatttatttttctttgggtatatacctagtaatagaattagatttctcaaagaacttaaagcaactttaccatgaggtatatgaaaatgaaagctaatatgggagaaattagaaaattcattttctgctaagtaataatacaaatattattacttttaaacatatagtatattattatataagtatataatgtaatatgtaataatatacacaactatatgaatgtgaagcatctttgaacttctgaatgacwtatttgtgtgcttattggagagtggtttgctgtagcacaaaaaggagaagctatggcgagaagctaccacagtactaagttgtatagaattatattaatggcagcaggagtgatgaaaactttataattagaaaattatt

SEQ ID NO: 871397 - DNA, 644 bp, Homo sapiens
tttctccctcttaccttgagatgaaaattttgtaaggcattaagtagtttaattcaaatatgagatttatatttcttcaaataatttattattttgcatattatagtggtatggggtggatggaggaagagcagttggaaccaattgtgatgctgcaaccaagaacaatgagggcatagactgagaggtgaccatggaaacacatggagggtttggcaagagtgttggwggcggagaaggtggaatattaatggattcagtgcagcatgtgaaggactcatggatttactgcatccctcacaagggatgacgcctgggttgcctgactgagcagtaagatgggtgttatttatggaatgggctaggcatgtgtaggatttagaaagaaaacatctagttctgtttgtaaatattaagtttgggatgtcttgaagtatccaaatcccaatagccaattggatgtacaagcctggcgatcagaaaattctaatataaggatataaatgttggcattattagaatatgatattcaaagtcatgttgctatttaccctagcttataagtaacaaatttttgagaaaaaaatacactgtggtacactctgtgatggcaaatggatttggtaaccccaggacttttgctt

SEQ ID NO: 871398 - DNA, 606 bp, Homo sapiens
gtagtagtataatgggaatagcattgagtctataaattgttttgggcagtatggccattttaacaatattgattcttcttatccacgaacatggaatgcttttcatatttatttgtgtcatctctgagttccttgggcagtggtttgtggactgtaaaaactttggaagaccacctaggctatactactcagaacacaggcatgagcaaagatttcatgataaaaacaccaaaagcaattgcgacaaaagcaaaagttgacaaatgggatctaattaaattaaagagcttctgcacagcaaaaagaaaaataaactatcaccagaacgaacagatacctacagatggataaaattttggcaaaaatatgcatctgacaaaagtctaacatccagcatctacaaggaacttaaccaaakttacaagaaaaaaacacggccattaaaaagtgggcaaaggacatgaacagacacttctcaaaagatgacatacatgtggtcaacaagcatattaaaaaagttcaacatcgctgatcattagagaaatgcaaatcaaacccacaataagataccaactcatgccagtaagaatggctattactaaaaag

SEQ ID NO: 871399 - DNA, 648 bp, Homo sapiens
ctaggagtataattactaggaatagggtacatttacactgaacttaaactgaccagttgttttcccaagtggctgtaccattgtatattccagcagcacattatgagggttcagattttccacattgctgccaacttactgtcttcttgatgttagccattgtaataggtgtgaagtggtttttttttgttttttctttatatttctctagtgacttgtgttagcttttactttttatttttttttttgaracagagtcttactctgtcactcaggttagagtccagtggcacgatctgggctcagtgcaacctcaatcttcccggctcaggtgatcctcctccctcaggtcttgagtagctgggactacaggtgtgtgccatcatacctggctaatttttgaatttttttttttgtagagatggggtttcctcacattgcccaggctggtgtcaaactcctgggctcaagcaatccacctgcctaggcttcccaaagtgcttggattacaggtttgtgttatctttcaatgtgcatattggtcatttacatatttacatatattttttggagtaatgtctatttagatcctcttcccattctaaaattgggtttgtatttttattattgagtcataagagtttttta

SEQ ID NO: 871400 - DNA, 603 bp, Homo sapiens
agccccaaaactccttaagctgataagcaacttcagcaaagtctaacaaaatcaatttgcaaaaatctcgagcattcctatgccccaataatagacaagcagagagccaaattatgagtgaactcccattcacaattggtacaaagagaatagaatacctaggaatacaacttacaagggaaatgaagcacctcttcaaagagaactacaaacaactgctcaaataaataaaagaggacrtaaacaaatggaaaaacattccatgttcatggataggaagaatcaatatgtgaaaatggccatactgcctaaagtagtttataaattcagtgcttttgccattaagctacctttgactttctttgaagaattagaaaaaaactactttaaatttcatatggaaccaagaaagagctcatatagccaagacagtcctaagcaaaaagaacaaagctgaaggcttgcactacctgatttcaaactatactacaaggctacagtaaccaaagcagcatggtactggtaccaaaacagatacatcgaccaatggaacaaaacagagacctcaaaaataacaccacacatctataaccatctgatctt

SEQ ID NO: 871401 - DNA, 685 bp, Homo sapiens
agaacaatactaggctcaatgttgataagctcagttgctacattgctacaccaatgcaaaaccaaaagtgatggtagtattatcattttaattggtttttgctcattttaattgtatacatcaggaaatatggttttataaatcagtacacctattcttgagcctttgccatttcttaattttgcaaattagttttccattttaggttcaaaaatatagagytcactgtgtcatgggacttagaaggaatttgttttcttcctgcaatttccattgagttaacaaacagatcttggattcacttctgcagttctctagagttcctgcaagtgtctcctttcctattaacttgttcgtcctcagaggggtcatctttgagtcacagcttttggcatctgaattctagattctgctttttctaaatggaagtagttgatgagactcggagacctttgtacaaagcctctcatttcttggacttggagcctccatatttcagtaaagtgcttttacaaaactggaagtatcacttttctttttagcatctgtatgaggcattccttttaccactcaaagactctgtttatagctttcatttgatggtttattgtaattttaacttacgttgatcagtagttttcttgatacagaccacatcacaattgtaaatacaaagcaaccacac

SEQ ID NO: 871402 - DNA, 596 bp, Homo sapiens
gttgcatttgcaaaggaggaagctggctttaaaagttttacaacctttgaaaattgtctttttaaatgtttgtgacaaggctttggttgtcatgccctggctatagcacagaggaaagtgtagggaagattataggaaaacacacattgttccttaggaaccaagttgatcctgggcttgcccttaccatctaacttgtccattgaacaagatgttcatatcctaaagacagttaatacagactgcaaatagctagtcatttcagaagagcaaaactctcagactcgttgactccagtgacttgagtaccctgctcatgttaaaggatgtttcctagaggtgtttcytagatgctgagaacttccagagccttctccagaatgcccagtcacttccccacttggccaagtagtgatctattagtgctaaatgaaagctttttaaaatttgtttttggtttaaaagaaagtctctcagcttgtatccagtaaagcacagctccaaatcaatgatgagataccccaacacagacaattatttaggataaacaggcattagaaacctcaggcttcctaacctaaagtgggttcttcacc

SEQ ID NO: 871403 - DNA, 598 bp, Homo sapiens
cttcagaagactgttaaatcctacttgcacctctgttttcataacaagcaagtgatctcatttattatcatgagaaatgaagcaatatatgcagtaataaaatattaaactcaatcagtgattttaaaaaagctttatgggacagcttttttctctatttttcattttctacaatgtttattgtagaaaatgaacatagattatttttataattgtaaaaaaactggccaggtgcagtggctcacacctgtaatgccaacactttgtgaggctgcgataggaagattgtttgaagccaggagtatagtatcagcctgggcaatatagcgagactgcatgtctacarttttttttttttttaaattagctgagcatggtggcacatgcctgtagtcccaactactcaggaggctgatatgggaggatcacctgagcccaggagttcgaggctgcagtgagctacaatcacactactgcactctaacccgggtgaaagagtgagaccgtgtttcttaaaaaaaaaaaaaaaaaaaagtaagtagaacccattctaaacagatcaaccaaaaataatattacataaagcacaacttatata

SEQ ID NO: 871404 - DNA, 560 bp, Homo sapiens
catatctggctcttcataacatggagagctagtggtccttcctggatctgcgtgtcctcagtctaacccctgcagatctcccttcatgtggggagggccttctagatggcacctgggctatgccgacttaaccctgcatttcaggctgatcccacacagcctccaaataggcactattgctctaaggtgyctgggagagaaaaggttggccccggttttggaaactttggggttttgcgtgtgtctaaaaagattatcttcagtagttttgctctcccagtgagaaaaggagaggctgatcatgtgctgccagacactgggcaaagggtgatgtttgtaatgaccatccagtgactcctgctgccgctgtccttcctgcctggatgtttttggagcttccgtctactcattcagcatccagggaggctgtgatgaagtaaggaccatctgttagggaccagatagcaaggacatttgcagcgcattgaaggttggcctggatgaccagcaagggtttttcctgccctgcatgcctggactcccacctccccacccctggt

SEQ ID NO: 871405 - DNA, 597 bp, Homo sapiens
taggccttcacccagaggtggctactatgatcacctagatatgcatgccctgaaagctcatgagtgcacaggaagtggagggatagcctggcatcttcctgaaaaacctacccctgaacacaaggaagataacacaaggccacaccagagacccctgtggttcacttttcttctttctcttcctaatgaagtagggcccagctgcctccttaaagactcttccacctgtatccagttccatcacttggacaagccaccctaggacccagatcccattttctacttttgtttgagaacgtagaccatctctgggaggtatgacagtgtagatgacatcatctcacaaatggaaaaccagaccctcaaaggtaaatattgcacttrcaccccaatagagagctgggagcagaggccattgtgaggacttgacactccaagatgctaaatgtgtccttgttttctgcaaaacaaacagaacactaagagaagtgaggttgtctgcctcaaatgcaaagttgaaatgagtctacttgtatgatcttcacgtggactaaaatcatccacacagagggcagtgcaagattggacaccacagaa

SEQ ID NO: 871406 - DNA, 597 bp, Homo sapiens
taggccttcacccagaggtggctactatgatcacctagatatgcatgccctgaaagctcatgagtgcacaggaagtggagggatagcctggcatcttcctgaaaaacctacccctgaacacaaggaagataacacaaggccacaccagagacccctgtggttcacttttcttctttctcttcctaatgaagtagggcccagctgcctccttaaagactcttccacctgtatccagttccatcacttggacaagccaccctaggacccagatcccattttctacttttgtttgagaacgtagaccatctctgggaggtatgacagtgtagatgacatcatctcacaaatggaaaaccagaccctcaaaggtaaatattgcacttgcaccccaatagagagctgggagcagaggccaktgtgaggacttgacactccaagatgctaaatgtgtccttgttttctgcaaaacaaacagaacactaagagaagtgaggttgtctgcctcaaatgcaaagttgaaatgagtctacttgtatgatcttcacgtggactaaaatcatccacacagagggcagtgcaagattggacaccacagaa

SEQ ID NO: 871407 - DNA, 599 bp, Homo sapiens
cagttgtaagtatttagatcagtgctttctaactttaatacgcacaagaattatctgggactgctgtcaaaatgcagtcccattccctaggcctggggcaggtcctgagattctgcatttctaacaaggccatgccaccactgctgatccgtgaaccacacataactcaggagagctgacccttcactcccactcaacatcagtgaagcggaataggttcgagggaggtgggaatggttggctttttttcccctccccttctctgttatcagcagcacccagtgggtggttgaacttgcattctccctcagaggcaatgtgacagtgtgaattggtctccacttctcaggaaagcattggtggggtgtggaaagagttgagtttcctttccacctatgaacaaagagaacacccagagggaagctgcatgtatgtrcctggcccttactctgcatgttagcagggggtctacctgctaataaaagaagactcagtaaaatccagagtccgaacccaaaggcagaggttacaattaatttgtcactcaccataacaagaacaaggaaaactacaacttgaatgagaaatgacaaccaaca

SEQ ID NO: 871408 - DNA, 562 bp, Homo sapiens
ggcaacatctctcactcccgactgtgacaaccaaatatgttcaaaacctagggtttcattttttttaaagtcacaggtgaaatgatcgagttcaggcagaatattatcagatatattaagcaaggggtccctggcggctgttctggcaaatgctaaggactgtggtcatgagctgaagcagacttccctgtgcatccamcctacttgacccagttatggtacctacctggccctgtgggcaggtgagtttcttctggttacaggatttttgcagttgatagatacttgttttctcctgtaatcttcaaaacaagccaactgggtagatattgttagctcatcgggcggatggaagagttgaggtacagagaatacgtgatttgcccagagtcacggaaggggcagaccagtgctcaaagctctcagaatcctcatcgggacccttcctactacaacacagaagagaaggtttgtactgcccaagaaggtttgtactgtacagagagaaagaaaaggcttttgtgggaaacttggacttcactatggtgggtaattaagcttc

SEQ ID NO: 871409 - DNA, 593 bp, Homo sapiens
gagacatacattaacacacaaagaaaatgaaatgtgactgtagtgtgaagtatattgtaggtgctaacagatatttctgcccctctttcctccttccctttcttctacaaatattattgaacaccttctatgtgtgtaggcatcaagccaagtgttcaggacacagcaagaccaagatagtggagggaaaagtttactgtctagtttgggagatggataaaaaaatctggaaacaaataaaccaaacaaatcatttcaaaaagtgctcagaactatctgcccatgtccagattttaatcgaagtggaaatctcttttgttcctgacccatgggccaatgctgggtgctaactggggtcaggggctggagattctargcctgactcggcccttgaccagagatacacagacttggggaactacctaatacttccaggcctcagcttcctcatccaagggcagaatctctgagattcttctcatggtccagtggtctgtgattcattttttttccccagggtcagcactatattggagtaagtttgtgatttgtagggagcttaatattttaatttatgaaaggaccattaaatt

SEQ ID NO: 871410 - DNA, 642 bp, Homo sapiens
aaagatggaaattccttgtcccacccaaggaatcaggccaggtcctcagtgagacttggaaatcagtttttactcttgaaatatgctacctacaaagaaggaagaaagaaaggaaatgttaatgtcttaatacttacaaggcctttggtaagaagccaaaaaggggatgcatgaagcatctcttatgtgatgtgtctatgagaaaaaactgccatggatagaaaaataatgtatattcaragtctctggattaggactcagaaaaaaacggattctagtgaagctccactgtgaagtattggaaggatcccctaactatttcaggccttcgttttgtctgcttgtaaagtgagaattgatgtttggatgcattcaccaatgaatttactgaaggattttccatcctgtcattctatggtcacgtacattttgcttgctttttctctgtcttccatttaataacctttctggtcagttgagccaatgctggacttggggcttcagaggcagctactgaagacttctctgtttttaggagtcactccagtgagctcaaaggaccaagaatttccttgggtagatgttttagagaagatggaataaggtggaaagatggcacaaaccgaaggaactgaattgtgc

SEQ ID NO: 871411 - DNA, 659 bp, Homo sapiens
ctacaaagaatataaaatacctaggaatcaatttaaccaaagatgtgaaagatctatttaaaaaacacataaaacactgattaaataaagtgaagaggacaaacgcacaaaaagaaaagagattacatgctcatggattggaagaattcatattgttaaaatgaaactataaaacactgataaagtgacgaagacacacacacaaaagaaaagagattgcatgttcatggattagaagaattaatattgttaaaatgaaaatactgacccaagcaatttacaggttctatgcaatctttatcaaaatgccaataacattcttcacagaaatagaaaaaaaaacttaaatttatatggaaccataaaagaccccaaatagccaaagcaatcytgagcaagagaacaaagctggtggcaacacactacctgacttcaaaatatactaaaaagctacagtaaccaaatcagcaagatactggcataaaaacagacatacaaaccaatgaaacagaatatagaactcagatataactccatacacttacacccaactcatttttgacaaagttgccaagaacacacgatggggaagttcagtctgttcaataaatggtgctgggaaaactggataaacacacccagaagaatgtaaattagtg

SEQ ID NO: 871412 - DNA, 634 bp, Homo sapiens
gtacatatatggtatgtgtgtatacatatataatatggagatagagactgagagattaggtttgataaaataaaccaaaatattaatgattagagcagtgagaccttggttgatttttcttttcttgatattgcttatatgtaaatccaaaattttctactctaattattacttctgtaataaggaaaatgacattaaaattgtttttacaaacacagcttccactattatatacacacataaaaaatgagtatggggacattatggatatgtgaaaaatatatataagagggaacatatctagtaactagagtcttcattttaacatttatrgatgataatacacaatcgcttcgagttctatgtgagtttaaatgtaccagcttccacttttacattttctaatgcctcaaggagataatgataaagtgcattcacaggataaaataaaaaggaaacagctcgcagtctactcttgaaggcaccatgctagccatttatttataataatatcacataagataggccttataattccagttttgcagatgaggaaaaatgccttgaggaattaatgttttatacttccagagtcagaaattaagaatccaaatttaattctaagtcttctcag

SEQ ID NO: 871413 - DNA, 463 bp, Homo sapiens
tctagggtggaggtaaaatgctgccagtttttctttttgcatagcaagaatcacctttactccaattcccaagaagttcctcatttccatcagagaccacctcagcctggacttcattatccatatcgctatcagcattttgatcagagccattcarcaagtctctaggaagttccaaactttctcacattcctgtcttctttagccctccaaactgttccaacctctgcctgttacccagttccaaagttgcttccatattttcaggaatctttatagtagcacccaactcctgctaccaatttactgtattaatggattctcacactgctaggaataaatacctgagactgggtaatttataaagaaaagagatttaattaactcacaattctgcattgctggggaggcctcaggaaacttacaatcatggcagaaggtgaaggagaagcaggcgccttct

SEQ ID NO: 871414 - DNA, 599 bp, Homo sapiens
cttgttcttttatgttccctccaaagagaatggatagagatgggaatgatttttaacttggagtgtgttttttatattgccctgaaggaaatgttggtgctgtaattataggatgtgaaccattacaaagtatgcatagaacaggtccatacaaacwgcaggccaataatcagagaagtggcatttcaccttaggaaagagtagacatactcagtcatatttgtgatgtgattaaattgtttttggcatgtatcaatatcataaaaactctaaatcatggaaaccttcctatggcattaagaaggctttaacaaagggtcgggtccactatagaactctaagtttttaagtttttagaacaccctctaggaactctgcattctacatcaaatgtactcatttaaaaagaaaaagaatgtgcaaaggaaggaattatgaagtgtccaatttttctgattttttttttctttcccccaagacccatgcagtttggatttgttttggttatggttgttgttttcatttaactcatcaaaatacactcagtgttctggcagggagtctctgggtcagctggggtagagggcagatggtgagag

SEQ ID NO: 871415 - DNA, 620 bp, Homo sapiens
aactgtgaggctgtctggggaggctgataaactcaggtccaacaggacattcttgaggactgcattgaactcaagttgtaggggcttcttggagagacccatgaactgagtttatggaccctttttggggaggtcactgaactttcactgcatgcctggaactttgcttgcagactcaaagtccatgtggctgtcctctgctacacaaactcagaggtacaagacatacagacagacatggactgcagttacccaaggatcattcacagtctctcctctctccttgctacacacacacatacacacacacacacatacacacaccctgtctcttcagtcccctctcctggttcttccataatttcctaacctctgaacacaggaatgttcagagttcagtccrcaaacctccccatttgtttatactcactttttttttttttttttgagatagggtcttgctctgccacccaggctagagcgcagtggcccaatctcggctccctgcaatctctgcctcccaggttcaagcgattctcatgcctcagcctcccaagtagctgggactacaggcacataccaccatgcccagttaatttttgtatttttagtagagactg

SEQ ID NO: 871416 - DNA, 678 bp, Homo sapiens
acttgacattccaagagagaataaagtacacattgtttcccaagtttattcgactccagagcccttttgtcaaggagccacattgggaaatgctgctgctccagttctttgacagcttttaataaaaatatgctgtcttatgtaaactcaatattttattaatctgattcacacaaaaggtctgttctcaagttcatgctgagaaatctggctcaagaaactagtaactactgccctgcacaaattacttttgaaatttctgaatatcaacattgtcctcttaaaaagaacaaacatcagtgaccagctccatactctaagtcacaagctatttatttcatgatgagattttaacctatttatttaccaacatcctttaaataaagygtatttattcaacattcccaaattatcaataatgaagacttgcactcttcctttaaaggaattccaccacagaaccttgccaatcatcccagtaccagtgctggcatacagtgtcctaaacatacaacttacagggttgaagaaatacttaaaaaagaaaatgccatctaacacatgaatgaagaaggaataatagaatttcacaattttgcaatcactgatgaattaagaagtctaagcaattatcatcaacagctgctaacatcacaaagagacataagaccttacata

SEQ ID NO: 871417 - DNA, 567 bp, Homo sapiens
gggtctgtgctgaggaggagtagtgaaagaggaaggcctctatgaggttaagaggaaagcatctgtctcctgcacgtccctgggaatggaatgactcggtgtaaaaccgagcatacattctattctgagataggagaaaaccgccttatggctggaggcgagacatcatggtggcagtactkctctgttactctttactgctctgagatgttcatgtaaagttaaatataaatgtagcctacgtgcacatccaggcacagcacctttccttaaacttatttatgacacagagtcttttgttcacgtgttttcctactgaccctctccccaccatcaccctatagtcacaccgcattcccctcgccgagatagtaaagatagtgatcaataaatactgagggaactcagagaccagcgcaggtgcaggtcttcacttgctgagtgccagtcccctgggcccacttttcttcctctatactttgtctctgtgtcttatttcttttctcagtctctcatctccaccttgggagaaatactcacaggtgtggaggggtaggcccccttcaa

SEQ ID NO: 871418 - DNA, 543 bp, Homo sapiens
tcaattagtgaaagtactaaaagtctctgacgtgcagaaataatggcataagctgtctttctctctgtctcctctccctctctgcctcggctgccaggcagggaagggccccctgtccagtggacacgtgacccacgtgaccttacctatcattggagatgactcatactctttaccctgccccttttgcttcgtatccaataaataacagcgcagccagacattcggggccactaccagtcttccacgcattggtggtagtggtccccygggcccagctgtcttttcttttatctctttgtcttgtgtctttatttctacactctcttgtcaccgcacacggggagagacccacagaccctgtggggctggtccctacaagaaggaaaaaggttgagccaaaggaacccacccaggaggtggacaggtggagaccactgtaggagctgaaaagaatgcatttcccccataaggtcatccacacaagtcaatcataaatgcctggtagagttggatcctgctcacactgaataaatggtaaag

SEQ ID NO: 871419 - DNA, 662 bp, Homo sapiens
tcttgttagcggtgttcctaggtattttattctctttgtagcaattttgaatgggagtttattcatgatttggctctctgcttgtctgttgttagtgtgtaggactgcttgtgatttttgcacattgattttatatcctgagaccttgctgaagttgtttatcagcttaagaagctttggggctgagataatgggattttctagatataggatcatgtcatttgcacacagacagtttgacttcctctcttcctatttgaatatgctttatttctttctcttgcctgattgccctggccagagcttccaatactatgttgaataggagtagtgagagagggcatccttgtcttgtgccggttttcaaggaaaatgcttccagctcttccccattcattatgatattggccatgggtttgcataaatggttcttactattttgagatatgttccatcaatagctagtttatcgagagttttcwacatgaagggatgttgaattttatggaaggccttttctacgtctattgaaatgatcatgtggtttttgtctttccttctctttgtgtgatgaattacgtttatggatttgtgtatgttgaaccagccttgcaccccagggatgaagccaacttgatcgtagctaagttttttgatgtgct

SEQ ID NO: 871420 - DNA, 606 bp, Homo sapiens
cacgcccggctaattttttgtatttttagtagagacggggtttcaccttgttagtcaggatggtctcgatctcctgacctcgtgatccacccgcctcggcctcccaaagttctgggattacaggcgtgagccaccrtgcccggctgaggttaggaatctcatggcctctggctgcatgactcctgagccctaatttctaattttttttttttgttttgagatggagtttcactcttgttgcccaggctggagtgcaacggtgcggtctcggctcaccgcaacctctgcctcccgggttcaatcgattctcctgcctcagcctcccgggtagctgggattataggcatgcgccaccacgcccagctaatttttttgtattttcagtagaggcagggtttctccatgttggtcaggctggtcttgaactcctgacctcaggtgatccgcctgcctcggcctcccaaagtgctccgattacaggtgtgagccaccggcctggcccctaatttctaatcttatagctgatttgctagttctacaaaggcagtctggtccccaggcagaagggatttattttgggaagggactcttatcgtctttgtttcc

SEQ ID NO: 871421 - DNA, 601 bp, Homo sapiens
gtaggggtgatgaacagaaaataacatctgcccccttacccaagcataggccttaggtagcccaagctcctccacaagagtgtgtgactcctctttgtggtaaggaaagggtgagggattcttctccctctgctacagatgaaggaatggagacttggagacattaagcaacttgtctaatgttacacagacagcggggatggagatagggcttagtctcagatcttctgctctcaaatccagagctctttgctttaatcaagttgcctccttagaagcagagctggtttcatccacctgtagcaggcatttacaaacacaaccccaacyttagtcaaccttaggttgactttcctccgcccctaagttttctcacccctaaagtgggaatcaagaaacctacctcccccagttgctatgagaggttataaggaatgagaagcacctagctcagtgcccggcacatggaaggtgctccataaattactttcccttcgctcttttagcacaatctctccccacttttcttgggggtctgccatggtgggaaatgagaatttctggttggggaggtagtcgaccgcgtttgaagtgacagtga

SEQ ID NO: 871422 - DNA, 723 bp, Homo sapiens
tggtaatggggaaagcagaatactttgccatgaaagaaggtaaccataaaaatttaaaaataaagtgcccaatgtttcaagttcttctcctctgacaaaaaaaaaaagcccagtgttattccatcctggctgagtcctgccacctgcttctgagctctaagcctgaggcttaatgtctattgttaaaaaagaactaacaagtggcgaagaggtatgcaagctgtaccagcctcaaaccaagaccttctgctagtcaaaatcagaaagcttgaaaaataatttaaggagtaactttttttccgtgtaagcaatcttattgaatgctggtcaacgtagcacctgaaagaaactttgggaatcactgatctagtccactccctcgcccttgcctctacctcactgctaaaatcctttgatctttcacccagtgtgtgtgcacctccagtgaccaggaaatcacccctttccaagacagcctgtctctccagaggaagttctagtaggaagttctttattgcatcaagccaagtttccctgcatcctcccctacttrtcctacctccccactttggggaatcccagggtcaaggctcatctgtttgttccaaagagtcattaaccttttacagcctcagtttcttcatctaaaaaaatgggggataataatacccactttccagggagatctttgtgatgaaacgagatacagcatgtaaggtgctc

SEQ ID NO: 871423 - DNA, 593 bp, Homo sapiens
ttatgtggtcaattttagaataagtgcaatgtagtgctgagaagaatgtatattctgttgatttggggtggagagttctgtagatgtctattaggtctgcttggtgcagagctgagttcaagtcctggatatccttgttaaccttctgtctcattgatctgtctaatattgacagtggggtgttaaagtctcccattattattgtgtgggagtctaagtctctttgtaggtctctaaggacttgctttatgaatttgggttctcctgtattgggtgcatatatatttaggatagttagctcttcttgttgaattgatccctttaccattatgtaatggccttctttgtctcttttgatctttgttggtttaaagtctgttttatcagagactaggattgcaacmcctccttttttttgctttccatttgcttggtagatcttcctccatccctttattttgtgcctatgtgtgtctctgcacgtgagatgggtctcctgaatatagcacactgatgggtcttgaccctttatccaatttgctggtttttgtcttttaattggggcatttagcccatttaaatttaaggttaac

SEQ ID NO: 871424 - DNA, 621 bp, Homo sapiens
acacagacctgccctgccagaatgctaataggagttcttaaatcagaaagaaaagaatgttaatgagcaataagaaattatctaaaggtgcaaaatttactggtaatactagtaagcacacagaaaaacacaaaatattataacactgtaattgtatttgtagtgggtaaacttctcttaagtagaaagaagaaatgaagaagcaataaaaaataataactaccacaacttttcaagacataatataataaaacataaagacaaacaacaaaaagttaaaaaacagaggaacaaagttataatgtaggttattattagggtttytttgcatgtttgtttatgcagtgttttcatcagtttaaaataatgggttataagaatatttgcaagcctcatagtaacctcaaattgaaaaacatataacaaatacataaaaaataaaaagcaggaaattaaatcatactaccagagaaagtctccctcacttaaaggagaataggatgaaaggaaagaaggaagaaaagaccacaaaataccagaaagcaaattaaaaattggcaagagtaagtccttatttatctttaacactgaatgtgaatggactaactctcaaataaaaag

SEQ ID NO: 871425 - DNA, 668 bp, Homo sapiens
acaagaaaaaaatcaaccccattaaaaaatgggcaaaggatatgaacaaacacttctcaaaagaagacatttatgcagccaacaaaaatatgaaaaaaaagcccaacatcactgatcattagagaaatgcaaatcaaagccacaatgagataccatctcacaccagtcagaatggcaattactaaaaagtcaagaaacaatagatgctggtgagactgaggagaaataggaatgcttttacactgttggtgggaatgttaattagttcaaccattatggaagacagtatggcgattccttaagaatctagaaccagaaatatcatttgacccagcaatcccatcacggtatatacccaaatgaatataaatcattctactataaagacacgtgtgcacttatgtttattgcaacactatttacaatagggaagtcatggaaccaactcaaatgcccatcaatgataggctggataaagawaatgtggtacatatacaccatggaatactatgcagccataaaaaagaatgagataatgtactttgcagggacatggatgaagctgaaagccattatcctcagcaaactaacccagaaacagaaaatcaaactctgcatgttctcattcataagtgagaggtgaacaatgagaacacatggacacaggg

SEQ ID NO: 871426 - DNA, 585 bp, Homo sapiens
tttattttgtaaagaagcaaatgtcctataggacactttgctaagtggaataagccaggcatagagaggcaaaaaccacatgatctcaattttatgtggaatgtgaaaaagtcaaacttgtagaagtagagagtaggatggtggttaccaggttctgggggcaaggatagggggaaatggaaagatgctggtcagagagtacaaagttccacttaggaagaataaatttttcttctacaatatattttgtaaatgcaatatattttacaatttgatttttattgaaaagatgcaagctgaattctatttcttttgtgtatttagaatataaaagaatcaacctgaaatgattagagttagtatcatattaaaagacgtatgcccttcttatttcagaagttatttagggtkgttatgagaatacctaaaatacaggaaactagcatattataattagaagagactaaaaacattgagtcaagccaggaattaaaacacaaaaaaatcaggccataaaatattatgtgcttgtagatgggcatgaatggctttctgaaaatatttatatcactgcaacaatgactt

SEQ ID NO: 871427 - DNA, 603 bp, Homo sapiens
actttcctctcatctgcattttacagctctgttcgtttgatgttgtctcataaagacctccatgtaacttcttaatacctttatctacacttcgccctccttctgctgttgagtaaaagtatgaaagtgatgctgcatgtgcagtcaagatatagtacacctgctattakgtttccgctttacaatgatctgctttaagacaacaacttgagcaactctgcatctaaaagcctggattccttgtgcatactttgtgtcattgtccatgatgcacaacgagctgagccccttcctgttcccacataacaacatggactttgccctactctgcttggaaacccctttccccttctgcacttgggaagtcagcaagaaactcatgcttcaaaccctagctcagagggttgagaacctagctcctctcccaggcaaatattcactcatctcatctgctcccagaatgctttttacaaacattttctaaggcccatgcccattttataattttgttttgttttcacatcggtcttcaccaaaatgcatacttcaagaccacagcttattcatttttataaccatattaccaaatactgcagctgtcac

SEQ ID NO: 871428 - DNA, 603 bp, Homo sapiens
ttctcatgaggaaggggatgctacaagtttaagcgacaggcatacctcagagatattgagggtttggtttcagaccacttcagtaaaggcaatattgcaataaagcgagtcacacacatattttggttttccagtacggataaaagttatgtttacactatgctgtagtctattaagtgtgcaatagcattatgtcttaaaaaaaaacaatgtgcatgccttaatttaaaaatatggctgggtgcagtgattcatgctacctgtaatcccagcattttgggaggctgaggcaggaggatcacttgagctcaggagttygagaccagcctggaaacatggcaaaaccccatctctacaaaaaatacacacacacacacaattagccaggtgtggtggcatgcgcctgtagttccagctactggggaggctgagatgggaaaatcacttgagcctgggcagaggttgcagtgagccaagatggcgccactccactctagcctgggtaactgagtgagaccctatcttcaacaaatagaataaaataaaaattttattgctataaatgttaatgatcatttgcgccttcagcagattgcaaccttt

SEQ ID NO: 871429 - DNA, 603 bp, Homo sapiens
ttctcatgaggaaggggatgctacaagtttaagcgacaggcatacctcagagatattgagggtttggtttcagaccacttcagtaaaggcaatattgcaataaagcgagtcacacacatattttggttttccagtacggataaaagttatgtttacactatgctgtagtctattaagtgtgcaatagcattatgtcttaaaaaaaaacaatgtgcatgccttaatttaaaaatatggctgggtgcagtgattcatgctacctgtaatcccagcattttgggaggctgaggcaggaggatcacttgagctcaggagtttgagaccarcctggaaacatggcaaaaccccatctctacaaaaaatacacacacacacacaattagccaggtgtggtggcatgcgcctgtagttccagctactggggaggctgagatgggaaaatcacttgagcctgggcagaggttgcagtgagccaagatggcgccactccactctagcctgggtaactgagtgagaccctatcttcaacaaatagaataaaataaaaattttattgctataaatgttaatgatcatttgcgccttcagcagattgcaaccttt

SEQ ID NO: 871430 - DNA, 671 bp, Homo sapiens
tgctttctcctgcctgattgccctggccagaacttccagtgctatgttgaataggagtggtgagagagggcatccttgtcttgtgcctgttttcaaagggaatgctttcagattttgcccattcagtatgatattcgctgtgggtttgtcataaataactcttattttgagatacactccatggatacctagtttattgagagtttttagcatgaaatgctgttgaatattgtcgaaggcgttttctgcatctattgagataatcatgtgttttttgtcgttggttctgtttatatgatggattatctttattgatttgcatatgttgaaccagccttgcatcccagggatgaagccaacttgattgtggtggataagcttttttatgtgctgctggatttggtttggcatttccaagtatstaagaaagcaagagcaaaaggtgtaaggcctcttaagtcttataactggcacaacatcactcttacggtaattcattgatcaaagcaagtcccagggtatgtacagcaatggctgggaaaatagactccacctcttgttggaagacacaaggtgttgtagagatttttgccagttaccataatgcccatttaacattatagcactgaaccttttccagagatcagaaatatgggactacattatgctcc

SEQ ID NO: 871431 - DNA, 646 bp, Homo sapiens
tctcctaggcctctgggcctgtgatgggaggggctaccgtgaaggtctctgacatgcatgggagacattttcccaattgtcttggctattaacattcagctcctcattacttatgcaaatttctgcagccagcttgaattcctcctcagaaaatgggtttttcttttctaccatatgttcaggctgcaaaatttccaaaccttcatgctctgcttcccttttaaacatagcttccaatttcaaaccatctctttgtgaacgcatataactgaacactttcagaataagccacgtcacatcttgaatgctttgctgcttagaaatttcttccacccaataccytaaatcatctctctcaagttcaaagttccacagatctctagggcagggacaaaatgccactttgctaaagcattagtctctttgctaaagcatagcatgagtgacttttactctagttcccaataagttcctcatctccatctgcgaccacctcagcctggacttcattgtccatatcactatcagaattttggttacaacgattcaacaagtctctaggaggttccaaactttcccacatcttcctctcttcttctaagctctccaaactgttccaacctctgccagttacccagttctaaag

SEQ ID NO: 871432 - DNA, 618 bp, Homo sapiens
gaagtgagagcattgtgggtttgtaaaccacagaaataacttcagatttttttcttttctaagaaatcacagtaagattaacagaaggggtatggcatggcctgacatgttttaaagggatcaatctaggagacaagaaaatagacaccctccccttttttttcaaattctactaacaaaactgaggtttcaagaagagcacccccccttttttttcaaattctactagcaaaactgaggtttcaagacgagtacctgaggaagttgtacacaggtttgcccttgtctctattaaattctcattattaacgatggcgtacatcatgctgaaaacatcatctccaaagattttaataaactagaaggttttaaaatgattctaaatctgcactgatgattgtatcattcagaaatagaaaaatttgcattgtggcttgctggagctggtatccagtaagtatgaactctttcccagaaayttctctctgggtcagtaaatttgtcagatattggttctcttggtcacataaaaatggacacaaaatggccagtctaattaaaccagatgattcacggtgacatgccattccaaaaaaatatttatgtggcatttttagt

SEQ ID NO: 871433 - DNA, 637 bp, Homo sapiens
agcccaggcccaatgcaggctgcagagaaacacccaaatgtctgctcataactcagaaaccactgtccagctttggagcttaccgtggggatcaggaaggtcaatgcccagccctcagcaagaactgccagcttcttttggtatgggcacccaggcctccagcctgtggtacagaatgcacctgtgtgggaatgcatgtgagtgcccgagtctgtgaacattcagcctgctgtgcaggcctcatgagttctgtttggctacctgggctccatacaggcagctgggcctctgtgtgggtacactcacctctctgtgagcacctgggcacactggatctcggtgcccctccagataacacctagttagcaccttggcctgtgagaggacgctgaggccccagccaggtccccttctcagaggcctttaatcttccacggttcttgcaaagaatggagacgwgcccccagccctgggattgtccacagccttggaaggcaggttggcctggcatgtgggtggcatgcagaagatgggactggtacagagaaaagtggccgttttttcaggaaaggaggccttctccacagagggccaggccctggcagaaataccccaggccttttctctgtcctcttcc

SEQ ID NO: 871434 - DNA, 647 bp, Homo sapiens
ctctcaagtgactttcatatcaatttagaaatcaaatcctatattctacttcagatattctcgctcatttttttttcaaggatagcaggaaaaacaatgccttcaaaggatcaccaagcttttattttatcacataacctcactccagttgttttccaaacattttttaatcccaaatgattactgatrtcttacatggtcaagatgtttccactcttctgcccattctctgtctgttagtctgtgatcaatcatttcttcttgacgtgtgccatgcaaccctacaaaaatagagaaggctgaataaccctaaagcattcagtacacaacccataaacacacagactcatagcaaggactatgtgggcaaactcgatgtaaaaatacgtttgattttggatggagacatgagtcatatttagattcagaattacctaacagattcctcatagaatgataaaatactagaactagaaggaattttagaggtcacctggtcagaagcctttattttacacataaggagacagttaagtgacaccaactccacaactagttatccatgcaacactctgtaagtaaaaatatattctaactcttaataaatacaagaaaccacaagtagacattaagtggtttttaaagca

SEQ ID NO: 871435 - DNA, 642 bp, Homo sapiens
cagatttgttacacaggtatacacatgccatagtggtttgctgcatccatcagcctgtcttatttctcctattgctatccctcccctagcccccaactccccagtaggccccggtgtatgatgatgttccccttcctgtgtccatatgttctcattgttcacctcccacttatgagtgagaacatgtggtgtttggttttctgttcctgtgttagtttgctgagaatgatggtttccaacttcatccatgtccctgcaaaggctggttcaacatacgcaaatcaataaatgtaatccatcacataaacagaaccaatgacaaaaaccacatgaagarcagaactgtttgtgtcccttttcggtgagtactttgttctaccttgtatcctacctacctctgtgtgtgcctgtcaccttcactggaggaaaagcccctgcagggcagaaactcatctaaatcttttattcatctatttgtaatcgttggtaaaggctcagtaactattgtactatcttcaatgaaatacttggtcttatttggtccttataatatctcaatgattttattaggcattgatagtccttcctgaaaactgataacacaagttttgagagaccatatgtttgtctatggctgtacaa

SEQ ID NO: 871436 - DNA, 642 bp, Homo sapiens
cagatttgttacacaggtatacacatgccatagtggtttgctgcatccatcagcctgtcttatttctcctattgctatccctcccctagcccccaactccccagtaggccccggtgtatgatgatgttccccttcctgtgtccatatgttctcattgttcacctcccacttatgagtgagaacatgtggtgtttggttttctgttcctgtgttagtttgctgagaatgatggtttccaacttcatccatgtccctgcaaaggctggttcaacatacgcaaatcaataaatgtaatccatcacataaacagaaccaatgacaaaaaccacatgaagaacagaactgtttgtgtcccttttcrgtgagtactttgttctaccttgtatcctacctacctctgtgtgtgcctgtcaccttcactggaggaaaagcccctgcagggcagaaactcatctaaatcttttattcatctatttgtaatcgttggtaaaggctcagtaactattgtactatcttcaatgaaatacttggtcttatttggtccttataatatctcaatgattttattaggcattgatagtccttcctgaaaactgataacacaagttttgagagaccatatgtttgtctatggctgtacaa

SEQ ID NO: 871437 - DNA, 471 bp, Homo sapiens
ttccagtgagtgggctatttctaataagattagtagttttttcattcatatttagatttctggattttcaaggtcatgttttagtttatatttgaaatgtgctggaggaaattagggaaacacctcattttagaggtgaattctgcaggccaggaactgcatacaccaaggtgttctgacagcccttccagacctggttcaggtagccccattccacagcctttctaggctgcagccagcacctaccacttcctcagtctcccccttggttaaatgggtcacagtcagtccaggttcttgagacagaaatccygggcatctgttatccttaatactttccttttcctctcagccaatcagcagccagattctataaatctactgcctcaaagttatctctttcattcctccaatctcaacacctttgcagccctcatcaatgataacctgagctatttcaagaactggttc

SEQ ID NO: 871438 - DNA, 513 bp, Homo sapiens
aataactgcacatatttagtgtgctattttggtaagtttacacacacacacacacacacacacacacacacacacaccccatcaccaataaaaataatgaacatattaggtcaggagtggtagctcaagcttgtaatcccagtactttgggagggtgaggcaggcggatcactcgaggtcaggagttcaagaccagcctggccaacatggtgagactcccgtctctactaaaaaaatataaaaattagctgggcatggtggtgcttgcctgtaatytcagctacttgggaggctgaggcaggagaatcacttgaacctgggggatggagattgcagtgagcttagatcacgccactgcactccagcctgggcaacagagcaagattctgtctcaaaagaaaaaaaaaagaacatattcatcatcctcaaaatattcatcattcctctttgtaatccctttccatccctaggcaaccactaatttgttttccatcactgtagattagtttgcat

SEQ ID NO: 871439 - DNA, 620 bp, Homo sapiens
gagttcactcatgatttggctctctgtttgtctattattagtgtataggaatgcttgtgacttttgcacacattgattttgtatcctgagactttgctgaagttgattatcagcttagagagattttgggctgagatggtaggattttcaaaatatacaatcatgccatctgcaaatagagacaatttgacttcctctcttcctatttgaataccctttatttctttctcttgcctgattgccctagccagaacttccaatactgtgttgaataggagtggtgagagaggacaaccatctgatctttgacaaacctgacaaaaacaagaaatggggaaataattccctgtttaataaatgatgtttggaaaactggctagccatatgcagaaaactgaaactggaccccttccttacaccttttacaaamattaactcaagatggattagagacttaaacataagacctaaaaccataaaaaccctagaagaaaacctcggcaatagcattcaagattaggcatgggcaaagacttcatgactaaaacaccaaaagcaatggcaacaaaagccaaaattcacaaatgggatctaattaaataaaaagcttctgcactgca

SEQ ID NO: 871440 - DNA, 577 bp, Homo sapiens
tatcagaatatctcaagtacttcataaatatatgcacctagtatgtacccacaaaaaattttttaaaaagtccatgcacctaaacagtaagtttattttctacaatggttccaagagcatacattgggaataggacaatcccttcaataaacgatgctgggaaaactggatattcatatacagaagaatgaaactagatccytatgttttgccacatataaaaagaaaatcaaaaatggatgaaagacttacatctgaggcctcaaattatgaaagaaaaatggataaaagacttacatctaagacctcagacaagaaaatattggggaaactcctcttcaggactgggcaaagatttcttgagtaataccccacaaacacaggcaactaaagcaaaaatagacaaatgagatcacatgaggttaagtttctgcatggcaaagggaacaatcaacaaagagataacccacagaatgggagaaaacattttcaaactatccatctgacaagggattaataaccagaatatataaggagctcaaacaattccatagggaaaactttaataattcgatta

SEQ ID NO: 871441 - DNA, 585 bp, Homo sapiens
gagaaaaggttcagcattaattctggtcttatttttgtttcttataggtcaaagggctgggaaaccctgctcaaataagcagctgggaatggaggcagtttttaagagcaatgccacttaattcttcgcactcctttctgtgcatcyaatcccatggtgctctatcactcagccctccctccctccctttctttccttcttttttttttttttttttgagaaggaggctggctctgttgcccaggctggagggcagtggcacgatatcagctcactgcaacctccacctccctggttcaagcaattctatctcagcctcccaagtagctgggattacaggtgcccaccaccacgcccggctaatttttatatttttagtagagatggggtttcaccatgttagccaatctggtctgaaacttctgacctcaggtgatccacccaccttggcctaccaaagtgctgggatcacaggcgtgagcccccacgcctggcctcactcaacattatttttaagacctcatcagttgatatccccatgaagtcctctcctcttcaattcagtttccttgaggaattgagaat

SEQ ID NO: 871442 - DNA, 585 bp, Homo sapiens
gagaaaaggttcagcattaattctggtcttatttttgtttcttataggtcaaagggctgggaaaccctgctcaaataagcagctgggaatggaggcagtttttaagagcaatgccacttaattcttcgcactcctttctgtgcatccaatcccatggtgctctatcactcagccctccctccctccctttctttccttcttttttttttttttttttgagaaggagkctggctctgttgcccaggctggagggcagtggcacgatatcagctcactgcaacctccacctccctggttcaagcaattctatctcagcctcccaagtagctgggattacaggtgcccaccaccacgcccggctaatttttatatttttagtagagatggggtttcaccatgttagccaatctggtctgaaacttctgacctcaggtgatccacccaccttggcctaccaaagtgctgggatcacaggcgtgagcccccacgcctggcctcactcaacattatttttaagacctcatcagttgatatccccatgaagtcctctcctcttcaattcagtttccttgaggaattgagaat

SEQ ID NO: 871443 - DNA, 611 bp, Homo sapiens
gcgggtggatcatgaggtcaagagatcaagaccatcctggccagcatggtgaaaccccgtctctattaaaaatacaaaaattagctgggtgtggtggtgtgtgcctgtagtccaagcaactcgggaggctgaggcaggagaatcgcttgaaccagggaggtggaggttgtagtgagcccagatggcgcccctgcactccagcctggtgacagagcgagactctgtctcaaaacaaaaaacaaaaaacaaaaaaaaaccactggctgtggagacccaaagaatagttccaagcatgacaagcatgaaggcgtagattggggtacccttgaatcactctagtttctttattggagcctttaaatataatctctgttaattttatagccttaaaatggccctggaattcacctgacttcagaactttttcygcactaagaatagctaaaacttaaaatgaacttaaataaacaactccattggtttgctttatcttgggttttacgttaaagcaaatcaatttcagaaaggagcctgggacagggagctggactggggaaacaaatgtcactatgtagttttcagaatgttttgtctttcagctgtggtagcca

SEQ ID NO: 871444 - DNA, 502 bp, Homo sapiens
gctgaatgctagttctgcttttagctctttgaggaattgccatactgtttcccacaatgactgaactcatttacactcccaccaacagtgtgtaagtattcccttttctctgcaacctcaccagcatctgttattttttgactttttaatagtagccattctgactggtgtgagatggtgtstcactgtggttttgatttccatttctctaatgagcagcaatattgagctttttttaatatgcttgttggctgcatgtatatcttttgaaaaatgtctgttcatgtcctttgcccaccttttaatggggttgtttttctcttgtaaatttgtttaagttccttatagatgctggaaagacctttgtttgatgcatagtttgcaaatattttctcccattgtgtaagttgtctgtttactctgttgatagtttcttttgctatgcagaagctcttaagcttcattagaacccatttgtcaatttttgctttgttgctattgc

SEQ ID NO: 871445 - DNA, 502 bp, Homo sapiens
gctgaatgctagttctgcttttagctctttgaggaattgccatactgtttcccacaatgactgaactcatttacactcccaccaacagtgtgtaagtattcccttttctctgcaacctcaccagcatctgttattttttgactttttaatagtagccattctgactggtgtgagatggtgtctcactgtggttttgatttccatttctctaatgagcagcaatattgagctttttttmatatgcttgttggctgcatgtatatcttttgaaaaatgtctgttcatgtcctttgcccaccttttaatggggttgtttttctcttgtaaatttgtttaagttccttatagatgctggaaagacctttgtttgatgcatagtttgcaaatattttctcccattgtgtaagttgtctgtttactctgttgatagtttcttttgctatgcagaagctcttaagcttcattagaacccatttgtcaatttttgctttgttgctattgc

SEQ ID NO: 871446 - DNA, 502 bp, Homo sapiens
gctgaatgctagttctgcttttagctctttgaggaattgccatactgtttcccacaatgactgaactcatttacactcccaccaacagtgtgtaagtattcccttttctctgcaacctcaccagcatctgttattttttgactttttaatagtagccattctgactggtgtgagatggtgtctcactgtggttttgatttccatttctctaatgagcagcaatattgagctttttttaatatgcttgttggctgcatgtatatcttttgaaaaatgtctgttcatgtcctttgcccrccttttaatggggttgtttttctcttgtaaatttgtttaagttccttatagatgctggaaagacctttgtttgatgcatagtttgcaaatattttctcccattgtgtaagttgtctgtttactctgttgatagtttcttttgctatgcagaagctcttaagcttcattagaacccatttgtcaatttttgctttgttgctattgc

SEQ ID NO: 871447 - DNA, 591 bp, Homo sapiens
gtttttcccaccggagcctgatcccccagcttatgcctggaggcctccagcacctggagcttgctttctctcgactgagcctcctctctctgttaggaaatttcctccctaggaccaacagaaggggccccaaggtcacttttcccatccaccttagcagtacccttggggccaaatctaattcctcctccacccaccagcaaggatgtaaagaacgtatgtcttcccaagtctttctgcaggtggagcaccccagtttcttakccaccttccctctaagcccctggtgtgaggctggagcttacacataaagactccccaggtggtcctgccactcagagggcacagccatgccctccctccacaggcagcttctgggaatgctgcctgcaatccccctccctttcctggagtattttagcatttcacctccattctgtcatccagtcttcgtaaaaaccctctgaagtaggcagggctgctatcattggattcatttttcagatggggaaagctgaggttatacacaaactgcagttcaactccagggcttttggtgacaagcctgaagagcccaggagactttagggt

SEQ ID NO: 871448 - DNA, 624 bp, Homo sapiens
gtacaaactgctaggcattttccattgtgctggaagctcaaggttgccactgcctttctgatggaaatcttttaagagtctggtgagtcctgcaaacctaagacacatcttagagcaggatggaacaaaccagaagtgacagaagttgtctggtaagttctgaaacactagttttcacatacatcagaatcactgaaaaagctttckgtgaaaacatggatgttcatatcttggccccagaatttcagattcagtgctgaattaaggtgcttccctccattcccaggggacaagctgttctaaaatgcaaccaacacaaagttatctgtaaacctgagaaatatgacatgacgcaaaagtgcaatgtgttcaaatgaaaacagtgatctatggatcctggaagctgattggacacaaaaaggtgtccaggcatcttacaacatgtaaatttacccaaatgcatggagtcaactcttttaaaccaagtactcaattaagttaagagcctggtttttaagcaaactggctccttcatagaccactttccttaggaatgggctttagtagtgagagctcttataaacaattaagagaccaagctacagtgaacaaatagataatctc

SEQ ID NO: 871449 - DNA, 674 bp, Homo sapiens
cagctcaaggaggcctgcctgcctctgtagactccacctctgggggcagggtatagctgaacaaaaggcagcagaaacttctgcagacttaaacgtccctgtctgacagttttgaagagagtagtggatctcccagcacggagtttgagatctgagaatgaacagactgcctcctcaagtgggtccctgacccccgagtagcctaactgggaggcacctcccagtaggggccgactgacacctcatacagcctggtgcccctctgacacaaagcttccagaggaayaatcagacagctacatttgcccttctgcaatatttgtggttctgcagcctctgctggtgatacccaggtaaacagggtctggagtggacctccagcaaactccaacagacctgcagctgagggtcctgactgttagaaggaaaactaacaaacagaaagggcatccacaccaaaaccctatctgtatgtcaccatcatcaaagaccaaaggtagataaaaccacaaagatggggagaaaccagagcagaaaagctgaaaattctaaaaatcagagtgtctcttctcctccaaaggaaccacagctccttgccagcaacggaacaaagctggacggagaatgactttgacgagttgagagaagaaggcttcagacaatcggtaataaca

SEQ ID NO: 871450 - DNA, 566 bp, Homo sapiens
aaaattatcaatgggtttcaaattgttgattaaaataaaggacttggaattgaattaaaagcatcttagaaaagtctagtattgacctatatgcaaaattcagaatattttaattatcattatgttcctgtgtttcaactcatgaactccagcctccaaatgtctaagtttgaggaacactgaactttgaccaacagaggaaagtacattgaatttctggcacctaaactttggtatcagggccaaatattaaaatacaaattgtttctttggattcacagcatatctttatcattcattttgcttgtctttyttcagtttgattatttagggatcaaatgataaaattcttccttttcttgaagctcagttcccacatattttcctttccattcttcctccacacattcttatcaaaagatatccaacattacattggactaacagaaccctgcctattaagaatttcttcccagtgccatctgcctgcttcatagatttctgaatattcatgtccctctatttccttggatataagcaaaaaggacaaatctgaaggcatcaca

SEQ ID NO: 871451 - DNA, 640 bp, Homo sapiens
gccagaggcaaaatctctaaagaagcactctatttttttctataatttcataagagtgtgatgttttacattatagatcatttttccttaaaacagtgtccatttccaggtgatttagatctatgctctcattacccattcccattccatagaaaatgaattaataaatatttagggagtagtgacaaactggaatacttacaaatattgactataaaatatgtaacacaggatgttatgtattttttattgaagtgaaattcacataacacataattaactattttaatgtatcaaattcagtggcatttagttcgttaaaaatgttgtttagctaccagttatttctggtctcaaaactttgtatcaccccagaacaccctgtacactttaagtaattattctccatttcyttctcccctatgtcctctggcaaccaataattttttttctgcctttgcagatttgactattctggatatttcgtataaaaggaatcatacaataggagacctcttatgtctggtttctttcatttacataatgtgtttgaggttcatacaagttgtgaaagtcgtagctacattcatgcctctgaggcctcagctgctggggatgttcctcaaagtcttagatccca

SEQ ID NO: 871452 - DNA, 645 bp, Homo sapiens
caatattgattcttcttatacatgagaatagaatgtttctccatttgtttgtgttctctcttatttccttgagcagtggtttgtagttctccttgaagagatcctttgcgtcccttgttagctgtattccaatgtatttcattatctttgtagcaaatgtgaatgggagttcattcatgattagcctctctgctagtctgttgttggtgtgtaggaatgcctgtaatttttgctcattgatttttgtatcctgagactttgctgaagttgcttattagcttagggaatttttgggctaagatgatgaggttttctaaagataggattatgttgcctgcaaacagagacaatttgacttcctctcttcctatttgaatacacttaatttctttctcttgcttgattaccctggccagatctcccaatactgtgttgagtaggactggtgagagagggcattcttttcctctgacagttttcaaagggaatgctttcagcttttgcccmttcagtatgatattggctatgggtttgttataaatagctcttattatttttagatatagtccatcagtgcctagtttactgagagttttaacatgaagaaatgttgaattttatctaaggccttttctgcatctattg

SEQ ID NO: 871453 - DNA, 547 bp, Homo sapiens
gtctgtatcttttaatcaggggcatttagcctatttacatttaaggttaatattgttatatgtgaaatagatcctgtcatcatgatgctagttggttattttgcatgctagttgatgccatttcttcatagtgtcattggtctttacatttttatgtgttctgcagtggccagtactggtttttcatttccatatttagtgcttccttcaggagctcttgcaaggcaggcctagtggtgatgaattccctaggcatttgcttgtctggaaagggttttatctctcctttgcttatgaagcttagtttggctggatatgcaattctgggtttaaaattcttttctttaagaatgttgcatattggccctcactctcttctggctagtgrggtttctgctgagagatctactattagtctgatgggcttcccttcataggtgacctggcctttctctctggctgcctgtaacattttttcttcatttcaaccttgaagaatctgatgattgtgtgtcttggggttgaccttctcatggagtatcttagt

SEQ ID NO: 871454 - DNA, 581 bp, Homo sapiens
accagcaacagaataaagctagacaggaaatgactttgaggagttaagagaagaaggcttcaaatgatcaaacttctccgagctaaaggaggaagtttgaatccatcacaaagaagctaaaaaccttgaaaaaagattagatgaatggctaactagaataaccagtgtagagaagtccttaaatgacctgatggagcagaaaactatggcttgagaactacatgaygaatgcacaagcttcagtagccaagtcaatcaactggaagaaagggtatcagtgattgaagatcaaatgaatgaaatgaagcaagaagagaagtttagagaaaaaagagtaaaaagaaatgaacaaagcctccaagaaatatgggactatgtgaaaagaccaaatctgtgtctgattggtgtacatgaaaatgatggggagaatggaaccaagttggaaaacactttgcaggatgttattcaggaagacgtcctgaacctagcaaggcaggccaacattcaaattcaggaaatacagagaacgccacaaagatactcggcgagaagagcaactctaagatacataattgtcagac

SEQ ID NO: 871455 - DNA, 581 bp, Homo sapiens
accagcaacagaataaagctagacaggaaatgactttgaggagttaagagaagaaggcttcaaatgatcaaacttctccgagctaaaggaggaagtttgaatccatcacaaagaagctaaaaaccttgaaaaaagattagatgaatggctaactagaataaccagtgtagagaagtccttaaatgacctgatggagcagaaaactatggcttgagaactacatgatgaatgcacaagcttcagtagccaagtcaatcaactggaagaaagggtatcagtgattgaagatcaaatgaatgaaatgaagcaagaagagaagtttagagaaaaaagagtaaaaagaaatgaacaaagcctccaagaaatatgggactatgtgaaaagaccaaatctrtgtctgattggtgtacatgaaaatgatggggagaatggaaccaagttggaaaacactttgcaggatgttattcaggaagacgtcctgaacctagcaaggcaggccaacattcaaattcaggaaatacagagaacgccacaaagatactcggcgagaagagcaactctaagatacataattgtcagac

SEQ ID NO: 871456 - DNA, 582 bp, Homo sapiens
atgttgttactatcagatgacaaattcactttcccctcagaacattactaattgcacacaatttaccttttgaacaacctgtagcaaaaataaaatatgtacctgtgtaagtttttaataagaaattattagtttttttaattgagggggctttcctttaatactgaaaaatacattatattttataaaatgcattaattttgaggggtcagttgtgtggaggaagaagattaatcctattatcggtaaaagaagttcacattttcagcatttcagtgaattataaaatttatttacatgtaccactggrtaaaaatttgtgtacatctaaatgtctggatgaattttgcccttttcttttgaaattcccttgggatgtgaagtgccaaattctgacataaagcttccatagatgggacagcaaaacaagtatttacattttttcttaaaagaatacattaaaatttgctgtattatgtatcaaaaatagagtaccatgttattgtttgtacaatgattttcaagacaacaaaatccaacaatatttttctgtggcacttaaaatattaatctataatgttt

SEQ ID NO: 871457 - DNA, 587 bp, Homo sapiens
acaacttttcttatcaccataatcaaaggttagcaaagttcctttggcttcatttctggactgttgcagagactccaaagtgggatgtctctatccggttgacccatttctctcttctcttcacattgaaaatatgtcttgctgaaaactcaaacatcaaaactcaaacttctttcctgattaaaatatttcaatggttcctcattacttttcagataaagtcgaatttcctacaagcctctagcctggcctgcttctccgccaagtgttgcactgaactgcrctggctctttgggctggtcttttctccttttttcctatttggcatgctctgcccgaccacaggccttggcacacacttcctcttctacctgaagcttgttgctgccccctttcccaacatataggtgcacatgtgtccacacacatactcctttagaacctcattcattcttcagatttgcagtacaaatcttactccctcaaatatctgtgatttctcatatcaggtaaaatactttctcctagtactctgtacttctcaggagtccttctttcacttcttttaacaaacatttaatgaataa

SEQ ID NO: 871458 - DNA, 689 bp, Homo sapiens
aatgtgccaagagactcacctgacagcctctactattctatttaatcaaacttgaacaaaggacgtggctatttactctcttggtgcacgtgaagttccaggctggaaggtttttgttgagagcctggctgcctgatgtgcagaactggtccttccaccaggtagggatttcctgccacttaataggttaacctagatgagtaaaggaaggcaatgtggcatgctttttttctgtttgttacaagttttctattgttctagccaggcgtatgtctctataatccatacacccttggttagaacacaagtctttgtatttttgatattgactcttaacattagacactgagtgtgctataggaacctgagtctctcatttccaaaataaagaaaggattcatgtcaacccagaggaacaacttcccaaggcttactacaaaagaatgaaactcgagcagacagacggcatctgtgactacctggcctgagcataggtcattcctccaacagcacaagaatgacctcaacacattattgcaacmctcttaggcaagagaatgtgtcaaaactggcagctccaccaactcggctagaaaggcaacacatcaaaaaataattggtgcagctaaagaggaagagggtgcttctctctaagcagaacccagagtgacatgcacaggaactcaaag

SEQ ID NO: 871459 - DNA, 565 bp, Homo sapiens
tcctttcagagaaacaaatgctgagggctatcatttccaccagtcctgccctgcaagagttcctgaaaaaagcactaaatatgacatggaaaaactggtattagctactgcaaagacacaccaaaagataaagaccaatgacactatgaggaaactgcaactagtgtcyaatataaccaaatagcatcatgataacaggatcaaattcacacataacaatactaaccttaaacgtaaatgggctaaatgccccaattaaaagacacagactggcaaattggataaggagttgagacccattggtgtgctgtattcaggagacctatcttctgtacaaagacacacacaggctcaaaataaagggatggaggaaaattcatcaagcaactggaaagaaaaaaaaaaaagcaggggttgaggggttgcaatccttgtctctgacaaaacagactttaaaccaacaaagatcaaaaaggacaaaggaggacattacataatggtaaagagatgaattcaacaaaaagcactaacaattctaaatatatatgcgcccaatacaggagaa

SEQ ID NO: 871460 - DNA, 522 bp, Homo sapiens
aaaccatcagagaatattataaacacctctatacaaataaactagaaaatatagaagaaatggataaattcctggacatatacaccatcccaagactaaaccaggaagaagttgaatccttgaatagaccaataacaatttctactataggggcagtaataaattgcctaccaaaaaaaaaacccaggacaagatagatttacagctgaattctaccagaaatacaaagagggactggtaccattcgttctgaaactattccaaacaactgaaaggaaggactcctccttaattcattttaggaggcagcgtaaccctgataccaaaacttggcagagatacaacaaaaaaaraaaacttcaggcaaatattcctgatgaacatcgaggctaaaatcctcaataaaatactggcaaactgaatccagcagcccatcaaaaagtttatccaccacgatcaagtcagcttcatacccgggatgcaagcctggttcaacatatgcaaatcaataaacataattca

SEQ ID NO: 871461 - DNA, 668 bp, Homo sapiens
tactgaaaagtcaagaaacaatggatgctggcgaggctgtggagaaataggaatgcttttacactgtcggtgggaatctaaactaaaccattgtggaagacagtgtggtgactcctcaaggatctggaaccagaaataccattcgacccacctatcccattactgggtatataacagaaggaatatgaatcattctattataaagataaacgcacatgtatgttaattgcagcactattcacaatagcaaagacatggaatcaacccaaatgctcatcaatgatagactggataaaaagaatatggtatatatacaccatggaatactacgcagcyataaaaaggaatgagatcatgtcctttgcaggacatggatggagctggaagccatcattctcagcaaacaaacacaggagcagaaaacctaacacagcttgttctcactcataagtgggagctcaacaatgagagcacatagacacagggaggggagcaacatacactggggcatgttggggcagtagtaggggagatagcatcaggataaatagctaatgcatgtggggcttaatacctaggtgatggcttgatggttgcagcaaaccaccatggcacacatttacctatgtaacaaacctgcatgtcctgcacatgtatcccagaactta

SEQ ID NO: 871462 - DNA, 680 bp, Homo sapiens
ccattatagagaaagatacaggaagaactaaagagatttttctgaacttcctaaaaagaaatttctaaaaaggcaatgtacatatctcagtagtatgaacctaacagataaatatttcataataaaacaaaaagaacctcaaattggctaagaaaggtcataaaaatgactcaattgttaagttaactgataaatattaattgcagcccattatgtgtcagattctaggagtcccaacctggtaaaacctcaagtattgctcaacagattttgggtgggaggagccatctctctaaagagacagcactttgctgaataaggagcgaagtggctagtcatatctttgaatgcatcctctatatctaattattctcattgtcttccttctccttgcccatgtttgtagctaagatcatamtgactgggatcaacaaagagttgcaatagattcccatgattgaaaaaatgagaaagaaaaaggtcaagtatatttctctctttttcttattcctttttattacatatttcccaaactgtttctgtctttttttattgtctccttttgtcttctctgcttcctccttcacctacgaccttctccttttctttatctttcttctgtcatcttcattatcacctctttttcctttttctcctcttttttcatctcttcctaactg

SEQ ID NO: 871463 - DNA, 661 bp, Homo sapiens
gccatgttctgggctagtagaaattctttctttgatcagggttgtatatgattagatttttttggctcacttattcctgatctacaggggctgatggtgtggagctagtctcttccacccgcctctcagtaactgctgtctgaaagttcctgcatatcttcttttacagccttgycctccctgcttcaccttcagccatacaacatccagggaagggagcttccacctccagcccatgcacccatcattctgtttctccaaacaagggaccatgggtcacacccttcaagtcacgctgtctactttggaaagctgctggcctcgcctacgatttgctgtcacaggggtcctttcctggaatcttctcggactcccttagacctcacacactaggcagcccttcctcttgtagattgtcttttcatgttatcacagtttcaaacacatttgcattatccctcattcttctaatagcttttgtgtgatttccaagaggtgcaagaaaagacacagttattttttactatttttaaaaaattattgttaaaaggaaaaaaatggcaagcacacagaagctagaagaagtagggaactaggccccttatttaaaattcagatgtttgcggtacttcattcattgagtcattctacagcatgtagt

SEQ ID NO: 871464 - DNA, 661 bp, Homo sapiens
gccatgttctgggctagtagaaattctttctttgatcagggttgtatatgattagatttttttggctcacttattcctgatctacaggggctgatggtgtggagctagtctcttccacccgcctctcagtaactgctgtctgaaagttcctgcatatcttcttttacagccttgccctccctgcttcaccttcagccatacaacatccagggaagggagcttccacctccagcccatgcacccatcattctgtttctccaaacaagggaccatggrtcacacccttcaagtcacgctgtctactttggaaagctgctggcctcgcctacgatttgctgtcacaggggtcctttcctggaatcttctcggactcccttagacctcacacactaggcagcccttcctcttgtagattgtcttttcatgttatcacagtttcaaacacatttgcattatccctcattcttctaatagcttttgtgtgatttccaagaggtgcaagaaaagacacagttattttttactatttttaaaaaattattgttaaaaggaaaaaaatggcaagcacacagaagctagaagaagtagggaactaggccccttatttaaaattcagatgtttgcggtacttcattcattgagtcattctacagcatgtagt

SEQ ID NO: 871465 - DNA, 656 bp, Homo sapiens
tataagatctagattagcaactgggtatccttatgaaagaccttccatgaaagagtttcataaccagaagctctcttagaccacagaaaaactcatgctcagtaaaatttttaatgtcttctgatatgtagaatttttttttccccagaacaatcatcagccttcatataccttaaagtgtatatttttttagtcagtgttgaaggacgtgaatagaagcagttcaatttcaatacacgatccctgattctcccaaacattccagggttataatttctaatggtaagaagaaataaagtcagatgagttaaagcatatctctactgaacaaaatagatggtcaaacattttatttacttttctctggaacttcagtgttttcacaggatcagactatttactgaagatgccatccctcattcacctttatttggcactggattttattaaaaagggagaacagatgacctactrggcttgaggtatggtcagagttttcttaaggagtcttcttcacacaatttaaaaatcagatccaatctgatcattcttatcactcagcaaagtaaagtgaaaacattttgtcaaaattcaacctcttagatgaaggagccagcaaacctggtttctgcctccatgcaattaggtggctcaat

SEQ ID NO: 871466 - DNA, 677 bp, Homo sapiens
gcaggagagagagaagaatgagagtgtgggcagggaaagcctcttctcaaaccatcagatctcgtgagaactcactatcaccatactagcatgagggtacccgcccccatgattaaattacctcccactaggtccctcctacgacatgtggagattatgggaactacaattcaagatgagacttgggtggggacacagccaaaccatatgaggggtcattaggatttttacggattcctcatccaaagcaaaaaattcttgaaatttccatactgggcaatacacagtgtggatgactttagcagccatacagaaaagactcctgggtcagacagagcagcttttgaaggccaactccttcactttctagttaagatcctacgtatttctacttataacctatccragctccagctttcttctttggaaaaggtaagtaattccacatatgtttttgtaattattcaatggacagatgcacaaatgtacacctggcattaagccttgcaattggtaactcttggcttctctttcattcttactggacaggaccacaggaccaggcatttggacatctcctgcagtaagatgaatgtgtattttgagactctaattaggttgtctagttagcatcccaaagcttcatattctttctaacagcacgttttttaggtcct

SEQ ID NO: 871467 - DNA, 648 bp, Homo sapiens
agtaggtgtatggaaatgcgtgaatgcccaagcagaagtttgctgcaggggtgggcctccagatttcagaatggtagatccaccaacagcttgcactgtgtgtggcaaagccacagacactcaatgccagcctatgaaatcaggcaggtgggaggctataacctgcaaagccacaggtgtggaggtgcccaagaccatgggaacccacctcttgcatcagtgtgacctgaatgtgagacatggagtcaaaggagatcattttggagctttaagatttgattgccttgctggattttagacttgtatagggcctgtagctgcttcgttttggccaatttctcccatttggaatggctctattactcaatgcctgaaccccagttgtatctaggaagtaactaaattgcttttgattttccaggctcataggtggaagagacttgtgtagtctcagctgagactttggactgtggacttatcagttaatgctaaaatgarttaagactttgcaagattgttgagaaggcatgatagattttgaaatttgaggacatgagattttggaggggccagaggcagaataatatggtttggctctgtccccgcccaaatctcatcttgaattcctacatgttgtgagagggaccc

SEQ ID NO: 871468 - DNA, 624 bp, Homo sapiens
tgacgcacttgctttctgacatataaaggtgacttctaagtagtactggcttcactcaaagagggagaggcagtgccacatgaagagtgaaatgagagataccaggaaggtccttccagcaatattgagtcatcagaaccaggaatttcttgggaaggggtagagattagtgaaaagatctttacagacagacctggacttgaatttctgctccacttaatagctgataggaaagtgggaagaaaaagattggtggtaacaaatctgaggggctcacgattgtgtggggaataccctatgccaacaagaaaggccttgggcataatatatgtttgtatattggggaaagctggggtaacatgagaggatcatggaacasgtgaggtgtgataacaccaaagacacatgctaaatacttttgttatgataacactaaaataggaagaaaaaggataactaaatctgtcaatactcaaatgtacttattagatatagaaccctctttgtctctctctttatgtgtgtgtgtatatgtgcgtatatagtgaaatatataactcttatatatattatacatatatatacatataatcttctgtgaacctactgtgtactcaccgtaat

SEQ ID NO: 871469 - DNA, 619 bp, Homo sapiens
ttggtgtcttcataggtggtggaggctgcacggacactccaagggccgaggccaagaatgttaaaccttctgcaagggaaagagctgtcctgccccaaatgccagtagcccctcggtgagaaacacacacttccagaaacatgtaggaaggacaactcaggctgctcaacgatctcttgtacttgaagagacgcctgcagctcgggctggatttgactggtgtcacccctggtcacacccagcctgtccccactttctgctgaatagcacccgcccatcctctgctcttccctctccaccrtcatcctcccataaaccccctggttttgacagcctccttctctgatagcttggtaggcttgtggaatatcttctgattcctcccctttcacactcaatcggtaaccacctcattctcaacacattttaaaactctcagtgccaaaaacgttcctttggctttggcctttttatccgactcttatcaataaaaacctgcctgtgtctgtcctgcctgccctcacgtttccctctgagctgccctgaagggggggtgtgcgtctgatccatgcaagggcgggctgtctggcaaggcatgcaggtacccccacccgcctct

SEQ ID NO: 871470 - DNA, 602 bp, Homo sapiens
ctgcacgactccatgtacacaaagacaagaacaaagtttatgtctatggtgcagaagtcggctcagacagtggctacctgggcagggctgggacttgggaccctgatctggacagtggtgctgtgtcaacttggttaagctgggaactgtctcccagggcccccagttagagtctgagttagaattggccacgccaggaagttccgtaaagcttggaaggtgaactgaagcagtggccatgaggtgaagggcagagacacgggcacctggaggttccagcctgccccactctccacactgcggccagctcctcttcctcacgctggccctgctggccaatcacaggccccaggcctgccaccggtcactgggccggggacccaactggacagcagcttcccagaggcagcgcctcccaacrccccctcctccggtggctccacctccgcaacagaccgggttccgggcatccctgtgagctcgggcctgtccaaccacaccagtgcttcaggcgaccagtgagtgacccctctctgacatccccaccatctggacccccacaccccctggtcccccaacttgtggagagtctaattcttgca

SEQ ID NO: 871471 - DNA, 620 bp, Homo sapiens
tttggtgtcttcataggtggtggaggctgcacggacactccaagggccgaggccaagaatgttaaaccttctgcaagggaaagagctgtcctgccccaaatgccagtagcccctcggtgagaaacacacacttccagaaacatgtaggaaggacaactcaggctgctcaacgatctcttgtacttgaagagacgcctgcagctcgggctggatttgactggtgtcacccctggtcacacccagcctgtccccactttctgctgaatagcacccgcccatcctctgctcttccctctccaccrtcatcctcccataaaccccctggttttgacagcctccttctctgatagcttggtaggcttgtggaatatcttctgattcctcccctttcacactcaatcggtaaccacctcattctcaacacattttaaaactctcagtgccaaaaacgttcctttggctttggcctttttatccgactcttatcaataaaaacctgcctgtgtctgtcctgcctgccctcacgtttccctctgagctgccctgaagggggggtgtgcgtctgatccatgcaagggcgggctgtctggcaaggcatgcaggtacccccacccgcctct

SEQ ID NO: 871472 - DNA, 645 bp, Homo sapiens
catacatctgttatatcataaaaatgtaaacagttgatataaaatgcagagtaattaaacataaagttgcatagagaaacctctcttgatgtgtttatgttaaatggagagaaaataaagggacttaacaaaaagagtgctaattaagaagcaagagggctagaaatatgaatcaataatggacacaaaattgaggttttgttatatatttaatttttcttattagatatagatttttgtttttgttaatcaaaccctttctaaaggcaggtactgaggaaatagaatgggcaaaggtaaagaactatgtacatcaactctgcagtgttacaggtattacagagaagataggtgartgggtcgattggtgagtagtctggacacagactggtattctagatcttaaattaggtagtatatatttaaaacaaaagcgatagaaattagaaactttgatcctcacctagataattcatagggattcaaagaggttgaatcaaatgtgaaaatatataaaagaaattattttaaaatcattaaatgctataggaacattgtgtattaagataataatagataacagtgcttcaaacccaatagtttctcaataatttggttgaattatagatattgctaagtcccctc

SEQ ID NO: 871473 - DNA, 631 bp, Homo sapiens
aaagtcaatggtagcttgatggggatagcactgaatctataaattactttgtgcagtatggccattttcacgatattgattttccccatctataagcatggaatatttttccatttgtttgtgtcctctcttatgtccttgagcagtgatttgtagttttccttgaagaagtccttcacatcccttgcaagttgtattcctaggaattttattctctttgtaggaattgtgaatgggagttcgctcatcatttggctctctgtttgcctattgttkgtgtataggaatgcttgtgatttttgcacattgattttgtatcctgagactttgctgaagttggttatcagcttaaggagattttgggctgagatgatggggttttctaaacacacaatcatgtcatctgcaaacagagacaatttgacttcctctcttcctatttgaataccctttatttatttatcttgcctgattgccctggccagaacttaggcaatatcattcaggacataggcatgggcaaagacttcacgactaaaacaccaaaagcgatggcaataaaagccaaaattgacaaatgggatctaattaaactaaagggattctgcacagcaaaagaaactatcatcag

SEQ ID NO: 871474 - DNA, 621 bp, Homo sapiens
gttgaataggagtggtgagagagggcatccttgtcttgtaccagttttcaaatggaatgcttccagcttttgcctattcaatatgatattggctatgggtttgtcataaatagaacttattatttcaagatatgtcccatcaatacctagtttcttgagagtttttaacatgaagggatgttgaattttatcaaaggccttttctgcatctattcagataatcatgtggtttttgtctttggttctgtttatgtgatgaattgyatgattgatttgcatatggtaaaccaaacttgcatcccaaggatgaagccaacttgatcacgatggatgagttttttgatgtgctgctggattcagtttgccagtattttattgtggatttttgcacaggtgttcaacagggatattggcctgaagtttttgttgttgttgttgttgttgttgttgttgttgtgtctctgacaggtttcgataccaggataatgctggctttataaaatgagttagggaggagtccctctttttgaattgtttggaatagttttagaaaaaaatgctaccagctcctctttgtatctctggtagaatttggctgtgaatctctctggtccttggctt

SEQ ID NO: 871475 - DNA, 621 bp, Homo sapiens
gttgaataggagtggtgagagagggcatccttgtcttgtaccagttttcaaatggaatgcttccagcttttgcctattcaatatgatattggctatgggtttgtcataaatagaacttattatttcaagatatgtcccatcaatacctagtttcttgagagtttttaacatgaagggatgttgaattttatcaaaggccttttctgcatctattcagataatcatgtggtttttgtctttggttctgtttatgtgatgaattgtatgattgatttgcwtatggtaaaccaaacttgcatcccaaggatgaagccaacttgatcacgatggatgagttttttgatgtgctgctggattcagtttgccagtattttattgtggatttttgcacaggtgttcaacagggatattggcctgaagtttttgttgttgttgttgttgttgttgttgttgttgtgtctctgacaggtttcgataccaggataatgctggctttataaaatgagttagggaggagtccctctttttgaattgtttggaatagttttagaaaaaaatgctaccagctcctctttgtatctctggtagaatttggctgtgaatctctctggtccttggctt

SEQ ID NO: 871476 - DNA, 621 bp, Homo sapiens
gttgaataggagtggtgagagagggcatccttgtcttgtaccagttttcaaatggaatgcttccagcttttgcctattcaatatgatattggctatgggtttgtcataaatagaacttattatttcaagatatgtcccatcaatacctagtttcttgagagtttttaacatgaagggatgttgaattttatcaaaggccttttctgcatctattcagataatcatgtggtttttgtctttggttctgtttatgtgatgaattgtatgattgatttgcatatgktaaaccaaacttgcatcccaaggatgaagccaacttgatcacgatggatgagttttttgatgtgctgctggattcagtttgccagtattttattgtggatttttgcacaggtgttcaacagggatattggcctgaagtttttgttgttgttgttgttgttgttgttgttgttgtgtctctgacaggtttcgataccaggataatgctggctttataaaatgagttagggaggagtccctctttttgaattgtttggaatagttttagaaaaaaatgctaccagctcctctttgtatctctggtagaatttggctgtgaatctctctggtccttggctt

SEQ ID NO: 871477 - DNA, 629 bp, Homo sapiens
tttctaaggacaagttgttttttgaaaccttggagaaaggctatacaaaatacatgaatatgatgtttatgaaaaggcatttggtagcccatccattatttttcatctcctatgaataaaatgtcagtgactttggtaatattgtatttccaaagccccaaagactgacagacagcctcatgcacatattgtgctatattaaaggaatattggtccttggctagaaargattttctaacccagtctgagcaataaccacttgatcacacatctcgctggagtctaagctcctgatagcagaatatgtgcctctcatttgctggttccaagccctcactcagcattctgcacagtcactggggctgtgtgccttcagctacatgacctctggggcatgctggagaaatgttgccttctgtccatgacccttttaagaccctttaatgtcttccaaagttgtcaccatggcgctctcttgctttcataattctccctgacaaccactcctcctcaatgcctgctttcactgtagtgcaataatttaagtgcatgccacagacttccactgtcagtgtatttttttctaatagaacaacactggaatttttcttacaaatacaccaaaacta

SEQ ID NO: 871478 - DNA, 636 bp, Homo sapiens
tttagaagatgtgtgttcataaatacagctattttcattataactaaaaatcaataatatttaggaaagcaaattcagtggagaatgtaaatcacaaggtaccttttaaaaccaaatagaattagaatttgagaattaccagtctgcttaccaggaattgttttgcttctcttgaaaaatgacatcttgaattttgttatgtttctctccttgtgttactacaaagctcagtgtcaaatttggacatcatagcatgcattttttatattaatttcacctctgactttattctcttttttttctttttttcctggagttctgaagttgctaaaaaaggaaccctatggtgttgtttgtattttataaggtacatttacagcttttggatcaagatgcaagtaaataaataaaatcgatattgctattrctgctatcagtgcagacaagtgagcaccgaaaatctctgaattctgtaatgtgctttgaattactttgtctgcattacacagaacactccttgcttttaatgtgtttgtgccatcattccattgtcactagttcaggctcatgcacttgaaattctttagttacagtgtgaacagaaactcatgaaaatggcatcgagagcttggaaat

SEQ ID NO: 871479 - DNA, 650 bp, Homo sapiens
ccaatgcatacacagcttctctcattatcagtatctcccaccagagtgtatattcattacagttcatgagctcacactgacaaatcattatcaaccaaagtcatagtttacattagcattcactgtcagtgttggacattctgtgggtttggacaaatgtatcattacaygtatccaccattatagtatcaacagaatagtttttttaacctaaaaatcccctatgctctgcctattcattctttcctctccctacccctgccaaccactgatctttttactgtctccacaattttgccttttcccaaatatcatatggttgtaatcatacagtatgtagctttttatgattggcctttttgacttgacaagatatgtttaagtttcctccatgtctttttatggcttgatagctaattccttttcagcactgaataatattccattatatggatgtaccacagtttgtttatccattcacctactgaaggacatcttggttgcttctgtaaaatttgtttaaattttagtaagtcacctgagggaaaaaggcaactttgaaaagaactgatctcttaaaatggcttccaaacattgggatagaagagcaatttttataacacatgaaaagcaagatataagaaattgaa

SEQ ID NO: 871480 - DNA, 635 bp, Homo sapiens
gaatgccacatgtctccacaaagggcctccctcatcctgacaatgtaaattaacagcttatcttcatggacacaaaacaagaggagactggaaaccgtcccaccacccaccccaagacaaatgcatacttgactgcttcctctactcaatgtttactttatcttatgtaaagtgcacatttaccgaacacgagatgaatgcataattgacttttccctctacgtccgccttttcacgtgcaacaggtggattcagttaacctaacagaagcctcacaagaatgtgaccatatccttctcttttctttctttccctttttcccttctgccacatttaccctttaaatattgaagccatcaaaaccttcctcagaaaaagcacaggccccagatcctgttgtagcttatgtctgtttttcccaggtacatcgtcarccttgacaaaatacatctctaaaatgataaagactcgcctcattttttctgatacatatgaaaagagggtctatatttacattaatctctgagtgttcttggcctcattgaagacccacttccaaaaattagacaccttctcagaaattgggaggaatataattttttgcttcaattctcaccaaactgcccagaaacctc

SEQ ID NO: 871481 - DNA, 602 bp, Homo sapiens
aaggtgggtttacatgggcttgcgcagctccgcccctgtggtctggcagggaactgcctccctcccagctgcttttatgggctggtgttgagtgtctgtggcttttccaggtgcacggtgcaagctgtcggtggatctaccattctggggtcttaggatggtggctctcttctcatagctccactaggcagcaccccagtggggactctgtgtggagtctcccaccccacatttcccttccatactgccctagcagaggttctccatgagggccccagccctgtagcaaacttctgactggacatctaggtatttccatacatcctctgaaacctaggtggaggttcccaaacctgaattcctgacttctgtgcacccacaggctcaacaccacatggaagctgcaaggcttgaggcttgcacccactgaagccayggcctgagctctatgttggcctctttcagtcatagctggagtggctgggacacagggcaccaagtacctagaatgcacacagcatagggaccctgggcctggtccaggaaaccatcttttcctcctaggcctctgagcctgttatgggagagactgctgtgaagac

SEQ ID NO: 871482 - DNA, 649 bp, Homo sapiens
gatgaatgcacacatcagaaagcagtttctcataatgtttaattccagtttttatctgaagatattttcttgttcaccataattctttttacgctacctaacattgcttcacagattatataaaaacagtgtttccaaactgctcagtcaaaagaaaagtttaactctgtgacataaatgcatacatcacaaagcagtttctcaaaaagcttcttactcgtttttatctgragacatttcctttttcacaatatgcatcagtgcactaccaaatatcactcggcagattctacaaaaacggtgtttccaaactgctaaaacaaaagaaaagtttaactctgtgagaggaatgcacatatcacaaaatggtttctcagaaagattatttctagtttttatctgaagttatttcctttttcaccataggtctcatgcactcccaaatatccctttgcagattctacaaaaacagtgtttgcaaactgatctatcaaaagaaagttttaactctgtgaagtgaatgcacacatcacaaagcactttctcaaaaagcttctttctaccttttatcagaagatatttccattttcaccataggcttcattgtgttctcaaatatgcctacgtagattctacaaaaaagtgctaa

SEQ ID NO: 871483 - DNA, 601 bp, Homo sapiens
gtccattcatctcacagagttaaaactttcttttgacagagcagtttggaaacactgtttttgtaaaatctgcaagagatattaggtagctcaaaaaagcctatggtgaaagaggaagtatcttgatataaaagctagaaagaagcattatgagaaactgctttctgatgtgtgtgtttgtcgaacagatttaagtccttattctgaaggaacagtttggaaacactgtttttgttaagtctgcgaaggtatatttgggagtgcattgatgcctaagctggaaaagtaaatagcttcattgaagaactagaaagaagctttctgagaaactgcattgtgatgtatgcawttatctgacagaattaaacctttcttttgattgagcagtttagaaacaccagttttgtagggtctgcaatgggatacttgggagcgctttgaagcctaaggtaaaaaaggaattatcttcaaataaaaactagaaagaactttttgagaaacttctttgacacgtgtgcgttcaactcacagagttaaacctgttttttgattgagcagtttggaaacagtttttttgtaggatatggaagggatatttggg

SEQ ID NO: 871484 - DNA, 624 bp, Homo sapiens
tatgggggccctggagttgggatggccctttagagttgttccaaatgaggctaaggagtcagacctttgtatctcggcattagccagtcattaactgtgggctgctccctgggagtgggtgcaaacttgggcaaggaatatccaggggtggaggctgtggggagccttcactagctgacattcccaacagatgaggatgagtgtgttggtcctggagagcagcccatgacagagcaccacagtgtctactcccctcccctcaaggggcttaccttagcactctccagcttgcctctggttccttttgagggcagtagtgttgggatgagatgagagatgaatagagagaggctacagagaatgcaggagaaggccgaagtcttgttttacatcctgcacmattttgctcacagagaactgaggctggtgtaacaatatggacatcaccttgagggttcaggaaagaaagggaaggcagttgtgcagtctataccactcactctacccttaactgcacacccacaggtcgtctttaatatttacggggttgttgtcttatttggcaacactgctgtgcaattacaaagaaattgatctacatagcacatggaggctaacagccag

SEQ ID NO: 871485 - DNA, 643 bp, Homo sapiens
ctcagactagagtctctcagacccctttagagcccccaggagtgggatctggaaagccctgtgactggaaactgaataaggcagcagaaatctaccaggctaggatgtggccatagtcaaaaccagaatagtcagagttcacagaatcaagaatatatgccaggattcaatggctgaaaatatatttttcattcttataaacaactgtacagtgcagggagaacttccacatttatcactgtgaatttcacaactcctatgcagtgaggatgatttgcctaattttatcagtatggaaagataagctcattgagatgaaacctctgtataactccacctctttctgtagtgggaggtagtatgtagaaattacacatgtcaactctagagtcagacacyttggctcaaatccaagccctggcacttccttgctgagtgtccttggacacattagttatgtaacttgcttgaaattcaatctcctcaggtgaaaaatgggaatcactttttagggttgctctaaagagtcaatgaggtaatgggctatttgttcaagccaaacctaggaacctttcttttctctcaaactcttcattctttctccttcccatgccccaaccctgctcctcttctagcctttctc

SEQ ID NO: 871486 - DNA, 630 bp, Homo sapiens
ttgttatcacatattttgtcctacccaattatccaaatccttagtgactattaattactgaagaaaagcaagcatggccaagtcaatgatatatgcaggcactccttgctctagacaggatcataaaaatgactgtatgagctgaaaccatacatagtagtagtcttaataatcaatggggaaaaattatgattgttctgtgacctttaaaatttcctgtcaaaacactgaaatctcttttactgttgtttataaatgtataaggaaattaaaaaacatggtaaaagttttttttagtatgctgtaatttaaarcattagaaatgggacttaaagtgtttaatacttttgtaaaagaacttatgaagaatagtttgagcaatgtttgtcttctcatgtataacttatagtactaagtgagcatttttttctaggctttggtgaatcttgacagcccattctaagtttggatcagcttccaacattttatcctttgcactttcaaccttgtgaagtatctctgagtatccatttagggtaaagatttttaatggcatcagtttctctgggagatcttcatccttttcatcactacaagtttttgcatttctgttggtaacttcaccttcac

SEQ ID NO: 871487 - DNA, 613 bp, Homo sapiens
tttgtaagcttctgatttaatcagatctgctagcttttcattctccaagtgaagtcacctaatcaaactcagaaacaaaaagaaaagaattcagctccactcaatgaagagaacactgtaaaggcaaatgaaaaatggcaagctaaaggaggagtaaaaaattggaaacatcagcacaattttccacagttgttgtttattatgtttctttaatctatagctgttgtgaaacattttggtctcaggactacctaacagttgtaaatgtattgaaaaccatataaatcttttgtttacttggcttatatctatcagtagttaccatattagaaattaaaatggaaaatacttaaatgcttatatatttctataaatttgataaattttatatttagatataaataacgataccaaaattaaaagtagtgaaaacgagtttcacgattttgcacatgcattagtatcygaattagtagaaggcagttggtttcaaacatctatttctgcatcatatttgctgatatatactttgggctaaaatatacttaaaaatcagatttaataccaaaaaatcagatttaatgaccaaatatatatttgagagaggcctatt

SEQ ID NO: 871488 - DNA, 633 bp, Homo sapiens
gtgcagcaaaccactacggcacatgtgtacgtacataacaagcctgcgcattttacacatgtatcccataacttaaagtaaaaaataaataaataagtgaataaacaaataaaaaagaaaatgaggtcagaagggtaactttaaaacactaaacagtatttactgttccaaagaatgttatattttataataataaatatcttttctaagttgtgttgtggtatcttttatatattaaacatgatgctaagtgttttatgaaaatactatcatttaatacttctaaccatcctgtaaatgaaccttagagaagttatttaatttgacaaggttatggaacaggaaagttcctgaattgaaaccattttatagctaatattgttttttcttttttttwaaaaagtttttaaaacatttttgaaacatttaaagcaatttaaaaatagttttaaaatgtattacttttcatttattttattttctttatatgtttatatttcaatagaatgatctaattcagaacaatatttagtatgctactaatagttaccttgtgtttactagagtggttcaattatactgcaatataacactctaatatccatttcattgaactgcacctatttgtcagcc

SEQ ID NO: 871489 - DNA, 595 bp, Homo sapiens
tatggtttagaattggaaacgttcagtttattcagcaccttattttctaggtgtgaatatagagatatcagaggtaaaattatgaccctgaagccacagttcattgcagaggggaaattagaagcaagtcatattatacataattctgtattcagtaaccattacccttaaatgtctactaatttttctcattttcccaagtgaatgatttgtacaaaggtcaccactggaatttacatacttttcagcctaatagtagactggtagtttggcaataaagtaatagctttacaaagaagtcttytgaaaaaaaaaaaaaaatcctaaagaaagagtattggctcagtaataaaattgaattactgggctgtcaatcagttagattttttaatgtcctggcccttcatgtaattatgcgttaattgaaatcagacattgcgaatagattgaataacttattacataaagtttttaacattttagagaataactagaatgtaataaattgcacatatttacttacagggtacagtcacataagttctaaaataaaaacaaccataaaaccatcactacaatcaagaaaatgaacata

SEQ ID NO: 871490 - DNA, 592 bp, Homo sapiens
caggggcaaaatgccaccagtctttttgcatagcaagagtgacctttactccagttcccaacaagttcctcatctccatctgagaccacatcagcctggactttattgttatatccctatcagcattttggtcaaagctattcaacaagtctctgagtctccaagttcattcaagccattcaacaagtctctaagtctctaagttccaaactttcccacacctttctgtcttctgagctctccaagtctctaggaagttccaaacttccccacattttcctatcttcttctgagccctccaaactgttccaacctctccctgttacccagttccaaagtcatytccacatattcagatatctttacagcagcaccctactctactgaaaccaatttactatattaatccattctcatgttgctataaggacatacacaaaactgagtaatttataaaggaaagaggtttaatggactcgcagttccacatggctggggaggcctcacaatcatggtggaaggtgaaggaggagtaaaggcatatcttacatggcggcaatcaagagagcatgtgcaggggaactgcccttta

SEQ ID NO: 871491 - DNA, 675 bp, Homo sapiens
tctcatcctatttgttcagcaaattctaatggcagccattagctaccaagagatgtatttgattttggaggtgatgcaggtggaaaggccctttcttcttactttgggaatatgataacattgtcctgcatctcatcaaatttagctgagtttatttgttactttctttttgtgaccatggatgccataagaaatgatcctctatagactgtgcttaacctataggttgccttatggggtcctggggagatgtttgtgtaaatccaaccgattttccaatgaactcccaaggttatttcaggacagctgctcctcattagggattgacccaccatgagcagtcaccccgagtatccctgtctcaatctcgaaagctgtctccaggtctgaaagaaaaaaattgcaatgtgtttaagaactgcatatttaagtgtctccatcccgtttaataaagtcagcacagtaaataagttggcctgagggcttrataacaatgtaaaaattgttacaaagcctaattcaaaaatgaatatcctataatgaaaacagcatggcttctagacatcaacacaccagctctgctagttaccacctgtgtggccctggatgcatggcttaacaaatacttgcctcaaagggctaaaatgaaaactcagttaggcaatgtttgtaatg

SEQ ID NO: 871492 - DNA, 552 bp, Homo sapiens
gcagaaggaaaatgtggggttgaagcccccacacagagtccccactggagtgctgcctagtggagctatgagaagaggccactgttctccagaattgtagattccactgacagcttgcaccatgtgtctggaaaagctgcagtcacacaatgccagcctgtgaaagcagtctggagtggggctgtaccctgcaaagtcacagttgtgtgtgggagcccaagaccatgggagcccaccaccgagggagcccacctgttgcatcagcgttccctggatgtgaaacatagaaacatagagtygaaggagatcatttaaaaactttaaagttcaattacttccctataggattttggacttgcatgggccctgtggctcctttgttttggtaaatttctccaattaataatgggtgtatttacccaatgcctatgcacccactgtatctaggaaataactaactaacttactttttgattttataggataataggtggaaggaactgtcttgtctcagatgagaatttggacttggacttttgggttaatgctgga

SEQ ID NO: 871493 - DNA, 552 bp, Homo sapiens
gcagaaggaaaatgtggggttgaagcccccacacagagtccccactggagtgctgcctagtggagctatgagaagaggccactgttctccagaattgtagattccactgacagcttgcaccatgtgtctggaaaagctgcagtcacacaatgccagcctgtgaaagcagtctggagtggggctgtaccctgcaaagtcacagttgtgtgtgggagcccaagaccatgggagcccaccaccgagggagcccacctgttgcatcagcgttccctggatgtgaaacatagaaacatagagttgaaggagatcatttaaaaactttaaagttcaattacttccctataggattttggacttgcatgggccctgtggctccttygttttggtaaatttctccaattaataatgggtgtatttacccaatgcctatgcacccactgtatctaggaaataactaactaacttactttttgattttataggataataggtggaaggaactgtcttgtctcagatgagaatttggacttggacttttgggttaatgctgga

SEQ ID NO: 871494 - DNA, 670 bp, Homo sapiens
ttaggacttgaactcacctctggaccatgtggacctaataaacatgtacagaactttccattccaaatcaacagaatatacattcttctcagcaccacatagcacttattctagaattaaccacataattggaagtaaaacactcctcagcaaatgcaaaagaatggaaatcataacaaacagtctctcagaccacagtgcaatcaagttagaactcaggattaagaaactcactaaaactcacacaacaacatggcaactgaacaacctgctcttgaatgactacagggtaaataacgaaattaaggcagaaataaataagttatttgaaaccaatgagaacaaagacacaacataccagaatctctgggacacagctaaagcagtatttagagggaaatttatagcactaaatgcccactggagaaagcaggaaagatctaaaatcggcaccctaacatcacaattaaaagaactagagaagcaagagcaaaaaaattcaaaagctagcagaaaacaagacataactaaattyagagaagagctgaaggagatagagaaatgtaaacccctttaaaaaaatcaatgaatccaggagctgcttttctgaaaagattaacaaaatagatagaccactaaccagactaataaagaagaaaagagagaagaa

SEQ ID NO: 871495 - DNA, 514 bp, Homo sapiens
cagtctaccacggttgggcatttaatttgaatccatgtctttgctattttgaatagtgctgcaatgaacatatgagtgcctgtgtctttataattgaacaattttcatccctttgggtatatacccagtaatgggattactgagtcaaatggtagttctgtttttgcctgtacwggtggtcacttagcacaggggagggtccagcattttctgccctagttttactcccatggcagttttggtgcagaggccagcactggtgggggtggggctggctggctctgtgtttgccaaggttctgactgcaatggcagtatggcaggccaagagagggcagagtggctcccccttcagcagtgactgggcatggtgaacatatacacatgcattggctgtgcaaggaaggcaaaacctgcctggcccacaaaccagcaaagtgatatctggagtggccattgtccctggggaagttgcagtaacaggagggagctagtgggctggtgcatggccaggg

SEQ ID NO: 871496 - DNA, 577 bp, Homo sapiens
tttgctccttagaaatttcttccatcagataccctaaatcatctctctcaagttcaaagtttcacaaatctctagggcaggggcaaaatgcctccagtctctttgctaaaccaacacaagagtcacctttgctccagttcccgacatgtttctcatctctatcggagaccaccttagcctggactttattgttaatatcattatcagcatttttgtcaaaaccattcaacaagtctctaagaggttccaaactttcccacatttttctgtcttcttctgagccctccacactgttcygacctttgcctgttacccagttccaaagtcgcttccacatttttgggtatctttttagcagcaccttacttctggtaccaatttactctattagtccattttcatgctgctgatcaagacatacttgatactaggaaatttacaaaagaaagagatttattggacttatacttccacacagctggggaggcctcacaatcatggcggaaggtgaaagacctgtctcatatggcagcaaagaagagaacagagatagtgcagggaaactcccctttttaaa

SEQ ID NO: 871497 - DNA, 654 bp, Homo sapiens
tggtgacaaaatctgtcagcatttgcttgtctgtaaaggattgtatttctccttgacttatgaagcttagtttggctggatatgaaattctgggttgaaaattctcttctttaagaatgttgaatattggtccccactctcttctggcttgtagagtttctgctgaaagatctgctgttagtctgatgggcttccctttgtgggtaacccaacctttctctctggctgcccttaacattttttccttcatttcaactttggtgaatctgacaattatgtgtcttgtagttgctcttctcgaggagtatctttgtggcgttctctgtatttcgtgaatctgaatgttggcctgcctttctagattggggaagttctcctggataatatcctgcagagtgttttccaacttggttccattctccccgtcactttcaggtacaccaatcagacrtacatttggtcttttcacatagtcccatatttcttggagacttcgttcatttctttttattcttttttctctaaacttcccttctcacttcatttcattcatttcatcttccatcacttataccctttctttcagttgatcacattggctcctgaggcttctgcattcttcatgtagttctcgagccttggctttcagctcca

SEQ ID NO: 871498 - DNA, 682 bp, Homo sapiens
gatgttctaaaaggagaagagattaaaatgagatttggggaaaacatctggattttatttgtttgtgatattctagttatccatagaaaaataatgccattgtttttaataaagcaacataattgtcagtttttttatagtttcattttcttaataaaaacccccactgaaataaagggagtaaagttggtctcatattttgaatatagtcatccaattatcacatatattttacttaaaattttagaatcatagcaatcactcaagtttcttgccatctaatgattagacacattcaactgagtaaataaggattagcagcactacatataaaatgttgaagttgatgctgtgaggtgctgatatatgacacccaaatactgccaatcaagtaaagggaatgaaatataagccttaacatctatcatagaaggtggaatatgggaaactctgtatcagcatatgaagtgcagtgatgagtcagaagagctccgtggaagcttcagagaaaagacagcttttgccctcrgtcttggatgctgggtagatcattgctggccagagaaagttataggaaaaaaaaaaaaaagaaggcattcctgaaagaaggaaaatctgagcaaatgcatagcagtattgaaataattgaacacatttcatatgtaattgtcgtgaagaacat

SEQ ID NO: 871499 - DNA, 661 bp, Homo sapiens
gctatcataaaataattattatatgttattacagaaactttctaattacaaatacaaaaattagctgggtgtggtggtgcatgcctgtaatcccagctacttgggaggctgaggcaggagaatgacttgaacctgggaggtggaggttgcagtgagccgagattgtgcctctgcactccagcctgggtgacagagtgagactccatctccaaaaacaacaacaacaacaacaaaacacttcccttgaaacaaccttgctgaaagtacttacatattcaacatgaaatagtgttctcaggttagggattaacagatctytatcatgctataaatgtttttgagaaatgttaccatgtagctgttcaaatgtgtttgaatgagctgtttcatagagattatgtatcatgtggtactaaatatcctcataaagaattcacacgtaaaaagcacaattaaaaaacaaattaagaacacatattagatatgtaaataaagttgattaggggaatagagaataaagaagaatataatgtttatatgaaaataactgaactactgtgattgataagactattatctgatgtatagaaaactagtatgatattaaagttagcagagagtgagaaagtagtctatgaagtggtggatgagacagactttg

SEQ ID NO: 871500 - DNA, 650 bp, Homo sapiens; identical to SEQ ID NO: 871102

SEQ ID NO: 871501 - DNA, 595 bp, Homo sapiens
acaaaggaaaatttcacctatatcacgttaaaatgtcccagtgtttcctcctccatgctttaaacatgaaagatccccctcctttctttcatgtccctcatgcatacactcaaatatgcttacattctttggttcccaaacttaccacctgtatttattattctatatctgcaccttttatttattttgctagcaagagtctttctctcttctcctcccctctyctttctctcctttcctttcctctcctctccttacttatttcttttctctctccacactgacagtttccacaattaacttaaatcagcttccagactaaaatggttgaattctctggaatcctgatgcaatattttatcaatctctattagtactcttctcacataagtacaactgtgagtaagcatttgtcagactcatttcaatgtgtgttctttgaaggcaggagctgaaccttgcttatacctaatagaagttctagtgcaagttgatagatggtaggttcccaggtcatgattatctaacatgaactgaatactgatactgtatttctttctctgtgtctttaataaaaccatttgagctgtcgtaa

SEQ ID NO: 871502 - DNA, 613 bp, Homo sapiens
taaagcttttaatcacctgggtgcaggcgggctgagtctgaaaagagagtcagcgaagggagatggggtggggccgttttataggatctgggtaggtaaaggaaaaaggggggttgttctctggcgggcaggagtgggggtcacaaggtgctcagtaggggaggttttgagccaggatgaaccaggagaaggaatttcacaagacaatgtcatcagttaaggcaggaaccggccatctggatgtggacgtgcaggtcacaggggatatgatggcttagcttggactcagaggcctgacactrtctatctatctatctatctatcatctatttatgggaatgtactgtgaacatactttaaggaacgtttatagtctcagttgtagggttctcttgcaatcttccacagaaaagaaagcaaaaatgactgacattaatagaaacatattttaatagaaacagagctgaattaaatgtagcaataagaaagcagtattaaattttgcactgcctaaaaaaaccatttactcagcttgaaattcaattcttcttacaacaaatgtttgataaaaaaggagcagtaggtgaaaaatgtcaaattagtgatgctacac

SEQ ID NO: 871503 - DNA, 603 bp, Homo sapiens; identical to SEQ ID NO: 870939

SEQ ID NO: 871504 - DNA, 603 bp, Homo sapiens; identical to SEQ ID NO: 870940

SEQ ID NO: 871505 - DNA, 603 bp, Homo sapiens; identical to SEQ ID NO: 870941

SEQ ID NO: 871506 - DNA, 613 bp, Homo sapiens
caggtcaggaattcagcagtcctttgcagaaatcacgttcagcttgaaattcatagggtagagttaaaacatggacatggaaatttggatttctagttttggttgatcagtaattaagctgaagcactacaaattctgagcatttaaaatcaagayattttttgtgtttctaataactaaaattaagacttcattctttccagggtttaaaagaatcagagtaagtcttaatttcttattctctcctacccactaaaaaataggaaaatagttttaggttttaaagaatacaaagctagaaatctccgagcaagctaaaatgattagttaaaataaaacaagggctgttgttcaaagataaatactaaaatagaaccttaatgattttcacagttacacctgttactatacttcaatgatgtgaagaacaagtctgaacaactcattaacagctaccgtttattggccgcacaccatgtgtcagacatttttatggattatctcattcgatcctcacggcagccctatgcagtagatcttattagccctttttcagatgaggaaacagtgcaaagaagctagcagacttgcctaaaatcacccagcaaggcgg

SEQ ID NO: 871507 - DNA, 591 bp, Homo sapiens
ttgttgttagttgttgttatttgttttttattttcttttgtttgacttaaggcattttctctcatgagcagtgtggtagttttaaaaagattaaaatgctaaaaaaaatcagtgactccagttaaaatgcaagtcttagtaaaaagagaaagggcaactatcacccttaatttcgctgaatgacagctcaagtctggtgacaacctcatcctaaaccaatgctttccaaagcagtttccaagaacactggccccaaggggtgcacctctagggaagggtccttgtgcccaaatatgtttgcaaattgtgccaaactctctctcctgtcyaccaccacagtgcttcacaaaagtacctgttcacatgatcatctctgtaaagtcccacagtaaagcaacttggtgaattttgatcaggcaagcatttttcaagcttatttgtccccaaaccccccttattttaaattgcttatatcactttgtgaacatttctacagagcaagggtactttgaggttgcggtaagcagctctgaatgtgtctgttgagtcagggctgtggggttaaatttcatttctgtacgtgtcagttgg

SEQ ID NO: 871508 - DNA, 591 bp, Homo sapiens
ttgttgttagttgttgttatttgttttttattttcttttgtttgacttaaggcattttctctcatgagcagtgtggtagttttaaaaagattaaaatgctaaaaaaaatcagtgactccagttaaaatgcaagtcttagtaaaaagagaaagggcaactatcacccttaatttcgctgaatgacagctcaagtctggtgacaacctcatcctaaaccaatgctttccaaagcagtttccaagaacactggccccaaggggtgcacctctagggaagggtccttgtgcccaaatatgtttgcaaattgtgccaaactctctctcctgtccaccaccacagtgcttcacaaaagtacctgttcacatgawcatctctgtaaagtcccacagtaaagcaacttggtgaattttgatcaggcaagcatttttcaagcttatttgtccccaaaccccccttattttaaattgcttatatcactttgtgaacatttctacagagcaagggtactttgaggttgcggtaagcagctctgaatgtgtctgttgagtcagggctgtggggttaaatttcatttctgtacgtgtcagttgg

SEQ ID NO: 871509 - DNA, 622 bp, Homo sapiens
ggttgtttcattgcaaaataagaagttgactttaggatgacaagaccttgatagccagtaagtttgggctttaaggacctcctcctttgggatatcttgggcatgtctatgtggattgggaaactagcgttttagaataaatgttctgagagaggaactacagactctggttataaaaattgaataatctcagttgtaagatggactttgaaggtgatttcattcaaatctgttattttacagatgaggaaactgatgcaaaaaaggaaggatggaaggtcatttagttaggggaaggaataattgctttttcctcaaaaccatagtattaagtgatggttctatttcagtgaatcctgccatggccytgacatttcaagctgggctctgagcctggtggtagaccactgtgcagcatatagagcagccaatgcgattaatacaaagtccatgactggggaaagagccttgttgccctggagatatctaagcccacagtcattgatctccagagcaaggcacctactccaggcatagtgggaaacaccacccttcaaccctaagtccagagttctgctagaaaagctgcttgtgactgcagtgccagtcaattggccccaag

SEQ ID NO: 871510 - DNA, 613 bp, Homo sapiens
ctttcagacttcactttatgcaacttttcctttgcctggttctaatttatacctttttgcaataataaaattgtaattatggttatagcgagtatagcactttcctgggttctgtaagtcattctagtgaattactaaatctgaggatggtcatgggaaccctcaaatttgcagccagctgatgcgatgttcttgaggctatttacmcatattttttctgtatgctggattttttatatattatgacatagtatggtaatgagcatttcttctcaactccactttcagtgattcatgttggtaccttgaaatcaaccatgcggaaagtatatcacagaaatcagcaaatgctatgaatcagagcttaatttattattttcctaataacaaaactattaataatacagattaaacataaaattttattgtattgatagtcattacattgcaaatagtacaaaaagttgaggaaatattctgtcagtttttaaaaattattatccagttcagcaaagaagttactgacatcattgacaaaagagtaaatttccaatatatgtcctcactgtttcagtttcgtatcagtcattattataaatgaaaagatcaacca

SEQ ID NO: 871511 - DNA, 560 bp, Homo sapiens
taatcgaattattaaagttttccctatggaattgtttgagctccttatatattctggttattaatcccttgtcagatggatagtttgaaaatgttttctcccattctgtgggttatctctttgttgattgttccctttgccatgcagaaacttaacctcatgtgatctcatttgtctatttttgctttagttgcctgtgtttgtggggtattactcaagaaatctttgcccagtcctgaagaggagtttccccaatattttcttgtctgaggtcttagatgtaagtcttttatccatttttctttcataatttgaggcctcagatgtaagtctttcatccatttttgattttctttttatatgtggcaaaacatarggatctagtttcattcttctgtatatgaatatccagttttcccagcatcgtttattgaagggattgtcctattcccaatgtatgctcttggaaccattgtagaaaataaacttactgtttaggtgcatggactttttaaaaaattttttgtgggtacatactaggtgcatatatttatgaagta

SEQ ID NO: 871512 - DNA, 650 bp, Homo sapiens
ctccttgcataggctctcatggattttacatactactgcttattttattagtctctaaagtcattcttctcccagtgtaattacacttttaaaaattactaaattgcataagagatattatgaaatcgtattcctggaacattgagaatttcaagctttaaaagacagcagctaaagtcaaagatacagcaacattttcaaaagttagctttgtacatctcttggctgagtaatgtgaacccacacatggaaagatttaatakatacaggaatgttctgggcctctgtaagagctgatccctctatcaggtttctgtgcagacaagcatgtttcttctatctattaggaaaggtttatgaattgagcatttcagaggctatggtaagaagcagggagagaagggggcaagtagagaattgctaaatatcaattctttttaaatattgagatttagaaataaaaatcaagaatctgtattttgacttgacttttcaatctattattctaacctcgtagctcattgttccatttattcaaagaacattaacatctgccatatattaggaattcagagattgctaacattgcctatgttcaaggatctcataatcaagtactgaggataattatacaagaagagtaatcacta

SEQ ID NO: 871513 - DNA, 650 bp, Homo sapiens
ctccttgcataggctctcatggattttacatactactgcttattttattagtctctaaagtcattcttctcccagtgtaattacacttttaaaaattactaaattgcataagagatattatgaaatcgtattcctggaacattgagaatttcaagctttaaaagacagcagctaaagtcaaagatacagcaacattttcaaaagttagctttgtacatctcttggctgagtaatgtgaacccacacatggaaagatttaatatatacaggaatgttctgggcctctgtaagagctgatccctctatcaggtttctgtgcagacaagcatgtttcttctatctattaggaaaggkttatgaattgagcatttcagaggctatggtaagaagcagggagagaagggggcaagtagagaattgctaaatatcaattctttttaaatattgagatttagaaataaaaatcaagaatctgtattttgacttgacttttcaatctattattctaacctcgtagctcattgttccatttattcaaagaacattaacatctgccatatattaggaattcagagattgctaacattgcctatgttcaaggatctcataatcaagtactgaggataattatacaagaagagtaatcacta

SEQ ID NO: 871514 - DNA, 641 bp, Homo sapiens
ccaaaatgttgacagtgatattgacaataaaattcagatggaggtgatctcagatggagatgaggaacttgttggaagctggaacaaaggtgactcttgtcatgttttagcaaagagactggcagcattttgcccctgccctagagatttgtagaactttgaacttgagagagattatttagggtatctggcagaagaaatttctaagcagtgaagcattcaagaggtaacttgggtgctgttaaaggcattcagttttataagagaagcagagcataagtgtttggaaaatttgcagcctgactatatgatagaaaagaaaaaacattgtctggggagaaattcaagctggctgcagaaatttrcataagtagcaaggagcctaatgttaatccccaagaccatgaataaaatgtctccaggtcacgtcagagaacttcttggcagcccctcccatcacaggcccagaggtccagaaggaaaataatggttttgtgggctgggccccgggtcctcacactgtgtgcagtctagggacttggtgccctatgtcccagttgctccagctgtggctgaaaggggccagtgtacagcttaggctgtggcttcagagggtgggagcaccatgccttggcagcttc

SEQ ID NO: 871515 - DNA, 622 bp, Homo sapiens
gcactaggaagtaactagcttgcttttgattttacaggctcataggcagaaggaacttgccttgtctcagatgagactttggactgtggactttcaggttaatgttgaaatgagtaaagaatttgggggactgttgggaaggcatgattggttttgaaatgtgaagacatgagatatggaggggccaggggcagaatgatatggtttggctgtgtccccactgaaatctcaacctgaattgtatctcccaggattcctatgtgatgtggagggacccagggggaggtarttgaatcatgggagccagtctttcccatgctattcttgtgatagtgaataaatctcatgagatttgatggttttgtcagaggttttcgcttttgtttcttcccatttactcttgccgcaaccatgtaagaagagcctttcacctcctgccatgattctgaggccttgccagccatgtggaactgtaagtccagttaaacctttttttttgttctcagtttcaggtatgtctttatcaggagtatgaaaacatcctcttaaaagtatattcacgagcaaatatttgtaaattttatgaagtccagttttttatttctctttttatggattatgc

SEQ ID NO: 871516 - DNA, 656 bp, Homo sapiens
ctcatcatcaggtactaacaaacagttctgggacccacatagatccttggtccccactttaagcaacactgatctaaattcttgtagagttggccatggaaatccaagcacactaaagattttgcagtatccagagagaaaggataacaatactcaaataagcactataaatgatgacttcaaaaggctccgtgacaaggattgacactcttcttatctatgaaatgatttttctttgtgagttgaggaaaaacacatattctaagaatgargttaatcttcctttacccggcacgtgttactcctgcttaacatgaactttttattccctacagctccccctcctcttctgaaaccactacacaccttatacacgttatgtacagagagccatgggcatggatcaagagagagagacagaatgcttttgcctaagccaggcatcccctacaatgttaaggttggcttcaaaaatggaatggaaaacaaagttttatgttgaatgaaatattcttttcgaagattttattctctctactcttgggaaagttcctgaataaaaaatacagaggtagccgtcactcacctctataaattggcattgaacagggtaggtaaaacacaggaagcaaagctatgtaagaaggaatacttag

SEQ ID NO: 871517 - DNA, 656 bp, Homo sapiens
ctcatcatcaggtactaacaaacagttctgggacccacatagatccttggtccccactttaagcaacactgatctaaattcttgtagagttggccatggaaatccaagcacactaaagattttgcagtatccagagagaaaggataacaatactcaaataagcactataaatgatgacttcaaaaggctccgtgacaaggattgacactcttcttatctatgaaatgatttttctttgtgagttgaggaaaaacacatattctaagaatgaggttaatcttcctttacccrgcacgtgttactcctgcttaacatgaactttttattccctacagctccccctcctcttctgaaaccactacacaccttatacacgttatgtacagagagccatgggcatggatcaagagagagagacagaatgcttttgcctaagccaggcatcccctacaatgttaaggttggcttcaaaaatggaatggaaaacaaagttttatgttgaatgaaatattcttttcgaagattttattctctctactcttgggaaagttcctgaataaaaaatacagaggtagccgtcactcacctctataaattggcattgaacagggtaggtaaaacacaggaagcaaagctatgtaagaaggaatacttag

SEQ ID NO: 871518 - DNA, 568 bp, Homo sapiens
ttggtgtcagctatatcaactagctcttgatcctatacagtattgcacacatagatttttggttttgttctataattttccttgatacggtgtacattgctaaaaggcaatgaccatgtctctctagagtaatgatttgttcatgtgctctagatatctgatctctataagtgttctgaataagtcagattaatagcaaaatacatatgtgatcaatgccccagaatctctataagtgaaagtaactataaacragcaatttgaaagtagtaagatcctcatccttttcaaaagtatctatatttccaccattttttagaatgccataaaggccacgttattaaaaccaagagagaacataaatgtacatgagagaggtcacattctggcccttctcaaacttttccacagaggcatcactggtcaggacgaaactgaagagtgaatacatacaccctggagttggagggcatctcccaaagcaacccatctcccatctgaaatttctttgaagtcttctaatattgctttaacatgaatgcaaattgtgcctcctgctccccaatat

SEQ ID NO: 871519 - DNA, 685 bp, Homo sapiens
tgaagtcaggtagtgtgatgcctccagttttgttctttttgcttagaattgtcttggctatacaggctcttctttggttccttatgaaatttaaattattattttctaattctgtgaagaatgtcaatggtagtttgatgggaatagcattgaatctataaattactttggtcagtatggccatttttacaatattgattcttcctatccacgaggatggaatgtttttccatttgtttgtgtcctctcttatttccttgagcagtggtttgtagttctccttgaagaggtccttcacatcccttgttagctgtattcctaggtattttattctcgttgtagcaattgtgaatgggagttcatttatgatttggctctctgcttttctattgttggtgtataggaatgyttgtgatttttgcatattggttttgtatcctgagactttgctgaagttacttatcagtttaaggagtttttgggctgacatgatggggttttctaaatatagaatcatgtcatctgcaaacagagacaatttgacttcctgtcttcctatttgaataagctttatttctttcttttggctgattgccctggccagaacttccaaaactatgttgaataggaatggagagagagggcatccttatcttgtaccggttttcaaaaggaatatccaggt

SEQ ID NO: 871520 - DNA, 625 bp, Homo sapiens
cacagatctctagggcagggataaaatgccacccatctctttgctaaagcataggaagagtgacctttactccatttcccaataagttcctcatctctatctgagatcacctctccctagacttcgttgtccatatcactatcagcattttggtcaaaaccattcaacaagtctctaggaagttccaaactctcccatatctttctgtcttcttctgagccctccaaactcttccaagctctgcccaatactcagttccaaagtcccttccacatcttcaggtatctttatagcagtgccccattcttgtaatgccaattttctgtattagtccattctcacactactataaagagttacctgaaactggataatttaggaagaaaagaggtttaattgactcacagttccacagaattaacaggaagcatgactgggagtcctcaggaaacttacaatcatgttggaagrtgaagggtaagctagcactttgttcacatggcagcaggataatgagaatgctaagagggaagtgccacacacttttaaaccatcagatttcatgagaactcactcattataatgagaagagcaagggggaatttcatacctatgatctaatcag

SEQ ID NO: 871521 - DNA, 593 bp, Homo sapiens
aatattagaaacctggaaaaattgttactcattcactttaagtatattgttgtgagtgattctaccctttctgttgaaatctctcccctatcatcaaagcttagctgaactctggaccttacttgtgaatttaaagtgacaccaggaaagttttttttttttttaaaggtcagctagtagtaggtgaaaagatagagaatggaagtagataataatgaatgaagtgttaagcttggattcagatatatttgttttccctttgtatttccartgactggcagggcatacaaccatggtgaaataatgattttaaagaagaatatgaatgtcaaagagaaaaatgaagaagaaaatatcacatgtatcttataaatatgtacaactattacatatcagtgaaaaaagtcaaaagcagtccttattaataaaattttttaaaattccaaaatataagaaaataacttctcatgacatcttgattatatttatcaagattaatttcactaaaaaatctaagacagtattctggcattaccctccatctttaggggcattgcatgaataaattgcatgaaacataatcaaaatgtgag

SEQ ID NO: 871522 - DNA, 631 bp, Homo sapiens
tagctattttaaaatggacaattaaattattattgaccatagtacccttgttgtactatcaaataccagcatttcttgtaaggaagttctgtaggtgatacactctctcagcttttgtttgtctgagaaagtctgtattacctgtttattttcaaatgttgctgaatatagtattcttgtttggcaatttttttttctttcaggatttgattgtatcatcccactcatttgggctatgcaagatttctgctgaaaartctgttgataatcttacagaggttcccttatatgtagcaatacacatatgtagcatataggtaacaattttccttattgttttcaaaactcatctttaatagcttttggcaatttatgatgtgtatcagtgtgtatatctgtggaatcatatttggtgtcctttatgcttacactatttagatttttgttcctttcccaggcttgggaatttttccatcataattttttttgaaaaagtctctctcttctttttctgggtacaacagtagtacatatcctgttatgcctgatcatttccataagtctctgaaaccatcctcactttttatcattctttttttctttgctcttcaccttgtgtaatttccactaa

SEQ ID NO: 871523 - DNA, 651 bp, Homo sapiens
tattttttgaagtgggattctaggattataaataccttaatagtgagaatatgaaggatagggatgtttttactaattcaattgataaaaaattgtgggagccactatgtttctatgaataagaaattcagatttcattgttaagtaatgttgtctacattttgtatgtgacagggcagtggtggatatgagagtgtggcatgtacacagaccaagtgagtcagaaatcaatatgtaaagataaggatctatggatatgaactgaaagtatgtaactacttcacaaaatgctaataaatgcagttcgaaataaaccccaaattattcaggacacaaatgtcttgacaattattttggaagcagtgagttcataaagaactccaaactcctgtttcattttctgattcctattgtccatgagacaagaaaatcatctctaatcatgcatcacagygcaaagttgtaaaccaagagtgtttctattgaagaccctgggggatcaggacaccaggcaggtgctggagacactctctcaggagcgtccagcagatctcagagtgatccgctggatgctcacgtgaaatccagcagtcactttctgagtcaccagtgagctgtgctggtgcctgaggggaccaaaataaggtcaaa

SEQ ID NO: 871524 - DNA, 625 bp, Homo sapiens
cgtgacttgctccttcttgccttccaccatgtttgtgaggcctccccagccacatggaactgtgagtccaattaaactcctttccttcgtaaattgtccagtcttgggtatgtctttatcagcagtgtgaaaatggactaacacagtaaattgttaacagtagagtggggcaccactgaaagatacctgaaaatgtagaggcaagccactttggaactgggtaacaggcagaggttggaacagtttggagggctcagaagaagataggaaaatgtgggaaagtttggaacttcttagagacttactgaatggctttgaccaaaagcytgacagcaacatggacaataaggtccaagctgaggtggttgcagatggagatgaggaacttgttcggaactggagcaaaggtgactcttgttatgttttagcaaagagactggtggcattttgcccctgtcctagagatttgtgaaactttgaacttgagagagataatttaggatatctgactgatgaaattcctaagcagcaaatcattcaagaggtgacttgggtgctgtgagaatcattcagttttaaaagggaaacagagtataaaagttcagaaaattttcagccagacaat

SEQ ID NO: 871525 - DNA, 625 bp, Homo sapiens
cgtgacttgctccttcttgccttccaccatgtttgtgaggcctccccagccacatggaactgtgagtccaattaaactcctttccttcgtaaattgtccagtcttgggtatgtctttatcagcagtgtgaaaatggactaacacagtaaattgttaacagtagagtggggcaccactgaaagatacctgaaaatgtagaggcaagccactttggaactgggtaacaggcagaggttggaacagtttggagggctcagaagaagataggaaaatgtgggaaagtttggaacttcttagagacttactgaatggctttgaccaaaagcttgacagcaacatggacaataaggtccaagctgaggtggttgcagatggagatgaggaacttgttyggaactggagcaaaggtgactcttgttatgttttagcaaagagactggtggcattttgcccctgtcctagagatttgtgaaactttgaacttgagagagataatttaggatatctgactgatgaaattcctaagcagcaaatcattcaagaggtgacttgggtgctgtgagaatcattcagttttaaaagggaaacagagtataaaagttcagaaaattttcagccagacaat

SEQ ID NO: 871526 - DNA, 569 bp, Homo sapiens
ttgtcctgatctcagactctgggaggagggcttggggccagcagaggtggactgggctggaggatatccaggccccttgatggcatgctcaaatcctgggggaatgggacttggctggtgggcttgtcctcaggtgcccttgttatggtgcattcaggtgctcactatgataggggcagagtattccccaggcctcctgaagaaagcttaggtgggggcagtggtggctgccctagggatctgcctccagggatggcagggctgcttgcagtaggagtagcttactggggcagctgtggagctggtggttttytggtgcctccatcccacagcagcccatggaagtggaagtggcatttgtccttggagcatgtggaagtttctggcctctcctcttactcctgcagcagcagaagtatcagtttcagggcacaaagtcctttggggatctgttttcagattggtgccagccgtgggcccaccacctggaaggacggggcatgtcttagtgggagaagtgtgggaaggcagctacgggcttacagtttctctatgtctgggtgccacaa

SEQ ID NO: 871527 - DNA, 664 bp, Homo sapiens
attaactggaagccttaccaataacataaacaatgaacatattttttgtatgttatgtgtattatatactgttatttttacagtaacaataaagtaggatagagataagaaaatcacaaggaagaaaaaattgtatttataattttttaagtgaaagtggattatcataaaagtcttcatccccgttattttcacattgagtaggctgaggaggaggaagagaagggtttggtcttgctgtytcagcggtggcagagtgagagaaaatccacttataagtgaacctgtgcagttcaaacctgtgttattcgagggtcaactctacactaatataaactatagaaaataaaaaacaaagagaaaataaagattgaaataaataaacaaacagagcatcaatggtgtgcagaatcatatagaaaaatctaatattttggagtttcagaaagaaaagagagagagagagacagagacaaaaaaaaagtttggaagattaatggtcaaaacttttccaaatgtgatggaaaatataaatccaccaagcaaagaggcccaagtaaacactccatgtaaaaacagtaaggcacctcataattaaattgccaaaaacaagtaaaaacatctttaaaacagccagaggaaaaagacatattatgtatagaga

SEQ ID NO: 871528 - DNA, 645 bp, Homo sapiens
taatttacacaaatcagtagctcttctatacaccaacagcaatcaggagaagagtcaaatcaagaactcaacaccttttacaatagtcacaaaaaaaatacttaggaatatacatattcctaagaagtcaaaagacttctacaaggaacactacaaaacaatactaaaagaaagcataaatgacacacaaaaaaatggtaacaaattccttattcatggatgggtagaatcaatattgtgaaaatgaccatactgccaaaagcaatttacaaattcaatgaaatccccatcaaaatactatcatcattcttcacagaattagaaaaaacasttctaaaactcatatggaaccaaaaaagagccctcatagccaaagcaagactaagcaaaaagaacaaatctggaagcatcacactatctgatttcaaactatacaataaggctatagtcaccaaaacagcctggtactgtcctaaataggcacatagaccaatggaacagaaataaacccaaatacttacagccaactgatttttgacatagcaaacaaaaacataaagtggggagaggacacccttttcaacaaatggtgctgggataattggctagccacatgtaggagaatgaaactggatcctcatctca

SEQ ID NO: 871529 - DNA, 645 bp, Homo sapiens
taatttacacaaatcagtagctcttctatacaccaacagcaatcaggagaagagtcaaatcaagaactcaacaccttttacaatagtcacaaaaaaaatacttaggaatatacatattcctaagaagtcaaaagacttctacaaggaacactacaaaacaatactaaaagaaagcataaatgacacacaaaaaaatggtaacaaattccttattcatggatgggtagaatcaatattgtgaaaatgaccatactgccaaaagcaatttacaaattcaatgaaatccccatcaaaatactatcatcattcttcacagaattagaaaaaacacttctaaaactcrtatggaaccaaaaaagagccctcatagccaaagcaagactaagcaaaaagaacaaatctggaagcatcacactatctgatttcaaactatacaataaggctatagtcaccaaaacagcctggtactgtcctaaataggcacatagaccaatggaacagaaataaacccaaatacttacagccaactgatttttgacatagcaaacaaaaacataaagtggggagaggacacccttttcaacaaatggtgctgggataattggctagccacatgtaggagaatgaaactggatcctcatctca

SEQ ID NO: 871530 - DNA, 645 bp, Homo sapiens
taatttacacaaatcagtagctcttctatacaccaacagcaatcaggagaagagtcaaatcaagaactcaacaccttttacaatagtcacaaaaaaaatacttaggaatatacatattcctaagaagtcaaaagacttctacaaggaacactacaaaacaatactaaaagaaagcataaatgacacacaaaaaaatggtaacaaattccttattcatggatgggtagaatcaatattgtgaaaatgaccatactgccaaaagcaatttacaaattcaatgaaatccccatcaaaatactatcatcattcttcacagaattagaaaaaacacttctaaaactcatatggaaccaaaaaagagccctcatagccaaagcaagactaagcaaaaagaacaaatctggaagcatcacactayctgatttcaaactatacaataaggctatagtcaccaaaacagcctggtactgtcctaaataggcacatagaccaatggaacagaaataaacccaaatacttacagccaactgatttttgacatagcaaacaaaaacataaagtggggagaggacacccttttcaacaaatggtgctgggataattggctagccacatgtaggagaatgaaactggatcctcatctca

SEQ ID NO: 871531 - DNA, 555 bp, Homo sapiens
tttcggatattatttgattgaattatctccttataaattctggttcctttctacatcaactcttagtatattcatttgtgtttctttctcccatctaaacttcttggtgttaatctctacttgtagttatctatagaatctgaaaaaaactttttttctattcagaaactccaaaagtgctctcactttcccaaccgtttcattttgcttttgagctaattcctcaaagtcagtatgactcttggttgtataatcagtgaatttaccttcaattgctttccacyattttcttccattacctttgttttctctagctttgctataattgcatacatcttcccagtgggctacttactaatttctcaatgcctaggtcaatgtacatcacatattaagtgcttgccctccttgtgcagtgaatccagttgttctagagtaactgtttcactcacagaaagctcctctgaggctagttctaattccatgttggtatttcaggtatcgataacataatgagagatatattttagtagagatgtttttctgttttcctcc

SEQ ID NO: 871532 - DNA, 661 bp, Homo sapiens
aggtagtgtgatgcctccagcttccttctttttacttaggatttttttggctatatgggcccttttttggttccatatgaaatttaaagtagttttttccaattctgtgaacaaagtcaatggtagcttgatgggaatagcaatgaatttatacattactccgggcagtatggccatgtattgattcttcctatccatgaggatggaatgtttttccatttgtttgtgtcctctcttgtttgcttgagcagtggtttgtagttctccttgaagaggtccttcacatcccttgtaagttgtattcctargtattttattctctttgtagcaattgtgaatgggagttctctcatgatttggctctcactggtgtataggaatgcttgtgatttttgcacattgattttgtatcctgagactttgctgacgttgcttatcagttaaggaatttttgggctatgacgatgaagttatctaagtatacaatcatgttatctccaaacagagacaatttgacttcctctctttctgtttgaatacgctttatttctttgtcttgcctgattgccctggccagaacttccaatactatgttgaataggagtggtgagagaacacatggacagagggaggggaacatcacacactggggtctgtcacg

SEQ ID NO: 871533 - DNA, 436 bp, Homo sapiens
gaatgagtgggccaagcacggtggctcacacctgtaatcccagcactttgggaggctgaggtgggcagatcacttgaggtcaggagttcaagaccagcctagccaacatggcgaaaccccatctctactaaaaatacaaaaatcagctgggcatggtggtgggtgcctgtaatcccagctacttgggaggctgaggcgggagaattgcttgaacccagggrgcagaggttgcagtgagccgagatcgtgccattgcactccaacctgggtgacagagcaagactccttctcaaaaaaaaagaaaaaaaaaaaaaaagaatgagtggtagtcactgagtacataatcgagtggtgttgcttccactgtttcttattgcacctgtgtgtactcttggagaagtactgctgtgcttgggttagcctcacgactgttagg

SEQ ID NO: 871534 - DNA, 556 bp, Homo sapiens
tttgccccccagcatgacttgatttcagttgtagtactaaatggtgggcaaggatggagttgtctatgattctctttttaccctctgcctaggacctgaattttcaggttggctagtgaaggcccttttttttttttttttttttttttttttttttgagatggagtcttgctctgtcgttcargctggagtgcggtggcgcgatctcggctcactgcaacctccacctcccttgttcaagcaattcccttgccttagcctcccgtgtggctgggattatgggcgcacgccaccatgcccggctaatttttttatatttttagtagagacggggtttcaccatgttggccagactggtcttgaacccctgaccttaggcaatctgcctgcctcggactcccaaagtgctaggattacaggactgagccaccgcacctggccgaaggactttttgtaaaaacaaaacaaaacaaaaaaaaaaacaagcatcttttgcaactcagtctgtatgtagcccttattttatgaatgttctttattatattgatattttaaa

SEQ ID NO: 871535 - DNA, 608 bp, Homo sapiens
caatgacaattatccctggctgattactattatctgacacttgcattggtcctggcatcccatgggtgagcaagacaggcatgtcccttgcccttatgtagcttatggttaatgtgtaacctttgccaagtcatgcaagttctatgatatggtttcttactgtgtaaaatgaagcagttgttaacagttaacagacatacagggaggtgaagaatatggcaagaggtaacaattttaaatacactggtcagagaaggcttcattgaggaagtgacatttggagacaggaatgagatggatatttgggggaagaaaattcaagtaaaggcatcrgcaaatacaaagtctctgagggggaagagggcttttttgttcaagacaatagcaggctggagaagatgcagaaagtgggagagttatagcagatggagacaaaaaagggaactgctggggatcaaaccttgtaaagtccttctaagtgatatatgaggactttgacttttattcaaagttagaaggctttgaacaaaagaattatttcatttgtgttttacaatggtcacaagtgccgtagcgagaataggctgtgtagagaagagattttgtgg

SEQ ID NO: 871536 - DNA, 513 bp, Homo sapiens
tttagcttaatgtaattttttttataattgcatatttttcctttggacagtcataaccagtatcaatacttatctattatttcagggacatcagcaatttataacttactttgaattactttagttttatttcttytccatttttatgcattctctcgtctctttccttaagttccccacaaaatttttgtatattcacacatcataatagacacagtttatgtgtacatgtgtgtacctgcatgtacatgcatatgtatccatgtatgtttatgtatatgtatatttttctcaccaggattataatatattttagtagtctgtggactaaatattattatttatttatcctactccgtgccaggcacattgtagtcacttactgaactaaaagttgctttatttacccaaatattggtttcataattccttttctttgtattcctaacatcttttttcattatttaccaatttatttgtattttttcaaatttaccaatttatttgtatttt

SEQ ID NO: 871537 - DNA, 622 bp, Homo sapiens
ctttgtaggtctctaacaccttgctttatgaatctggatgctcctgtattgggtgcataagtatttaggatagttagctcttcttgctgcattgatccctttaccattatgtaatgcacttctttgtcgtttttgatctttgttggcttcaagtctgttttatcagagactaggattgcaacccctgctttttttgctttccatttgcgtggtaaatagtcctccatccctttattttgagcctatgtgtgtytttgcacatgagataggtctcctgaatacagcacactgatgggtcttgactcttcatccaatttgccagtctgtgccttttaattggggcatttagcccatttacatttaagattaatattgttatgtgtgaatttgatcctgtcattatgatgctagctggttattttgcccattgcttgatacagtttcttcacagtgtcaatggtcgttacaatttggaatgttttgcagtggctggtactggtttttcctttccatgttcagtgcttccttcaggagctcttttagggcaggcctagtgttgacaaaatctctcagcatttgcttgtctgtaaaggattttatttctcccttgcttatgaagctt

SEQ ID NO: 871538 - DNA, 635 bp, Homo sapiens
gcaatggcaacaaaagccaaaattgacaaatgggatctaactaaactaaacagtatctgcagtgcaaaagaaactattatcagagtgaacaggcaacccacagaatgggagaaaattgttgcaatctatccatctgacaaagggctaatatgcagaatctacaaagaacaaatttacaagaaaaaaaacaaacaaccccatcaaaaagtggacaaaggatatgaatagacacttaccaaagaagacatttatacagccaatgaacatgtgaagcaaagcacatcatcactggtyattagagaaatggaaatcaaaaccacagtgagatacaatctcacaccacttagaaaggccattgttaaaaaatcaggaaacaacagatgctggacagggtgtggagaaataggaacacttttacacagtttgtgggaatataaattagttcaaccattgtggaagacagtgtgacaattcgtcaaggatctacagctagaaatatcatttgacccagcaatcccattactgggtatatacacccaaaattataaatcattctaatataaagacacatgcacctgtctgtttatggcggcactgttcacaacaccaaagacttggaaccaaccaaaatgccc

SEQ ID NO: 871539 - DNA, 677 bp, Homo sapiens
gggagaaggagaaaaaattctaagagtcaaagaaactgtgtaatccccatttttatcactttttttgtgaccaagtgatttcactcaccattttattcatcagttccctatctacacacttagagcaaatgagataacatagaatgctttgcaaagtaaaaagcatgatacagaatacataatgtcatcgtaaccaacaacctctgaagtttaatcgcatccagacatctggcttctttttccctaccttcttatggttgtagatttcaccattgtaacagagccacatatatggatatgtcttcacttaaattgtctgcattccaaacagyaggtcaactaccaccaatgggtgaaatccaaagcagcagctggtgtatccattgacattctcaaaacaggatgcatctggacccctgtgtgcaatcttcatagcacacagacactaaacagaaaggcagtcattgctgccaaacaggacccaaatgccacacacagtgcaatgaagctataagctccctatggagagaaaagtagacaaatcaaaaatattcaatatccaatccaagtccacgttaaatcttgattccagaaacgtgcataaaccacttcaaagactaaaatttaaaccatcttttctatagcgatttcccatttggttggcaggcatacaggag

SEQ ID NO: 871540 - DNA, 677 bp, Homo sapiens
gggagaaggagaaaaaattctaagagtcaaagaaactgtgtaatccccatttttatcactttttttgtgaccaagtgatttcactcaccattttattcatcagttccctatctacacacttagagcaaatgagataacatagaatgctttgcaaagtaaaaagcatgatacagaatacataatgtcatcgtaaccaacaacctctgaagtttaatcgcatccagacatctggcttctttttccctaccttcttatggttgtagatttcaccattgtaacagagccacatatatggatatgtcttcacttaaattgtctgcattccaaacagcrggtcaactaccaccaatgggtgaaatccaaagcagcagctggtgtatccattgacattctcaaaacaggatgcatctggacccctgtgtgcaatcttcatagcacacagacactaaacagaaaggcagtcattgctgccaaacaggacccaaatgccacacacagtgcaatgaagctataagctccctatggagagaaaagtagacaaatcaaaaatattcaatatccaatccaagtccacgttaaatcttgattccagaaacgtgcataaaccacttcaaagactaaaatttaaaccatcttttctatagcgatttcccatttggttggcaggcatacaggag

SEQ ID NO: 871541 - DNA, 659 bp, Homo sapiens
ggcaggcatgaaatgagcctccatccctctgtcagcaggctagaatgtaggggtgttcactggcaagtcgcctgcgaataaatgagccaaggaaatgaaatgagagaaggacactcctaatttagcatttgcaccatttataacattaagtcctgagaaaggcccttttagttgcttccatgatgaatttgctaaatttgctttttcttgttttaggtatcactggartaggctctgagacatctattgaaacaggaatttccaacacaggtaaagttgaaagaaaaccgtctctatggacacacagatgaaatgatgtttttttgtagagttgttctgatgaataacacaaaatctgtcttctcactagtgcaactccccagaatttacaattccatatcctgtctcaaaggctacaatttctgcagaacacgttggcaccactgaagcttcattcacaataggggagaaggagcaactcatgtctttgttgttttcagattttgacactcatagcgagactagagagaggaggattctggagagcagtttgtatttactttactaatactacatttttggccaacaaattctttatcagtttagacatttttccagaaaagctactaattacagattgcagaatcatacttctaatc

SEQ ID NO: 871542 - DNA, 621 bp, Homo sapiens
tcttccattttaatttaagtggttgggtgtaaataacttttaagtttgctacctgggcaatttacaaaagaaagaggtttaatggacctacagttccatgtggctggggatgcctcacaatcatggtggaaggcaaggaggagcaagtcatgtcttmtacagatggcagcaggcaaagagagagagcttgtgcagggaaactcccaattttaaaaccatcacatttcataaaacttattcactatcatgagaacagtatgggaatgacctgcccccatgattcaattatctcccacagggtcccttcccacaacaggaagggaattatgtaggcattaaggaacctacaagatgagattagggtggggatacagagccaaacaatatcattccatgccttgcctcttgcaaatctcaagtcttcacatttcaaaaccaatcataccatccaacagtcccccaaagtcttaactcattccaacgttaactcaaaagtccacagtccaaaatctcatctgagacaagtcaagtccattctgtctataagcctgtaagatcaaaagcaagttagttacttgctagatacaatgggggtacaggaatttggtatatacagctgat

SEQ ID NO: 871543 - DNA, 568 bp, Homo sapiens
tcactttatttctagagctatccaaaataacaatatctacagtttgagagagaggttgactttggaatgaaaggtaagaaaagagaagaggaagaaaacaaatagataagtcccataatcttcgcaggtccacagagtgatatggaaaattctcctgagctgtagggcttttaggctgacagccctgatatgtcatccttcctgagtatacacatcctaattggaaatgtggcattttatgcatacgcacgcatgcagtcagcataaaagggcaatccatgtcttagaaaagattcatcttacagagataatatgcgtagggacgaagttgagaaaatcacaccacaaatcacctttttrtagttctatgagaaagaaaactttctaatattgtctactgagactgaagaatttttgtccccgtccccattatttacctttaatatccatcactttattagatgaacaaatatacttttgagaaatatataaaatttgttttattctaaaatggttcttgtccactgacacattgtgttatgtcttttcagtacagcatgttttactt

SEQ ID NO: 871544 - DNA, 622 bp, Homo sapiens
acactgatttgcatcatatcttacttttatgtttctataagaaagttttatttcaggacgagtgaattataaaagagtttattaaaatggtcatcagtacaactctgtgagaaagaccaaaataacagtggtttaaataagatggggattttttttctcttacagaaaaatccaagcaaagcatggtgactctgaggaggccagggatccaggctcacttaccaggtactactccaatatcccacttatcaagattattcccacttcaygatccgaaacgtctgctccaactctggcaaaatgtccacattctagctgtgggaaacagcaaagtaaaaggcacagcattttgtttttattggttaaccttaaagttacacacctcttttcttcttaaattcctttggccagaatttaggtacatggccaaacctaacttcaaggaagaatgggaaatgtaatccagttaaaaaatgtttatcactgtgcaagagttcaagagaccttataaaacaattagcagtctgtggacacagcaataaaagatctcctacgatacaaagaagaacacaaagatcattgctgtgagccctagcatcttttggttttactgaagagcaaa

SEQ ID NO: 871545 - DNA, 622 bp, Homo sapiens
acactgatttgcatcatatcttacttttatgtttctataagaaagttttatttcaggacgagtgaattataaaagagtttattaaaatggtcatcagtacaactctgtgagaaagaccaaaataacagtggtttaaataagatggggattttttttctcttacagaaaaatccaagcaaagcatggtgactctgaggaggccagggatccaggctcacttaccaggtactactccaatatcccacttatcaagattattcccacttcacgatccgaaacgtctgctccaactctggcaaaatgtccacattctagctgtgggaaacagyaaagtaaaaggcacagcattttgtttttattggttaaccttaaagttacacacctcttttcttcttaaattcctttggccagaatttaggtacatggccaaacctaacttcaaggaagaatgggaaatgtaatccagttaaaaaatgtttatcactgtgcaagagttcaagagaccttataaaacaattagcagtctgtggacacagcaataaaagatctcctacgatacaaagaagaacacaaagatcattgctgtgagccctagcatcttttggttttactgaagagcaaa

SEQ ID NO: 871546 - DNA, 642 bp, Homo sapiens
gcaatggcaacaaaagccaaaattgacaaatgggatctaactaaactaaacagtatctgcagtgcaaaagaaactattatcagagtgaacaggcaacccacagaatgggagaaaattgttgcaatctatccatctgacaaagggctaatatgcagaatctacaaagaacaaatttacaagaaaaaaaacaaacaaccccatcaaaaagtggacaaaggatatgaatagacacttaccaaagaagacatttatacagccaatgaacatgtgaagcaaagcacatcatcactggtyattagagaaatggaaatcaaaaccacagtgagatacaatctcacaccacttagaaaggccattgttaaaaaatcaggaaacaacagatgctggacagggtgtggagaaataggaacacttttacacagtttgtgggaatataaattagttcaaccattgtggaagacagtgtgacaattcgtcaaggatctacagctagaaatatcatttgacccagcaatcccattactgggtatatacacccaaaattataaatcattctaatataaagacacatgcacctgtctgtttatggcggcactgttcacaacaccaaagacttggaaccaaccaaaatgcccaccaatg

SEQ ID NO: 871547 - DNA, 677 bp, Homo sapiens
ttaaaacgcagatcaaggctgggtacggtggctcccaccagtaatcccaacactttgggaggccttggtgggaggatctcttgagatcaggagttcaagaccagagtgggtaacatagccagatctttgcctcttaaaaaaaaagccaggcatggtgtcatgcacttgtagtcccagctactcaggaggctgaggcaggaagatcgcttgagcctaggagttcgaggctgcagtgagctgtgattgcaccactgtacactccatcctgggtgacagagggagtccctgtctcaaaaatacaaaagrcaaaaaccaaacaaaagcaagaacaaaactccagcagattagaaaggattccgcagtattacaaaagaacaagcaaaacagagtcaactgaagggatcccacatgagataatggtaaaagaattcacacaagaaatactttttcattgcttattaactcataaaatggcaaagtgtagattactggccatgcaataattatcactatttagtaaatgctcaagactggcatatttatgaaagcatttctattttggggactgcattcagatttttaactggcttttttcatttggagtgttgattttgaagctgatttttaacatgccccatgcaaagatcaagagacggaacttcagcactggtttggtg

SEQ ID NO: 871548 - DNA, 611 bp, Homo sapiens
ccctagcacagggaccctgggcctgatccacgagaccatttttccctcctaggcctccaagcctagggaggggcggctgcaaaaatctctttcatgccttggagacattttctcccttgccttggtgattaacattcggctttttgttgattatgcaaatttctgcagccagcttcaatttctcctcagaaaatgagattttcttttctatcagattgtcaggctgcaacttttccaaacttttatgctctgtttcctttttaaaactgaacgcctttagcagcacccaagtcacttcttgaatgttttgctgcttakaaatttcttccaccacataccctaaatcatctctctgaagttcaaagttccacaaatctctaaggcaggggcataatactgccagtctctttgctaaaacataataagagtcacctttgctccagttcccaacaagttattgatctccatctgagaccacctcagactggactttattgtccatatgtctgtcaacattttggtcaaagccattcaacaagtctctaggaagttccaaactttcccacattttcctgtcttcttctgagccttccaaacagttttaacctttg

SEQ ID NO: 871549 - DNA, 678 bp, Homo sapiens
ataataacacttctgaccctatgaagccagggtagacaaaacgttaagtgggaatcagagcaaaagggattgtctccatcagtgatgtcctgatagtggattacaagagggtgtgaactcatgataactaaggagagaaaggctgctgactaakatcagttctatctttaaggaagtctgggctctgcttagtgttagggctgagatacaaaacaatttctctattttcccagatagttcacccctccctaattatagccctcagacgaatgttttgttaccatgagaaagcaggcaaagcaggaaggaaataatcagacatttttacttagaacattgaattttaatactgttttcctcttgctaacagacctttcaattttacttcttacatattttaagtgtgatcaattttacctttcaggatattattcctcatccataaaattacacaaaaattgccataaacaagctggctgcaaaggaacaatcgtcatactttaaaaaaaataaccttcgtgtttatagaaataataaagcccatgcagtacttcttttaaagatcttgctctaaacaaactgaattattcatgcatagaattgtgcagcattagaacacctgttttcaatcatgcataatgtaaaatcactcattacctcacaagagcctctacatct

SEQ ID NO: 871550 - DNA, 556 bp, Homo sapiens
tatttatattttaaaaagaactgccctgaattaagagaacgtccttgtcacgagcctgttgtgaatcaatcttgcaataaaatttttcatgaaaacaagacggaattaggagaaatacattcttctagggaacaggagtgacagctttgtcttttctgcatcagtcacaaygcaaccagagttttaaattcagtaattgatagcacatttaagagtgatgttggcaagctgaagtccagaggaggtgactaagtggtgagatgaagttggaaaagggcctggctcatgggtcgggcattgcccagtgccacaggcagagttctaaagatctgaaatttatcatttccttttatcgttataacaaacttagacaatagaaactagcattattcctatcccacagttaaatgaacagtcatctttctaatactgagaataatcatcgttaaacattcattttgcgaaagacttatcaaggagcacaattagaatgatgcagttatgctagagaaactctaacatcctataaggttctagatttatttactctttgatg

SEQ ID NO: 871551 - DNA, 636 bp, Homo sapiens
aaggaaaaagcttcatacgttaattcttattgttgtttccaagtctttaaattattgacatattttttcaactaaaaaggaactttttttttgtattgagatatattttaaaccaagctggactcagattgcttttcaaaatgagacaagcaaatatatagtaacaggcagctaaagccttacctgttcaccacgaatggagcaagaatgggttaatgaacatattttgactccatggcatcagagaactgtgcagctgaatttctttawgtctgaaataatttgagtttgtccattgttctggtattatgtagccacagttcaaaacagtcaacatactaaaaaattatgggacattgagtcataaactttgtggaactgggaaaaagacggttgtcatagattattcaactttgaaccgtatatcatgaggtaattttatagaaaattattatgatcaataatttctgtcacattcaatttaactactagttttagaaacacaaattttaagagaacataaaataaatgagaatatgtccatttctgtaacataggaaatttcagctacataatgtctgatgattctttagagtgctaatgcatctatcctcctgtgtttttattactttaaag

SEQ ID NO: 871552 - DNA, 636 bp, Homo sapiens
aaggaaaaagcttcatacgttaattcttattgttgtttccaagtctttaaattattgacatattttttcaactaaaaaggaactttttttttgtattgagatatattttaaaccaagctggactcagattgcttttcaaaatgagacaagcaaatatatagtaacaggcagctaaagccttacctgttcaccacgaatggagcaagaatgggttaatgaacatattttgactccatggcatcagagaactgtgcagctgaatttctttatgtctgaaataatttgagtttgtccattgttctggtattatgtagccacagttcmaaacagtcaacatactaaaaaattatgggacattgagtcataaactttgtggaactgggaaaaagacggttgtcatagattattcaactttgaaccgtatatcatgaggtaattttatagaaaattattatgatcaataatttctgtcacattcaatttaactactagttttagaaacacaaattttaagagaacataaaataaatgagaatatgtccatttctgtaacataggaaatttcagctacataatgtctgatgattctttagagtgctaatgcatctatcctcctgtgtttttattactttaaag

SEQ ID NO: 871553 - DNA, 636 bp, Homo sapiens
aaggaaaaagcttcatacgttaattcttattgttgtttccaagtctttaaattattgacatattttttcaactaaaaaggaactttttttttgtattgagatatattttaaaccaagctggactcagattgcttttcaaaatgagacaagcaaatatatagtaacaggcagctaaagccttacctgttcaccacgaatggagcaagaatgggttaatgaacatattttgactccatggcatcagagaactgtgcagctgaatttctttatgtctgaaataatttgagtttgtccattgttctggtattatgtagccacagttcaaaacagtcaacatactaaaaaattatgggacattgagtcataaactttgtggaactgggaaaaagacggttgycatagattattcaactttgaaccgtatatcatgaggtaattttatagaaaattattatgatcaataatttctgtcacattcaatttaactactagttttagaaacacaaattttaagagaacataaaataaatgagaatatgtccatttctgtaacataggaaatttcagctacataatgtctgatgattctttagagtgctaatgcatctatcctcctgtgtttttattactttaaag

SEQ ID NO: 871554 - DNA, 570 bp, Homo sapiens
attgcaaactctggggctcaagctatcctcccacctcagcctcctgagtagatgcatgtcaccatgcctggcaattttttttttttttttttttttttttttgtagagtctgggtctcactgtgtttcccaggctggtctcaaactcctgggctcaaccaatcttytcgtttcagcctcctaaagtgctgggattacagacatgagccctgtacctagcctgtttgttattttgataaactgctgttccatttcccagcaaggttgctggatgccaatgtgccagtcaaacaaacatgctgcttctctgtcttctcctttccagtgcttttttagctttctaaaaaagaattaggtagtttgttccatgtattgtcatgtaggcaaaatagttgctacagcttaatacaatggaatgaaaaattgtccagataaatttttctgggatttcttttattttagcaataaaaatgctgcaccttggaaaaaattcctctccaggatttgaaaagtcttattttttagaatgagggtcaaagtttgggagaaaatatagaacccatattgtagt

SEQ ID NO: 871555 - DNA, 687 bp, Homo sapiens
catgcattccaggaataaatctcatttgatcatcatgtataatcttttgatatattgttaaattcaatttgtgagtatttgttgaacgtctttgcatcaatattcataaaggatataaatctatattcttctctttttctgtaacatctttgcctttggtgccagtgttatgctgtatttttagctctaaaatttctgttggtttttaaaataatttctatctctttattgatattctyattttgtttatatatcattttcctgagttcttttagttctttatccatactttcatttagctttatggccatatttaagacagatgttttaaagtctttgtctagtaaatccaatatgtgtttcatcagggatcattcttggagatttattttggttctttgaataagttatggttttcttttttttttgtatgccttgtgatctttttttgagaattgaaaacccaaccacttctcccaatatttgcaaactggcagagaagaccttcattcattagcagggcacattctgagccttggtatctgcctggagtaaaggcttaaattcttttctgggcatgtgtcctatctgggctggtgtgtgtgtgtgcctttttttcaatgtccgttagatattccattgtattcttctgcttctaatttcttagaaattaggcatccataggtc

SEQ ID NO: 871556 - DNA, 687 bp, Homo sapiens
catgcattccaggaataaatctcatttgatcatcatgtataatcttttgatatattgttaaattcaatttgtgagtatttgttgaacgtctttgcatcaatattcataaaggatataaatctatattcttctctttttctgtaacatctttgcctttggtgccagtgttatgctgtatttttagctctaaaatttctgttggtttttaaaataatttctatctctttattgatattcttattttrtttatatatcattttcctgagttcttttagttctttatccatactttcatttagctttatggccatatttaagacagatgttttaaagtctttgtctagtaaatccaatatgtgtttcatcagggatcattcttggagatttattttggttctttgaataagttatggttttcttttttttttgtatgccttgtgatctttttttgagaattgaaaacccaaccacttctcccaatatttgcaaactggcagagaagaccttcattcattagcagggcacattctgagccttggtatctgcctggagtaaaggcttaaattcttttctgggcatgtgtcctatctgggctggtgtgtgtgtgtgcctttttttcaatgtccgttagatattccattgtattcttctgcttctaatttcttagaaattaggcatccataggtc

SEQ ID NO: 871557 - DNA, 687 bp, Homo sapiens
catgcattccaggaataaatctcatttgatcatcatgtataatcttttgatatattgttaaattcaatttgtgagtatttgttgaacgtctttgcatcaatattcataaaggatataaatctatattcttctctttttctgtaacatctttgcctttggtgccagtgttatgctgtatttttagctctaaaatttctgttggtttttaaaataatttctatctctttattgatattcttattttgtttatatatcattttcctgagttcttttagttctttatccatactttcatttagctttatggccatatttaagacagatgttttaaagtctttgtctagtaaatccaatatgtgtttcatcagggatcattcttggaratttattttggttctttgaataagttatggttttcttttttttttgtatgccttgtgatctttttttgagaattgaaaacccaaccacttctcccaatatttgcaaactggcagagaagaccttcattcattagcagggcacattctgagccttggtatctgcctggagtaaaggcttaaattcttttctgggcatgtgtcctatctgggctggtgtgtgtgtgtgcctttttttcaatgtccgttagatattccattgtattcttctgcttctaatttcttagaaattaggcatccataggtc

SEQ ID NO: 871558 - DNA, 685 bp, Homo sapiens
attgcctttgacattttcatcaggaaatccttgcccatgcctatgtcctgaatggtattgcctagattttcttctaggatttttgtagttttgggttttacatttaagtctttaatccatcttgagttaattattgtgtaaggtgtaaagaaggggtccactttcaattttctgcatatggctagccagttctcccagcaccatttattaaataagaaatcstttccccattgcttgtttttttcagttttgtcaaagattagatggttgtagatttgtggtcttatttataagttctctattctgttcaattggtctatgtgtctatttttgtaacagtaccatgctgtttttgtaccagtaccatgctgtttttgttagtgtagccttatagtatagtttgaagtcaggtagtgtgaagcccccagctttgttctttttgcttagaattgacttggctattacaggctattttttggttccacaagaattttaaagtaggttattctaattctgcgaaaaatgtcaatggcagtttaatgggaatagcattgaatctataaagtcttttgggcattatagccattttcatgatattgattcttcctatccatgaggatggaacgtttttccatttgtttgtgtcctttctgattgccttcagcagtggtttgtagttctcgtt

SEQ ID NO: 871559 - DNA, 685 bp, Homo sapiens
attgcctttgacattttcatcaggaaatccttgcccatgcctatgtcctgaatggtattgcctagattttcttctaggatttttgtagttttgggttttacatttaagtctttaatccatcttgagttaattattgtgtaaggtgtaaagaaggggtccactttcaattttctgcatatggctagccagttctcccagcaccatttattaaataagaaatcgtttccccattgcttgtttttttcagttttgtcaaagattagatggttgtagatttgtggtcttatttataagttctctattctgttcaattggtctatgtgtctatttttgtaacagtaccatgctgtttttgtaccagtaccatgctgtttttgttagtgtagccttatagtatagtttgaagtcaggtagtgtgaagcccccagctttgttctttttgcttagaattgacttggctattacaggctmttttttggttccacaagaattttaaagtaggttattctaattctgcgaaaaatgtcaatggcagtttaatgggaatagcattgaatctataaagtcttttgggcattatagccattttcatgatattgattcttcctatccatgaggatggaacgtttttccatttgtttgtgtcctttctgattgccttcagcagtggtttgtagttctcgtt

SEQ ID NO: 871560 - DNA, 616 bp, Homo sapiens
gtgagatggtatctcattgtggttttgatttgcatttctctaatgaccagtgatgatgagctttttatcatgtttgttggctgcaaaaatgtcttcttttgagaagtgtttgttcatatctttgtccactttttaatggacttttgtaaatttaagtgcctcataaattctggatattatccctttgtcagatggatatattgcaaaaattttctcccattctgtaggttgcctgtttactatgatgatgttcrctttcctgttctgtaggttgcctgctcactctgctttcttttgctgtgtggaagctgtttaattacatcccatttttcaattttggcttgcgttgcagttgcttttgatgttttagtcatgaagtcgttgcctatgcctatgtcctgaatggtactgcctaggttttcttctagggtttttatggctttaagtcttacatttaagtcttgaatccatcttgagttaatctttgcataaggtgtaaggaaggggtccagtttcagttttctgcatatggctagccagtttttccagcaccatttattaaatagggaattctttcccccattgcttgtttttgtcaggtttgttaaacatcaga

SEQ ID NO: 871561 - DNA, 574 bp, Homo sapiens
ctattcacaatagcaaagacttggaccccccccaaatgtccaacaacaatagactggattaagaaaatgtggcacatatacaccatggaatactatgcagccataaaaaatgatgagttcatgtcctttgtagggacatggatgaagctggaaatcatcattctcagtaaactatcgcaagaacaaaaaaccaaacactgcatattctcactcataggtgggaactgaacaatgagaacacatggacacaggaaggggatcatcacactctggggactgttgtggggtggggggaggggggagggatagctttaggagatatacctaatgmtaaatgacgagttaatgggtgcagcacaccagcatggcacatgtatacatatgtaactaacctgcacattgtgcacatgtaccctaaaccttaaagtataataataataataataatataaaattaaaaaattaaaaataaataaataaacaaagtccccaccacttccaaatgccatcaacatacaaatttggagattaagtttcacacacatgaaatctggggggcacattcaaaccatgg

SEQ ID NO: 871562 - DNA, 676 bp, Homo sapiens
ccctagttaaaatggcttgtattcaaaagacaggcaagaacacatgctggcaaggatgtaaagaaaatctacatttctatggagggtggagccaagatggccgaataggaacagctccagtctacagctcccagcctgagtgacgcagaagacaggagatttctgcatttccaactaagggacggggttcatctcactggagagtgtcrgaaagtgggtgcaggacagtgggtgcagctcacccagcatgagctgaagcagcgcaaagcatcgtctcacctgggaggcacaaggggtcagggaattccctttcttagtccaagaaagaggtgacagatggcactgggaaaacagggtcactcacactctaatattgcgcttttccaacagtcttagtaaacgccacaccaggagattatatcccacgcctgtctaggatgggtcctatgcccacggagcctcactcattgctagacagcagtctgagatcaaactgcaaggcagcagcgaggctgggggaggggcacccccccattgccgagacttgagtaggtaaacaaagctgccaggaagctccatctgggtggagcccaccgcagctcaaggaggcctgcctgcctctgtagactccacctctggggacagggcatagccaaacaaaaggcagcagaatcct

SEQ ID NO: 871563 - DNA, 570 bp, Homo sapiens
caatctacagaatgtgggaaaatttttgcaatctgtctatctgacaaaggtctaatatccagaatctacaaggaacttaaacagatttacaagaaaaaaacaaacaatcccatcaaaaagtgggtgaaagatatgaacagatacttttcaaagaagacatttatgtggccaacaaacatatgagaaaaagctcctcatcaatggtcataagagaaatgcaaatcaaaaccacaatgagatacgatctcatgccacttagaatagcgattattaaaaagtcaggaaacaacagctgctggaaaggaagtggagaaaagaatgctctcacactgtggggaggagwgtaaattacttcaatccttttggaggacagagtggggattcctcaaggatctagaactagaaatacctttggatatatacccagcaatcccattacgggattataaatcaagtttataggattacaacatcattctactatataaaggatgtataaagaattataaatcattctacttttataaatcattctactataaatatacatgcacatgtgtgtgtattgca

SEQ ID NO: 871564 - DNA, 489 bp, Homo sapiens
agtgaagaattcttgtgggctctcatgcacattttgagagtgaattttattgatagcgcattttagatgacatttaaatataataactataaaatttttgaaattatgccaacatatactattgtattaaacattatttaacttttggattattaaaactacttactataarcattaaatattttatctattatagtatataaatgtcctcaaaggttaaggaggggtatagagccattccattattcactcaatggcttaagatgcttatatcagcaagattctaatcttctatttcaatagtaccatcctatatggagtgatgaatgccgcagactgacatgtacagatatgatttcagaggctggtactatcttggttctcattgcttttactttatgtatagattatggagataatattattaatttttcttatttttagcatcttgtattcgttctttttctgtgtatcagtgtctgttcatct

SEQ ID NO: 871565 - DNA, 566 bp, Homo sapiens
tgagtgacgcagaagacgggtgatttctgcatttccaactgaggtaccaggttcatctcactggggcttgtcagacagtgggggcaggacagtcggtgcagcccactgagcatgaaccaaagcatgctcggtcaggtcaaagcacaaggggtcagggaattccctttcctagccaagggaagtggygatggatggcacctggaaaatcaggtcactcccaccctaatattgtgcttttccaatggtcttagcaaactgcacaccaggagattatatcccacacctggctcagagggtcctatgcccatggagcctcactcattgctggcacagcagtctgagattgaactgcaaggccacagtgaggctgggggaggggcgcccgccattgctgaggcttgagtaggtaaacaaagcggccaggaagctggaactgggtgaggcccaccacagctcaaggaggcctgcctgcctctatagactgcacctctgagggcagggcatagccaaacaaaaggcagcagaaacctctgcagacttaaatgtccctgtctgacagctttgaa

SEQ ID NO: 871566 - DNA, 640 bp, Homo sapiens
taaggaaactggtcacctacctattaccatatacaaaaagctatgcaagatagataaattaaggacttatatgtaagacctaaaattataaaaatccaaaaagaaaacctgttaaatacccttttcaatattggccttgtcaaagaattcatgcctacattctcaaaagtaatttcaacaaaacaagaaattgacaattgggacctaattaaatgaaagagcttctgtacatcaagagaaagtatcaagagaataaacagtacctacagaaagcaagaaaatattcacaaaactgcgtatctggcaaagttctaatattcagtatctataaagtacttaaacaagccaacaagcaaaatacaaataatactattaaaagtgggtggasgataggaaaggacactcatcaaaagaagacatacaagtgtccaactaacatacagaaaaatggtcatcttcactaaccatcagagaaatgcaaataaaaaccacaatgagataccacctcacacagtcaaaatggcttttgttaaatattcaaaatataacatattctggtgcggctatggagaaaaagaaacacatacacagttaatgagaatttaaattagttcagccactggggagagcagtttggaga

SEQ ID NO: 871567 - DNA, 695 bp, Homo sapiens
accacaaatcaataaatgtgatttaccacataaataaactaatgacaaaaactacctgattgtctcaatagatgcagaaaaagcttttgataaaatttcaacacctctttatgttaaaaactctcaatgaattaggcattgaaggaacatacttcaaaataataagagccatctatgacaaacccaaagtcaacttcataccgtagaggcaaaagctagaagcattccccttaaaaactggcacaaaacaaggatgttctttctcaccactcctatttgacatagtattgraaatcctggctggggtaatcaggcaagagaaagaaataaagcacatccaataggaagcactaccccactacccctgtttgcagatgacatgatactatatatagaaaaccccatagtctcagctcaaaaacttcttcagctgataaacaacttctgcaaagtctcaggatagaaaattctgtgcgaaatcaccaaaattactatacaccaacaacagtcagctgagagccaaatcaggattgcaatcatattcacgattgccacaaaaataacaaaatacctagaaataaaactaaccagggaggtgaaagatctctgcaaggagaactacaaagcactgttcaacaaaatcagagatgataccaaaaaaatggaaaacatggataggaagaatcaatattgtt

SEQ ID NO: 871568 - DNA, 641 bp, Homo sapiens
ataataatttatatgcctcgtattacaatttccacttcctttttgttctttggtcaactgtacacaaattttgtctcctcttataagcttaaattccttggaagcaagaactctatctgacaaaacataataattatgtataatgcaatagcaagtggagtacctgattttttaacacctaagaacctaaatggaaaaaaaaaaagaagtgcttagtgtatacatacatacatataaatgtatgcatttgtaatkgtttctgttgtattgcttctaacttatcctgaaaaacaagggaaatgatctttcctttattccaaataataaatgcatgtatacatatgtacttgtataattttccaattctcctacattcaactgattaaagccattttagtgcatttagaaaaaataataggctgggtgtggtggctcatgcctgtgatctgagcacattgggaggccaacgtggctggatggcttgatgccaggagtttgataccagcctggatgatatagcaagactccatctctatattttaaaaaatagacaaaataatattacttctttgagaaaggtatttgcttttcattgtgatctggttgaaattataataatcattgttatgaactgtcatatg

SEQ ID NO: 871569 - DNA, 558 bp, Homo sapiens
gtcttgtgctggttttcaaagggaatgcttccagcttttgcccattcagtatgatattggctgtgggtttgtcataaacagctcttattgttttgagatatgttccctcaatacctagtttattgagtgtttttagcatgaagggctgttgaattttatcaatggccttttctacatcttttgggataatcatgtggcttttgtcattggttctgtttatgtgatggattatgtttattgatttgcatatgttaaccagccttgcatcccagggatgaagctgacttgattgtggtggataagctttttaatatgctgctggattcggtttgccagtattttattgaggattttcgcaatgwtgttcatcagggatattagcctgaaattttctttttttttttttgctgtgtctctgccaggttttggtatcagtatgatgctggcctcataaaatgagttagggaggagtccccctttttctattgtttggaatagtttcagaaggaatggtcccagctcctctttgtacctttgttagaaattctttggtagaat

SEQ ID NO: 871570 - DNA, 618 bp, Homo sapiens
ttgttatgctgtctttaagagactcatctcacatgcaatgacacacataggctcaaaataaagagatgaaggaacatctacccagcaaatggaaaacagaaaaaagcaggagttacaattctagtttctgacaaaacatactttaaactaacaaaaataaaaaaagacaaaaaagggcattgcatattggtaaagggttcaattcaacaagaagagctaactattctaaatatacatgcactcaacacaggagcacccagattcataaagcaagtttttagagactttaaaacagacttaggctcccacacaaaatagtgggagacatttacatcccactgacaatattagacagatcattgagacagaaaattaamaaagatattaaagacctgaactcagctctggatcaaatggacctgatagatatctacagaactctctacccagaaacaacagaatatacattcttctcattgctacatggcacttactctaaaattgaacatatagtcagaagtaaaacactccttagcaaatgcaaaagaactgaaataataacaatctctcagcagcacaatcaaattagaactcaagactaagaaattcactcaaaac

SEQ ID NO: 871571 - DNA, 613 bp, Homo sapiens
aactatactaaacaattgaaaaggaggggctcttctctaactcattctatgaggtcagcatcatcctgataccaaaacctggcagagatacaacagaaaatgtaaacttcaggtcaatatccttgatgaacattgatgcaagtattctcaacaaagtacttgcaaatcaaatccagcaacacatcaaaaagcttatccaccatgataaagtaggtttcatctctgggatgcaaggttggttcaacatatgcaaatgaaaaaatgtgattcatcacataaacacaactaaaaacaaaaaccacaagattatctcartaaatgcagaaaaagcttttgataaaattcaatacagcttcatgttaaaaaaatctcaataaactaggcattgaaggaacagacctcaaaataataacagtcatatataacaaatccacagccaacatcatactgaatgggcaaaagctagaagcattccctttgaaaactggaacaacacaaggatgccttctgtcactactcctatagaacatagtgttagaagttctggctagaacaattaggcaaaacaaataaataaagcacattcgaataggaagagaggaattcaaaccat

SEQ ID NO: 871572 - DNA, 579 bp, Homo sapiens
cccttcttccacataactccaataagactcatgaaccacttcctcacctatctgcctctgtaacggtgcaggccctctttctcttccttgaactgtttttcattaatgacccctctccatattcaagaacctgaataaaataatctccttgattgtctggtgcattttgtctttcacaaagcaagacacattttttttgaaaagttatcaggttatcagttaaacgtacatagatttattgctcagtgttactcccatccaggaaataataattacacctgagtcytaaaaggggaaggagaaaggaggaagagtaattcaggattattaaaatcttcatcttttctgaaagaagtttcttctgagtctaactcaagagacagagcagtgtcccaaagccaggtggattgcttagtttggatcctgattcacccccaatttctacagcatagatggatgtgagtaagtaatatgggatgaaagatgattctcaacaaggatgattgtacattccaatttgaatgccctttctcctataataaggataaaaactgtgccagataaagctacagagttaat

SEQ ID NO: 871573 - DNA, 582 bp, Homo sapiens
gcatctggtggaagaagttttgaagcaagaaagcgctcaggctgctgcattgttacctctaactacttacagcgagcttctagagaaaaaggaaatagagcaaaaagatttggaaaatttgcaatctggctatctgatagggaataaaagactattttcagagagaaacccaagggtgcagccaaacagactgcttactcttagtaacattatcatatataaaagggaaccaggtgytatgcatcagaacaatgaaaaaaggccctgaaggccctgaaggcatttcaaaattcttcgaggccacccctcccatcacaggcttagaggactaggaggacaaaacacttttggggaacaggcccagattgctgctgtcctgccccaccttggaacactgttccctggagcagccatggttcaaacggtcccaggtatgacttgtactaccactctagagagtgtaaaccataagtcttggtggttttcacatggtgttaagtctgcacatgcacagaattcaagagctatggaggcttggtggcttccacccagatttcagaaggtgtactaaaaatcccggaa

SEQ ID NO: 871574 - DNA, 560 bp, Homo sapiens
agctgcaaacaaaataaaagccatctgtaaggccataaaattgaactataataactaaattcacattttaaaaaaaggtaaagtgaaataagttctattagtttcttggcacaagaaatgcaattgcatatggcacacgcatttcaagaaatgaagtaaaatctgaaaatatccctagaataattgtttgctaatttttatttctgtacatttcagtcatttagatttttttcagagtgaacatgacagccattaattttattagtctaaaaaaatgacttattctactctaaaattgtgctaraatttgaaattattttagcatatcctgtccgtctaggtccctctatatcaagggatttcatttttagacattcctttccacccacccctgtgccccccttggatgtaacaaggaaaaaggaatgtctcttctgtttaaaaaaaaaaaattctgagaaacctgattgcagaaatgagtgcttaaaatttataataattaaccaacataatgaaatgtggtttttaaagattgagaactaaatttgtaaaggaatcta

SEQ ID NO: 871575 - DNA, 599 bp, Homo sapiens
gcaagacaggccaacattcaaatttaggaaatacagagaacaccacaaagatacttctcaagaacagcaaccgccaagacacatattcgtcagattcatcaaggttgaaatgaaggaaaaaatgttaagggcagccagagagaaaggtcaggttactaacaaagggaagttcatcagactaacagcagatctatctgcagaaaccctacaagccagaagagagtggaggccaatattcaacattcttaaagaaaagaattttcaacctagaatttcatatccagccaaagtaagcttcataagcgaaggagaaataacatcctttacaaacaaacaaatgctgagagattttgtcactaccaggcctaccttacaagagctcctgaasgaagcactaaatatggaaaggaaaaactggtagcagccatgcaaaaacataccaaactgtaaagaccattgacgctatgaagaaactgcatcaactaatggccaaaatagccagctagcgtcatgatgacaggatcaaattcacacataacaatattagacttaaaggcaaatgggctaaatgccccaattaaaagacacagactggtaaa

SEQ ID NO: 871576 - DNA, 619 bp, Homo sapiens
aggtgtgaaaatcctgatgacccagcttcctttaaactttttctaaagttatactgattcttcacaagggatgtattggtcaaggttctccagagaaacagctccaacaggatagacaggcatgtatactggaggacattcgttatgggaattggctactaatttttcataatggatgtattgggcaaggttctccagagaaacagctccaacaggatagacaggcatgtatatcggaggacattcattatgggaattggctcaggcgatggtgaaggccaaggagtcctacaatctgctatragcaagctggagaatgggaaagtgagtggcgcaattcagttcaagtctgaaggcctgagagccaggagggccaatggtgcagctcccagcccagggccgaggtctgaaaccagggatgggatactggagtaagtccagggatccaaaggcccacaaaccaggagcactgatgtctgagggcagcacaagacagatgtcccaggcctgaagagagaaggaactcgccctttctctgcctttttgttttatccaggccctcaggggatcggatggggaccacctactttggggaagagtgttctttttactcaggcaa

SEQ ID NO: 871577 - DNA, 627 bp, Homo sapiens
tttagaatataaaatacatacatctgtgttacagaaaaaaaataaaacaacacaattatctcccattttttttctcttggacaaataagtaatatattaatgacccaaataattttgttatcctaaaaataatatgagtgaacgtttggatttgcaccatgccatagaaagggcattgtgttacctctcattgctctctacttcctgccagtttttggttgtttgtttttgcttttttttgtgtgtgtgtgggaactgcagacatacaatttgagatattgatgaggaggcatgtgtttaggaaacagcactttgcctgtcttaccttctgaaatgttgttttattatcaagctgagcagtagattttaagggcttttacatcatctttcaacatctcaactttattttcctgtttccatttgcatagcygtagatagtcacaatttattttttgttacagttttatggtccttgtacttataatgaatttctattttccataagatcctgcttgttgggtaactacagaatatgcataatagatagaagaataaagttttattaatcaaaatgctcagatccattgaagggaaatttcaacctctcatatttatttatttgaaaac

SEQ ID NO: 871578 - DNA, 633 bp, Homo sapiens
tttattttttcatttactctattgtttcttcttcctgtatttctttctgggatcaattttcttctgttcaaataattttcttcattatgcttttcagtatagatttgctcgtgaaaaattttctcagttttgctttaatggacattcttttactttgacttcacttttaaatgatatttttactgatataacattctagtttgacaggtttgtaaccccgtcacygcctcccaaccaacccctccaatattttaaaggtatcattgccttattttctggcttcaatcatttatgttgagaaggcagctggatctattctttgctacttgaatctaatgtattttttttttctcttctgctttttaaatttcccctttgtctctggagttcagatgtttcattacgatgtgcctatatgtgattttctttgtgttttatagatttacagattgtagtgcttatagaatctgacttaatatttttgtttggaaaaattctcagatattttaacattttacctactctattttttgtcttcatcctttctgaatttccaattaaatttgtgccatgtctttttaccaattcccatgttttttatactgtatggttttctcccctttctttttttta

SEQ ID NO: 871579 - DNA, 676 bp, Homo sapiens
tatcattgccatcattacaaacacatattttctagcacagttggttccacaatagactagcataccggtgcttactgtagggaaatgtaaaagagaaggccagcgcagcggtcatttaaagagatctaagccatctaaattatcctcctaaaaacccttcaaaatcctaagaagacaagtaatattaatttacttttaaagtaaggatactttttataattagtaccttgcccttttgtttaaattgtgatagtcaaatacattttttaatgatatatgaatagttcatggataatacaggcccttatataaacaataggtatggaacatataattccattttaaacttgtcattttacatttttgcaatttaatagtaattagatcctaatctcattatcttaagactttgcagtttgtatcttggatttcaggacaatgaaaggtcacctctgagttatgtgaagctgtggccttgtttgggaacacaattcccaaatataacactgtttgaatgggaatatattatccattatacwctgatgcattcaatgatctagtttccagaaatagattttggcaaatagcgaggactgaacttctattaatgatacctctgcctccctgctttaattacttccttgaatcaggtatagaaagcaattgattcatctat

SEQ ID NO: 871580 - DNA, 572 bp, Homo sapiens
aacctaatccatcacataaagaaaaccaatgatgaaaccacatgattatctcaatagatgcagataaggccttcgataaaattcaacaccccattcatactaaaaactctcaataaaatagacattgatgcaacatatctcaraataataagagctatttatgacaaacccatagccaatattatatggagtgggcaaaagctggaagcattctctttgaaaactggcacaagacaaggatgccctctctcaccgctcctattcaacatagtattggaagttctggtcggggcagtcaggcaagagaaagaaataaagtgtattcaaagaggaagagaggaagtcaaattgtctctgtttgcagatgacataattgtatatttagaaaatcccattgtctcagcccaaaaactccttaagctgataagcaacttcagcaaagtctcaggatacaaaatcaatgtgcaaaaatcacaagcattcctctacaccaataatagacaagcagagagccaaatcatgagtgtactgccattcacaattgctacaaagagaataaaatacctacaaat

SEQ ID NO: 871581 - DNA, 643 bp, Homo sapiens
ttttcacactacttttacccctttttctagtttatttgtagtgttactgattactgtttgttttggtgtaaattggggttgctccttggtttccttaagctggctagaattcaacctttcggattgtgctaagctatttaccacctccctctctgttctccagcttccaaagttttattgctattatctcctcttcccattttgtcctcgtgggtttgtcttttgtgaatctttccagcctcctcctcctgccctgcccattttgtgcattttctggaggaggcaagattaatgaatttattcagtcctccatttttgatgcttgttccccagagcctaccagctttcagtcatgtagcttttatctttacaatgtatctattttmtatcctctctgtcctatttcttttggcaccattctaactcagaccttcagaaactcccttgtaaacaagatcttcatcccaagattcttaccatcccaagattaaatccatttgggataacactgccaggctaaccttcccaaagcatagcactgtgtacaccatccccttgtttaaaaacctttacaacttgctactaatcaacatgaaatataaatggttcgctcttgtatttaagttctggcattatatccctt

SEQ ID NO: 871582 - DNA, 595 bp, Homo sapiens
aatgtgaagtatagccataggaatccatacttgtcactggtgactataaaaataggtgcaccatgcatgagcgtatgagatgcttaagtcaattctgtattttctttttactttaaggatcatgccattttagaattccagtttctctaatgaagaagcttggaaaggagttaagaggcttgtccaaagccaagagttttcagaggtatatcataaatatgttttcttaaaaataccgtaactcctgatattcacattgggttcagctttttgaaaaacattagaaagaaagtttagaaaaacaagttcatgtatatgctggtttttacaaatcaacggtgctcatcaatttactttaaaaactaatgcaayagaaaaggcaagcctgctgagggaaaaatatctggtgaacagcagaaaagtctttcttcccccaagagtcaaggaaagggggaagagaagaaaaaggagagaagagaaaatgaaccaaaaatcacatttttaaaagtgtgacaagctcaaagacagtaatttcaaagacgaactcaaaagaaaatcttcttgacagttttaataacccaaacaaacatttcaa

SEQ ID NO: 871583 - DNA, 618 bp, Homo sapiens
aggaagaaagaagaaagaagctaggatatatctccccatccctctctgcccaagtggcctcaggtgtgaagcagcacttgccacacctttgtgcctccagctacctacagacagacctgccaggtgaccttggcccctgagctctgatagcactattagcttttgccctgcagcccaggggcagtagtgacttcttgctgttgctaatctcagttttctcactatttcctattgtcttcacagcaattccatttcctgtgtaatcaattaaacttcatctgttttgaatatttaaagcagtttgggttttcctaattggacctaactgacacaatatactttctgactggaatccagcttgccttgtttactgctacatcctagtacctaggagagtgccaagtgcacattaagtaatcagtgaaactgtgctggatgaatgaatggaaaayatgtcctttatttattccaatagcctcagacttcattaagcatcagaattacctggagggtttgttatgacagattactacccctccacataccccttccccaagtttctgatttactaggtctgtaataaagcccccaaatttgcatttctaacaagttttcagt

SEQ ID NO: 871584 - DNA, 579 bp, Homo sapiens
agtccccaggctgcacacagattgggacgaccctgggcccagcccatgaaaccattttctcctaggcctctgggcctgtgatgggaggggctgctgtgaaggcctctgaaatgccctggagatattttccccattgtcttggggataaacattcggctcctcattacttatgcaaatttctgcagctggcttgatttttctcctcagaaaataggttyttcttttctatcacattgtcaggctgcaagttttacaaacttttatgctgtttcccttttgaaactgaatacctttaactgcactcaagtcacctcttgaatgttttgcggcttagaaatttcttctgccagataccctaaatcgtctctttcaaattcaaagtcccacaaatctctagggcaaggtaaaaatgctgccagtctctttgctaaaacataacaagagtcacctttgttccagttcccaacaagttcttcatttccatctgagaccacttcagcctggaccttattgtccatattactatcagacttttggtcaaagccattcaacaagtctctaggaagttccaaactttcc

SEQ ID NO: 871585 - DNA, 593 bp, Homo sapiens
ggtagtttcttttgctgtgcagaagctccttagtttaattagatcccatttgtcaattttggcttttgttgtcattgcttttggtgttttagtcatgaagtttttgcccatgcctatgtcttgaatggtattgtctaggttttcttctagggtttttatggttttaggtctaacatttaagtctttaatccatcttgaattgatttttgtataatgtgtaaggaagggatccagtttcagctttctacatatggctagccagtttgcccagcaccatttattaaatagggaatcctttccgcatttcttgtttttgtcaggtttgtcaaagatcagatggttgtagatatgwggtattatttctgagggctctgttctgttccattggtctatatctctgttttggtaccatgctactttggttactgtagccttgtagtatggtttgaagtcaggtagtgtgatgcctccagctttgttcttttggcttcagattatcttggcaatgcgggctcttttttggttccacatgaactttaaagtagtttttttccaattctgtgaagaaagtcactggcagcttgatggggatg

SEQ ID NO: 871586 - DNA, 628 bp, Homo sapiens
aagtctttaatctatcatgagttaatttttgtataaggtgtaagaaggggtccagtttcagttttctgcatatagtgagccagttttcccaataccatttattaaatagggaatctttcctcattgcttgtttttgtcaggtttgtcaaagatcagatggttgtagatgtgtgacattatttctgaggcctctgttctgtcccattggtctatatatctgtgttggtaccaatatcatgctgttttggttactgtagacttgtagtatagtttgaagtcaggtagcgtgatgcctccaactttgttctttttgcttaggattgtctttgctgtgcagtctctattttgattctatatgaaatttaaagtagttttttctaattctgtgaagaaagtcagttttagcttgwtggggatagcattgaatctataaattactttgggcagtatggtcattttcatgatattgattcttcctatccatgagcatggaatgtttttccatttgtttgtatcctttcctattacttgaacagtagtttgtagtttttcaagaggtccttcacttcccatgtaagttgtattcttaggtattttattctctttgtagcaattgtgaatgggagtt

SEQ ID NO: 871587 - DNA, 589 bp, Homo sapiens
ataaaaagctggagtggctataataatatcagaccaaattagattttagagaaaaaatattagcagggataaagaggattattttataacaatggatcattgatcaagaaaacataacaatcctaaatattcatgcatatactaaacagaatttcaaaatgcatgaagcaaaaatcgctagaactgcaagaagaaatagagccacgattattgtcaaagatgtagcactcttctctctataattgatagaagtgtacagaaaattaggaaagataagacttgactaacagcatcaatctgatctaattgacattagtagaacactccacctaactacaactgagcacacattcttttgaaatgcacacaagatatttaccaagaaaggctgtattctgggctgtaacaaagtctcaataaatttaaatrgatttaaatcctactaagcatatttactgactacagtgaaattaatttaaaatgatctacagtaacacatataaaaaaatcagaaatatttagaaactaaataatatacttctaaataacccttggtccaaagaagatttcaaaaggcagttagaaagta

SEQ ID NO: 871588 - DNA, 663 bp, Homo sapiens
caaaattcttgtactatctttgattccccttattctctacatgccccacatacaaacataagaaaattctgttgcctctatactcaaaaactgcctatctagatggagatatagatatagacgctatcacctatgwctaatctaccattatctcttgtttggattattgaaatagcttcctagctattaggaaacagcatgatgtgctagacaatacttcggacttttgaacaaaatgctggatacaaagcccacctttgttacttagcagtcatgtgacaataaacaaatagattaaaccctttggcctctgtttcctcagatgtaaattggaggacgataatagtaccaacctcataaagtttagtgagaattcaatgtattagcaacttaaagctctgaaagcaatgtctgacccctagtgaatcatacatactattatactcacaaagtataaagtattcattctttttgttatttttatctaaaaggaactgagagattcaagctctttaaatataatttcaactttatttcagatccaggggtacatgtgcaggtttgttacatgggtataccacgtgatgctgaggtttgaggtacaaatgatctcgtcacacaagtcctaagcatactacccaatatttagtttttcagcccttc

SEQ ID NO: 871589 - DNA, 575 bp, Homo sapiens
cctggccctgcagcagccttcattaacagaagcttctttgaagagcttgatgtgctcacttccagattgtcccttaggcccagctatggttcttcaaagtctaaatgtcaaggcttgttctgcctctagccacgtgctagagatgtkttctgttttcctcagtctgttttgtctctggggccatggaaatcctcaactcattcaaccaggaatttagtttctcatcctcttttttagtcatgtggttggtaggtttcaaacaggattaatacagcctctgagtttaaccaggtttccaagttgaaatctgacactgattccatcatacaggtacagaagcaagggatgggaggccgcttctgtggacaaactcaaggacggaaagaagtaataatgagtttggagcctgggactcctttaatgggaggaaagagcttgtaactttgacgacgaaactactctggctccaaaataagcagaaacatgatccagtgacttcatttcttctaagaatcaatagaattaaaaaaaaaaaagaattgatcccattttcaaaacaacagaaaggtttcttt

SEQ ID NO: 871590 - DNA, 575 bp, Homo sapiens
cctggccctgcagcagccttcattaacagaagcttctttgaagagcttgatgtgctcacttccagattgtcccttaggcccagctatggttcttcaaagtctaaatgtcaaggcttgttctgcctctagccacgtgctagagatgttttctgttttcctcagtctgttttgtctctggggccatggaaatcctcaactcattcaaccaggaatttagtttctcatcctcttttttagtcatgtggttggtaggtttcaaacaggattaatacagcctctgagtttaaccaggtttccaagttgaaatctgacactgattccatcatwcaggtacagaagcaagggatgggaggccgcttctgtggacaaactcaaggacggaaagaagtaataatgagtttggagcctgggactcctttaatgggaggaaagagcttgtaactttgacgacgaaactactctggctccaaaataagcagaaacatgatccagtgacttcatttcttctaagaatcaatagaattaaaaaaaaaaaagaattgatcccattttcaaaacaacagaaaggtttcttt

SEQ ID NO: 871591 - DNA, 606 bp, Homo sapiens
tgccctagagtctcacatagtgtcttatacagagtggatgctcattcaactttaacagtggacatataagatattagtttcaactactgggctccttcgaccttcagtgacctcctggaagaaaggaactgtgttttagaaaagcaaacamtcctgaaaagaacaaacaagcaacccctccaaaactttaggttccacatactgggtaccatgtagcaaaataattaacccatagtacatgtcttgggctcgataagcaatgaaaaggttgatttttatgtgcataaacacctctgggttgcttttgagtgtgtatgtaagtagagagtcatagaatgtcaggtaatctattctactaaaaaaattttcttttaagtaacaaaaggacccttactgtgcttaggctataaccatctaaatgtgtgctactagtctgggtaatattttagttataatcccatatgttagaattcaatgtctgtcacttgtcagatttttttctgtagaatgcccaagaaatctttaagctgtgaacatgtagcatcagaacgtcagtgttgaatgagcctctgtgtgcaaagccctgccttatatgccatgtgtgag

SEQ ID NO: 871592 - DNA, 599 bp, Homo sapiens
cttagtgcctcaaacaggtaaggcctatgtaaatattcactattactacttatatatttgcttatttgtttacgatttctcttctgcaaaagactgtaagtaccattagggcagaggttctatatataggtaatttttttcatgttgaatgaaaggaaaaacaagatcccaatcttctattatagaaagattaaaaaaatttgaatcccttcctcacaccatatacaaagatagrgcgttgaagactcagtgtgaaaagtttaacatttattataaaattttggagaatatcattatcatcttgggggtaaggaaggttttcttaggtaattttagaactacttaccataaaggaaataataaatacattaaaattctgtataacaaaaagtatcagaaacaaagacggaaaagttacactcttgaaaaagatatttgtaaccacatagctgatggagaaatagtgtttgatcacttaataggaaacctaagtggttagcaaacacaagaagttaagcatcatttgttatttggaaaatgcaaattaacattccaataatatttcacattcatcaattcacaagatttaaaatctctga

SEQ ID NO: 871593 - DNA, 637 bp, Homo sapiens
gtgacaatgggcttttgatagcccagagttctgaacttattctgtgaaaaatgtgagtgagagtcaccctaagtcagaccttcagcaccattttaggcacccataccctaggatgcacatcgtgggattcgtactctgggatccacaccttgggatctcaccctggtaagcccacctcccctttgtgtttctcaagccacaagtgagtggtgctgccacagggttctccatctaaggcacrtccacctggggtatcaattttatttgaatatctgaggggataaaattaagcattttaactgggaaataactttatctttaaacagttacaacagatatagatgtattttgaagcagaatgcaacatgcacaatacttcatacttagagctgtccacttgagtcctggtcctgctggccttgcaaggacataggctatttcctctatgtatttttaaaaaatttattatcattattaacatataattaatataatataacttcagcacgttaaggtatacaattcagtagttttcagtatattcataatgtgcaactatccccacagttcccctgtgtttaagggtccctttcatggaaaggttcaggaagtgctgcctgccgatgccactctgcct

SEQ ID NO: 871594 - DNA, 587 bp, Homo sapiens
aaaataggaatgcttttacactgttggtgggagtgtaaattagttcaaccattgtggaagacagtgtggcgattcctcaaggatctagaactggaaataaccatttggcccagtaatcccattactggatatatacccaaaggattataaatcattctacaataaagacacatgcacatgtatgtttattgaggcactattcacaatagcaaagacttggaaccaaccccaatgtccatcagtgatagactggattaaaaaatgtggcacatatatactatggaatatactacgcagccttaaaaaaggatgagttcatgtgctttgcagggagatggatgaagctggaaaccatcattctcagcaaactatcacaagatcagaaagtcaaacaccgcatgttctcactcgtaagtgggagttgaacarggagatcatgtggacacagggaggggaatatcacacaccagggcctgttgggggttgggtggctaggggagggataacattaggagaaatacctaatgtaggtgatgagttgatgggtgcagcaaactaccagggcacgtgtatacttatgtaacaaa

SEQ ID NO: 871595 - DNA, 540 bp, Homo sapiens
ctctcagtatttctgttagaattcagctgtgaatctattctagtcctggattttttttgttgttaggctactaattactgcatcaatttcagaacttgttattggtctatttagagattcaacttcttcttggttttgaattgggagggtgtatgcatccagggatttaccaatttcttttagattttctagtttatttgcatagaggtgtttatagtattgtctgatggtagtttgtatttctgtggggtcagtggtgatatcccctttatcaatttttattttgtctatttgatgcttctgtcttttcttctttattagtctagattagtctagctagtggtctatctattttcttaattttttygaaaaaccatcttctaaattcattgattttttggagggattttcgtgtctctatctccatcaattcttgtctgatcttagttatttcttgtcttctgctagcttttggattaatttgttcttgcctctctagttcttttagttgtgatgttagagtattattttgagatcttt

SEQ ID NO: 871596 - DNA, 578 bp, Homo sapiens
ccctgctttgactcatgctcggtgtgctgcacccactgtcctgcacccactgtctgacaagctccagtgagatgaacctgggatctgagttggaaatgcagaaatcactcgtcttctgcattgcttgctctgagagctgtagaccggagctgttcctattcagtcatcttggaaccacccccttgagagtttttaatatgaagtgatgttgaattttatcaaaagtcttttctgcatctattaagataatcttgtaatttttgtctttagttctgtttatgtgatgaatcacatttattgatttgtgtattttgaaccaaccttgaatcccaaggataaagcctacttgatcatggtggattagcttttcgatgtactgctggattagctttgcaagtatgttgttgatttttgcatsaattttcatcaaggagattggcctagggttttcttttttcttgtgtctctgccaggttttggtatcaggataatgctggcctcatagaatgaggttttgggatagtttcagtaggaatggtaccagctcttctttgtatatctggtagaattcagctgtg

SEQ ID NO: 871597 - DNA, 648 bp, Homo sapiens
ggtttaagggaaaaagtcatctacctacaataaaagagcaaggtgaaacagcaagtgctgatggagaagctgcagcaagttatccagaagatctagttaagatcattgatgaaagagtctatgctaaaaacatattttcagtgttgaccaaacagccttctattggaagaagatgccatctgagactttcatagctagagaggagaagtcaatgcctgacttcaaagctkcaaaggacaggccaactctcttgttagaggctaacgcagctggtgactttaagttgaagccaatgttcattgaccattctgaaaatctgagggcccttaagaattatgctaaatctcctctgcctatgttctataaatggaacaacaaagcctggatgacagcacttttgtttacagcttggtttactgaatatttttaagcccactgctgagacctactgttcaaatgaagattcctttcaaaatagtactgcttattgccaaagcacctggttactcaagagctctgagggagatgtaccaggagataaatgttgttttcttgttgctaacacaccatccattctgcagcccatggatcaagaagtcattttgactttcaagtcttctgatttcagaaatatatttcataaaatta

SEQ ID NO: 871598 - DNA, 624 bp, Homo sapiens
aagacagagagtcaaaggagggttaagtttaaaaaagtagagtgttcaaggagtctggagaagaaagagcattacagtgtgaggagacatctgtgattgttgactataagtgaccaacatgcaactttaatgcaagtyatatgcaaaccagagtctattattcccagtaaacagcctatttaggtgctttctgtaacaggactgtttcagcataacagccttagtaatcatagtctctgccaaaactgtggccaatgtaatactttttcagtgggacctggggaatgatacattatttaaaatgaagtccatcaaacaagcgaaagacaaaatgcattgatttaagtgatgtgtggactggagcctgtgaacagggcaggcagttcacaccaaagctgaggtgccctggtactgttgatttgggggccacacacgcagggtaacaagcctcctcacaatggtgtgacagtgtttcctcacccgagtgcacacagagatgggagcacagcagtgactaccctgtccctggcctcctgctggatttgccaacaatggtaacacttggtaccagctggaaggccctgagatgctgagaagggaccaccgcatttcctgtggatggga

SEQ ID NO: 871599 - DNA, 624 bp, Homo sapiens
aagacagagagtcaaaggagggttaagtttaaaaaagtagagtgttcaaggagtctggagaagaaagagcattacagtgtgaggagacatctgtgattgttgactataagtgaccaacatgcaactttaatgcaagtcatatgcaaaccagartctattattcccagtaaacagcctatttaggtgctttctgtaacaggactgtttcagcataacagccttagtaatcatagtctctgccaaaactgtggccaatgtaatactttttcagtgggacctggggaatgatacattatttaaaatgaagtccatcaaacaagcgaaagacaaaatgcattgatttaagtgatgtgtggactggagcctgtgaacagggcaggcagttcacaccaaagctgaggtgccctggtactgttgatttgggggccacacacgcagggtaacaagcctcctcacaatggtgtgacagtgtttcctcacccgagtgcacacagagatgggagcacagcagtgactaccctgtccctggcctcctgctggatttgccaacaatggtaacacttggtaccagctggaaggccctgagatgctgagaagggaccaccgcatttcctgtggatggga

SEQ ID NO: 871600 - DNA, 632 bp, Homo sapiens
gggtcttgtgctgctgtgataagagtaagtgctctattctgctctgaagtaatgaaggggctgggctatttcttctgcctaggtcaattctaaagtctacttagagccatgagttttgcagttcagtttaatatgggaatgagaggaacacagaaggcttccctgtttaggcttcccaaaatggaatgagaaataggcaggcatttgactccaacttctgctgcactggaatttcccgttgcacagattctggtgtggggtctaaaatgaggccacctgctgtgttagtataaccctgggccttgttgaggttgtggaactcagtggtccccaggggttctgcgtggatctgggaaccatgtcccctgcacttttctctctggcsaacctctttgggcccagcattcctggctcttctaactgattgcctggacaaggaagctttactcagtggagtatgctaaccctgcaatggcactctgagggtagggtgtggagcgctggttgttaccagggactacctcatgctcaccagtcttcacagctgtcttgtcctccaccccaccccttggctgcaccaccaccaccactgccaccatatacaccctagtcactctctaatcctgtgtcat

SEQ ID NO: 871601 - DNA, 659 bp, Homo sapiens
atggcttgggaacaccaaggtggaagattctcaagcacaagaaactcactggtactttgccttaaaagcatattgaattaaatacaggtagtaccaaagaagtggaaattatactacagaaaatactccttctggatgaatgattaagtgaggtatctggataagaagctatggagaaagactgctgctggtaataaacacttttttacagaatctgaggattaagaaaactcttgccctgtagtgtgagttygacaaatgctgtttaaataaaagcaactaggctgagtgcagcggctcatgcctgtaatccctgcacttcgggagtctgaggtggatggatcacctgagaacgagagttggaaaccagcctggctaacatggcgaaatcccgtctctactaaaaatataaaaactaactgggtatggtggcacatgcctgtaatcctagctactagggaggctgaggcaggagaattgcttgtacctgggaggtgtgggaggtggatgttgcaatgagccaagatcacgccactgcactccagcgtgggtgatgatggagtgagactctgcctcaaaataaataaataaataaataaataaataaataaataaataaaataaaataaagcagctagtcatgctgtcccacattaagg

SEQ ID NO: 871602 - DNA, 603 bp, Homo sapiens
gaggcagttgtttagaacatctgagatggtggctatgaggtggggcaaacaacaagcagatcaaaatcttaaaaagaaagcctgaggaatgagatattaacagagggctttgaaactccagcatattcctgggaatctctaagaccacacccatgtgtaggaatataaacatgctcagagctatgcatacactcagaagggacatgagagggccatgagccctcagctttggcagacatgaggttctgcacaagcaggaatgaaggctaagacagagaggtaaccacctggctcagagttgaaggtgtgcccaaaacatgcacacataacatcagcaaagattaggagactctgtccatcattatttgaccactaagataatcaagcacagtcttcagtggctaccacaggacaaagaatacagaccttacagarctggttcataaaagtcaataaataaacaacaatagcaacaaacagcaacaacaaaccctggggagaaaaaaagaattcaatttccaaagtttccacattgttttattttaaatgccattttcaacaacaaaaaaattatgagacatgccaacaaataagaaaagaaag

SEQ ID NO: 871603 - DNA, 603 bp, Homo sapiens
gaggcagttgtttagaacatctgagatggtggctatgaggtggggcaaacaacaagcagatcaaaatcttaaaaagaaagcctgaggaatgagatattaacagagggctttgaaactccagcatattcctgggaatctctaagaccacacccatgtgtaggaatataaacatgctcagagctatgcatacactcagaagggacatgagagggccatgagccctcagctttggcagacatgaggttctgcacaagcaggaatgaaggctaagacagagaggtaaccacctggctcagagttgaaggtgtgcccaaaacatgcacacataacatcagcaaagattaggagactctgtccatcattatttgaccactaagataatcaagcacagtcttcagtggctaccacaggacaaagaatacagaccttacagagctggttcataaaagtcrataaataaacaacaatagcaacaaacagcaacaacaaaccctggggagaaaaaaagaattcaatttccaaagtttccacattgttttattttaaatgccattttcaacaacaaaaaaattatgagacatgccaacaaataagaaaagaaag

SEQ ID NO: 871604 - DNA, 614 bp, Homo sapiens
taggtgaaatagaagccatgagggttgaataaaattgcttaagaagagcattatattggtttcccagggctactataacacattaccataaagcagggtagcatgaaacaacagaaatttattctcacacagtttcggaggccagaaatttgaaatcaaggtgtcagcagggctgtgctccccctgaagtccctaaagaaggacccttccttgactcttcctagcttctggtagttgctgtccatccttgccattccttggcttccatmtgcaccactcctatcgctacctccatagccacatggccttcttccctctgtgccttcctatctctgtgtgccctctcctcttcttacaagcacattggtcacattagatctagggcccactctaatcccataggacctcatcttaactatttatatctgcaagatcctaggtccaactgaggtcacattctgaggttctcagttggatctgaatttggggttggggagtgctatttaacccactataatggtgaagagagaaaaagagaaagctaaaggcagaatcatgagacgcacgaacattctggtcgttagtagggaagtgttagcaaaggaaagagaaag

SEQ ID NO: 871605 - DNA, 676 bp, Homo sapiens
gggcagtctttcttaaagactatttgcattaaattattaggattatcagattaagtatgagaaactgagttgagggaatatagaggagagaattagacaaagctctagtgaatgtatcatgctagaagaaatgctttaaataggaaaaacttcacagtacagtggaaagttgacaactgagtcagaataagcccagttataatgccgagataagtcacatttattttaaatatacctaatattaatttggaagggaattagcagtccaatatcccatttattaatttacctttacctctttttaactgaaattgtatttaaggacaggccatgtatatgtataaatttatgtgtatgtgggtatatatatgcatgtgtgtgtatgtctatatgtttgtgtgtatgtatatagatatagatatatacagaaagcatatacctcgaatttactaaaatgatacaattcaaacaaggtttgtttaaaagattatttgtagactattgattacrtaaaatattccaagatgaatatttttttttttaggctcttaggaagtggtcaaacagggagaaagacatattttggtgagatacttagatgtctttatcatgattattgacaattttgaaaaaaaatcaccatacttactgtcttgtcacataactgagaaacttc

SEQ ID NO: 871606 - DNA, 557 bp, Homo sapiens
tgcatatatacccagaaatgggattgctacatcatatggtagttctatttttaatgttttcaggaagccctattctgttttccataatagctatactaatttacactaacacaaaaatgtataagagttctcctttctctgtacccttgccagcattttttttttttttgtcttattgtagtagcccttctaactttgagaacttggagtttgatgttcaaggataggaagcatccagcacaggagaaagacaggctgagaggctaggccagtctctcttctcatgtagtaagatgatattactatctcactgtggttttgatttgcatttgcctgatgattaatgatgctgagcatttttatrtgtgctggcctttttattcttctgagaaatttctattcagatcatttgcccatttttagattagttgtttcagttccttatatattttggatattaacccctaattagatgtatgacttcgaagtattttttcccattctgtaggttgtcttttcactctgttgattactatttttgctgtgcagaagctttt

SEQ ID NO: 871607 - DNA, 600 bp, Homo sapiens
gaaactcccatttttaaaactatctgatctcatgagacccatttactatcacgagaacagcatggggaagacccacccccatgactcaatcagctcccaccaggtcccactcacaacacatgggaattatgggatctacaagatgagatttgtgtggggacacagagcmaaaccaagtcatttctcctctggttcctcccaaatctcatgtcctcatatttcaaaaccaataacacctttccaacagtcccccaaagtcttaactcatttcagcattaactcaaaagtccagagtccaaagtcttatttgagacaaggcaagtcccttctgcctatgagcctgtaaaattaaaagcaaattagttacttcctagatacaatgggggtatagacattggatcaatacagccattccaaatgggagaaattcgccaaaacaaaggggctataagccccgtgcaagtctgaaatatatcagggcagtcacattttaaagctccaaaatgatctcctttcactccatgtcttatatccaggtcatgctgatgcaagaggtgggttctcatggtcttgggtagctctgtccctgtggctttgcag

SEQ ID NO: 871608 - DNA, 664 bp, Homo sapiens
aaacagaagatgtataattttcatctgtacatggcaaatactctaaaatcaatcacatgttcacccataaagcaattataaacaaatttttaaaaaagctgaaatcataccaaccatactctcaaaacacagagcaataaaaatagaaatcaaaactaagaagatctgtcgggccaggcacagtggctcatgcctgtaatcccagcattttgggaaggcaacgcaggaggaccacctgaggtcaggagtttgagaccagcctgaccaatatagtgaaaccccatctctactaaaaatacaaaaattagccaggcgtggtggcaggcccctgtaatcccagctactgggaaggctaaggcaggagaatcgcttgaacccaggaggcggaggttacagcgagccaagattgcaccattgcattcgaggctgggcaacaagagcgagactccatctcaaaaaaaaaaaaaaaaaagaaagacagaaaaaaagaaaaaaaagaaaaagaagatctrtcaaaaacatacaattacatggaaattaacctgctcctgaatgacttttgggcaaacaatgaaattaaggtagaaatcaagaaattctttgaaactaagaaaaacaaagaagtaacatgccagaatctctgggacatagctaaagcagtatt

SEQ ID NO: 871609 - DNA, 655 bp, Homo sapiens
atctcagcactattcacaatagtaaatacatgtaatcaacctaaatgcccataaacggtagactggataaataaaatgaggtatatagatacatatatataccatggaattctatgtagccataaaaaagaaggagatcaagtcctttgcagcaacatggatggaactagaggccattatcctaagcaaactaacacagaagagaaaaccaaataccacaggttctcacttataaatgggagataaacattaagtacatatggactcaaagaagggaaagatagacactagggcctagttgagcagggagggtggraggaaggtggggatcaaaaaactacaaatggggtactatgcttattacctgggtgattaaataatctgtattaccaaccctccataacacacaatttacctatataacaaacatgtacatatacccctaaacctaaaatgaaagattttaaaaaataaaatataataaaaagtaaccccagagagaaattgttagcacaagtggtaatatacgaaggtcagataggaaaatgatatagaattatattccaagataatggataacccaaatactcctaagggagaactgagtgaaaagatatgaatcgaaataataagaaccacctatggcaaaaccata

SEQ ID NO: 871610 - DNA, 569 bp, Homo sapiens
gttaagtttttagttcatgaagaaataagtttgcacgtcttcattctgcctatttgaataatgtgaaataggttttaagaaaaaaatgaagtagaagatatcaagcctgaaacaaagcttaattttgtgaacaatttagttctggttagactgaggcagacaagtactgtaaaaataatttctactgcaaagttgtagctcaggctgagaggtattatgggcatcaatcagtttatttatggtactaytactgatgagtctctccttgtctacaagggaaattcaacgacagaaaatgatagccttttcctaatgtattagtgaaaggaattttttttttgagcattcacttaatctgattgtaccttgagcctagaatttcgtagtttgaattagtcattctttcttagtctcccgtgcattttgaaagatgcttcccattccacagccttcatatcctcctgtccttgataatgttttagggcgtggtgattttccctccgtggatactgaattccggatgaatgcagctatgatgttgttaagtgttttgccactttttgccatga

SEQ ID NO: 871611 - DNA, 569 bp, Homo sapiens
gttaagtttttagttcatgaagaaataagtttgcacgtcttcattctgcctatttgaataatgtgaaataggttttaagaaaaaaatgaagtagaagatatcaagcctgaaacaaagcttaattttgtgaacaatttagttctggttagactgaggcagacaagtactgtaaaaataatttctactgcaaagttgtagctcaggctgagaggtattatgggcatcaatcagtttatttatggtactattactgatgagtctctccttgtctacaagggaaattcaacgacagaaaatgatagccttttcctaatgtattagtgaaaggaattttktttttgagcattcacttaatctgattgtaccttgagcctagaatttcgtagtttgaattagtcattctttcttagtctcccgtgcattttgaaagatgcttcccattccacagccttcatatcctcctgtccttgataatgttttagggcgtggtgattttccctccgtggatactgaattccggatgaatgcagctatgatgttgttaagtgttttgccactttttgccatga

SEQ ID NO: 871612 - DNA, 665 bp, Homo sapiens
tattctgtatatatatgcacccaatacaggagcacccagattcataaaactagttcttagagccctacaaagagacttagactaccacacaataatagtgggagactttaacacctcactgtcagtattagatcaatgagacagaaaattaacaagaatattcaggacttgaattcagatctggatcaagtggacctactagatgtctacagaactctctaccccaaatcaacagaatatacattcttctcagtgccacatgacacttattctaaaatagaccacataattggaagtaaaacactcctgagcaaatgcaaaataactgaaatcatgacaaataatctctcagaccacagtgcaatcaaattagaamtaaggattaagaaactcactcaactcaccaaaaccacacaatttcatggaaattgaacaacctgctcccgagtgactcctgggtaaataatgaaattaaggcagctatcaagaagttctttgaaaccaatgagaacaaagagacaacataccagaatctctgggacacagctaaagcagtgttaagagggaaatttgtagcactaaatgcccacaccagaaagctagaaagatctcaaatcaacaccctaacaccataattataagagctagtgaggcaagggcaaact

SEQ ID NO: 871613 - DNA, 595 bp, Homo sapiens
gccgcattagttcagtctttgtcttcgtcttcatatcaccatgttctctgttgtgagtctaatttctctttgcctctctcttataaaaacacttgtgatggcatttaaggcccactggtataatccagtataatccaaaatcaagatccttgagttaatcacactttcaaagaccctttttctaaataaggtgatattcacaggttccagggattaagatatggccatatcctggggggccattatcagccaaccacagtatgtatgttttatccaagcaatgagtattagcattactggtaaaggtggtgttttaccaaaaactagaataaagagaggaattgagccataaaaacggttttaggaagaggacacttggcagaaaaaaaaatagtcaatgcagaggctctgaggcgaggaactgtttgttggcttgagagaccacaaaaagcctagaaagactggagtagaattagagggaaggagagtattaggtgatgaataaaaataggtagcaggagagtctgcttgtgtatgttctccctggttgctgtatggatcttggcygttactccgaatgacatggaagacattg

SEQ ID NO: 871614 - DNA, 598 bp, Homo sapiens
cttggtattttttaaccctttgcatttccatgaatattttagattcagtttgtcaatttgaataaaaaaaaaccagctggaattcagattagaaatgtattaaacatataaagtaattaggggaaaatgtcaaacttcaaactctgaacagtaaatacttaatcacrtgtgatgctaaggaaccttcaaatccaaaaaagagaaatcaagggcaccaaatgtaacaaactcctgtactttttccatcttattgtgattttttgcactgggctatgtaaaaattcttcagctcaatcttccagctcaataagctgatgattatatctgttccttctgctattatcccaagtactaagattctgttttatttaaacttataattgtttcactttcatagcagccagttttgttaagacagacacatcttccctaatttatctgatactaattataataattttattttgtttcccatattaattcagtttcctaaaaggtaaaattcttttgtttgttgagttcaatgcctcatgcctcttttttgtgcttgttttggttttccttcaattttggtaattattgactatcggtttatatt

SEQ ID NO: 871615 - DNA, 632 bp, Homo sapiens
tgaaacagaatagagagtccgaaattagtccatgtatttacaaccaactggtttttgacaacagtgccgagaatatatattcaggaaaggacaccctcttcaataaatggtgctagaaaaaattggatatctgtatgcaaaagaaggaaactggacccctatctctcaccatctacaaaaatcaactcaagatggattaaagacttaaacataatacacagaactataaaactagtagaaaaaaaacatagaggaaatacttcaagacctcagtctaggcaaagattttgtggctaagacctcaaaagtacagataactatttttataaatagacaaatgggactatattaaactaaaaagcttctataccacaaaaaattgttcatcaacagaataaagagacaacctgttgaatgggagaaaatatttgcaaactattcacctaataagggactaatatccaaaatatagaaggaacycaactcaacaaaaaacaaataatcccatttaaaagtggactaaagacataaataggcatttcccataagaagacaaatggccaacagatatgtggaaaaaatgctcagcatcacagatcatcagagaaatgcaaatcaaaatcacaatgaaa

SEQ ID NO: 871616 - DNA, 670 bp, Homo sapiens
gttatctggattagaaggttgaatatttttgagatcacagagagtcaacctgaatcacagtcttcagaatggaagaacagtcagagggcttccgggaaagaaccacaaagtcatttacaaagcaagatctatttgcaagcctttttccttttttgaagcatcaggaatgatgctcaaataaagtagattcaataaagtagataaagtagctctcaataaagtagattatttcaataaagtagctatttcaataaagtagctctcaataaagtagattcaatatgtggtacacatgtacttagaaactcaaagtgctttgcaatatcataaaatattcccayataatcacagtatttctgtttgcaattattttttaaggaagcaaaataagtatttaagggggagagaaattatttcatgtcacagaataaactaggcactcaagtttctgtttgattgcccaggtttctgcttcactgggcaaggcatcgtaagtgtggttatgaaaacctcaaaatcatttctgtgtgtaaaacacaacttaactgaaataataataatacaacataataaaactttattgagtctttcatatatctgccaggcatttatgaaaagaatttcatctttatgtaattttacaactagtttgtgccaatgatttgggctg

SEQ ID NO: 871617 - DNA, 623 bp, Homo sapiens
caaaaacagcattggaagtgtgctttctacagaaattgtgttcctccacaagtgggggattatataccctggcagccattgtgtagaggccaggaatgctgttatcctacaatgcataggacagtcccctcaaaaaataattatcttgccaaaacacatcagtagtaccaatgctgagaaaacttgctctagaataaaaccastcaaactttagtaaaatgttcctcgatgaatgatttagcctctcaagtccactcatttcacagtatttccacagcatagtgttcttgtaagtatttcccccttatgatatattgagggtagctacttgtccaaacatacaaacatacctatgtttctgagacaaataaggatgttaaatgagcacactattaagggagttaaagcaagcaacacaaatataaagattagatttgcaaatttacaaaaggattgctatgtaaatatacaataagtaaaaagcaggccaataacttcaatggatatatggatatatataagtttacaattcacaatgaaaatagtcaagaaacataaaaggtggtctcttgattaagagaaatcaattcaattcaaatgaaacaaaaattttgtaaatttat

SEQ ID NO: 871618 - DNA, 586 bp, Homo sapiens
tcctttgtgtttgaaaagggcaggaattttttgatacctgagatacccttccagatgaacatagacatggttaaaaaaaaaaaaaaaaaaaaaaaaaaagtactcaatgcattctctgctatataggaggacccttgaaaggtctgttgagtgaatagtaaatgttgctgcatttcttttacttttacaggtttcctttggggagtctagaatttgataaacaatccgacccattgtgttgattgtktacctaatatgatcaaaactcttttcgagacaagccagattgagattccaacaggtttggtctattaaggacaaatgattggataaacaggtttctctctctctctctctccctctttctctctctctcatacacacacacacacacacacacacacacacacacacacacatttatttatttaaaatttatttataatgctaagaataaagtgataaatgctcaggagatgtcacagtgcattatttacattaattccttccttgctggatgaaccagcaattcccatgaaagagctgaacctagaaggctcatgacaatgtggttgtgctgagagaa

SEQ ID NO: 871619 - DNA, 623 bp, Homo sapiens
cattatcattgtgtcaaagaaaaaatgacactatataaagttatacaggtaagaaagactttattcaaggctattgaactagaggagaaaggcctggagttcaacttttctgagacgaaaagctggaaagtgtttaaaagctgtgtcaggagaggatcattggccacctgtgtttgctaattggccttacccaaagaaaaagtaaactttatcctaccttcacgacaggggatagttttacaacttggaataagccattcctgaagtcacactcctaattcctgtagaaactgggagacagggccacaatcacctttaawttcattttatctctcacttaacttgccccagcgacactagtttttttgatgttctttgaatataggaaccaaactccctattcagggccttggcaattgttttggactcttatgtaacttgtcctaaaaaccttagagattaatttacatctacataagaacaattattatttacatattttgaatactttgtatttctatattgaggctcataatttcctcaaaatataatgttaaactttaaagcaatccttagtgataaatttagaagtttttaattttatagactttttaaaaaaacaa

SEQ ID NO: 871620 - DNA, 651 bp, Homo sapiens
agactctgtctaaaaaaaaaaaaattaaaaaaataaggtcaaagagcagcaaggttagagaaaaagaggaaatcagatcaaaggaaactcataaacaccatctcttactcttaagaaacaattgtttgcttactgtttatattctggtaatttttattgctacaccaaaacagatgagtcagagttagtcttgtggccacaagaaacatgtactattccttactgctctattccttatttctgaggccayggaaatgagtgaaatgagtgagagcgcccaggacctgagacaatggcaggaaagtaaggctaactttcatttagctgcaatgcattcctttagcttcaacagtctcacctgctaaactcaaccacgatgaaaaagtaccacatgcagggaagaattttcctacaccttctctttttcctttaacttctgtgctcccttctgtccttacccttgctgctttcccctctttctttactcttcccactttttcatctcataagacattgttgagggccagctatattgaaagtactttaggtttacacaagtgaattagattttcactttgcaattccaacgcccacagtcgagtgggaaagacaaaaaaaaaaaaattataatttcatagcactttacaaagc

SEQ ID NO: 871621 - DNA, 489 bp, Homo sapiens
gagctccacaacctgaattccaacttactttccaaagcaaactctcattaattactgatgatgaccatgaggttttggagagggacaaaaccatctccaaatgtttttgagtgtctcctgtgtatcgtgtcctgtactaratgttttacacatcaactcatttaatccttatgagaacattgaaaacaaagttatccccattttacagatgagaaaattgagattgatagaggtaaggtcaccttacacagttattaactgtgagggtggattaaaatccagatttctctgtctctaaaacctcaggctttttctactgtgccatactacttctaatttgaactgtattttccagtgaaatgagattaatcttccctatagacatgccaggtacctgttatcactttattctggtatccgctccattttttggcatcctatgcttcttccatgcctgactttatctcccgtttgagcctctttctctgc

SEQ ID NO: 871622 - DNA, 641 bp, Homo sapiens
ttgtaataacagcataaaacacactttgtacaactgtacaaacatattttctttatatacttattctataagtgctttctattttcattttttccctttaaactttttaatttaaatgaagacagaaacacaataccctaggtctacacaggttctggatcatcaatatcattatccaccacctccacatcttgtcccactggaagatcttcatggacaataacacgaagctctcgtctcctgtgttaacaatgccttcttctggaatacctcctgaaagacctgcctgaggctgttttatagttaatttccttttttacaagtagaaggagtacactctaaaataacgattaagagtattgtacagtaaataaatacagcagtaacagagtcggttattatcattatcaagtattatgtactayacctaattgtgctacatttttgtatgcctggcagtgcagtaggtgtgtttcaccaggatcaccacaaacatatgagtaatgtgttgatctatgacattaccagagctaccatgttgatataaacaggagacagggaaatactgggtagaagagggcagttccctggcaaaagccttactcccaagcctggaaacctgcagtcctaaatgggaatag

SEQ ID NO: 871623 - DNA, 605 bp, Homo sapiens
aaaaaaatcccattttccgaggagaaattcaagccagctgcagaaatttgcataagtaatgaggaacctaatattaatcaccaagacaatggggaaaatgtttccagggcatgtcagagacccttgtagcagtcccttccacagagggccagaggtttagaaggaaaaattggttttgtgggccaggcccagggtccctctgttttgtgccgtctaaggacttggtgccctgcatcccagtcgctccagctgtgactaaaagggaccaagtcagaggctcaagctgttgtttcaaagggtggaagccccaagccttarcagcttccatttagtgttgaacttgcaggtgcacagaagtcaagaattgaggtctgggaatctctgcttcgatttcagaaggtttatgaaaatgtctggatgcccaggcagaagtgtgctgcagggacagagccctcatggagaacctttcctagggcagtgcaaaagggaaatgtggggttggagcccccatacagagtccctaatgaggtaccacctagtggagctgtgaaaagagggccaccatcctccagaccccagaatggtagatccactgacagcttgca

SEQ ID NO: 871624 - DNA, 605 bp, Homo sapiens
aaaaaaatcccattttccgaggagaaattcaagccagctgcagaaatttgcataagtaatgaggaacctaatattaatcaccaagacaatggggaaaatgtttccagggcatgtcagagacccttgtagcagtcccttccacagagggccagaggtttagaaggaaaaattggttttgtgggccaggcccagggtccctctgttttgtgccgtctaaggacttggtgccctgcatcccagtcgctccagctgtgactaaaagggaccaagtcagaggctcaagctgttgtttcaaagggtggaagccccaagccttagcagcttccatttagtgttgaacttgcaggtgcacagaagtcaagaattgaggtctgggaatctctgcttcgatttcagaaggtttatgaaaatgtctggatgcccaggcagaagtktgctgcagggacagagccctcatggagaacctttcctagggcagtgcaaaagggaaatgtggggttggagcccccatacagagtccctaatgaggtaccacctagtggagctgtgaaaagagggccaccatcctccagaccccagaatggtagatccactgacagcttgca

SEQ ID NO: 871625 - DNA, 525 bp, Homo sapiens
acagccaaatgcaagagatacacagggcagggtgtggggctatgcagagtgttcatgctctctcagggcacacctcctgccagacccccagtgtgagacagccaagtataaagggatcaccggaaaacctccaactggcctgcacactgggaggagtgtgcactggggtggagcctctggaagttcatgctgtttgcagggggaggagcctggcctcttttgttcctgggtgaacctggaatttaatctgtgaggcaggaaactggccagcaggactctctctgctgagagtttctgttcctccccacctttttttcccttttcgcccaatacgttccatttttctcacccttcaaagcatctgcgagcctaatctttcctggtsgtgtgacaaggaccctaaggagaaagtcctacaacagatgtgtgtgccaactcagaagcaatctgaaccccaccatttaagggtttttatggagatttcattacgtggagctggtggactaaatcactggccattggtga

SEQ ID NO: 871626 - DNA, 637 bp, Homo sapiens
ggaaaaaaaaaatgttgtaagaaatgttaacatagtgatatggtttggttgtgtccccccacctaaaatctcatcttgacttgtaatcctcacctgtaaagggtgggaccaggtagacataattggatcatgggggcagttcccccctgctgttcttgtaatagtgagtcgcatgagatctgatggttttgtaagcatttggcatttcccctgctttccctcactccatcttcctgccctgtgaagaaggtgcctacttctccttgccttccaccatgattgtaagtttcctgaggcctccccagcaatgcagaactgtgagtcaattaaacctctttcctttataaattarccaatcttgggtatttcttcatagcagcatgagaatggactaacacagatagcatggaagtatttaattatgagttaataaaatattggacaaatactggaagaaaataactatacacaaaaaaataaaattggaaattgctcaaaggcaaaactctggctagtagcatagtgaaatacacagaagataaaactgaaaaaaaagcaaatattatgaatagatgaaaatatgagtttaggattagaaagaaaatgagcgacatgggagaaaaacaaattaccataa

SEQ ID NO: 871627 - DNA, 625 bp, Homo sapiens
attcaatatatatgtattgcccacctactctgggcactaagcactgaggagttaatggtgaataaaatcaaatcattcccttccttcatacaactcataatctagaggtaggtgggtgtgtgcagatgttagcaagtaatcacaaaaataaaagcataattacaaactggttctataaacaaaatgattctattacagcatataatagggagacttggacacagtcaaaatagtcaggatattgatttgagtattttctttccaaaagtccaaatagtaattgatgaagcaaggcaacattagatttgtgtccaaataatatgatctctgcagacttgggctttccttgagatttttccaaatgatgtctttggctaaatctaaccagacaagacaaaakaacttgagagcaaaaatggaattcagagatctagtctaaccctcttattggatagatgtggaaacaaatcatgagagagggtgagtggcttgcccctgcttgttttcactcagtggcaaagatgaaattggaacccattatgctaaaatcctgtccagaggttatccttcttcatattattctgggtctggtttatctaacgttatctactctgatgcactaagg

SEQ ID NO: 871628 - DNA, 638 bp, Homo sapiens
gaataaaacccatggcacgatacacaaaaccccaacccaccgttccagactctccttccaccaattcctaccatacacctgtatatcagccacatagcccaccacaatctttcattctttcatcattgtgccatgctgtgtcgtatcttgaaaacacttccactattctctatttgacacattaatcattgartatcaaacttaaatgtcatcacctccaaccaatttaattgattcaatgtatatgttcccttgaaaatgcatatttatctctagcacacgtgctttgtaacggcttcatgttcatctgttttcttccctaaaacttgactttccataatgaaaatcaagtggtatatctttatatccccagcacacaacagagtctgtcaaatgatggttcctcaacaaagtgtttgttgattgaacaaataacctacaccatacatttgagcatatcttgatttttttacttgtactgtccaataattaagtgtatgtcatctatgcattattgcctttgattactcacaagcatgatgtgctgcaggtattatttttaattacctgtatactaccttggtcagtgttcagaatttacatttgatgaactatcttttttgatattatcttctggt

SEQ ID NO: 871629 - DNA, 628 bp, Homo sapiens
ctgaacatcacggaataaagtgggggagttgagcaactgtgccattaagccccaaaacatctttattaaggcaatccaagttaaagcaaaacttgggtttgctaatttgtccaaatgactacagtgattacagttgtgtaaaattagttttctctatattcagttgaattctcaataaaggagcttctcctttcctccccatgcttggaaatttacttatactacaaagtaatccagacaygatggcacaatacttaaggatatgactgaattgaactcaagtcctataccagtctctgttactctttggcaacacacagatgcagtccttccacctgtcctcatgtcctcaaagggtctcacttctggactcttcatctactgttacttctattctcttttttctcagacactattcaacttctgagtctagtgggtagtgaggccttctaagcctctaatagttcccatactgtgctttagcttctgaaacataagattacatattttaacaatttattattccatagcatcagaatctgataacacctactcctatagcacccaccacattctgacattccgtcttcccccagactatgttttacttgaaagcgaaaacctgtct

SEQ ID NO: 871630 - DNA, 632 bp, Homo sapiens
gtggatcacctgaggtcaggagttcgagaccagcctgatcaacatggagaaaccccatctctgctaaaaatacaaaattagctggtcatggtggtgcatgcctgtgatcccagctactcgggaagctgaggcaggagaatcacttgaacccaggagagagaggttgcggtgagctgagatcacgccactgcactccagcctgggcaacaagagtgaaactccaactcaaaagaaaaaaaaaaaaagccttgaaaatataaacaagactggtcctgtgaatgcgcgtttgtggtttcaagaggactaattaggtaccgtatgggttcacatgtctatctacataaataagtacccaaacaaccttaagttatctgtgtttcagtgtcaacactgcacaccaaaaaggggaatgtgtactggtgatagttaaaggtcattctaggtctcaatgacatccagaaaaaagtctgtgctcytaaggacagggcacccatccaactgtgtcctttgtttcaaaattcgtccaaacctgtctaacccaggtcattccatttactttgtctgtctccttggcaggcttaattttcatttctgtatctacttttcttagtataacttattttcatattaaa

SEQ ID NO: 871631 - DNA, 602 bp, Homo sapiens
aaaaaaaaaaaaagcccaggaccagatgtgttcacagctgaattctatcagaggtacaaagaggagctggtatcattccttctgaaactatttcaaacagtagaaaaaaagggactcctcgctaactcattttataaggccagcctcatcctgataccaaaacctggcagagacacaacaaaaaaagagaatttcaggcccatatccctgatgaacattgaggtgaaaatcctcaataaaatactggcaaaccaaatccagcagcacatcaaaaagcttatccactgatgattaagtcggcttcatccctgggatgcaaggctggttcgacataygcaaatcaaaaaaatgtaatccaatcaccgtaaacagaaccaatgacaaaaaccacatgattatctcaatagatgcagaaaaggccttcaataaaattcaacacccctttctcccaaaaactctcaattgactaggtattgatggaacgtatctcaaaataataagagctatttatgacaaacccacagccaatatcatactgaatgggcaaaagttgaaagcattccctttgaaaactggcacaagataaggatgccctctctcac

SEQ ID NO: 871632 - DNA, 606 bp, Homo sapiens
aatgttgtaagtgctgtcacagagatacacaggttcagaatagtgtacccttagtgagacatgggctcaggagctgaactactcagattcaaatgcggcttccataaccatctagacacacaacctcacatatgtttargcagcttgtctcatttcctcaactgtaatggaaataaggaaagtgcagacttcataaggctcttgtgagaatcaatgagacgatgcttgcaaggtgtctggagagctctcagcctatggagagagctcagtaagtattcagggatctccgttattatgcaatggaagcacaaagaaggaaataactaaaagcggctaactcctacccagaggggtctgggaaggcttctcaaggaggtgacaaaagttgaatcctcttctgggaaggagggaggggagaggcagtccagggggaaggagtggatagccaaaaatcctgagggtgatggggaacccagggaagttggtgagcaagaaaatgacacaaactgatgtgtgttttagaagaatttcttgagtagccatgtagaaaacagattggaacagaaggaatctgaaggcagagagaggagaggagctatgatgctg

SEQ ID NO: 871633 - DNA, 636 bp, Homo sapiens
aacaaatgtgcactacaacaaactccagaaagggtctgggggtgaagtttggatataaatttctcccttctgtaaagaggacccaagagtaaatacttgtactgttttccccttggagtatcaagaaggcaagggtgtaaagtgggaatataaatgctagcatgccttatctagatcytaaagggctaatgatccctgggattttgttgcctaagtgatgaggaagaggctgtggttcctttgggctataggaggcctggaagttagtcaggagtgacagccagcaggacaggtaatcaccaagaggtcccctgggagggcgaccagattaaatgccaaggaaagggcgtggcctgtctatggaaacataaaggtgtggctacaattgccatggcaatgacctcagaagagtcagtggctatgcactagagtaatgccatcttcattcacacctctagaatggaagccaagtcagctcttcagaaaatgacagacatgtcccccagtgtcatgatgctgtgtaagtctcccctggaccaacaagctcccctggaagtaaaggcgaaggaaaaatgggaggggcagcaatacttaaactgagtaagttttaaaccagggtagacttggtttagatta

SEQ ID NO: 871634 - DNA, 606 bp, Homo sapiens
cagtcattcttgcttatgtacacattaacacataacgtatatataacatgttcagtattcagctagacacagtaatttaaactaggctgtggcaatgtggaacatagcagtaatggtctttaatatcatttttaaattgatacaacaaatgcttactgtgcacctttgtgtgctaaaatgttgattagcatgtgtttgttatttttattattactgagtttttgctatttagttctatgcattttaacacatatatagatttttgtaaccaccacyacaattgggatactgaaaagtgctataagccaaagaactctatcctatcacaccctcccctaacccttaatccatagaaatcactgttttcaaccaccatagttttattttttgaaattatcataaaaattgaattacacaatataaacttttttgagattggcttctttcactcagcataatgcctttgaaattcatccagattgttgcttatgtcaacagtttattattttttttagtgctgagtagtaatcagttatatatctgcaccgtagtttgtttctctattctccaactgaaggatgtttagtttgttttcagtttttggtg

SEQ ID NO: 871635 - DNA, 613 bp, Homo sapiens
atcccttctttataccttacacaaaaattaattcaagatggattaaagacttaaatgttagacctaaaaccataaaaaccctagaagaaaacctaggtaataccagtcaggtcataggcatgggaaggacttcatgactaaaacamcaaaagcaatggcaacaaaagccaaaatggtaacctaattatactaaagagcttctgccagaaaaagaagctaccgtcagagtgaacaggaaacctacagaatgggagtaaatttctgcaatctacccatctgacaaagggctaatattcagaatctacaaataacttaaacaaatttacaagaaaaaaacaaacaaccccatcaaaaagtgggcaaagcatatgaacagacacttctccaaagaagacatttatgcagccaaaagacacatgaaaaaatgctcatcatcactggccatcagagaaatgtaaatcaaaaccacagtgagataccatctcacaccagttagaatggcaatcattaaaaagtcaggaaacaacagatgctggagaggatgtggagaaataggaatgttcttacactgttgatgggagtgtaaactagttcaaccattgtggaagacagt

SEQ ID NO: 871636 - DNA, 613 bp, Homo sapiens
atcccttctttataccttacacaaaaattaattcaagatggattaaagacttaaatgttagacctaaaaccataaaaaccctagaagaaaacctaggtaataccagtcaggtcataggcatgggaaggacttcatgactaaaacaccaaaagcaatggcaacaaaagccaaaatggtaacctaattatactaaagagcttctgccagaaaaagaagctaccgtcagastgaacaggaaacctacagaatgggagtaaatttctgcaatctacccatctgacaaagggctaatattcagaatctacaaataacttaaacaaatttacaagaaaaaaacaaacaaccccatcaaaaagtgggcaaagcatatgaacagacacttctccaaagaagacatttatgcagccaaaagacacatgaaaaaatgctcatcatcactggccatcagagaaatgtaaatcaaaaccacagtgagataccatctcacaccagttagaatggcaatcattaaaaagtcaggaaacaacagatgctggagaggatgtggagaaataggaatgttcttacactgttgatgggagtgtaaactagttcaaccattgtggaagacagt

SEQ ID NO: 871637 - DNA, 613 bp, Homo sapiens
atcccttctttataccttacacaaaaattaattcaagatggattaaagacttaaatgttagacctaaaaccataaaaaccctagaagaaaacctaggtaataccagtcaggtcataggcatgggaaggacttcatgactaaaacaccaaaagcaatggcaacaaaagccaaaatggtaacctaattatactaaagagcttctgccagaaaaagaagctaccgtcagagtgaacaggaaacctacagaatgggagtaaatttctgcaatctacccatctgacaaagggctaatattcagaatctamaaataacttaaacaaatttacaagaaaaaaacaaacaaccccatcaaaaagtgggcaaagcatatgaacagacacttctccaaagaagacatttatgcagccaaaagacacatgaaaaaatgctcatcatcactggccatcagagaaatgtaaatcaaaaccacagtgagataccatctcacaccagttagaatggcaatcattaaaaagtcaggaaacaacagatgctggagaggatgtggagaaataggaatgttcttacactgttgatgggagtgtaaactagttcaaccattgtggaagacagt

SEQ ID NO: 871638 - DNA, 572 bp, Homo sapiens
gggacatctgccccagctaaacatggatgtttttattttcatttcctaatctacccatcgctttgagaacaaactctgtctagactttcttccctaagttctaaactgggtttggaatatataaaaacattatctatctttgaattcctgatgtttcaaaccctrcgtgggagatgcttaataaatatttatgaaaaaaagaatgagcttaaaatggattagaagattagattcttcaggtaaagaacttcataatcaactacccatggggactttcatattatccactgttttgctatgtcttggaggtctactatggtactgcattccatgtattgttttgtgatgttgatttgcacaggcttgtactgtgcagtggagtctgagtgtaatgtttggcaaataggagggatctttaatttgctttcaatgattcaaacatatttccataacaactgttttgtttgcttccttgttttgttttatttttagtaatttaggtttgcttaatcacagactggtctgttatatcttgcatatttgaatttttatacagcttctcttttactgta

SEQ ID NO: 871639 - DNA, 630 bp, Homo sapiens
ctcttctgacttgtagggtttctaccaagagatccgctgttggtctgatgggcttccctttgtgggtaacccgacctctttctctggctgcccttaatattttttccttcatttgaaccttggtaaatctgacaattatatgtcttggggttgttcttctcaaggagtatctttgtgttggtctctttagtttctgaatttgaatgttggcctgccttgctaggttggagaagtactcctggataatattctgaagagtgttttctaacttggttccattctccccatcactttcgggtacaccaatcaaacgtagatttggtcttttcacatagtcccatatttcttggaggctttgttcatttcttttcactcttttttctctaatcttgtcttctcrcttttttttattaatttgatcttcagtcactgattccctttcttccacttgattgaattggctactgaagcttgtgcatgtgtcaagaagttcttgtgctttggttttcagctccatcaggacatttaaggtcttctctacactgtttattctctttatccattcatctaaccttttatcaaggattttagcttccttgcagtgggttagaacacgctcctttagctcag

SEQ ID NO: 871640 - DNA, 637 bp, Homo sapiens
caattttattgttgtatgaacattcagaatatatttacacaaacctagatggtatagcctactacacacccagcctattgctccttggctggaaacctgtacagcatggtactgtactaaatattgtgggcaattttaacctaatggtaggtatttgtacatctaaacttggaaaatgtatagcaagtcatatgcaactgcatatgaccaccagttgcatatgcagtctgtctttgatcaaaacttggttatgcattgcatgactatatatatatacacacacacatataaatatatacaaatatgtaaatatttatgyatattttatcccactttccccctgaagtgggaggtttagtttgatatatactactacatcttggctggagttggaggtctcagtacttcatagcagtaatgaatgctgtgggtttgcagtaacttcactgaactgtttatctgccacaactacaaaagatggcttattctctttaagttatggagccctattccttttaatttgtgtgttagataaaatctaccacgtgtctatgggcaaaaccaaagtctgaatctctaaaatctaaggccataatcaaaactaggtaatttatcaatctagagtcatataatgggg

SEQ ID NO: 871641 - DNA, 614 bp, Homo sapiens
ttgttaaattcgaaaatacattctttggtatttatttgacctcttggtggtaatatagtgtaagagcacagactctggagccaaactgcctaggttcaaatcttagctctattactttctaactctgtgactttgggcaaatgacttaactctctcatgcctcaaagcagaatcctttgtaaggtttatttatatagtggtgtaaagagtacttacttcaaaagctttggtcagtgtgagaaataagctcctaacaaagaaagtgttatgtaatagttattatctggtacctctgatcacawcatttttgaaaatcacttgaaatctgcctaagtttcattctgcctttgatggctccttattttcatctccctacttcaggcttcctccctaatatatcttttatgccaatattatgatcacttgaaactataaatctgatgccatccttggccactaccattaagatggtctaaactcctcagcatgatagacaagtccctttatgatagtgtacccatctagttctcattcctcaagtctcctctgttgtctatgcttaccctatgggctaagctgaatcaagctgttacatttccaaaacatgcctcact

SEQ ID NO: 871642 - DNA, 628 bp, Homo sapiens
gctaacatttctaagattctccacatagtagagactactatgaagttaaagctatcaggatttatatttcaatagacataggaaagttgtaactaaaatacaataagtactacaaaaaaaaacgcaagtaaattaagctttttagtattttctggcaagttttttcacccccaaggacatttgtaatgttgttatcttcttataacagttaactaaacacttagagaaatagccagatagacacaagctagaccatattaaaatatarggcatattttaataataaacacaaactctccatttgacataataaattctgatcaaacttttcacttcttgaaatttcagaaaaaactattttgcaatccggctgtttcttccttaaagaatgcttttggaatatttggagttgcttaatagagactggttttgattgggaaacatggcgttacttaataacacaggcatgacagccacgtctgaattagcaactgatcacatgagtaagaaaaacatctagtgacggaagaagagtcagggactgagaaataaccatgacaatgcacagggcatctttttacagagcctacaagaatatacacttcactggacagggattttaaattat

SEQ ID NO: 871643 - DNA, 615 bp, Homo sapiens
aaatgttaagggcagccagagagaaaggccaggtcacctataaagggaaacccatcagactgacagtggacctctcagcagaaactctacaagccagaagaaattgggggccaatattcaacattcttaaagaaaagaattttcaacccagaatttcatatacagccaaactaagcctcagaagcaaaggagacataaaatcctttccagacaaacaaatgctgaggaattttgttaccaccaggcctaccctgcaagagctcctgaaagaagcactaaatatggaaaggaaaaactggtaccagccaaaatgtaaaagggttaaatgccccagttaaaagacacagcctggcaaattggataaacagtcaaggcccatccrtgtgctgtatgcaggagatccatctcacgtgcaaagacacacataggctcaaaataaagggatagaggaaaatttaccaagcaaatggaaagcaaaaaaagcaggggttgcaatcctagtctctaacaaaacagaatttaaaccaacaaagatcaaaaaagacaaagaaggcattacataatggtaaagggaacaattcaacaagaaaagctaactattctaaatatatatac

SEQ ID NO: 871644 - DNA, 616 bp, Homo sapiens
gagagagccttcatttcaaaactgtatttgccccttttgctttttaaattacctcttctttctttattgccctgtaaatgtgggtgcctcctggttgagtttagaattaaaattagtatgagtcctagtaaatatatattaatgtatcttacatatatttatttagtgtaatgtaacatattacattacgtataatatgtaatgtatatgttcaatgtaatatatatttaatcatgtaatgtattaatattatacattactaatttcacactaacattgtctattatatcataatagattttatatataatatagagttgctttaaccacttgcaactctttccaaaccattaaatatacaaacctctctctatatacatacatacatagaatccgctctctatatagagagagaaacctatctctctatatatagagacatgtacacacatatgtatasatagagacatatacacatgcacatatatgtgtatatgtgtatgtgtgtatatacatatatatagagagagaaagagttgctttaaccacttgcaactctttccaaaccattaaatatacatctatctgtgtgtgtatatatatattatatatgtgt

SEQ ID NO: 871645 - DNA, 654 bp, Homo sapiens
tttctttataatagaacaatttctattcctttgggtatatacccagtaatggaattgctgggtcgaatggaatttctgtctttaggtctttgaggaattgccacactgtcttccacaatggttgaactaatttacactcccatcaacaatgtaaaagcatttctttttctccacaacctcatcagcatctgttattttttgacttcttartgatagccattgtgatgggcgtgagatgacatctcattggggttttgatttgcatttctctaataatcagtaatgttgagcttttcatatgcttgttggctgaatgtataccttcttctgaaaagtgtttgttcatgtcctttgcccactttttaatggcgttgtttgtttgttttgtaaatttgtttaagctccttatagatgctggatattagaccttcgtcagatgcatagtttgcaaaaattatctcccattctgtaggctgtctttttgctgtgttgatagtttcttttgctgtacagaagctctttagtttaattagatttgatttgtcaatttttgcttttgttgcaattacttttggcatcttcatcatgaaatctttgtcagtgcctatgtcctaaatggtattgcctaggttttcttctagggtttttatagtt

SEQ ID NO: 871646 - DNA, 654 bp, Homo sapiens
tttctttataatagaacaatttctattcctttgggtatatacccagtaatggaattgctgggtcgaatggaatttctgtctttaggtctttgaggaattgccacactgtcttccacaatggttgaactaatttacactcccatcaacaatgtaaaagcatttctttttctccacaacctcatcagcatctgttattttttgacttcttagtgatagccattgtgatgggcgtgagatgacatctcattggsgttttgatttgcatttctctaataatcagtaatgttgagcttttcatatgcttgttggctgaatgtataccttcttctgaaaagtgtttgttcatgtcctttgcccactttttaatggcgttgtttgtttgttttgtaaatttgtttaagctccttatagatgctggatattagaccttcgtcagatgcatagtttgcaaaaattatctcccattctgtaggctgtctttttgctgtgttgatagtttcttttgctgtacagaagctctttagtttaattagatttgatttgtcaatttttgcttttgttgcaattacttttggcatcttcatcatgaaatctttgtcagtgcctatgtcctaaatggtattgcctaggttttcttctagggtttttatagtt

SEQ ID NO: 871647 - DNA, 590 bp, Homo sapiens
cttaactgatagacctagaaatcatacttttctttgcaaatacatactataaatcttaaactaggaattcttcttcctctcaagaacagtaatttgttgattatttttaagtcaatactgatgtatacctgtcttgattgttttgatgccaatttataaatttctttataccttagccattgtcaaagctaactatattaatctttactccattagagtactgaggccacacccaagtacttattatggaactgaattagcaagctacttaatttagggtgtgtgtgtgttgagtactcttagtactctgttttttagtgtacatatatgtgagaggaagcttttattagtacaaaatgtgcaagggaactacactckcctttacaaaaattaaatctaattaaattaaaaaatatattcatgccccgttgcaaattatttaaatgttgtttaaagtgtgtggcaatttcacaaacacagaacatggtagatattgtcatttcccgcaacatatttaaatatgggcttccccctactttatatgctagagctgaatatcaaaggggaaggctctatcagtcagttttttt

SEQ ID NO: 871648 - DNA, 605 bp, Homo sapiens
aataattttattccgatcactgccaaaaacattgattttatttcagtaaaaattatgattccaaaacctgttgaaagctaaaactaaataatgcaagtacaggaaatgtccaccacgtaaatagctgtataatttgataaaaaagaaaaattacaaaacaatgataataagaaggtgaagtgagaggcaatgaaagtttaaatgtttaatcatttgtttcttctctaaaatgactctattatgtataatcttcatgtttaataaccaaaaaaaatagttttctggagtccaaagaggctatccaaagtgtgattagaccacaaaattctgcctacgactatgacagtaaacataccagtgttttctatttattttctttttgtttttcacaggtgttaagtasacaatttgagacacagaataacttgaaaaatggcatattgtctgtacacagagatgtacaaaacccagatttctgtccaatatgataatctcattccttggcaatatttaaatatgcacaacagctgcaactattcccagatctgactaacaatttatccacggagagcaactttcatcaggaagaaacactgagaaaatga

SEQ ID NO: 871649 - DNA, 574 bp, Homo sapiens
aaatgatctcttttgactccagatcttacatccaggtcacactgatgcaagaggtgggttcccatggtcttgggcagctccatccctgtggctttgctgggtatatccccctcctggctgctttcacaggctgtcattgagtgtctgtggcttttccaggtgcaaggtgcaagttgtcagtggatccaccattctgggatctggagaaaggtgtctctcttctcacggccccactaagaagtgccccagtggggaatctgtgtggaggctcagaccccacawttcccttctgcactgccctagcagaggttctccgtgagggccctgctcttgcaacaaacatttgcctgggcattgagttgtttccataaatcttccaaaatctaggcggaggttcccaaacctcagttattgacttctgttcactcgcaggctcaacaacacgtgcaagctaccaaggcttggggcttccaccctctgaagccacagcccaagctgcacattgacccctttcagccttgggtagagcgactggggcacagggcgccaagtccctaggcttcacagagcatgg

SEQ ID NO: 871650 - DNA, 574 bp, Homo sapiens
aaatgatctcttttgactccagatcttacatccaggtcacactgatgcaagaggtgggttcccatggtcttgggcagctccatccctgtggctttgctgggtatatccccctcctggctgctttcacaggctgtcattgagtgtctgtggcttttccaggtgcaaggtgcaagttgtcagtggatccaccattctgggatctggagaaaggtgtctctcttctcacggccccactaagaagtgccccagtggggaatctgtgtggaggctcagaccccacaattcccttctgcactgccctagcagaggttctccgtgagggccctgctcttgcaacaaacatttgcctgggcattgarttgtttccataaatcttccaaaatctaggcggaggttcccaaacctcagttattgacttctgttcactcgcaggctcaacaacacgtgcaagctaccaaggcttggggcttccaccctctgaagccacagcccaagctgcacattgacccctttcagccttgggtagagcgactggggcacagggcgccaagtccctaggcttcacagagcatgg

SEQ ID NO: 871651 - DNA, 665 bp, Homo sapiens
aagacacaatgagaacacttggacccagggtggggaacatcacacactggggcctgtcatggggttgggggctgggggagggatagcattaggagaaatacctaatgtaaatgacgagttaatgggtgcagcacaccaacatggcacatgtatacatatataacaaacctacacgttgtgcacatgtaccctagaacttaaagtataataataataaaaaaattgatataccttttaataaaatataaatagcaaaaaatttttttcctcccattctgtaggttgcctgttcactctgatgatagtttcttttgctgtgcagaggctctttagtttaattagatcccatttgtcwattttggcttttgttgccattgcttttggtgttttagtcatgaagtccttgcccatgcctgtgtcctgaatgatattgcctaggttttcttctagggtttttatggttttaggtcttacatttaagtctttaatccatcttgagttaatttttgtacaaggtgtaaggaagggattcagttttagctttctacatatggctggccagttttcccagcaccatttattaaatagggaattcctttcctatttcttgtttttgtcaggttggtcaaagatcgtgtggttgtagatgtgtggtattatttctg

SEQ ID NO: 871652 - DNA, 665 bp, Homo sapiens
aagacacaatgagaacacttggacccagggtggggaacatcacacactggggcctgtcatggggttgggggctgggggagggatagcattaggagaaatacctaatgtaaatgacgagttaatgggtgcagcacaccaacatggcacatgtatacatatataacaaacctacacgttgtgcacatgtaccctagaacttaaagtataataataataaaaaaattgatataccttttaataaaatataaatagcaaaaaatttttttcctcccattctgtaggttgcctgttcactctgatgatagtttcttttgctgtgcagaggctctttagtttaattagatcccatttgtcaattttggcttttgttgccattgcttttggtgttttagtcatgaagtccttgcccatgcctgtgtcctgaatgrtattgcctaggttttcttctagggtttttatggttttaggtcttacatttaagtctttaatccatcttgagttaatttttgtacaaggtgtaaggaagggattcagttttagctttctacatatggctggccagttttcccagcaccatttattaaatagggaattcctttcctatttcttgtttttgtcaggttggtcaaagatcgtgtggttgtagatgtgtggtattatttctg

SEQ ID NO: 871653 - DNA, 541 bp, Homo sapiens
ccagtctctttgctaaagcataacaagagccacctttgctccagttcccaacgagttcctcatcttcatctgagagcacctgaggctggacttcattatccatatcactatcaacattttggtcaaagccattcaacaagtctctaggaagttccaaackttcccacaccttcctgtcttctgagtcctccaaatacctaggaagttccaaactttctcacatttttctatcttctttgagtcctccaaactgttccaacctctgcctgttacctagttccaaagtcacttccatatttctgggtatctttacagcagcaccccactacccagtaccaatttactgtattagtctgttcttatgcttctaataaagacatacccaagactgggtaatttataatggaaagagatttaattgactcacacttcagcacagctgggtaggcctcaggaaacttatggcagaaggggaagaaaacgtccttcttcacatggtgacaagcaagagagtgtgtatgtgcaggggaactgcccttta

SEQ ID NO: 871654 - DNA, 590 bp, Homo sapiens
ctggtcatcagagaaatgcaaatcaaaaccacaatgagatactatctcaccccagttagaatggcgatcattaaaaagttaggaaacaacagatgctggagaggatgtggagaaataggaacacttttacactgttggtgggactgtaaattagttcaaccattgtggaagacagtgtggygattcctcagggatctagaactagaaataccatttgacccagagatcccattactgggtatatacacaaaggattacaaatcatgctgctataaagacacatgcacatgtatgtttattgtggaactattcacagtagcaaagacttggaaccaacccaaatgtccatcaatgatagactggattaagaaaatgtggcacatatacaccatggaatactatgcagccataaaaaaggatgagttcatgtcctttgcagagacatgtaagaagctggaaaccatcattctgagcaaactatcacaaggacagaaagccaaacaccgcatgttctcactcataggaaggaattgaacacttggacacagggcaggtaacatcacacactggggcctgtcgtggggtggggt

SEQ ID NO: 871655 - DNA, 590 bp, Homo sapiens
ctggtcatcagagaaatgcaaatcaaaaccacaatgagatactatctcaccccagttagaatggcgatcattaaaaagttaggaaacaacagatgctggagaggatgtggagaaataggaacacttttacactgttggtgggactgtaaattagttcaaccattgtggaagacagtgtggcgattcctcagggatctagaactagaaataccatttgacycagagatcccattactgggtatatacacaaaggattacaaatcatgctgctataaagacacatgcacatgtatgtttattgtggaactattcacagtagcaaagacttggaaccaacccaaatgtccatcaatgatagactggattaagaaaatgtggcacatatacaccatggaatactatgcagccataaaaaaggatgagttcatgtcctttgcagagacatgtaagaagctggaaaccatcattctgagcaaactatcacaaggacagaaagccaaacaccgcatgttctcactcataggaaggaattgaacacttggacacagggcaggtaacatcacacactggggcctgtcgtggggtggggt

SEQ ID NO: 871656 - DNA, 587 bp, Homo sapiens
ctagtcagttaataattaacttctgttttcaaacatattttaccatataaggtctgctccaatttattgaaaaatcctgcccagtatcagggcttcccatagcaaactgtatttcagaaccacctgagaactatttttaaaatgtctgagaatttgtgtgggtttttttttttttcaagttttctgctttacttttgtgtgcagtaactctgtggacctgggctttggaaccactgaatactttccattatcattttttttaaagttctttcatgtgtgtatgtatatttaraagttgttgctacaaagttcttgggccttctgaggactttttttttccttaggggccaaatctgattactgatggagtctccttatatccttcttgtctacaaagcccagagactactctaagacctaatcgtagaaagactatttactgcctgtctgactcctttttccttaaccttgactttatacaagttcttacagtgagtttaccctcacatacatactgtactactttattttagctatttttataacttattctaaaatataaaactgagtaaatactagcttctaag

SEQ ID NO: 871657 - DNA, 588 bp, Homo sapiens
ttctcactcttttcttcttaaacatatatacacatttattcttcatctatttaatgtaaagaaacctttttccctcagctttattaaggtataatagacacataaaaatatacttatttataaaatgtcattttttcatatatatatgtatagtgtgaaatgatttaatcaaatgaattaagaatccatcacctcacatacttaccacttattgtggtaagaacatttgagatctatgccctcagcaatttttaagtatacaatacattattattagctcttatcatcacactgtacaatagatctctggaaattattcatagtgtctaactgaagctttgtacacttttaacaaaacctcccaattttatcccgccacccagcccctggcaaccaacatttaattcttttcttctatgagtccaactttctcagattttgcattcaagtacratcatgtagtatttgtctttctgtgcctggcttatttcacatagtataatgtccttcaagttcatcaatgttgtcgcaggattttcttcttttttaaggctgaatagtactccattgtgtatctgtatcacagtt

SEQ ID NO: 871658 - DNA, 642 bp, Homo sapiens
gtgtttagttggaaatggggagaacagtaatttcatagcccttatgtttctttcctgtttcttttttagagaaaactatgtaatttattatagaggtgttcagttccctcctcttgtcacagttcagcgtgctcaattcaaatccaagaatgggctactatttatctctaccccataatacaatttattttgatcttaccttgtcctctgtgcactgtgggaacatgtcttttcaaattaagaatgtcggccaggcgtggtgactcacacctgtaattccagcactttgggaggccgaggcgagaggatcaggaagccaggagatccagaccatcctggccaacatggtgaaaccccgtctctactaaaaacagaaaaaaaaaaattagctgrgtgtagtggtgcgtgcctgtaatcccagctactctggaggctgaggcaggagaatcacttgaacccgggagttggaggttgcagtgagccaagatcgcaccactgcactccagtctggccacagagtgaaactccatcttaaaaaaacacacaaaacacacacaaaaaaacagagttttcagataaaaatacagcacatccatttaaatttgaatttcagatggagtggatttttttttaagtataatt

SEQ ID NO: 871659 - DNA, 609 bp, Homo sapiens
tcacctgaggttgagactagcctgaccaacatggtgaaaccctgtctctacaaaaaatataaaaattagctgggcatggtggcaggcacctataatcccagctactcgggaggatgaggcatgagatttgtttgaacccaggaggtcggggttgcagtgagctgagattgtgccactgcactccagcctgggcgacagagtgagacttagtctcagaaaaaaaaaaaaaaaaaaaaaaaaaaaggaggtctggcttgcagtaratggtctcaaaggaccttcatactttacaaatattaacacagagtactccatattagccctggatattcaaatagagccttgcctagcttgctgagattgcagaacacaaaggttttcttagtatttgtggaggctctgaaagaacttatgcctgtgagctctggagtcagtgtctggatttgaaacttgaccctgtcacttcatagctatagtttagcaagttacttaatgtctgtagtctctgtttcctcaatgtgttataataggtaattatagattttctgtattaaatgagtaaatattgtaaaacacctaggactgtgccagaacaatgataagcactca

SEQ ID NO: 871660 - DNA, 645 bp, Homo sapiens
gccttgggggcatcaggcccatgtaagtgtaaggttaccacgagggaaggagagggattacaagcaagtttatagactgaatgttgaagccaccagcctcttctcactttcaggtctcagaacctcagcagctagatgttaccttccaggaaggagatcagaagaatcttgtctgggcaatctgaccagactaggaggacaaattgaaggataatgaaattgaggatgcccaaagtaacagatcacagcactccatacgtgacatccacgatggggaagcctagccacttgcacagcactgccaatcagacttttagtttcctaatttaaaacataagcagacaactaagaattaccagaaagtcaaagatgttctgtaactgaaaacatagagactaaaacaagtggggaaataaagtwaattggagggaataaagaaaatgcaagaataagaaaacttaaaagctgtcatcagtattatctgatagctagtaaaatacattatctttatgaaacaaaagaataggagactataaaaattagcattcagatagcaaaaaatataatcttgaaaatgaaaaatatgatgacaaaagtgaaaaacttgatagaagaactggaagataaaggtgaagatatcaccca

SEQ ID NO: 871661 - DNA, 622 bp, Homo sapiens
tttcacatattcagtaaatgaagacataaatgaaaggcattgggacataaacaatagcaattaggtagatatatgtgtgtaaggtgaaagagggtataaggtctgtggaaaggaaaaggaagagggtgagatggagcaaatagcagctgactctatgtccccattccagaatgttcccaggtaggtattttatttacttcttatagaggagaaggtcactgagggagattttggagtatgttcatcttttagagtgaaaactatagaattattggtggtcatctttcctcacttyattttatttttgtttatatgtttttaggactttgcacattcataagctggagatgaattaccaaatgtatatgaaactttttcagcctgtgctttgcttttatgtccagttctagtatccagcttaaagctcccaagattacctctcacgtgtcattctccaaatttaagaattttccaagtttgtgtagctgtcagaatgtatttatttttgtgtatttgaacatttttattgtttggattttctatcatgaaataaattgtcgcttgccatgcactttagaaataatctaattgcatgaacttctgttttgttttgtttcttctt

SEQ ID NO: 871662 - DNA, 597 bp, Homo sapiens
ttcctgcctcataaagaaattgagaaagaatcaggtaacttcaaatctagcaagatacttcctaaaggactggcctgacatcatgaaaataagatttagtttgaagagcttatatcactgaaagcatcatgtctctccactcataaaataataataccatctgaacaacagtataagtctaacataggactaacatgaactcttttttttaaaaaaaatttataagacctgtatttcggaggtgagcagatcaaaatattctctataagaagttaggactgactgaagctcacatcatgttataaactggctgaaagggaacgagcctcaaatctaattcaccaggaaatgtcccatttgatacattcaaaacatttttaaaaattagtcatttggaatatgcaggacactctccagaagacagtgattattcctcagcacacctrtatttatttttcttttcataaactttgttaagaatgtggtatccagcgaattattttaaaaagtgaaaacagcaagttgggtctttaaagaactaagagaaggtaaggttatcttctggtacttgaaaacttcaccaacaattttagtagc

SEQ ID NO: 871663 - DNA, 606 bp, Homo sapiens
ttttttaaacatgtctctgtttctattctattcaatatttactattattaactcaacataaatgttactattctctaaggtcagagataggaaaatctgtgtattaagttgatgccattactcttaatggcataagccacaattacttttgcactaacctagtaatatggagggccatttgaggaccactcacaaactctattgactcaatagacatatgttctgatcataaaactttaaaaaacrctatgctcatcactgcttctatacctttgcacatgttgttctcccttactaatatgcccacattacaccctcttaattatagtgtggggtataatgggacacttatactcattagttaatacctagttcaaatgaacttcaatgtatagctttttggaaaaatttatgctgtagcttcctgttcacatacctatctccttaataaactgatctctatagctcacttaattcttctatccccagctcctagtgtaagttctggcagtgcatattaaaataaaataaaattttgttgaaagaattaacaaatagatgaaagatgagtttttaggttaagtttggccattaacttactgtgta

SEQ ID NO: 871664 - DNA, 578 bp, Homo sapiens
agcaaaagtgcacaacagatactcagtaagttttaaattattctaagatggctttctctccctttttttcctattaatctaattcctcttctctttctttctactttatcttgcctttttggattgatcaaacaaggctaactaactcattaaacccagtaagtaattacaggtcaacagtcattttatgagctacaggaatgagcaagagaggcaatccaagtgacaccatgtgaattgttttgactgaactttttggtttttaaaatcctggccttctaggactcaacttttctcctagtagcaggaaatataaggaagaccttagrgaaaggccacaaatagtacttcaaagcactgtagttccttggagaggtaggaagcagggcactaaatcgtgttgccaaggtgtacagagattgcctttctctgtatctgcctaatttgctcctggaggagctaattctttttacattttggaaatcaaagctccatggataaatactgctttttctgaccttatgtttttttttctagacttcatttaaaacatctcaaatcagatcaaagggaacaca

SEQ ID NO: 871665 - DNA, 640 bp, Homo sapiens
  misc_feature 1, 2, 3, 4, 5, 6, 7, 8, 9, 10, 11, 12, 13, 14, 15, 16, 17: n = A,T,C or G
nnnnnnnnnnnnnnnnnttgtatttcttttataccccctcccttgatataacatgtaatataaaagtgaggagtcaaataaccaatgtacaaaatattaggttactctaggaccctgatcttcacgtgatttgatttcattcattcagaatggggctgcatgtagaaagaaaattcccaccatccgaatagacattatttctcttagaattatttaatgataattaaactcatttaattgaatccaatgattcaaatcaggtgagaataaataacatatcacaattagcattaggtttggtttaaatataaaaaagcaaatttataaagactggtgattgagttataattttaacataagcccagaaaaccacagaggacaggccgggcacggtggctcatgcctgcaatcccagcactttgggaggccgaggcgggcggatcacaaggtcaagatcaagaccatcctggccatggacaaygtggtgaaaccctgtctctaccaaaaatacaaaaattagctgggtgtggtggcatgcacctgtagtcccagctgctcgggaggctgcggcagcgagaatcattatgaacaccacgcaagatggagggttgcagctgagcacgagattgcaccactgcac

SEQ ID NO: 871666 - DNA, 673 bp, Homo sapiens
gattgagcagttttgaaacactctttttgtaggatttgcaattggacatttggagtgctttgaggactatggtggaaaaggaaatatctgcacataaacactagacagaattattctgagartattatttgtgatgtgtgcattcatctcacagaggtgaacctttcttttgattgagcagttttgaaacactatttttgtgggatctgtaagtggacatttggagcgttttgacgcctatgctggaaaaggaaatatcttcacataaaaactggacagaagcattctgagaaatttctttgtgatgtgagcattcatctcacagagttgaagctttcttttgattgaacagctttgaaacactctttttgtagaatctgcatgtggaaatttggagcattttgaggcctattgttgaaaaggtaatatcttcacataataactagacccaagcattctgagaatcttctttgtgatatgtgcatttatctcacagcgttgaaattttcttttgatagagtggtttggaaactctttttgtagaatctgcaaggggacatttggagagctttgagtcctgtgttggaaaaggaaatatctacacttaagaacctgacagaagaattctgagaaacttctttgtgaaatgtgcattcatctcacggagttgaac

SEQ ID NO: 871667 - DNA, 662 bp, Homo sapiens; identical to SEQ ID NO: 860392

SEQ ID NO: 871668 - DNA, 662 bp, Homo sapiens; identical to SEQ ID NO: 860393

SEQ ID NO: 871669 - DNA, 610 bp, Homo sapiens; identical to SEQ ID NO: 860394

SEQ ID NO: 871670 - DNA, 610 bp, Homo sapiens; identical to SEQ ID NO: 860395

SEQ ID NO: 871671 - DNA, 604 bp, Homo sapiens
ttcggttgggaacttcaagttcctgaaggcactctaggcctctcttttgccattttacttgccccaggttttggcactctggacctgggataagagggtcagtactggtggtctctgaagtacctttggggtcatttttccattgtcctgattaatagccttggcttcattctgttcatactaatcttatcaaatggccacttggccacagccttgatttcctcacctgaaaatgctctttcattctctattaggatcaagctgagaatccttcasatctctaaattctgtttcccttttaattataaattccatctttaaatcatttctttcttctcatattttcctttatacactcaaaggaagccatgcaatattctgagtattttactgattagatatttcttctgccagacatccaaattcatcaccctctacttctgcctttcatgaagtcctatgacatgaccacacttcaaccaagttctttgccactctataacaaggaggggctcttctctaataattcaataccttgttctttatttccatctgagacttcatcagaattgcctttaccattcatatttctaccaacattctg

SEQ ID NO: 871672 - DNA, 585 bp, Homo sapiens
gaaaaactcaagctacccttctctaccgaggaagagatcaaaatccagcagcccgatttctcctctggaaacttgaattccaaagagataggagctgaagcactagagttttaaggagaaaggtttgggattgtcacattcccaaacattcaactgggcaggttggtttgttgttaatctgtgaactcctgtcactaaaacaaccacacactgtcatgtgtgacgaagcccactgactccaaaaaaatagcttggatgggatcaggttttgagacgcagcctgaggctgacrgtagtccctgcgtccaccccacatggccacagcctccctgcagatcagggagcacatcacgaagccttctccctagagcagcagggaggggccggctgtgcacagggtgggatccttgtcctgagaggaagactttaaaaaaccaagtctctgttctttcccacaaaaccacaaccacctcaaacaacccaatgggctttaaaaatttttcaatggtaaagagtctaaagaattacgttacacaccttttaaagcaataacaaaagccactgggtttcttttaatgggagaga

SEQ ID NO: 871673 - DNA, 674 bp, Homo sapiens
tgtagaggctcttgtgaggtaatgagtgattttacattatgcatgattgaaaacaggtgttctaatgctgcacaattctatgcatgaataattcagtttgtttagagcaagatctttaaaagaagtactgcatgggctttattatttctataaacacgaaggttattttttttaaagtatgacgattgttcctttgcagccagcttgtttatggcaatttttgtgtaattttatggatgaggaataatatcctgaaaggtaaaattgatcacacttaaaatatgtaagaagtaaaattgaaaggtctgttagcaagaggaaaacagtattaaaattcaatgttctaagtaaaaatgtctgattatttccttcctgctttgcctgctttctcatggtaacaaaacattcgtctgagggctataattagggaggggtgaactatctgggaaaatagagaaattgttttgtatctcagccctaacactaagcagagcccagacttccttaaagatagaactgatmttagtcagcagcctttctctccttagttatcatgagttcacaccctcttgtaatccactatcaggacatcactgatggagacaatcccttttgctctgattcccacttaacgttttgtctaccctggcttcatagggtcagaagtgttatta

SEQ ID NO: 871674 - DNA, 608 bp, Homo sapiens
ccctagcacagggaccctgggcctgatccacgagaccatttttccctcctaggcctccaagcctagggaggggcggctgcaaaaatctctttcatgccttggagacattttctcccttgccttggtgattaacattcggctttttgttgattatgcaaatttctgcagccagcttcaatttctcctcagaaaatgagattttcttttctatcagattgtcaggctgcaacttttccaaacttttatgctctgtttcctttttaaaactgaacgcctttagcagcacccaagtcacttcttgaatgttttgctgcttakaaatttcttccaccacataccctaaatcatctctctgaagttcaaagttccacaaatctctaaggcaggggcataatactgccagtctctttgctaaaacataataagagtcacctttgctccagttcccaacaagttattgatctccatctgagaccacctcagactggactttattgtccatatgtctgtcaacattttggtcaaagccattcaacaagtctctaggaagttccaaactttcccacattttcctgtcttcttctgagccttccaaacagttttaacct

SEQ ID NO: 871675 - DNA, 637 bp, Homo sapiens
caaaaatcatgggactatgtgaaaagacaaaacctatatttgattggtgtaccttgaagtgactgggagaacggaaccaagttggaaaacactctttgagatattatgcagaagaacttccccaacctagaaagacaggccaacattcaaattcaggaaatacagagcacaccaaaaagatactcctcaagaagagcaaccccaagacatgtaattgtcagattcaccaaggttgaaatgaaggaaaaaattttaagggcagccagagagaaaggtcagcttacccacaaagggaagcccattagactaacagcagatctcttggcagaaacccaacaagccagaagagagtgggggccaatattcgacatkcttaaagaaaagaattttcaacccagaatttcatatacagccaaactaagcttcataaatgaaggagaaataaaatcctttaaagagaagcaaatgctgagagattttgtcactaccaggcttgcctcacaagagctcctgaaggaagcactaaatacagaaaggaaaaactggtaccagccactgcaaaaacataccaaattgtaaagaccattgacaccatgaagaaactgcatcaactaacaggcaagataacctgctagca

SEQ ID NO: 871676 - DNA, 643 bp, Homo sapiens
aactactaaccactgcccaaggaaataagagaggacacaaacaaatggaaaaacattccatgcttatggataggaagaatcaatatcttgaaaatggccatactacccaaagtaatttaaaggttcaatactatctccatcaagctaccattgactttcttcacagaattagaaaaactactttaaatttcatatggaaccaaaaacagcccatatagccaagacaatcctaagcaaaaagaacaaagctggaggcatcaccctacctgacttcaaactatactacaatgctagagtgaccaaaacagcatggtactgataccaaaacagatatatagtccagtgtaacagaacagaggcctcagaaataacaccagacacctacaaacctgagagaaacaagcaatggggaaatgattccctatttaataaatggygttgggaaaactggctagccatatgcagaatactgaaactggaccccttacttatacaaaaattaactcaagatggattaaaggcttaaatgtaagacctaaaaccataaaaaccctagaagaaaacctaggcaatgccattgaggacataggcatgggcaaagacctcatgactaaaacaccaaaagcaatggcaacaaaagcca

SEQ ID NO: 871677 - DNA, 624 bp, Homo sapiens
cttagcagttgcaggagatttccagaagggcattgcagagggtgccagtgccctgccatagccccttagcacttgtcacatacatgtcagcagcttcttgttgcaagactgctaatctcccctctctgcctgagacagcatgcttggccagcacacaagaaaggacaaaaagacccaggagtggatgcccagaggagcagctctcaaccaaaaaggggtaggcatgggtagcctgagcacctcagtgtcttttccccaagtaggaaacctctaaggtatatcctacagtgtccctatgaagtccagtgatgctgaacccctgttgccaaagcagtaaygtgttcattacaacacgttccagaggttttctttcctgtcttaattccccatcttctatgagtgtttctggatagactgcctcaataaatttcttgcattcaaatcttcatcacagggtcagcttcaggaaaatctcaacataaaagaagtgatcagaatcttgaaagacatgtagaattctttctacatgttaaaaaaaaaatctgaagagggcaggatctccatagtgcacgagaagaaaatcaaagctctgttttccactaagctgcctttcctctaggacag

SEQ ID NO: 871678 - DNA, 649 bp, Homo sapiens
aatgaggagttgattcttttgaatgggcaaagaaagtggtttcttgagatggaatctactcctggtgaagatgatgtggacattgttgaaatgaaaacgaaggatttagaatactacataaatgctgtttataaagtagtggcagagactgagaagatttacccaaattttgaaagaagttccactgtggaaaaatgctatcaaacagcatcacatactacaaagaaatactttgtgaaagaaagaattaataatggagcagacttcactgttgtcttaagaaactgccacagccaccccagccctcaccaacttccactctgatcagtcagcaaccatcaactttgaggcaagaccctccaccagcaaaaagattatgactcacagaagactaagatgatcattagcaatttttagcaataaagcattttttaattaaggtatacrtatttttcagatgtagtgctgtttcatacttacagactacagtataatgtaaacataaattttatatgcattaggaaaccaaaaattctgcatgactcactttctttagctattcactttgttgtggcagtctggaacccaacccgcagtaactccaagggtatgtctatatccctgaaaattaaagcattttgcattcagg

SEQ ID NO: 871679 - DNA, 632 bp, Homo sapiens
gagaagctaaggggatggcatatctgagcccttgttgggaaaactcttaatcgcctgcaggtttaggaccaagcagggcatataagccacttcatggtttggccccttccttcttctctgttgcctaacaattttaacttcaccaatattaaactaattgcagttttccaaacctatcctactattttaccctttgatgattttctgcctgcctttttctttgttgagaatttccttactttctatctatctttgcctgacaaactgattgattctccaaagtgcaactcaagtattacctcatttctgaggatcattccttyatcccttcaagttccttcttctgtgtcatcattaactttctatgtgtggttttaatgtacttcaagtaatgtcttatacttattttctcatggctattgttccctttcagacttgataagtcctcaaggagagaatctatgtcttttaaaaaaatcttgatatttccttacagaggtcctggcacaaaatagatacccaatatatgtgcaactgaatagaaatttatgagggagtgataattatccgtgtcttcctttcagctatgactgtgtcccatgataaaagttttttggatgatgatcatttgt

SEQ ID NO: 871680 - DNA, 680 bp, Homo sapiens
gccatttgtttagtatataatagtcaatatctattttatttctagatttttcagtagtcatttggactccaaaagtcagttctgtgatgattacaaggtctttcgtatggtatcatgattttttaaccatactttataaatgatctagtgtcttataattgtatttaatactattcttttttccaacaacccatcccagtcttagaggctrttgcatccctgtcaggtagatccctattttgtctccttctaatgcacaattctaaggagttattgaagtcaaaattgtctaaactcagctttcaggctgctcccatttgaaattactagctgggacatgttggaaattacacctttgggtaagtcttctgatatctgccagtctccacaatcatgtggataagtgtggtcatattcagttattagaaaaacttcactgaaaattctaattcaaagccttttctgccttaagattataccctcctttctcttctgctctcagattcctctaaggtcagattcatgttgctgtagtccctggtctttgacgtcatgtaggtaacaagtctccttacagtggcctgcatgggcaacacgtatgagttccttggaggacctgtaggaagtctccttgatgcagagttatctgggtcttgtgttttcaagcagacgtttttgag

SEQ ID NO: 871681 - DNA, 571 bp, Homo sapiens
gacattcatttttcatagccccagagaatctgaacataaaaataatgagatattctcaaagtgttactcaaagggtcattaagataaagttcttttaaaatgtacccttaaacttgaatcctcctataaattagatatcaacctcctaaaatatacatayttaaagcatcattaatttagtgaagagttataaagtaaaattacaaaatgttacttaacaaaagaatggaatcagcttgtaccttcacagttaaacattttagtaacagctcatgtgctgataaatttctactctgatctcagaaaattacagaagctctaacactgatgtatctatttttacttttactgtaaattattaaattagttttactattgcagtgaattattaagttattttatcacatagccctggagttcaggattgtttcttggttttagtttagtaactcagtgtgactattgatttccttcattccaatattgtctttgctacctttaggatcttagagctatccagggtattgtgtactttcaagtggaaatgtcttggtcttcccttcagtaacct

SEQ ID NO: 871682 - DNA, 571 bp, Homo sapiens
gacattcatttttcatagccccagagaatctgaacataaaaataatgagatattctcaaagtgttactcaaagggtcattaagataaagttcttttaaaatgtacccttaaacttgaatcctcctataaattagatatcaacctcctaaaatatacatatttaaagcatcattaatttagtgaagagttataragtaaaattacaaaatgttacttaacaaaagaatggaatcagcttgtaccttcacagttaaacattttagtaacagctcatgtgctgataaatttctactctgatctcagaaaattacagaagctctaacactgatgtatctatttttacttttactgtaaattattaaattagttttactattgcagtgaattattaagttattttatcacatagccctggagttcaggattgtttcttggttttagtttagtaactcagtgtgactattgatttccttcattccaatattgtctttgctacctttaggatcttagagctatccagggtattgtgtactttcaagtggaaatgtcttggtcttcccttcagtaacct

SEQ ID NO: 871683 - DNA, 372 bp, Homo sapiens
cctaaattattatattatctttgtaatacagagtctgactcctttttttttttttttttttttttttttgagatggagtctcactctgtcgcccaggctggagtgcaatggtgcaatctcggctcactgcaacctccacctccaggattcaagcaattatctgcctcagcctccctagtagctgggattacaggcacccatcaccscgcgcagctgatttttttgtatttttagtagagccaggatttcaccatcttggccaggctggtcttgacctcctgacctcgtgatccacccaccttggcctcccaaagaggtgggattacaggcgtgagacaccacgcccggccctgactccatttttttttaaat

SEQ ID NO: 871684 - DNA, 657 bp, Homo sapiens
tatgtccctgcatagatatgtctgggtataatagtgatttgcataaaggtaagaaagttgtggagaagaaaagaaagtttaaaaccatatcatgtgattgtggccagatgggaaaggaagaaaattggagagaacagtcaaaatttttgttacgagacaggcctcagtaatagaaaaaaaattttctccttccttctatatattagctagacaccagtaaactgaggtctggaggaaatacattgtcatattgccaccctaaaacatgtaagagaacccagagccctcaccctagtcatcacatcactccctggttagactggaatcagtttagcacctgaaagcatggttgtgtcctgctgcacatggcaggcctcaccaaacattcaagagcctcactagccatccaacacaagaggctgtattagaattgccaagcttttctgagcatgggtgaagtgtcagaaaaccactttcaaatagaactrggaaaactagccgtgatcctgtggagaggtcagaaacatcttaacagagttagatgtaaagagtggtgtggatttatttacacttatttatacccaataacatatagatttgagaacttttaaactattctgtacttattgtacattttctttagaattgtcacaacag

SEQ ID NO: 871685 - DNA, 625 bp, Homo sapiens
tgctatgatgctcaaggaaacatgcatgatttcattagcttagctgatagtgctgtttaagcagatttatgcaggtgagtaaagaaatgaaacccccaaccctcaccgaaataagtagcttcaagtagtatatgacagtgtaaaaaactgtaattgtgggatcagctgtagttagaaatatttcaggaaaggactgttttaagaggggccttttttwagctattatatttgttcaaagaataaccaaaactgtcacatttagtaaacatctctattaattgaagttctcctgttcattataaaaaagcaatgtaaagcaatataaatatatctgcatacccatgttcactgcaccattattcacaatagccaaaaggtgaaagcaactcaaatgtccataaatagataaataaactaacaaaatgttatatatgtgtgtgtgtatgtgtgtgtgtgtgtaatattaatcagcctgaaaaaaagaaatttttatacatgttacaacatgaatgacccttgaaaacgtgctaagtgaaataagttaagcacagaagaacaaatattctattatttcaactaaaatggtatctagagtagccaaactcagaaacagaaagtagaatgg

SEQ ID NO: 871686 - DNA, 625 bp, Homo sapiens
tgctatgatgctcaaggaaacatgcatgatttcattagcttagctgatagtgctgtttaagcagatttatgcaggtgagtaaagaaatgaaacccccaaccctcaccgaaataagtagcttcaagtagtatatgacagtgtaaaaaactgtaattgtgggatcagctgtagttagaaatatttcaggaaaggactgttttaagaggggccttttttaagctattatatttgttcaaagaataaccaaaactgtcacatttagtaaacatctctattaattgaagttctcctgttcattataaaaaagcaatgtaaagyaatataaatatatctgcatacccatgttcactgcaccattattcacaatagccaaaaggtgaaagcaactcaaatgtccataaatagataaataaactaacaaaatgttatatatgtgtgtgtgtatgtgtgtgtgtgtgtaatattaatcagcctgaaaaaaagaaatttttatacatgttacaacatgaatgacccttgaaaacgtgctaagtgaaataagttaagcacagaagaacaaatattctattatttcaactaaaatggtatctagagtagccaaactcagaaacagaaagtagaatgg

SEQ ID NO: 871687 - DNA, 611 bp, Homo sapiens
actttcctctcatctgcattttacagctctgttcgtttgatgttgtctcataaagacctccatgtaacttcttaatacctttatctacacttcgccctccttctgctgttgagtaaaagtatgaaagtgatgctgcatgtgcagtcaagatatagtacacctgctattakgtttccgctttacaatgatctgctttaagacaacaacttgagcaactctgcatctaaaagcctggattccttgtgcatactttgtgtcattgtccatgatgcacaacaagctgagccccttcctgttcccacataacaacatggactttgccctactctgcttggaaacccctttccccttctgcacttgggaagtcagcaagaaactcatgcttcaaaccctagctcagagggttgagaacctagctcctctcccaggcaaatattcactcatctcatctgctcccagaatgctttttacaaacattttctaaggcccatgcccattttataattttgttttgttttcacatcggtcttcaccaaaatgcatacttcaagaccacagcttattcatttttataaccatattaccaaatactgcagctgtcacacaatgga

SEQ ID NO: 871688 - DNA, 587 bp, Homo sapiens
tccagttagctgaaggcctgaatagaaagattgacctcccctgaagaaggggcaattctgccaacagaattccatcagacttacactgcaactttaactcttccctgggtctcaggcccactgattatcctgaagattttgaccttgccagcctttacgtctgtgtaagcaaattctatatayacagatagatagataaatgatagatagatagataaatctctaatacactcattgatttgtatgctacatgatatggtttagctgtgtccccatccaaatctcatcttgaattgtaactcccacaattcccacgtcatgggaggaacctgatgggaggtgattgcattatgggggcaggtttttcctgcgctgttctcatgatagcgaatgagtctcatgagatctgatggttttaaaaacaggagtttccctgcacaagctctcttctcttgtctgccaccatgtgagatggcctttcaccttccactgtgattgtgaggcctccccagccacatggaactgtaagtccaataaatctctttcttttgtaaattgcccagttttgggtatgtctttatcagcag

SEQ ID NO: 871689 - DNA, 520 bp, Homo sapiens
gttccagtatgacaacgaaagaacacacagccatcctttttctttatttctatttctatgtattggataatttttcttttctttttttttgttgacagagtctcactctgtcgcccaggctggagtgcattggcgtgatctcggctcactgcaacctccgtctcccgggttcaagtgattcycctgcctcagcctctcgagtagctgggattacaggcacccaacaccacacccggctaatttttgtatttttagtagagatgaggtttcaccatgttggctaggctggtcttgaactcctgacctcaggtgatccacctacctcggcctcccaaagtgttgggattacgggcgtgagccatcatgcccggcttgataaatttttttctaacaaaggcgtttaactaaaacaagacacaaaccccctcctaattgcaatgaatgttttggaaataaaataagataaaattgaatattttattaaagaagaaagaggtaattaggttgcctcctttcccag

SEQ ID NO: 871690 - DNA, 607 bp, Homo sapiens
tgtagttcctgctttgggggcattaccctgcttatcattgtccctgaaatatgggaaggaaagaaaaaaaaatcatttctcttcagccagtaaaacaactccagggaaaagagatgactatttagacaacagtcagctgggtgattgtagataaaaagtctacttcccatattatgtcactcagcattcatggttgcaagcaacagaaatcaactctggctgtcttatgcaaaatggagatttttctggaaggagattggtgggaaattagaagagcagacttggagcaagggaagtcaagcatcagagacaaccacatgctggtcaggaggctgtcagtgacactgatacgtcactgctaccatcactgctctaccactgctgggtcaagctgatgtctgccaagccaccatttgctatcacatactcargatgcaacatcctgcctccctgctgaaccaggaatattggaaggatctaagctccaagtttccagagtggaggacaggcattgagaattgctttcctgccaagatcatacacactggaggagagacagcatccctcttggtcaagggggttggacgctggacaatcagaaaatgga

SEQ ID NO: 871691 - DNA, 585 bp, Homo sapiens
ctgtgtgtttcacaaacagctgcagtggttcaacaggaaagcttgggaatcccgacatagaagtctgactccaaatgtgaagttccactggatcctaagccacagaggtttggggtcactgtttggttgaaatggcaagtccatttgtcacccaaacaaagggtaattccaggaaagcatttgctggaggggatgcatttttcaagacctgctgcagcaccttcagattaggctcatttgcacacctgcatattttcccccaattttccagcgtaaccctgtgtgaatcattgcagttttgctaattgaatctgagagcacctgtttyttaatcaatattaatgcatcacatggacgcagaatttgtaatgagtcattctagggggaagaatgatgaaattcaaaaaaagtattcactattcatctgcaacctgataacttgtggccagaattccatctgggaagatgtagggcagagcaggggtaacaaacagggagccccgagacaccaggcccctccacagggctctcgaggcacttacctttctcccatttttggaaagggaaaacagtgcctataacctg

SEQ ID NO: 871692 - DNA, 594 bp, Homo sapiens
tcaaagcacattcaatgtttaggcttggaaattcagctcagcttcaagttgggctttgtggttgattatccttttccaaactgttcaaagacatcatcaatcagatttgagaatcctggaatgagtattaaactcagcacatgagtagattagagtccagcaatgaaaagaaatgtatattttgatttatttcattagggttgctttctgaagacattacagattgcaaaactgttctcctgcattaccatgatgagatcattctgcagaagtggtgctaatgtctgtatttaacagagaacgtttgcagtgatagatagaaaccaaaacataaaatctgcaaatcaatatgtttctggttatttctaagtgttacccacatttgctggagactgaatctactttcaaccarggaaaatatattagcaagaacatcctgagaattaaattataaatgtctgttatagattttcaatgtttcgcaatcatgatcttgtgaatagttatttcctgtggctttggcccattgcagtttacaattttttctttcccaatagctaactatgaagtggacggtagtaactatgatcatta

SEQ ID NO: 871693 - DNA, 621 bp, Homo sapiens
ttctcagatctctagctgcgtgctgggagaaccactactctcttcaaagctgtcagacagggacatttaagtctgcagaggattctgctcccttttgtttggctatgccctgcccccagaggtggagtctacagaggcaggcaggcaggcctcctygagctgtggtgggcttcacccgatttgaacttcctggccgctttgtttacctactcaagcctcagtgatggcaggcgcccctcccccagcctcactgccgccttgcagtatgatctcagactgctgtgctagcaatgagcgaggctccactggcataggaccctcagagccaggcgcaggatataatcttttggtgtgccgtttgctaagacttttggaaaagtgcagtattatggtgggagtgacccgattttccagatgctgtctgtcacccctttctttgactaggaaagggaattccctgaccccttgtgcttcctgggtgaggcgatgccttgccctgctttggctcatgctcggtgtgctgcactcactgtcctgcacccactttccaacactccccggtgagatgaacccagtacctcagttggaaatgcagaaatcactcgtcttctgcatcgctca

SEQ ID NO: 871694 - DNA, 636 bp, Homo sapiens
caggaggaacccatcaagtgactccactgtcaaagtagacttttgtaccatcagaatatacttttcaaaatttaaggtaaaataaatatttttcacacatgaaaatgctgaagaaattcaacaccagcaaaattcaattatttttttttaaatgtaagagctttaggcaggagaaaaataatatcatgtaaatgacataaacacttcaatcaaaggcagtgatgatcagattccatgaagaaccaaaacccaactatatcctgtgtttatgaatgttatattaagcagagagaaacaaagagattmgtgttaaatcagaagctgggaagagaatgaggtactgagatgtcaccctacatgtacagttatactctaaatagataggtgtattgatagacaggtacgtagatatatatattctagcagaaatagtgtactgagtcagagaccagagcacatagtttatttactcaaagcaaaacagaatggaaagtaacattatcacaatggtcccccatacctagcaccctgcaagtggcatgaagagaggcaaatggataatcctatctctatggtaggagcaaattacaggaaacataagtgtgaatctgagagttagtgtagaagagaggcaat

SEQ ID NO: 871695 - DNA, 582 bp, Homo sapiens
tataagattattatttctctgtttcttattaaggcattttaaaagtatatttcttctacatttaaatagttctcctaaatttataaattatagtaaatgtgttttcaaattatataggaatattaaaatatttcaagagtataaaaagataacataaaccttgtttaaaaatgcatagcacttctcccttcactctttctctctcttgctgtgccatgtgaagattatgcctgcttctccttcaccttctgccatcattgtaagtttcctgaggcctgctcagcagtgcctcctgtatagtctgtggaactgtgagtcaattaaatctctttcctccaaatttccccagtctcatgtatgtttttatagcagtgtgagaatgaactaatacagaaaattcgtgtcagataaatgaggcattgctataaagatacytaaaatgtggaagcaactaaggaacttgataatgggcagaggttggaacaggttggaaagctcagacaaagacagaaagaatactgaacgtttggaacttcctagagacttgttgaatggttctaacaaaaaatgctgatagtgata

SEQ ID NO: 871696 - DNA, 612 bp, Homo sapiens
atgtcttgggactgttcttaaaaattgataaacagtgctgatttataagaggggagaatgacagaattgcttatttactaatcttacaaaattagaagagagaaatttctagattttataaactcaggaggaatacttttaaaaaggaggaaggaagaaaaaagaataagsgttaaactcagggaagaaaggataagttaattctctttttggaacaaagggccacaactaaaataagagacaaacgacccccaacttgggaggattttgcatttgaaaatgacgaaagaattaacagaaagaaaatgggaatggtgccaaatatctttgttaagtctgaatatatggttatagcaatctctaaggtttagatggaaataatggcaaagtttggctttgtatattttatagtcctggctatctaccaagtaagactcatactaatagtgagttatcaggttgttgtttttggtgaagaataattgtataacaaactcgagtagcctttataacaaatgcgctattgtcctgtacattttattatatagtaggtgaaataacctcactagacaacggctgcccctctgccctctgagatgcgtgtctcctcag

SEQ ID NO: 871697 - DNA, 541 bp, Homo sapiens
ttgtctacaaatggaagcccatcaaactaatagtggtcctctcagcagaaactctacaagccagaagagattggggggcaatattcaacgttcttaaagaaaagaactgttaacctagaatttcatatccaggcaacctaagcttcataagcaaaggagaaataaaatcctttccaaacaagcaaatgctgagggakttcattactactgggcctgctctgcaagagctcctgaaagaagcactatatatggcaggaaaactgtatcagccactacaaaacacaccaaagtataaagatcaatgatgctatgaagaaactgaatcaactggtgtgcaaaataaccaaatagcatcatgatagcagcatcaaattatcacataacaatactaaccttaaatgtaaatgggctaaatgctccaattaaaagacacggactgacaaattggataaggagtcaaggcccattggtgtgctgtattcaggagacccatcttacatgcaaagacacatataagctcaaaataaagagatggaggaaa

SEQ ID NO: 871698 - DNA, 621 bp, Homo sapiens
cctatattgaaggcaaaggccaagaaaaagattatgagtacattggcttgtggttgcaaattaaaaatgcgctaattctactgtataaggtgggccttcttaaagctcatacactcaagagtgtgagaaatatactctataatgtttytgggactcaacgtatcgataagtgcattgtttgggggtccaatgacctggggtgttctgaaatgttcctcaaacataaagaaacccaaattacagtatctcacaactccccccataaagaaataagcaacatgtttagtagacttcatttctgaagaagtggtcatgaatgacattggtgaagaggaattttcatgtgggcagagcttcaggtgatatacttggtcattcatattgtgtggcaagaatagtttccatagatgacaacatatatgaactcattggcagtggggaaagacttgctttgtttatcaggggcctagaagcagacagcttagaagactgagacagagaggtctacagaaaaggcgtgtgcataaatgaggggggtaagcaaaaagagtgaagatctttatgttaccttatgatgctttattagtcaaagttctccagagaaacaaccaatggtgtgtg

SEQ ID NO: 871699 - DNA, 630 bp, Homo sapiens
ctacaggaaaggatatgaagaaatggaaaattgaggcatgttacagaagctaggttggtaacaacaccctgctcagatggggcaccatattttaggaacaatatacacactaaatcaatataataatgtggtatctttcctcattatctaaaataagtaagcttcagaaccaagagatggaagtaggaatgactgtaattaccgttactctcagtgactgacttggtgaatgtgggcttgccatatctacaactgtagtctcttcagatctgaaagtctaggttccccaygaggatacacttctaccagggatgacggccagaatttcagcaaatttcaaggtatggctgccacataatgttagtctcctaatactaaaaacaagcagggaagaaaaaagtcactatcttggcagagatagtgactgtaatcatcagaagaaagagatagggttattattaaatgataggtaaaatgaaaaatatgtttggcatccaggtgattcattgggtcataacttagaactcgtctgccatttttgaaataattttattgatatatgattgacataaaatacaattttcctagttaaaccattcaagtcaatgattttagagtatttcattgttt

SEQ ID NO: 871700 - DNA, 599 bp, Homo sapiens
ctttttagaactgtgattaagaaggtaatgattagggatgatcagttgtctcaccagcagtctgttaggtggagctgacctgggctcatgccatctgcaaaggaacccatgggaaccagggaccattttcagcatttgaaaaggcttaacagaaactatgcttttacccaggatgaacatacaaaagctacccaaaccatcaagtttccttgcttttgtttggaattgcaaccctgtatggaaggtttcatgctgactccacgttctgattggctgtggatgacataataggagtttctgacacaggattggtctaactgtagatattgttactggagctggtaccaggtctcacttcccactacctttagaatgargttgaccttgaatgtgagtgcccttgactatggaaatgaagccactgattgtttcttgcttgctcagctatgcttattatcacacctgtggcagtgacttgatttttataatgtcattatgaaccccttataaatatggattgttgattaaaatttggatcagtattgaaatggaagaataatacacagaattaatcagtttactggtaaacaatgtaagaa

SEQ ID NO: 871701 - DNA, 552 bp, Homo sapiens
ctgcaccagaccgtggttgctccttgtggtttccaagaataaaaagatactgtagtcacattttgtttatcaatttctcagttgatggcttgtttctatcttttccctattatgaataatactactatgaacatttgtgtagaaacttttgtgtaaacatatgtttttatttctcttgggtatatatctagtgccaacattactgggccatctggtaactctatgttcaattgtttcatgaactgtcagtttattccraagctgctgcatcattttatattcccaaaagcagcatatacatgtttagaattttccaaatccttactgacacttcctaatgtctgatttttttattctagtggatgtgaagtagtatcttattgtggttttgatttggattttcctagtaaataatgatgtcagacatctttttatttatttatttattttttgctttttagccattagtatatctttcttgaaacagtatcagttcaggtctttttctcatagtttaatcaggttatttgtcattttattattgagctgtga

SEQ ID NO: 871702 - DNA, 617 bp, Homo sapiens
aataggcctctctcaaatatatatttggtcattaaatctgattttttggtattaaatctgatttttaagtatattttagcccaaagtatatatcagcaaatatgatgcagaaatagatgtttgaaaccaactgccttctactaattcrgatactaatgcatgtgcaaaatcgtgaaactcgttttcactacttttaattttggtatcgttatttatatctaaatataaaatttatcaaatttatagaaatatataagcatttaagtattttccattttaatttctaatatggtaactactgatagatataagccaagtaaacaaaagatttatatggttttcaatacatttacaactgttaggtagtcctgagaccaaaatgtttcacaacagctatagattaaagaaacataataaacaacaactgtggaaaattgtgctgatgtttccaattttttactcctcctttagcttgccatttttcatttgcctttacagtgttctcttcattgagtggagctgaattcttttctttttgtttctgagtttgattaggtgacttcacttggagaatgaaaagctagcagatctgattaaatcagaagcttacaaaaata

SEQ ID NO: 871703 - DNA, 632 bp, Homo sapiens
tggctgacaaataggtgcagttcaatgaaatggatattagagtgttatattgcagtataattgaaccactctagtaaacacaaggtaactattagtagcatactaaatattgttctgaattagatcattctattgaaatataaacatataaagaaaataaaataaatgaaaagtaatacattttaaaactatttttaaattgctttaaatgtttcaaaaatgttttaaaaactttttwaaaaaaaagaaaaaacaatattagctataaaatggtttcaattcaggaactttcctgttccataaccttgtcaaattaaataacttctctaaggttcatttacaggatggttagaagtattaaatgatagtattttcataaaacacttagcatcatgtttaatatataaaagataccacaacacaacttagaaaagatatttattattataaaatataacattctttggaacagtaaatactgtttagtgttttaaagttacccttctgacctcattttcttttttatttgtttattcacttatttatttattttttactttaagttatgggatacatgtgtaaaatgcgcaggcttgttatgtacgtacacatgtgccgtagtggtttgctgc

SEQ ID NO: 871704 - DNA, 565 bp, Homo sapiens
ccctgactctatgactattcccttcaggtctcccttctatgctgctgccataataccttcctaacatacacattgaaccacatacctcacttgctcaaaacttcagagtttttccaacaagatcctaaaggagagtctgaagaaatgaagtggaggacaccctaagacacacagctttgcctcaagtatattgtacccaccattcccactgttatatgaaaaagctggagacaaggcccacttcctagacatgcagcctgtactgtcacccagggcctcttgcttggaagagcccatgcttggtttaacgcccttctgtctccgtcttgaaattcatgataattttgaacaargagtcctgcatatttattttatcctgggctctgcaaattatgtagcctggccaggaatatctacaggcctaaaaaaacacaagctgaatgctattctgaaagatggcagctcatacacttagggtgacattggattttagattctagaagatataaataccctgggtaggggatcactgattatttgcaaggtatgtaaaagggatacagag

SEQ ID NO: 871705 - DNA, 685 bp, Homo sapiens
ctagggtttttatggttttaggttttacatttaagtttttaatccatcttgagttaatttttgtataaggtgtaaggaaggggtctggtttcagttttctgcatatggctagccagttttcccaacaccatttattaaatagggaatcctttccccattgcttgtttttgtcacatttgtcgaagatcagatggctttagatgtgtggtgttatttctgmggtctctgttctgttcacttggtctacatgtctgctttggtaccagtaccatgctgttttggttactgtagccttgtagtatagtttgaagtcaggtagcatgatgcctccagctttgttctttttgcttaggattgtcttggctatatgagctcttttttggttccatatggaatttaaagtagttttttctgattctgtgaagaatgtcaatggtagtttggtgggaattgcattgaatgtattaattactttgggtagtatggccattttcacaatattgattcttcctatccatgagcatggaatgtttttccatttgtttgtgtcctctcttatttccttgagcagtggtttgtagttctccctgaagaggtccttcatgtcccttgttacctgtattcctaggtttttattctctttttgcccattgtgaatgggagttcatttatgatttggctctca

SEQ ID NO: 871706 - DNA, 623 bp, Homo sapiens
ctttaaagccgccacaaagtgtgtgttcactcttgcactgagtgaagttcaagttcactcttgcacagagcttgcactgaggggagggatcggccaaagtaaaagtgttgggtcttcttatgacatttgtcagcatgtggcttaacctatgcatacatgtgactttctagactctcccatgtacgtgaatgattttgaatgtcttagttttccaaatactcttctccaacttttcttcctgtgctgaaagtgatctactatatgtgtaaactstaatttttgccctaagcatccgtggtttgttagttctccttgcagagtttcttaaaaatgtgcattccttatctgttctctattctagcaacacagaaaaaaacagcctttcatgagtcctttagatatcccccagacctgtctgaacagacactcgagtccattcgatgattccactcgattccatttgatgatgattccattcgagtccatttgatgattacattcgatgattattgcgttcaattccattcgatgatgattccatttgattccattcgatgattgcattcgattccattagatgatgagtccattcaattccattcgatgattccattcgattccat

SEQ ID NO: 871707 - DNA, 706 bp, Homo sapiens
ttttctctgcaaccttgccagcatctgttatattttgacatttttgtaatagccattctgactggtgcaacatggtatttcattgtggttttgattagcatttctctgatgattagtgatgctgagttttttttcatatacttgttagctgcatatatgtcttcttttgaatactgcctgttcatgttctttgcccacttattaatgcggttgtttgtttctcttgtaaatttgtttaagttccttatagacactggatattaaacctttgtcagatgcatagtttgcaaaaattttctyctattctgtaggttgtctgtttatttgttgatagtttcttttgctgtgcgaagctctttagtttaattagataccatttgtcaattttagcttttattgccattgcttttggtatctttgtcatgaaatccttgcctgttcctgtatccagaatggtattacctatgttgtcttccaaggtttttatagtttggggttttacatttaatccatcttgaattaatttttgcacacgatgtaaggaaggggtccactttcaatcttctgcatatggctagccagttattccagtaccatttattgaatagggagtcatttcccccactgcttatttttgtcagttttgttgaagattgtatagttataggtgtatgaccgtatttctgggctctctattctgttccat

SEQ ID NO: 871708 - DNA, 593 bp, Homo sapiens
cctctcccaagttatgataataaaaaatgtccctagacattgtcaaatgtcctcttggagagcaaagtgtaccccatttgagaactactattgtagaaaagaacatccaaaggtttatggagatgtgaatgctggagtagatttattatgaatgagcttcttacccacctgctagttatgtcacctgggagggtccagagtacacacacttcatcaaggctttgagaaataaattggcaaaggcagcatcaacatccataaaaaggctccatagtggcagttctctgcaaagaaataagtgatgctgccatggaaatgagccccttgaattaaataggtgatgggatcccagagcaacaaggtacaagaagtgatcagaatgatttggcctatagaaatctttggtgagaactaatttatcatggggttcctargaccataatgaactacctactaaagtcttatttgtgttgtataagcaaaataaacacataaaacccaaaaattggtctggagacagaggtccaacatgaatcactacaattgatagtcatgcttcctcaacaaattctcagacttgagtcgtattatag

SEQ ID NO: 871709 - DNA, 514 bp, Homo sapiens
ggagtaaatcaacacagtccctgatattttatctgcagtgttgatctagtggatgtttcttctctatacgtgttaataaatacaagtagaaaaaaagtttcccttatatggcaagagcagcagtacactttaactatgttgccttacttcaacctctratacaatccagtcctcaggaaccttgattgcctagcaattccaaaagatattattctagcccattgcattgatgatatcaggctgtttaggattagcgagcagatatcagactgtttaggactggtgagcagaaagtagcaaatatcttagtataccttaataaaatccatgacaggtgttgagaccacaaaattcagggcttgtagactcagtaacatttctaggagttctttagtctggaatatattgagatactccctacaaagtaagggacaagtggttttaaccactagaaaaagccataacacttaggatgcccatttggatcttgaggctatctataatttacttagcc

SEQ ID NO: 871710 - DNA, 592 bp, Homo sapiens
atttggaggacgacaatatgtgcagtaggtatatcaggagaggggcaaaacaggatattggagttatcctgaggctcagccatgtgtggagtcataactatggtgaggacattttaatttatccaaatgttattttttttctgatttgttgcttgtgttattacttgggttacagttcagagtgtaggtttaatttgagagggtcaaaacttgaaaaagttttggagacaatataaaaaatatacctgagaaatagtgattgtgtaaacaggagaggtggcagcagggacagaatagtgcaaattcaggatctagttaaggcttaatatcaatagaattttgtaataggaagtggttaggtcatgagggctccacccttatgaatgaaattcagatggacgtaataaaggagagggaagattcaaggataacacytgaatttatataggataggcaagtttgaaattttcttagccaggcaatatgcagttgattcttaaacaatacaaaggttaggggtgcaaacctccccttacagttgaaaattcatgcataacttttgactcccccaaaatttaacctactgttaatc

SEQ ID NO: 871711 - DNA, 582 bp, Homo sapiens
agtatgtctttatcagcagtgtgaaaacagactaatacagtaaattggtaccagcagagtagggcactgatgaaaagatacctgaaaatgtggaagtgactttggaactgggtaacaagcagaggttggaacagtttggagggctcagaagaagatgggaaaatgtgggaaattttgaaacttcctagagacttgttgaatggctttgaccaaaatgctgctaacaatatggacaacaaaatccaggccgaggtggtctcagatggagatgagaaacttgttgggacccggagtaaaggtgactcttgttatgttttagcaaggagactggcagcattttgcccctgtcctagtgatttgtggaactttgaacttgagagagatagtttagggtatcttgcggawgaaatttctaagcagcagagcattcgaggggtgacttgtatgctgctaaaggcatgaaaagaaaatcgcattttctgaggagaaattcaagctggctgcataaatttgcttaagtaacgaggagccgaatgttaatcaccgagacaatggggaaaatggctccagagtatgacagag

SEQ ID NO: 871712 - DNA, 597 bp, Homo sapiens
ttattaattctaatcatttatttattttttacaaattttccacatagataattatgctgcctgcaaatagtgactattttatttcctcatttctaattcttaaacttttaatttcttttctttgcctaactgctctggctagcatcccagcacaatgttcaacagaagtgatatctgtggacatttttgtctcattctcaacttcatgggtaggagaaaagaaggcttttaataayttacagttattgcgaaagtgaggtttattgtgggtttttcataaatagccttttttaaaataatgaagttctaatttattcttagtttgctaagagttgttttaaaatcatgggtaataaattttatcaaaaattttttctgcatctgttaaaatgactgtatgtttctgtcttttctgcaaatatagtgaattatattgatttttgaatgataaaaaaaaccttgatttcctataataactctaagtagttgtgatgtattttcctttttatataactctgggtttgattggcctatatttcatttttatacaactctaggtttgattggctagcatttatatttgtgagggatatggac

SEQ ID NO: 871713 - DNA, 599 bp, Homo sapiens
cagttggtagtattgcatgtgagattctcgaatagctagcatagtgtgcttatgtgggtatattcacagttctgctagtatccttagggacaactaaaacacacagcttgggaggtcgatatgatactattgtacttgaaggtctatctcttgaaagaaacatccatctcgtaaaagagtctacctcttaaaagaaatattgggattgttctgtgtggctccacaggacagaactcagggatagagagtacagagtgttaaatgttgctgcggttaaaaaataagattctaaaaattaggactctgtaaaaatgaagtgaattgtttcaccatgtaatgcgtaataacttctagatcagktggggggattcaaacatgggcttgatgaccgcttacttagttgctgtggagttgagaaggttgaactgaaggcttctgagatcccttgtaacactgagatgctgcgattcttttcagtcacagtctacttcccaccattgtaatgtcttaactggtaagtagcctcaactgcccacttgaattcttgtggttcccactggcagtcatcttcaaagattcattctttctctcaactttta

SEQ ID NO: 871714 - DNA, 607 bp, Homo sapiens
ctgtacatgttctattacactgatgactaagtatttcattttttgagcaatcacaaatattttattttgaatttcattatccacaggttcatagctagtttcagaaataaaactgatttttgaatattattctagtattctacaactttggtgaactcacttaatagttctaatagtgttttgttttgtttttttagattcctttggattttctgtgtagataattatgtcatttggaaacagggactgttttattttttcctttccaaggtgtatratttttattttattttcttgctttattgcactggctaaaatttctaggactatttgcataagagtggttagagtggatagcctggacttgtttctgatcttagggagaaaacattcaggttttgaccaccaagtataattttatctgtaaagtttttgtttttgttttgcttgtttgttttatagattctccttaccaatttaagcaatttctctgtactcctagtttttctgagagttttttgtttttttcttttgagacagagtctcactctgtcacccaggctgcagtgcagtggcgcaatctcggctcactgcaacctctgcttac

SEQ ID NO: 871715 - DNA, 607 bp, Homo sapiens
ctgtacatgttctattacactgatgactaagtatttcattttttgagcaatcacaaatattttattttgaatttcattatccacaggttcatagctagtttcagaaataaaactgatttttgaatattattctagtattctacaactttggtgaactcacttaatagttctaatagtgttttgttttgtttttttagattcctttggattttctgtgtagataattatgtcatttggaaacagggactgttttattttttcctttccaaggtgtataatttttattttattttcttgctttattgcactggctaaaatttctaggactatttgcataagagtggttagagtggatagcctggacttgtttctgatcttagggagaaaacattcaggttttgaccaccaagtataattttatctgtaaagtttttgtttttgttttgcttgtttgttttatagattmtccttaccaatttaagcaatttctctgtactcctagtttttctgagagttttttgtttttttcttttgagacagagtctcactctgtcacccaggctgcagtgcagtggcgcaatctcggctcactgcaacctctgcttac

SEQ ID NO: 871716 - DNA, 596 bp, Homo sapiens
tacgacagaccatggcacataacatgtactcaacaacagtgttaatattgtttttctcattattattatcttttaaaaattttgggggggctcctctgtttcatgagccccagcatgggtaggccttgaattttctcattgcagctctattcttcctattatgaggtaacttccttctggctttttgcagtagttggtctattattcttagtttttgatgatatggtaagttttcatcgttttctatcattttctgtgtctttttgtgtatactttatattggaargtcagggacggccatatccagggctgccagacagccagcatttaaactcctcttaatcaaacacaaaccttggaaaaccccaatttgtttatcttcagtgtctaaagtgatcaacaatagcagctccaaatgctgtgctctttcctggaagtgactgtctgggtcaatctctgaatagttttgaggcagttccataggagttacttgcacgagaccccccagtgctctgaagaaattcatctcagagctgttcaggtgttcgtgctgaccaggtaccaggtcaaagcttccagagaggaccgtcaggggc

SEQ ID NO: 871717 - DNA, 615 bp, Homo sapiens
tatagtcaaatctaaaatatttatgttacagtggaggtacacgaataacttttaactcttgtataaaagttaaaaaacaaaagtattaaaagtaactatagctataataaattgttaatagaaacacagaatgaaagtcataaatagtgacatcaataacataaaatgtgtgtcgggggaagaagtaaaaatgtagagtttttctttgtgatcaaacttcrttgttatcagcttaaaatagactgttataactacaagatcttttacgtaagtctcatagtaataacaaagaaaaacctttagcagatacacaaaaataaagagaaaggaaggaaagcatcttactataaaaataatcaatcacaaagaaaggcagatcaaaggaatagaagaactcacttcagctttaaggacaaagtgaagtaatcaaagaaagatattccatgcaaacagtaaccaaaagaatgtagaagtggtggcaatactttatatgagacaaaacagactttaagtcaaaaattatcacaggagacaaagaagaccatcaataaaaataaaagtgtaaatttattgagagattataacaattgtaaatatacatgcacccaacatctg

SEQ ID NO: 871718 - DNA, 600 bp, Homo sapiens
acaaatgttacatgaaacaactttggtaagaagtacttcaggctgaaatatacgaagctgagatgattttgcttagaatgatgtgtcaaaaaatcagcaaaaggagaagaaaagcaattctttatttttatccaaatatatcagacttcataatttagtttcaacaaaaacttcaccatatatcatccaaaccaagacattgtaagagtgaaagggagtgctaccaataattacacaggtacaacaggtataaactggaattttcctgggtaaactgggacctatgatcaacctagaaataagggttaaactgcaattacatgcagaaatcatacctttcccacgcatgtgtggaaaagataaaaaaaataccattcactcagataaggtaattttgacaacagtagcactttytcatgagatagatttctgttcacatattatccccgtcctaagccagtcacattttctaaaataatcaatttttattccacacagttactttgcattatgttaccctgtttttattctttttttttttttttttttttttttttttttttttttttttgatgttgaaatggagtctcgcactggcac

SEQ ID NO: 871719 - DNA, 669 bp, Homo sapiens
cttaataataacttctcattccacccttaatagtaaattttaaaagtttaaaatacccttaattatagctttatgaattattttaatcaattataataattagaaccaaatgttgctcactcctcctcaccccagcttctcttcctatttttttttttaaatatcattacctccgatattcttccttttgatttggcttaaagcatttctgttattcttgattcataaactaaatgcagaaaaatgtcattttatttctctgaaacttttgttaaataagacatgaatcagtcattacttcattaagtaggctcagaaaaatcttggatacttttgtcaatatgtataagaaaggatttaatcattacagtttatatatttttcaggttaattggaatattaccttgttaatttttgaaatgcttattaggcagcataaaatgttacttaaaataactttacgacaataaattattttctwttttttgtttactattcaaaaagtaatatatttaagggtaaatatcactagcaaagggatgttaaaatttgcagattatatatgaatatataatattcatgaatatgaatatataatattcatgaatatgaatatataatattcatgaatatgaatatatatcaaaatatatatatatgaatatatat

SEQ ID NO: 871720 - DNA, 669 bp, Homo sapiens
cttaataataacttctcattccacccttaatagtaaattttaaaagtttaaaatacccttaattatagctttatgaattattttaatcaattataataattagaaccaaatgttgctcactcctcctcaccccagcttctcttcctatttttttttttaaatatcattacctccgatattcttccttttgatttggcttaaagcatttctgttattcttgattcataaactaaatgcagaaaaatgtcattttatttctctgaaacttttgttaaataagacatgaatcagtcattacttcattaagtaggctcagaaaaatcttggatacttttgtcaatatgtataagaaaggatttaatcattacagtttatatatttttcaggttaattggaatattaccttgttaatttttgaaatgcttattaggcagcataaaatgttacttaaaataactttacgacaataaattattttcttytttttgtttactattcaaaaagtaatatatttaagggtaaatatcactagcaaagggatgttaaaatttgcagattatatatgaatatataatattcatgaatatgaatatataatattcatgaatatgaatatataatattcatgaatatgaatatatatcaaaatatatatatatgaatatatat

SEQ ID NO: 871721 - DNA, 669 bp, Homo sapiens
cttaataataacttctcattccacccttaatagtaaattttaaaagtttaaaatacccttaattatagctttatgaattattttaatcaattataataattagaaccaaatgttgctcactcctcctcaccccagcttctcttcctatttttttttttaaatatcattacctccgatattcttccttttgatttggcttaaagcatttctgttattcttgattcataaactaaatgcagaaaaatgtcattttatttctctgaaacttttgttaaataagacatgaatcagtcattacttcattaagtaggctcagaaaaatcttggatacttttgtcaatatgtataagaaaggatttaatcattacagtttatatatttttcaggttaattggaatattaccttgttaatttttgaaatgcttattaggcagcataaaatgttacttaaaataactttacgacaataaattattttcttttttttktttactattcaaaaagtaatatatttaagggtaaatatcactagcaaagggatgttaaaatttgcagattatatatgaatatataatattcatgaatatgaatatataatattcatgaatatgaatatataatattcatgaatatgaatatatatcaaaatatatatatatgaatatatat

SEQ ID NO: 871722 - DNA, 615 bp, Homo sapiens
ttttgcttcatcaaaaagctttaggaatgctaatgtcaaaatgtctaagtagtttattctgcatcagctttatctaaagatcatactgattttgagatacactatgaaaaacattatcttatataagaatttttgaattgaacattgctaattaaaatttcaacatccaattttaacactgatctcagaatgtgaaatattttttaaacaattactatatgcccaacatgtattatgcatatgcacacaaaatgtaatcttttttttaccctcccaaaatgaaggccaccatcaaagactgttctatttttttaattaaacctagtgaaataracatttcttttatttgtacttttaagatttaagtgtactttgactttaccacaaggacatatatttatataataattcagttttaaacatgcttactgattgaaaacaatttttgaatccagtaattgaatgaatttgtatgcataggcttatattcacactggagttacttctgtaaaaaaaagattttaaggagaaataaaaagcctaagttactaaaggaaaaaattgttgataaatcattcccctttaaaaagacactatatgatctaaatccataga

SEQ ID NO: 871723 - DNA, 597 bp, Homo sapiens
gcatgtgcaaaggcccagaaataagagggggcacagcacattgagggaattgagagaagagcagcaggggctgggacatagggagcttgcagagaagagactggggtaggaaagaggcagcaccctcatggtacaggattctttaagccacttttaatagtttcaacttgatcttggggaaatggggagctaataaagggttttaagctcagaagtgagacaatcagacttgagtatttgtgaggtccctagtgtggagagcatattcctgggataagtctgaaggtggggaaactgaaagggggctgytgtagctgctgaggtaaaagataatggtattctgataatcctagtgagctaagtagtatgggtgctcctggggattgggtttacgagtgctaaagcccaccttgaccctgaccatcactcaggcagcccttgtgccaggcctgtgctaattaataatttcatttaatgcttgtataatcttgccaagtatgttttgcctccacctgccaaaaagagacaaggatctacctgttgtctttctctggggggcccggtgacaaccaaaataagatcctgtttaagaaaagg

SEQ ID NO: 871724 - DNA, 597 bp, Homo sapiens
gcatgtgcaaaggcccagaaataagagggggcacagcacattgagggaattgagagaagagcagcaggggctgggacatagggagcttgcagagaagagactggggtaggaaagaggcagcaccctcatggtacaggattctttaagccacttttaatagtttcaacttgatcttggggaaatggggagctaataaagggttttaagctcagaagtgagacaatcagacttgagtatttgtgaggtccctagtgtggagagcatattcctgggataagtctgaaggtggggaaactgaaagggggctgttgtagctgctgaggtaaaagataatggtattctgataatcctagtgagctaagtagtatgggtgctcctggggattgggtttacgagtgctaaagcccaccttgaccctgaccatcactcaggcagcccttgtgccaggcctgtgctarttaataatttcatttaatgcttgtataatcttgccaagtatgttttgcctccacctgccaaaaagagacaaggatctacctgttgtctttctctggggggcccggtgacaaccaaaataagatcctgtttaagaaaagg

SEQ ID NO: 871725 - DNA, 643 bp, Homo sapiens
agatgcacctggaaaattgggtcactcccaccctaatactgtgcttttccaatggactcaacaaatggcacaccaggagattatatcccacacctggctcggagggtcctatgcccacagagccttgctccttgctagcgcagcagtctgagatcaaactgcaaggcggcagcgaggctgggggaggggacgcccaccattgcccaggcttgagtcggtaaacaaagtggtcgggaagcttgaactgggtggagcccaccacagctcaagaaggcctgcctgcctctgtaggctccacctctgggggcagggcacagacaaacaaaagacagcagtaacctctgcagacttaaatgtttctgtctgaaagctttgaagggaatagtggttctcccagcacgcagcttgagatctgagaacgggcagactacatcctcaagtgggtccctaacccctgagtagcctaactgggaggcacccccsactaggggcggactgacacctcacatggctgggtactcctctgagacaaaacttccagaggaatgatcaggcagcagcatttgtgattcaccaatatctgctgttctgcagccaccgctgctgatatccaggcaaacagggtctggagtggacctccagc

SEQ ID NO: 871726 - DNA, 643 bp, Homo sapiens
agatgcacctggaaaattgggtcactcccaccctaatactgtgcttttccaatggactcaacaaatggcacaccaggagattatatcccacacctggctcggagggtcctatgcccacagagccttgctccttgctagcgcagcagtctgagatcaaactgcaaggcggcagcgaggctgggggaggggacgcccaccattgcccaggcttgagtcggtaaacaaagtggtcgggaagcttgaactgggtggagcccaccacagctcaagaaggcctgcctgcctctgtaggctccacctctgggggcagggcacagacaaacaaaagacagcagtaacctctgcagacttaaatgtttctgtctgaaagctttgaagggaatagtggttctcccagcacgcagcttgagatctgagaacgggcagactacatcctcaagtgggtccctaacccctgagtagcctaactgggaggcacccccgastaggggcggactgacacctcacatggctgggtactcctctgagacaaaacttccagaggaatgatcaggcagcagcatttgtgattcaccaatatctgctgttctgcagccaccgctgctgatatccaggcaaacagggtctggagtggacctccagc

SEQ ID NO: 871727 - DNA, 464 bp, Homo sapiens; identical to SEQ ID NO: 871302

SEQ ID NO: 871728 - DNA, 573 bp, Homo sapiens
catggaatgcttttccatttgtttgtgtcctctattatttccttgagcagtggtttgtagttctccttgaagaggtccttcacatcccttgtaagttgtattcctaggtattttattctcttagtagcaattgtgaatgggaattcactcatgatttggctctctgtttgtctattattggtgtataggaatgcttgtgatttttgctcattgattttgtatcctgagactttgctgaagttgcttatcaggttaagkcgattttgggctgagacaatggggttttctaaatatacaatcatgtcatgtgcaaacagacaatttgacttcctctcttcctatttgaataccctttatttctttctcttgcctgattgccctggccagaacttccaatactatgttgaataggaatggtgagagatggcattcttgtcttgggccagttttaaaagggaatgcttccagtttttgcccattcagtatgatattggctgtgcgtttgtcataaacagctcttattattttgagatacattccatcgatacctagtctattgagagtttttagcat

SEQ ID NO: 871729 - DNA, 573 bp, Homo sapiens
catggaatgcttttccatttgtttgtgtcctctattatttccttgagcagtggtttgtagttctccttgaagaggtccttcacatcccttgtaagttgtattcctaggtattttattctcttagtagcaattgtgaatgggaattcactcatgatttggctctctgtttgtctattattggtgtataggaatgcttgtgatttttgctcattgattttgtatcctgagactttgctgaagttgcttatcaggttaagtmgattttgggctgagacaatggggttttctaaatatacaatcatgtcatgtgcaaacagacaatttgacttcctctcttcctatttgaataccctttatttctttctcttgcctgattgccctggccagaacttccaatactatgttgaataggaatggtgagagatggcattcttgtcttgggccagttttaaaagggaatgcttccagtttttgcccattcagtatgatattggctgtgcgtttgtcataaacagctcttattattttgagatacattccatcgatacctagtctattgagagtttttagcat

SEQ ID NO: 871730 - DNA, 643 bp, Homo sapiens
gtttctaatagcaaagactctttgggagacaaaaaaaaaaaaaaaagaaaaccaacaactcatgatttgtttttgtactggagacaaacaaaaggcattctaccattgatccaagaaccaataatgtaaaaaatgcagaggtgggcagctgaaaatatagccaggaatagaagcagagacaaagaaagtaaggataaaaaaggaaatcatccaatgaatgccaaactgtgctttgaatagcatgtactgacagaagaccctaagtaatccctagagaccttaagttccctgtaaggaaaaacacagctagtaaaactaaaagaatagcaaaaactatcactaaaggtggcttgtgaagaaacactagtgcattttgcagaactaagctaaaggcattgacttaaagagagttttccaacattcaaggctctaggtaagytttagaactcctgattttaagaaataaatattaattaattatttacttattcattcattcatttactataatttctattttttcaaatactttatgagacaattctgagagtacttattcccaatcaagacagtgatttactattttatgatatgactttagccaagcaagtaacaatcagtggagaatcctcttagacctaaa

SEQ ID NO: 871731 - DNA, 602 bp, Homo sapiens
gaatgatatcaactactaattaaacattatttaagacaatttcttgaaactcctttacatattaattgttctagcttttttactgcatagtatataagattatagttcactgaataacatcttatatacctggtgatttaatctgaatatctgtccactccaaatcccatgttgaaatttgatcaccagtgttggaggtggggccaggtaggaggtgtttgggtaatggaggtggattcttcatggactgattggtgccttcattacagtaatgcgtgttttttactctgtcagttcctgcaaggtctggttattaaaaagagtctggcacttacctcctctctctcttcttayctctcttgccatgtgatgctttctcccctttaccttctgccatgagtggaagcttcctgaggccctcactagaagtagatgctgatgccattctttttgtacagcctgaagaactgtgagccaaataaacttcttttctttataattacccagccttaggtacttctttatagcaacaccaacagactaagacaaaaacgttgatactgaggaatgggttgttcctataaagatattttaaaaggtgg

SEQ ID NO: 871732 - DNA, 664 bp, Homo sapiens
cctgaatggcaatttcgtttttctaattgctcagaccaagaacataggttatatttgactttatctttttctcatgcctcacaggtaatctgtcagcaaatcctgtaagaccaacctccaagatatattcagaatttggccacctcttaccacttttgctattacatattgccactgcagtccaagacatcggttttccagttggactatatatgtactcctcaccaatcaatctactatttagactactctgttcaggctatttccataaaaacaagcagtgttttatttcaaagcacaagacagatcacattgtacctcttctcaaatattgccagaactttccatctcctttagagaaaaagcaaaatttcttaatcctcacaatgtcttataaaaccrtccataatcttgtgacatgtctctcaaactacttgtcatactttggtcctcatcatttttcattttaggcaatgtatcaatttcttcttgacactgtaacaaatcaccacaaacttagtggcttaaaaaatattttcctacaggtctggagatcaaagtctgaaatcagtttcacttggctaaagccaaggtgtcagcagaaatagctctttctgaaaaccttacagagagaagcagtttccttgccttttgagttttttta

SEQ ID NO: 871733 - DNA, 664 bp, Homo sapiens
cctgaatggcaatttcgtttttctaattgctcagaccaagaacataggttatatttgactttatctttttctcatgcctcacaggtaatctgtcagcaaatcctgtaagaccaacctccaagatatattcagaatttggccacctcttaccacttttgctattacatattgccactgcagtccaagacatcggttttccagttggactatatatgtactcctcaccaatcaatctactatttagactactctgttcaggctatttccataaaaacaagcagtgttttatttcaaagcacaagacagatcacattgtacctcttctcaaatattgccagaactttccatctcctttagagaaaaagcaaaatttcttaatcctcacaatgtcttataaaaccatccataatcttgtgacatgtcyctcaaactacttgtcatactttggtcctcatcatttttcattttaggcaatgtatcaatttcttcttgacactgtaacaaatcaccacaaacttagtggcttaaaaaatattttcctacaggtctggagatcaaagtctgaaatcagtttcacttggctaaagccaaggtgtcagcagaaatagctctttctgaaaaccttacagagagaagcagtttccttgccttttgagttttttta

SEQ ID NO: 871734 - DNA, 637 bp, Homo sapiens
aacaaactcctccaagctaaagtagcatgttgtaacccaatgcaaggaagctaagatccttgaaaaaggttagagaaattgctaactagaataaccagcttagagaagaacataaatgatgtgatggagctgaaaaacacagcatgagaactttgtgaagcatacacaaacttcaatagctgaatcgatcgagcagaagaaatgatatcagagattggagatcaacttaatgaaataaagcaggaagacaagattacagaaaaaagaaygaaaagtaatgaacaaagcctccaagaaataagggactatgtgaaaagaccaaatctatgtttgattggtgtacatgaaagtgatggggagaatggaaccaagttggaaaacactcttcaggatattatccaggacaactttgccatcctagcaagaccaaccaacattcaaactcagggcatacagagaccaccacagagatactcctcaagaagagcaaccccaagacatataattgtcagattcaccaaggttgaaatgaaggaaaaaatgttaagtgcagccagagagaaaggttgggttacccataaagaaaagcccatttgactaacagcagatctctctgcagaaaccctataagccagaa

SEQ ID NO: 871735 - DNA, 564 bp, Homo sapiens; identical to SEQ ID NO: 870415

SEQ ID NO: 871736 - DNA, 564 bp, Homo sapiens; identical to SEQ ID NO: 870416

SEQ ID NO: 871737 - DNA, 605 bp, Homo sapiens
aaaaagaaaattgtatgcaaaaaaaaaaagaatttctatcatcttgagtaacttgctacagcatcatctagaaaattcaaaatcacattcaggtatttaatcactcccatgttcagcccattatttgagaccctgatccaaggctcttgctttgtccaggtcagttgtcactcacacaaattaattatgtatttgaagaatatttatgaatacgtataaatgatcacacatatatgtgaaaaaagcaagcaaaaagttgcatatgagttataatttcattttggatgaaaaagaaaaarcaccccagtagataaacatgtatttgtaaataaaaatattaggaggaaatgtgatatggtgttataataatttgagagttccttttcttctatatactattctatattttataattctataaatataaccatctataaattttataatcaaaaaaagtaaatatctaatataacttaaaatcaaaagaaagatgactgtaaaaaatctgctttgtataatatatttctaattattgttttattgagtttaagaacatatgggtttaagaagtatggtcatgctattttcaaataaattttttctgt

SEQ ID NO: 871738 - DNA, 525 bp, Homo sapiens
ttcttatgatagtgaataagtctcacaagatctgacggttttataaaagagagttcccctacacatgctctcttgcctgccgccatgtaagatgtgactttgctccttgtttgccttctgccatgattgtgaggtctccccagtcatgtgtaactgtgtgtctattaaacctctttcctttataaattacccagtctctggtatgtctttattaggagcatgagaacagactcatacagtaaattggtacctgctagtggggcaccaccgtaaagatacctgaaaatgtggaagtggctttagtattgggtaaaagtcacagattagaacastttggagggctcagatgaaaacaggaaaatgtgggaaagtttggaacttcctagagacttgttgaatggttttgaccaaaatgctagtagagatatggacaataaggttcaggctgaggtggtcttagatggagatgaggagctttttgggaactggagcaaaggtgactcttgttatgctttagcaaagagg

SEQ ID NO: 871739 - DNA, 646 bp, Homo sapiens
acacacacacgcaccccccacacacacacagactttatatatatgtaatttaccaagtctaggctacaagaggaaactggcaaaaattcactaattgaaatggagcttggccaagacatccatatctaatcccccttttctgattccaaatcagggagagtacatgctttgtgttttctggtaaaatacagacctatgtaacaatcagcatattttctcagaccagagcaagtaactcccracaatgagtgtttgtcagtcctaactggtttctctacgtgggtggtgaaaaaataccttactacagtcattaattctttctttcaaaagaaccatgtgtcttgagaagttctgctccatcacagggcaatatcccattttaaatacagtgtttaccgatgtttgtccatgaatgacgtcaacaaaaatgtttaaatctcaccaggaaaggagggcttagttgccagactttgggagacagagttagttgatctttgcgctctcaaaggctctgttactcaattaagtgaccaatcattaactccaaagtatttaagcctaataatacaacaaaagagagaacaatgggtagtatctttaacattaatcatggtcacctttggtttagctgtttaggtcctttcct

SEQ ID NO: 871740 - DNA, 642 bp, Homo sapiens
tgtgtattaatccatccttgcatccctgggataaattccacttgatcatggtgtgttatctttttgctgtgttgttggaattggtttgctagtatttttgcatctgtgttcattcaagatattggcttgtagttttctttttttgttgtgtctttgtctagctttggtatgagggcaatgctggccacatagaatgacttagggagagatcctgcctctacaacttttgcaaatagtttgagtagaaatggtattaattcttcttttaaagtttggtagaatttgtcagtaaagccatcagtgatgtaacctgtccccaagtctcccagcaatgsgtaccagcaccagctctgatgagggtggcaggggagtaacgtagactctgagattcctttgttataaataggcttagtatattggctttctcaaatgttggttacagtagtaatgaactgttcacctggacagactaggacccactggttagtcaggacactgtgggaaatggtgatagctgaggtcacacacaagtgttcttcttcctgggtgctctgttactcctcctggagctgctgtaatggactgactgtgtcagttggcctctagcttggaggtgttgcttggaaaagagcaccagctgcg

SEQ ID NO: 871741 - DNA, 592 bp, Homo sapiens
ctgcataatattctgaagagtgttttccaacttggttccattccccccgtcactttcaggtacaccaatcaaatgtatatttggtcttttcacatagtcccatatttcttggaggctttgtttgtttcttttcactcttttttctctgatcttgtcttcttgctttatttcattaatttgattttcaatcactgatatgctttcttccacttgatcaaatcggctactgaagcttgtgcatgcgtcacraagttctcatgctgtgtatttcagctccatcaggtcatttaaggtcttctctacactggttattctagttagccatttgtctaaccttttttcaaggtttttagcttccttgtgatgggttagagcatgctcctttagctcggaggagtttgttattactgaccttctgaagcctacttctgtcaattcatcaaactcattctccatccagttttgttcccttgctggtgaggagctgtgatcctttggaggagaagagacgctctggtttttggaattttccacttttctgttctggtttctctccatcttgtggttttatctacctttggtctttgatgtt

SEQ ID NO: 871742 - DNA, 629 bp, Homo sapiens
ccaagaaatatgggactatgtggaaaaaccaaacctacgtttgattggtgtacctgaaagtgacagggggaatggaaccaagttggaaaacactcttcagcatattatccaggagaacttccccaacctaggaagacaggccaacattcaaattcaggaaatacagagaacaccacaaagatactcctcgagaagagcaatcccaagacacacaatattcagattcaccaaggttgaaatgtaggaaaaaatgttaagggcagccagggagaaaggttgggttacccatgaagagaagcccatcagactaacagtggatcactcggcagaaactctataagccagaagagagtgggggtcaatattcaacattctgaaagaaaagaattttcaagcccgaatttcatatccagccaagtaagcttcataagtgaaggasaaataaaatccttaacagacaagcaaatgctgagagattttgtcaccaccaggcctgccttacaagagctcctgaaggaagcactaaatatgtaaaggaaaaaccagaaccagccactgcaaaaacatacctaattgtaaagaccatcaacactgtgaagaaactgcatcaactaatgggcaaaataacc

SEQ ID NO: 871743 - DNA, 633 bp, Homo sapiens
ctggctgagtgggcacatgaaattaaccactgcagtggtggtgaagggtgctgggctctggtgcgaggtctctctcttggccggaggcaggtgctgttacaagcttgaagccacagtgtgtctgtgcatgaaagtgctccatattctcccctccatagggacgatgcttggccccttgggcctcaaagctgcacctgctcttccactcagctctcacagagtcccccatggagcttatatacacagccttttcccacaggagtcaggcctgagtcaggtttagggcctggaatgttttccgagagagtcgcctctctttctctccctctcatgattctcccctgtttgagactctttcccagtggccaaaataagataaagggaagaaaatccctcaaaaccctcccataattcaactcttatgaaccctcccagcccccaccaaggacttcccctgctcatctctcatgtccagatgtgtccaggtacasttggatcccatttgggattggatcccatcctgggctgggacccaggatgctgatgtgtgagatcttggaaaatttcctccgccttcgacggagaaattggagttgctagtctggcagtgaaccagtgaggcaagaaaggggg

SEQ ID NO: 871744 - DNA, 714 bp, Homo sapiens
atcatcttcatctctcgtaaatgattttgtaagtttctccaattattttttagacagtgtttctctgtggtcctcaattaatgtttcaatttctttcaccataggaaggcatcaccacccacttgcctggccacaggaacagcgtgttctactttttcaaagaccaggaaattcttaaaatcatacactttttttttttttattttacatctcactggtatccattgaccatgtgagtcttgattgctstcacactgtgagagacacttgagaactgaaatctccactgaggacacagcgtatcatggctcccatctcaccctcactcccaggtggaagggcaggcagaatcaatgttctttttaacttgatcacattgttcatatttattctctccctctccctctacactactggcctgattctggccacctgtcccactgaggtctggaggggagatatggatggagagccacattcacctcattcttaggacacacagtgcatcatctttgagaaccagggggtcacccttgagcacggctctctcatgatgatgtcaagcagccttctcagcttatcgctgatgctttgtttgcctatactatccttacctagaggctgccttgttccagaattttccatcagtgttaaacacaaccagtgagttgaaattgtttgttatactgtgcagttttatttactatcaaaaac

SEQ ID NO: 871745 - DNA, 655 bp, Homo sapiens
aaaaaaagaaagaaagaaagaaaaattcaggtctctggctttccaattggagctttatcaaatggttggtgattcatggatatctattgattcttttttttttttttttttgagacagagtctcgctctgtcacccaggctggagtgcagtggctcaattttggctcactgcaacctctgcctcctgggttcaagtgattctcccgcctcagcctcctgagtagctgtgattacaagctcacaccactacacctggctaatttttgtattttttaggagagaaggggtttcaccatgttggtcaggctggtctcgaactctggacctcaggtgatccacccacctcggcctcccaaagtgctgggattacaggcatgagccactgtgcctggccctattcatttttaagaatgaagcagtaagagtctgctggaaagttttgtgtacatagatgggacttattgggtggcaggcttctaggtagaagcatgagctgggatttttaggtggatgctttgkgtcagtgcattttgcattgtcataaaggaatacctgagattgagtaatttataaagaaaagagggtcatttggctcacagttccacatgctgtgtaagaagcatggcactggcatctgctaggcttcttgtgaagc

SEQ ID NO: 871746 - DNA, 608 bp, Homo sapiens
aggatcatgagacagaacaaaaagaaaaggggaggtgagctatttactgaaggcataaaattcaacttgtgttggcattatgtcactgaactgaatagctatcggagactctctttcctcaactttgaatgggcccaaaatgttactgttatcaaagccgcacattgaagaagacagcagataatgtacttggtaaaacaggcagcctccgccaggaaaatgtgtaacgcttccattcactgaccctcctttccctccgcatcaacttgtgtcataaattgctatttgctgacaagctgtgctgatatgaacccaatgctggttgcagcacaagaaaaacatgccatttacttagtgccagggaacaacagccttgcttctcccaagctgatcaccatgtwgctggctggtagagggagaatggatggtaaccatcgttcgttaccagcctaattcccaggtatgcactaccgtagcattagtgaccagaggaaagacattcagctattctaggaagcatgagaaatttttctgacacctaccccagcccttcccaatgtccccaacagatgtactcacaccactatctcactgcacagccaggtgta

SEQ ID NO: 871747 - DNA, 611 bp, Homo sapiens
gtacatgtggctatttaaattaattacaattaataaaaattcagttcctcaggcatgctggccatagtgcgagactcaatagctatgtggctgctatactggaccacacaaatgtagagcacttgcattgcaaaaagctcccttgtgcagaggtgaactaaaataagggtcaataaattttttctgtaatagtaatattttaggttcagtggaccatacagtttgtgacataattactcaaccctgccattgtagttcaaaagcagccacagaaaatacctaaaaaagtggatgtggctgtgttccaataaaactgtatttatggacagtgataatcagaatttcaaaattttcatgtcaygaagtattcttttaattttaaccattaaaaaatgtaaagcccatgcttagtttgcatgccatgcaaaaacagatgacagatcagatttggccgatgggccatagtttaccaacccctagattggaatattatggaccccagcaaccgaattagcatgtgctgaatatctgcatatgctagatttgctgaacatgaataaaagtataaaatgtatgtatattagcaccaagtttcatctgttcttcattat

SEQ ID NO: 871748 - DNA, 621 bp, Homo sapiens
taaggatatctttggcaaattgtactgttgcaaaatatatttgctacattttctgggaggaaatttatactgtcctgtccatgtcagggaatcacgtgatttgctttgactgatcaagtatgagctaaagtggcacatgcaacttctaaccagaaactttaacagccgttggttggttttgccattttctctcttctcctctgctggaatatcagcaattgtcttcatatgtcattgaaatactgggtccttgttattatgacataacaacctaaactgactgatacaaatccaaagattttagaagatactrtatcatcttaaatgtgattacccttttgatctgcaaatggagagcccttttgccactctcacctgaaggtcagagagatatagtctgtactgattaagaagaactcaatatcttggatattggtgataagctgtgtgtgattagcttgcactgattctgcctagacattgcatatatcttaaagaagatgagtttctttgtcaggactctgagatcaaaggaattgaatagtcccttactaatttacttcagagaacgctaatatttgactttgtgtcttggccagtcctttagtagtgatgtgactt

SEQ ID NO: 871749 - DNA, 643 bp, Homo sapiens
aatcaggtttttggtttctcagtatttgggtgtttcaagaaacaaaattatttttcttccattttcttatcaccattctctagattgacttcctttctccattttataatctaatatgggtataaaactatatccttatcttgtcaagtaaaatatcattgttattaaagttatcattcaggttatatatacccaagcaatgtgaagtagaaaactgacgtttttacctcaaaccttattcatcagatattttaactctgccttttgaatctattgaacattttgccccaaggtttaaacccaaygatgatttttagttcatattcattaatacaaaagcactaatcataattatatcaatattaatcatgttcatcaggaaaaaatttaccaaagcaaactctgttaagctagtttaaattcttaaacaattttctaaagagtacacttaagtaatttctgatttttaaaagaacgcttcttgaaattcttacttttgagatcagttcttcatgtacaagaagtgattcatcataaattttctttatcaaatttcacggatgctatttgctgtcctagtaatttttgtgtctagtgtttctcccaaatccaatttttgtgtgtcacattttgcaaatctgta

SEQ ID NO: 871750 - DNA, 616 bp, Homo sapiens
tcacagaaatgaagtgaaaaccccaaagagacagtcagatccagaggtttatataccatttttaaaaacagcaataaattcttagagaagtgacaagacaaaggaagacaaaggaaagggttttgagcctctagggcagtgaattctaggaaagtaaacatatggggaacctaatggaaggcaggggttattttagcagggcttgttacatatattcctctcctctcggtaccatctatcagctaataagagcctagagtcttgctgagagcaggtagggggaacacattcacaaagggaaatttatrcccctcttttagacaaaaaaggtgaagatagagagctgctttctgtgtctgatgtttctcagttgccttcaactcaaaataatccttatggcagagtgacgttttggatggcatactctgatccccttcaaggacaatatgcagaggtcatgaagaccatctggtgccaaaaatagagaccctgaaattacagagtatttccactgtgagcacagaagtgatccagtcatgaatatatcttggagtttgactaaaaggagcagggtctgaatgaggtcaaattgctcccactcccttccttgttcacc

SEQ ID NO: 871751 - DNA, 648 bp, Homo sapiens
accatggagagacatactaaaagtcatcatcgtatgctaaatgttttgtttgtttgttttgtttgttttttaagtgagaggaattgcagtaataacagtttatgtttatgcaggacttataaatattttcatattctgaaatctgaagtgatgktctgacgctaactaacctctctacgattcagtttgctcatctcagaaataagagaagtagacttgatagccatatggttctaggatgggggatatgctggtcctaacactccctaatgccaaatttttacaaattccgttcatcctcctgtgcaatgtttacaccagttggactttacatatagatagcccaaacatttgcaaattcagcaatgttgtcttattgtacccttcctactccctacttaataaaactttctgggtctgaagactgctgagaagttactcccaagactttgctcttcttctggtaatttaatcttcttagctcttcttcataattcaattttgtcaatcttttcttcaggggaatttaaaatttactaccataactacttaataggctgcttctcgtgataaggggataagaaatttacttttggggacatgtgctgacttcctcatgggtaccatttagtctacttactgctgacc

SEQ ID NO: 871752 - DNA, 643 bp, Homo sapiens
ggagagacatactaaaagtcatcatcgtatgctaaatgttttgtttgtttgttttgtttgttttttaagtgagaggaattgcagtaataacagtttatgtttatgcaggacttataaatattttcatattctgaaatctgaagtgatgktctgacgctaactaacctctctacgattcagtttgctcatctcagaaataagagaagtagacttgatagccatatggttctaggatgggggatatgctggtcctaacactccctaatgccaaatttttacaaattccgttcatcctcctgtgcaatgtttacaccagttggactttacatatagatagcccaaacatttgcaaattcagcaatgttgtcttattgtacccttcctactccctacttaataaaactttctgggtctgaagactgctgagaagttactcccaagactttgctcttcttctggtaatttaatcttcttagctcttcttcataattcaattttgtcaatcttttcttcaggggaatttaaaatttactaccataactacttaataggctgcttctcgtgataaggggataagaaatttacttttggggacatgtgctgacttcctcatgggtaccatttagtctacttactgctgacc

SEQ ID NO: 871753 - DNA, 562 bp, Homo sapiens
gagggatttacacagcttcttgatatttggtgcttgaatggtggttgcttgtgagatctagttatctttccctcgtatatttaccattttcagtggatgtcttatcttgctttaaaaccccaagacccagcaaagccctttttggaaaaggtgagtgacccttaatcatggtagggattagttgaactctatcccctggctgagtaaacaggagcctggaaggaacaggtgacctgtccaagctcatctagttaagtagttacaaatcttcatcttgactgccaggactgatctttgaaaaatagacatacaaggccttaagatctacctgcaggagagaaaacaggtttaaactgacatggagatattttagattaaaaacttcagacttagctatttcagtgagggkttcctctagtttgagttgcaagtaggtcaccatgctaagagcagaaaaccctactctaattccaacctctgacctcattcaataatcattggcttgattccatttatgaatcaagctctgttagcggcttcatgtggggacaccctgttctga

SEQ ID NO: 871754 - DNA, 628 bp, Homo sapiens
gccatctccattggcctcaggaactgatgattcttttagtcctttccttatagtgcgtgggcccacagcttactttcactcattgcccacctggcttttgctgatacataatgcccttgcataacctccttggtcagcctaatcacttaaccccaggaggccccttcagaaaatctgcaaatcgcttctctgagtaygcttgagcgtagcttattcaggcctagataagctttgtttcttcaagacaaagcttgtcccttttgcttccagcatagactcaggccataggacccaagtctgaattttgggtgcgtaacttactttgagcaagttactatttctggtcctcaagattctcgtgaaaaataaagattaaaaatagtccttacctcctagcattgtttgagagttaaatgagtgagggcattttatacatttagactatacttggcatataatcagctatcaataaatattagataatattattttggcaagaactggaagtgacattggctttaccaagttcatttgtccatctgttcatttgaaatgtatttactgatcccctatgatatgccagctattgtgatcagccacaattaagaatagccactccatacattct

SEQ ID NO: 871755 - DNA, 616 bp, Homo sapiens
ggaaagtacagaagtgtttttttgtttgggtttgtttgttttaacatagagtcctgaagggaaacactcagaaagttgcagtgcctagaaaggtacttcagacacaggccgttaacaagaattcacactaagaagggttgacccatcaaggctgaggaccactgtagtgtttttatacctgataaggcatgacttgccttcaacgaatgctgcatttttcctcattgctgtatcagcgtactcattttcctgtwttcatttatttacatacccaccctcacttgagagcagggtcaatgaccttctactctgtgccaggcagggcccagcactgatgagactgcaaatctaaatgcattggaagagaaagagtgttcccatgtattctggatcctactgtttgggacgtcatgcagattttaccaaataatatcttactttccatcatctttattactcaaaagttgtgtactgagtccctggcccttggagatctggatcaaattaactcaatcctgctctcccaaatccaccactggcaggagcccatgagtcccacgagtcctcactttctcatgaggtcctcctcctaagcttgtctcaactatgtgctata

SEQ ID NO: 871756 - DNA, 630 bp, Homo sapiens
tttcttggtatttatagacaagcactaaaggcaatgtcatctacaaactcagcaggtaaataacctcgaaagaggctttcagcacactccagcaagtatagtaagaaaagcagcaatctgggaagttctcagtgatgaggttaccataagtataatccaaagttcagcaacaaccctctagtttctgttcatgtctttgcaatccaggggctgttctaaactgtcatcacactcctcaagccattagcaactcaagcatccagcaagtgatatgccctatctgtctccccagataaattatgatattgaggatgacttctcttccctgcttctgcccctggacttwgcatacaaccaactctgcccatcagggaggtgtaactgtggctaaaagcgtcatgtgctaaaaattccttccctatttatcctcctatgtcttgcccaccaaatttttgtcttcctatttctctttaatcctttccttttcagttatttctttccttggaacataaacatatttctttacctcaaaagtcaaacccctgacttgatcctgtagtctcctctaactacctttctctttctttccacttatgcttctggaaatgttgtcacaattttctgtcatgt

SEQ ID NO: 871757 - DNA, 630 bp, Homo sapiens
tttcttggtatttatagacaagcactaaaggcaatgtcatctacaaactcagcaggtaaataacctcgaaagaggctttcagcacactccagcaagtatagtaagaaaagcagcaatctgggaagttctcagtgatgaggttaccataagtataatccaaagttcagcaacaaccctctagtttctgttcatgtctttgcaatccaggggctgttctaaactgtcatcacactcctcaagccattagcaactcaagcatccagcaagtgatatgccctatctgtctccccagataaattatgatattgaggatgacttctcttccctgcttctgcccctggacttagcatacaaccaactctgcccatcagggaggtgtaactgtggctaaaagcgtcatgtgctaaaaattccttccctatttatcctcctatgtcttgcccaccaaatttttgtcttcctatttctctttaatcctttccttttcagtkatttctttccttggaacataaacatatttctttacctcaaaagtcaaacccctgacttgatcctgtagtctcctctaactacctttctctttctttccacttatgcttctggaaatgttgtcacaattttctgtcatgt

SEQ ID NO: 871758 - DNA, 632 bp, Homo sapiens
ccctgaagatttgtggaactttgaacttgagagagatgatttaggctatctagcagaataaatttctaagcagcaaaacattcaaaggtgacttgggtgctgtcaaaagcattctgttttaaaagggaaacagcataaaggttcagaaaatttgcagcctgacaatgcagtaggaatgaaaaacccattttttgaggagaaattcaagccggctgcagaaatttgcataagtagcaaggagcctaatgttaatcaccaataccatggggaaaacatctccagcccatgtcagagaccttcaccgcagcccctcacattacaggcctggaggcctaggaggaaaaagtggttttgtgggctgggcccggggtccccaagctgtatgcagcctagagacatggtgctctrtgttcaaggctccagccatggctgaaaggggccaacgtagagcttgggctgtggcttcagagggtggaagccccaagccttggcagcttccatgtagtgttgagcctgtgggtgcacagaagtaaaggattgaggtttaggaacctccggctagattttagaagatgtatggaaatgcctggatgcccaggcaaaagtttgctgcaggggcagagccctcatga

SEQ ID NO: 871759 - DNA, 631 bp, Homo sapiens
ggctagggtactggactgtggagcatttctgccagtgcagaatgcctgttggatagttttgctctaggatcatgcctgagctgggggccaggatgtccctcctggacctaagcagactttggccattggcactgggtccctctggacatcagtggcaactggtgactgtcatctctaagcagcctgtcagtggcaaaamtattcaccttgtggtgttccgtccctgcagggattatctcccaggcttcgggccttaagggtgaggactgtgtggcacacacagtctaaggaagtgggcatcactggggaggttccctccatcccaggctgacggaccttcctaggctcatcttacgtcatagtcacctcaagaagtgttcagatctcactttcaaattaaaacacagaagtgttcagagctcactttcaaattaaaacacaggccatgctaacatggcagaaatttcacacagcagacctttttttctttgttttgagacgaagtcttgttcttttcccccaggctggagtgcaatggcgtgatctcggctcaccgcaacctccgtctcccaggttcaagtgattctcctgcctcagcctcctgtgtagctgggattacaggcacctgcca

SEQ ID NO: 871760 - DNA, 631 bp, Homo sapiens
ggctagggtactggactgtggagcatttctgccagtgcagaatgcctgttggatagttttgctctaggatcatgcctgagctgggggccaggatgtccctcctggacctaagcagactttggccattggcactgggtccctctggacatcagtggcaactggtgactgtcatctctaagcagcctgtcagtggcaaaaatattcaccttgtggtgttccgtccctgcagggattatctcccaggcttcgggccttaagggtgaggactgtgtggcacacacagtctaaggaagtgggcatcactggggaggttccctccatcccaggctgasggaccttcctaggctcatcttacgtcatagtcacctcaagaagtgttcagatctcactttcaaattaaaacacagaagtgttcagagctcactttcaaattaaaacacaggccatgctaacatggcagaaatttcacacagcagacctttttttctttgttttgagacgaagtcttgttcttttcccccaggctggagtgcaatggcgtgatctcggctcaccgcaacctccgtctcccaggttcaagtgattctcctgcctcagcctcctgtgtagctgggattacaggcacctgcca

SEQ ID NO: 871761 - DNA, 648 bp, Homo sapiens
aaatgcaaattatgggaaaaatatgtatcttactaagatacatacgcttaataggatatatcctattaagtgacagaaacccatctgaaagggctgtatattattctaatgatatgaaattctggaaaacacaaatctatggagacagtaaaaagattaktggttggcaggggttggggtgggaagggatgaataggtgaagcatgaaggatttttaggacagtgaatctactctttatgaaaatataatggtggatacatatcattatacattttcccaagcccataaaaatgtttactgccaagagtgaaccctaatgtaaactatggactttgggtgacaatgatgtgttaatgtagttttttcaattgtaacaaatgtaccactcttgtgggagatgtcaataatgaggccaagtgggggggctatgcatgtgcaggataggaggtatatgggaaatttctgtaactttccctcaattttgctgtgaacttaacacttctctaaaaagataaagtcttaaagagttaaataaagtaaaatacaatgcacagtgtgatgactgaaaaaatatgtccatatattattttatattctttccttcaaagatggacccttcattctcctctccttgcatgtgggctgta

SEQ ID NO: 871762 - DNA, 607 bp, Homo sapiens
cctttactgtgatcgtcttttggtatttgccttcttcttccatctcttgagtttgtgatttccatttgaaaaactctctagccttctttggggagagcaccataaaaatagagttgtaagtagtaaatgataggtcccactgacaatgtctgtctgatctaaagtgtcaatccatttaacagatgcattcagctattatacatccagaagatttcaacagtgtcaaggtttctggggctaatcttacttttcagagcaagtgtgaaagttggagtaaaggattatctgggggctgggtgcggtggctcacgcctgtaatcccagcattttgggaggytgaggtgggcagatcatgaggtcaggagttcgagaccagcctggccaatacagtgaaaccctgtctctactaaaaatacaaaaattagccgggcatggtgtggcatgtgcctgtagtcccagctactcaggaggctgatgcagaagaattgcttgaacctaggaggcggaggttgcagtgagccgagatcgtgccactgccctccagcctgggcgacagagggagactctgttgtaaaaaaaaaaaagaaaaaaaagaaaaaaaaggatt

SEQ ID NO: 871763 - DNA, 620 bp, Homo sapiens
tgccttataagtttttcttgataacaagacatgatgtacaggatttaaaaaaaattactgtaaaaatgggcctttagtaatgtagtggtaaggttttggagaagggagttctattattaggtttcagtctttttgtaagwttgcctttggactgtaaactttacaagtgcttcttagtcttcctccctacccccacccccacttagatgggatagaattgctagagagggctggagttggatattttgcttctttcacatagatggctagagtgggctggagttgaatgcttcccttctctgaggcccagtagaatttgataaaaccaaagcatgttaaactctggttaaatagcttgaggacagactgttaagaagaacagaatactccggtatatttcacaatggttccttttccctctgctggaagcatgaggggatttttctctaatattaactgtgttctcatctggtagagctccaggaaataaaacttataaaggcgtgggggcccctgattacttggttcccctggagtttttaactctcagacttgtccacactgagcttccagcaattcatcaattacagttaaggatttcctaccctggcactggttcc

SEQ ID NO: 871764 - DNA, 642 bp, Homo sapiens
tgacctccataagcccctactttaactggaaaaccacaatgactttttgtgcctcctggattgacatctgctcagagccagtgttcagtagtccccaaaatgtctgataatttccctttccctaaagcacagtgaccctggtaaaaggccagaggtctccttcrggaaggatgggagagagattcaccacgtaaattgtcggtaatgtagtggggtccttcctcaagggaacccggcttccccttcattcaaggggttctgggcacgtagactggctcaagtctggaaattgactgacaggccgtgattctctgtttttgtatttcaaattagtcttttgtccattcgacctagaagttttatccttatataaattaaataggaatgcagtaggcttcctatcaattttacttccaggaacgctgtgattaattagccaatgccacagctctacacaagttagactattctgattgctgctttgtctctgctgtccattacagtagctacgaccaccttgcctttgacggttgagtgctgtcacttggcccctgccacctcaagatccaattattcccgttgtcttgtagttgagtgactgcggttcccactgttcgatctgacatacagagaacagcaatt

SEQ ID NO: 871765 - DNA, 561 bp, Homo sapiens
gtggaacatatttctatatctatagctgctatataactacataaatgatatttagttctaagttatattcagattctcaagtaatctctgcccttaaaggaacttaccatctagaagggggatattataatactagtaagtctacacagtagggaatattaaktgctctgagagtgtgaaggaggggagagagaaagaatatttccagtctccaagaggatggggaagaaggtaggcatccaaagagaccttatgggggaaattacacctggactggatgttatgggcagaagatgatcagttggtcttatagactcctgggaagtcaattaatgtcaaccaaagcagaagtcaattccctcttctttctctctggtcttcagagagctgtttgctgtcttgcaaaatctcctttgctttccctgtttaaggctgcctttgctgtttccttgaactggatttcatcttgatgcaaattcaaaaggagcaagagggtaatctgcttttagatagtcccaggagatgttctgctgaaggctgggcagagcagcacatcaagtc

SEQ ID NO: 871766 - DNA, 648 bp, Homo sapiens
cctttctctcaaattcccattctccatatccctttaggtaggtgaggatcttatccctagccagcagctgtaagggaactgggccttcctttctctggacatagcactggaggtcccagtatatgttaagaatgtagatggtcagaggaacagaggaaaacctgcatctgagtccccttgtcatccctcctgtggattcctggggaagcatggaaaacaagtatttaaaatgacaggacaatccatctgccacccgtgggaatggtagaaaataagggatattcatggaaggctgcttttgtgcagtctcacaaasagcagcccttagacctaagaggacattgcctatcagtcttctcagtgtagaggaagaactgtcagggccagggagtttgggatgagagaccacaaaaggcagagaaagaattgtcctctccccaaagtgcagatagctctagaaaggaagtaggagttgctcttaatggaccacatacagatgccctatggagacaaacaaatgacctcaagagccactggaaaacctggtctcaatgtgtagcaggatttaaaaattcatgataggaaataaagaattggtggagacagagtcttcccaatattaagcagagaaagaagttgcatgatatg

SEQ ID NO: 871767 - DNA, 632 bp, Homo sapiens
gcctcctttctcctgtgcttctgtgaatgaggttccaataacccagggacatagtctgttgtagtgtattagtccattctcacattgctataaagaaataaagagactgggtaatttacaaagaaaagaggtttcattgactcacagttccacatggctggggaggcctcaggaaacttacaatcttggtggaaggggaagcaggcacatcttacatggcagcagtcgagagagagagagagaaagagagagagatgtgagagcaagtagggaaaactttctgacaaaatcttcagattttgtgagaattcactcactatcacamgaacagcatgggggaaactgtccccatgatccaatcacctcccagtaggtccttcccttgatacctggggattacaatttgagatgagatttgggtaggaacacagagccaaaccatatcatgtagcaaacagatcctgaggctaggactcaaaaaaccagagttctgccggcgcagtggttcttgcctgtaatcctagcactttaggaggccaagatgggtggaatatctaaggtcaggagttcaagacctgtctggctaatatggtgaaaccccttctctactaaaaatatcaaaaagtagccag

SEQ ID NO: 871768 - DNA, 590 bp, Homo sapiens
agttttgcttatgaagggtctacaaactaagaataggtttaggatgtcagaactgaaaaagatcgggtatggtggcacatgcctgtaatcccagcactttgggaggccgaggcaggcagatcgcttgagcccaggagttcgagaccagtctgggcaacatggcgtaaccctgtctctaccaaaagtacaaaaaaaaaaaaaaaaaaaaattaccgggtgtggtggcccacacctgtagtcccagctagtgaggtgggacctgggggctgaggtgggaggaaagcttcagcttggaggttgaggctgcagtgagccatgattgtgccactgcactccygcctgggcaccaaagtgagacaaagatagaaagaagacagagagagagagagaaaggaaggaaggaaggaaggaaggaaggaaggaaggaaggaaggaaaaaaaggaaaagaaggaaagagagaaaaaagaacaaaagaaaagaaagatcttggaggtcatgtactttgatgttcccttctactaatgaggaaagggggaacaggggaagttaaaacccttggtgaaggtcaaatggcaagtaagcaaaagaa

SEQ ID NO: 871769 - DNA, 616 bp, Homo sapiens
gggatcacaggcgcacaccaccacgcccagctcatttttgtatttttagtagagatagggtttcaccatgttggccaggctggtcttcaactcctgacctcaggtgatccacccacctcggcctcccagagtgctgggattacaggtatgagccactgcacccggccttattaaaccttttaaatgtgtaatcaagactaataaaggctaattacccacccaaagtcaagtaccaaactgaaattcaagtccagtctatcttactcttaatgtcytctctgccaggctattgagtacctcaagtaatgctcttttgcctaatttttctattccacaatctggttttactatttctgagtcatttttgttagtctgattagaaaatgagatcatattcctagatatttcattattaaagtaaggtacttcttccaaccacttaaaaccacatatctcgtttttatttaagttgttcataaaaggggcaacatatcattcttctgtcctttctctagaaatcaagtgcatttattaagaaagtatttattgagactctccactgcattatagatacttatctggaagagatgacatagaaaatacattggaagtatta

SEQ ID NO: 871770 - DNA, 583 bp, Homo sapiens
agtagtttggctggtataaaagtctaggtttccccctcaaaattttggagactttttttttctttgtcttaagacttccaaaattgctctggggaccctggagccattctaattcttgattcttgaatgtattacccctccttcccttttctggcaacttgtgtgatcatctctgtgttcctgttttcagtttcatgatgggagtgccttttcatctcactgttctggacacttggtggacatttcargctggaaactcatgttcttgaatgctagatgactccattgtattttatttcttcctcttcgtatttttcttttcttactttctgaactttttgttacttacatgatagatattctgaaccagtcgtctgattttctttgtttccttcctgcttttttttttcctctttctccttctgttctactttctagggaattttctcagttttatctttcagcctttttattgagtttttcttttctggtgacatgttttaatgcctatgggttcttttgtgttttcctgaataattcttttgtacaacattttgtttttgttttatgaatgcagtgtttt

SEQ ID NO: 871771 - DNA, 583 bp, Homo sapiens
agtagtttggctggtataaaagtctaggtttccccctcaaaattttggagactttttttttctttgtcttaagacttccaaaattgctctggggaccctggagccattctaattcttgattcttgaatgtattacccctccttcccttttctggcaacttgtgtgatcatctctgtgttcctgttttcagtttcatgatgggagtgccttttcatctcactgttctggacacttggtggacatttcaggctggaaactcatgttcttgaatgctagatgactccattgtattttatttcttcctcttcgtatttttcttttcttactttctgaastttttgttacttacatgatagatattctgaaccagtcgtctgattttctttgtttccttcctgcttttttttttcctctttctccttctgttctactttctagggaattttctcagttttatctttcagcctttttattgagtttttcttttctggtgacatgttttaatgcctatgggttcttttgtgttttcctgaataattcttttgtacaacattttgtttttgttttatgaatgcagtgtttt

SEQ ID NO: 871772 - DNA, 658 bp, Homo sapiens
atttcaatcatggagccccagatccatgtagatgagaaggtggaatgcaattgtagctgtggttccaaggacagcacagacaggactgtgtgttatcccttgagggaccattgctacaaaccagttggcactaaaccttaagtcgtataaggaggatgaaacccactttatttgggttctgtagaaaatttgcaaatggactcttttttcagtctgtatgtttctgaagttctctgtgcaaaggattttgtactaatgagtaggaggtatgtatccacatcaaaatgtctccacatgtacaggagaatggagactttaggctttactaataggtgctagaattaatctgggtattcatgtgtactgttcctttgtgacgcctatgacactctttgcttttgactggcattaaggtttagaaaatgcataggttggtrtcgggatagagtaaagagagtacatcatagggagtttccccttctggggcctccacaatctgcatgtaattaaatgctgcatgtaatataaacataaacaagaagatcacataacacccacagaacccatagcttcccataagtagaaaagaagacaccagattgtagcaaagctatctcctcaactcctgctgcaagcctttatggagacctaatgagtc

SEQ ID NO: 871773 - DNA, 576 bp, Homo sapiens
actttttgactgaatttaaaaattatttgcatgtatcactttaaataataaaaatgattgtttttgtaaaacagaaagaacagaggctctggaatcaaacaaatgtgtactgtatttaaacacaaactataccaatgtctcacacctgtaatcccagtggtttttaagggagctgagactgcaatgagctaggattgtgctattgcactccagcctaaatgacagagcaagactctgtctcaaaaataaataaacgcatacattaaaaaatacttgaagcaatcattcaaatacatacataatctttgaaataagtttgatattgttatgctaatgttactctttgtgtagcatatttaactttttttttaacccgtgctgttttcttagattttaaaaaggaagaaaaatcawatcaagttatcagttggcttgcacctgaagatcatcaaagagaatttaaaaagagttttgatttctttctggaagaaactttaggtggcaggtaattgtttttttattctttgaacaaaaaggtcaccattttcataatacaaatggatggatggatgcatg

SEQ ID NO: 871774 - DNA, 642 bp, Homo sapiens
tccaccagatatgctaaattatctctctcaagttgaaatttccacagtttcctagagaaggggatcaatgcctccaagttctttgctaaagcatagcaagagtgacttttgttccagttcccgataagtttttcatctctgttttaggccacctcagtctggacttcaatgtccacatcactatcagcattttgggcaaaattattcagcaagtctctaggaagttccaaactttcccatatctttctgtattcttttgagccctccaaactcttccaaaacctctgcctgatacccagttccaaagttgcttccacattttcaagtatctttatggcaatgccccactcctgataccagtttattgtattagtccattcacactgctataaagaaatactcaagactgggtaatgtatagaggaaaaaggtttaattgactcagagttctacgtggctgggaagatctcaggaaacttcaaatcatggcagaargtgaaggagaaacaagaatttttttcacatggtggcaggagggagaagtgcaagcaaaggaaatcccatatgcttataaaattatcagatctcatgagacctcactcactatcatgaaaacagcatgggggaaacaacccccatgat

SEQ ID NO: 871775 - DNA, 586 bp, Homo sapiens
actgtggagtaggtgacttaaaaaacagatattcctttctcaaagttctgaaggctagaagtctgagatcagggcaccaggatggtcaggttcagggcaagggccctctttctggcttgcaggcactggctgacttcttgctgcatcttcacacggcagagggaggaaactctgctgtctcttcatcttataatggcactaattcagcatargggttctactcacagtgcctcatctaaacctgttaataattacctcccaaaggcccggcctccacataccatcacactgggattggggcttcaatctatgactttaatgggaacagaaacattcagtttgtaacaacttccctgacctgtgcaccagtctccaagacccagagggtgcaagggaagagatgctagcctgcaaaagtaatcagtgctgaggtgtaatagcaaattatttttcctgcattgttaatttccccttcattgcaccatcttgctgttatttcttccatatttaacaacaataacaacaacaaccctccttgacaagcccagcacctgagttggcaactctgctccacatctgtaacaaa

SEQ ID NO: 871776 - DNA, 677 bp, Homo sapiens
tcttcccctacattgttgatatggtttggctctgtgtccccacccgaatctcaccttgaattgtaataatcccatgtttcgtgggagggatcccataggaggtaattgaatcatgggagcaggtttttcccatgctgttcttgtgataatgaataagtctcatgagatttgatggttttataaaagggcagttcccctgcacacaccctcttgcctgctgccgtgtaagatgcgtcttgcttcccctttgcctttcgccatgattgtgaggcctccccagccatgtggaactggaagaattaaacctctttcctctataaattacccagtcttgggtatgcctttattagcagtgygagaacagactaatacaattgtctcactcttcatctgacctcccatgaatcatagagatcattgtactttgctgccattggagaacatgaaagtagctgggtatttctcaatgttatttgttggtggcatcctaaggaatcaaacacaaccagaatggttcaggccagtgcaccccacacttcaaggcatgtaacagtgaagttgaataaccaaggtagcatttaccactttaggttgtgtatagcgtgtacttaattgaccctctaaatgtaagcttctcattaacagggcttatgtccggtcaccagtaatgtgtctga

SEQ ID NO: 871777 - DNA, 681 bp, Homo sapiens
agttgttctttttttgaaaaaattaataaactacatagaccaccagctagattaataaagaagaaaagagagaagattcaaataaacacaatcagaaatgataagggggatattaccactgaccccacagaaatacaaacaaccatcagagagtattatgaacacctttatgcacataaactagaaaaactagaagaaatggataaattcctggacatacatactctcccaagactgaatcaggaagaagctgaatccctgaatggactaataaaaagcactgaaattgagtcagtaataaatagcctaccaaccaaaaaaaccccaggaccagactgattcacagctgaattctaccagatgtacaaagaagrgatggtaccattcctgctgaaactattccccaaaactgagaaggatggactcctccctaactcattctacaaggccagcatcttcctgagacaaatacctggtagaaatatgacaaaaatttaaaactcagaccaatattcttgatgaacattgatgcaagaatcctccataaaatactggcaaaccaaatccagtatcacatcaaaaagcttatccaccacaatcaagtaggcttcatccttgagatgcaaggttggttcaacatatgcaaatcaataaatgtgattcatcacataaacagaacta

SEQ ID NO: 871778 - DNA, 681 bp, Homo sapiens
agttgttctttttttgaaaaaattaataaactacatagaccaccagctagattaataaagaagaaaagagagaagattcaaataaacacaatcagaaatgataagggggatattaccactgaccccacagaaatacaaacaaccatcagagagtattatgaacacctttatgcacataaactagaaaaactagaagaaatggataaattcctggacatacatactctcccaagactgaatcaggaagaagctgaatccctgaatggactaataaaaagcactgaaattgagtcagtaataaatagcctaccaaccaaaaaaaccccaggaccagactgattcacagctgaattctaccagatgtacaaagaagggatggtaccattcctgctgaaactattccccaaaactgagaaggatggactcctccctaactcattctacaaggccagcatcttcctgagacaaatacctggtagaaatatracaaaaatttaaaactcagaccaatattcttgatgaacattgatgcaagaatcctccataaaatactggcaaaccaaatccagtatcacatcaaaaagcttatccaccacaatcaagtaggcttcatccttgagatgcaaggttggttcaacatatgcaaatcaataaatgtgattcatcacataaacagaacta

SEQ ID NO: 871779 - DNA, 649 bp, Homo sapiens
ttcattttaggtagagggtggggtaggaggcgaggtttcagcattcatgatgctgactattctggatgttgaaatgcactgcccagaatcccctcagcatgtgtttctccagtagagggtatactgctcttgcccaagattatacccatttatacagagcagtctgcagacaatggctatttgataaacgggaaggagatagtatagagtcctaaccccttcctctaagttttagaaaccccaactgaaccagaagaggcctccattgagcctttaaccctgttcctactcttcttcctgtggtgctcacactgagaacatttccccayaaacaccctgcatcccaatctctatctatctcggagtatctcagggaaccagacctgcaccacagacattcccttcattccttgtttcagccccacacctcatccctgcagggtgctacatcttctctctcagagtcctgaccctttctgagaacatttctctagaaaataaatcttgggtatttctgtggtagggtgtgcgggtagaaacaggagccttggataggatgtggggaggcaggcttctcttccattctcacacctttccttttaaattcctccatttaattacagataatatgaacatatggtccattcac

SEQ ID NO: 871780 - DNA, 608 bp, Homo sapiens
acatgagatcatagcttttgggacttttgatgagtgtgagtcatatagtcggaagagataacaaggtttcctatcgaaattgtttaagggaggagagatactgccaagactggctctgctggaaagatggtgacacatttctctgagaagaacaagtagctagtccctgaagggaaatatgtggctctagaaagcragtcggggaggggagcagattgtaacttagggtgaatgtttgtggggtttagtagtggtggggaatcaattggtttaatttattactgatattaataatagcaagaagtcccccttttaaaattttctttatttccataggttattggtgaacaggtggtgtttggttacctaagtaagttatttagtggtgatttgtgagagtttggtgcacccatcacctgagcagtatacactgcactcaacttgtagtcttttatccctcactcccttcccaccctttcctcttgagtccccaaagtccattgtgtcattcttatgcctttgcattctcatagcttagctcccacataaaacatatgatgtttggttttccactcctgagttacttcacttataataatagtctccaa

SEQ ID NO: 871781 - DNA, 664 bp, Homo sapiens
caaaaaatctgaaaagacatcgcaaaaggctaatcttaggttctacaatagtgacattatctgcaggagtatgtgggacaattgcatatcttgtgacctccagaataatagcaggtaatcatttatgtctgcgccttagcagaattcaggcttctcttaccctcttaacctggtggtctctcattagctttacaaggaggttgagttttgggaaagagctattaccatttaacctataaactaaatttctcccaaagttagcttggcccaagcccaggaataattcagggcagtttgaaggctaaagacaagatgggggagaggttagattagatatcttttactgccataattttctcactgttataatatttgcaaagccagtttcaattttcattgagccaaactgatgtatccctttcagtatacgtggaaatctatatatacagaggatatattttaatccmcagtggaagaaaaattgggaataataaaatgctttgcattacaattctagtgaattttcttaacatttgagaacatatgagcaaccctcctgaagatcttaaataataacagtgctggtgtttgttttacatctaaggaaacctaacaaccagttatttgccaagtcctctctgggtatgttaataaggcgttagct

SEQ ID NO: 871782 - DNA, 641 bp, Homo sapiens
tttaggatagttagctcttcttgttgcatcgatccctttaccattatgtaatggtcttctttgtctcttttagtctttgttggtttaaagtctgttttgtcagagaccaggcaagattgcaacccttgcttttttctgctttccatttgcttggtagatcctcctccatccctttattttgagcctatgtgtgtctttgcatgtgaggkgggtctcctgaatacagcacactgatgggtcttgaccctttatccaatttgccaatctgtgtcttttaattggggcatttagcccattaacatttaaggttaatatcgttatatgtgaatttgatcctgtcattatgatgttatctggttattttgcctgttaattgatgcagtttttcatagtgtcaatggtctttacaatttggcatgtttttgcagtggctggtactggttgtttctttccatgtttagtgcttccttcaggagttcttgtaatgctggcctggtggtgacaaaatttctcagcatttggttgtctgttaaggattttatttctccttcatttatgaagcttggtttggctggatatgaaattctgggttgaaaattattttctttaagaatgttgaatattggcccccactctcttct

SEQ ID NO: 871783 - DNA, 656 bp, Homo sapiens
cttaatggtctcagctcctaacactgccacaacagcaacccaatttcaatatgagttttgcaggggacaaacattcaaactgtaacagtacacaatacttgtgacttaataaacatattcttaaataaataataaatattcccctcttttgaagccaatggctttaattggtttcagttaatgcagctatagatctacaagtggtatggaaaccagattgagtaaaagccaagagagggttaggtcattcctagggtagatttccaactacactattctctaaataaatgttcacagatgcagataagcctgtgaacatctcctgagaaagtgggttatttatgctgtagataattttatttactatgggccatctctactcacaaccaatttaaatgtttgaaatgaatcaaccagttatagtttcatgttggtaatgcagcagtctaacccaaaagtgtggtggtaracatatttagagcagctaaatcggaacttaacaggtttatatgttaatgcacatatatttcattctcaaaaaatacttcaggccctcacttaaagtctatttaatcttgttttacacaaatattatcaaatttgactctctggtttcccagaagatcaaaaaggagggagaaaaatgctacaggcca

SEQ ID NO: 871784 - DNA, 678 bp, Homo sapiens
ttttaatatttcatacaatttttgaggaaaataaagcccctattagtcaagtggatattgtaaatgacgtcaagattatttttctgcgtgaaagagtgcatcataaatctctttttccttcagtctttcttgtgtttattatttctacatacacagcatccaayagagtgactaacacatagtgaatatttaaaaatgtttgctgaaaaaaatgactagatttggaacaagattctgtgtggtactgtcgctgctatatggttattgcatgggaagctttgaaaccatttattaacttgtttgctaaacaaacaattgttgatctcctgctgtgggcctaggtatggagttctagggataagaataaaaccaggagcgatagatagactaaaacaaaagctgaacgtctacaattttgagttagtatgaccctttgaatttgtgaagattattgatattgatatgatatttcttgtaatatgatacagttcttccaatattgcagcaacatgatgattaaatacaaaaaaccccaaccccaaacaatagctttttggactcacaacccaagtatgtgcatttctttcatttccttgtctccttgcttgactcccattaccctattttttttttaagatggagtctcactctgtcacccagagtggagggcagtggtgc

SEQ ID NO: 871785 - DNA, 655 bp, Homo sapiens
caaatgttgctgcctgattgttcctctggaagttttatctcagaggggtacccagcagtgtgagatgtcagtctgcccctactggggggtgcctcccagttaggctacttgggggtcagggacacacttgaggaggcagtctgtccgttctcagatctcaagctccgkgctgggagaaccactactctcttccaagctgtcagacagggacatttaagtctgcagaggtttctgctgccttttgtttggctatgccctgcccccagaggtggagtctacagaggcaggcaggcctccttgagctgtggtgggctccacccagttcgatcttcctggccactttgtttgcctactcaagcctcagcaatggcgggcacccctcccccagcctcactgccacgttgcggttcgacctcagactgctgtgctagtaatctgcaaggctctgtgggcgtaggatcctctgagccatgtgcgggatagaatctcctggtgtgccgtttgctaagaccatcggaaaagtgcagtattaggatgggagcaacccgattttccaggtgccatttgtccccccttcccttggctaggaaagggaattccctgaccccttgcacttcccgggggaggcaatgcctcgccctgctttggctcatgc

SEQ ID NO: 871786 - DNA, 644 bp, Homo sapiens
agctatttcagagacttgaaatttattcttattcaacagatggggaatcaaaccgatcatgcattataatacagccaaatatatattattgttgctatatagccaaaagtcatataagtgtttgaaagtaatagactaatgatgcaataagatgaatatgccattcaaattcatggatggttttaaaaattagtgacagataggtatattattatttcttccattttacgataagtgaagtcagagaagtaacttggccatggtcatatgataaatagccaagctgggatttgaccccaaggagtttggctccaaagcctgggctcttaactccacccactgtttctctgggcagtacctggaaatagctggacttcaggcaggttggtcaggtatggcacaaatattggaaacctcagatctgaaattttaaaaccaacatggtgccatgtaatttcttacagtkaaataaagagacagtttgggacctgagaaacggagatcttttgaaaaccatgggattctatgacttttagaaactaaccaccatgttcaggttgagttagtttcccctttctctatgtttccatgactttgtgaacacaccctattttagcttgtattacagtgttgtaattggtttt

SEQ ID NO: 871787 - DNA, 639 bp, Homo sapiens
gattcagagaaatgtggctgggagcagtggaaaggaaactagacttgccgccaggaaacctactgtgatgaacctgggcaaattgctcactcccacaagcacgggtttcattactcataacacggagacacagaatggaaaggaacagttgctgagcgcctgcaactggacacattctcatgtatgccatacaagttttacaatgaatctggaaagtgaattttattatcttatttttcaaataatgtactagaataagtgatgtaaaataattcacctaagttcacatggctagtcagaagtaaaagttgggtatttttgaaataagagctcatattctttctgcttccayccagttgtaagaattaattgttattgtgaagattaactgagatactctaagggaacatggacagtgcttgacctattctagatgctcacatagggaaatgcatgcaacactgcagcaataaagtctcagtcaggcagacttggtttgaatcctaattctgctgtttatgagctctgtgacttggggcaatttacttaccctctttgaacctctgtttcctaataccaactcatgaaaaaaaattatgtgataataactgatgtcagtagccgatgtctaaactatca

SEQ ID NO: 871788 - DNA, 671 bp, Homo sapiens
ctttgttctattggcttaggattgacttggttatgcgggctcttttttggttccatatgaactttaaagtagttttttccaattctctgaagaaaggcattggtagcttgatggggatggcattgaatctgtaaattaccttgggcagtatggccattttcacaatattgattcttcaatatacgcaaatcaataaatgtaatccagcatrtaaacagagccaaagacaaaaaccacatgattatctcaatagatgcagaaaaagcctttgacaaaattcaacaacccttcatgctaaaaactctcaataaattaggtattgatgtaacacaatactaagagctatctatgacaaacccacagccaatatcatactgaatgggcaaaaactggaagcattccctttgaaaactggcacaagacagggatgccctctctcaccactcctattcaacatagtgttggaagttctggccagggcaattaagcaggagaaggaaataaagggtattcaattaggaaaagaggaagaattctatttttatgcaaactgtttaagatactaaaagagattaccaaattaccaatgtctagaactgttaatggcctgacattttaccctattcgtaagctaacaagttatttggccactgtcatagatggtggcagaa

SEQ ID NO: 871789 - DNA, 645 bp, Homo sapiens
taaagcctcactcatgaggccctttattttcctatcagctggaagagaggatctgagtaattcagcaaggcgaggtttgtttagctgaaatgaaaagggaaatggtcaaagatgaaattgtttaattctttctcaccaactaactgcagaattatagatgtctcttgaatgcaataagttaatttcagtcattctgcttatttgtatacacgttgccaaagtaaaagcctaatccaaaaattaatgatttgagaatccattgggtattcttctgggcctagtccaattatttttttttttatgtgaacaccaaaactctcctacagtatgataygtagccaactgagtgattgactagtagctaatgcatatcaaggaacagttaaacttgcagctttaagctaaggcaaagttcagctacttatcttcagtcatctttaaatgtaattaagtctcctgggctccagttatgtggaaccagaaactagaaaggctgggtttttcaatggaaataataactggttataatccaccagcaaaagtaatgaaaatattcaagggaagaaactttttgttaaaaagaatcagatgtcgtgttattgactgtttaaaaagtacaacaaactgtttcataatatgccaaat

SEQ ID NO: 871790 - DNA, 645 bp, Homo sapiens
taaagcctcactcatgaggccctttattttcctatcagctggaagagaggatctgagtaattcagcaaggcgaggtttgtttagctgaaatgaaaagggaaatggtcaaagatgaaattgtttaattctttctcaccaactaactgcagaattatagatgtctcttgaatgcaataagttaatttcagtcattctgcttatttgtatacacgttgccaaagtaaaagcctaatccaaaaattaatgatttgagaatccattgggtattcttctgggcctagtccaattatttttttttttatgtgaacaccaaaactctcctacagtatgatacgtagccaactgagtgattgactagtagctaatgcatatcaaggaacagttaaacttgcagctttaagctaaggcaaagttcagctacttawcttcagtcatctttaaatgtaattaagtctcctgggctccagttatgtggaaccagaaactagaaaggctgggtttttcaatggaaataataactggttataatccaccagcaaaagtaatgaaaatattcaagggaagaaactttttgttaaaaagaatcagatgtcgtgttattgactgtttaaaaagtacaacaaactgtttcataatatgccaaat

SEQ ID NO: 871791 - DNA, 620 bp, Homo sapiens
tgttttgcaggtttcatagtagtctactcttatcctccaggatctgtcttatttttggaggatcagactcttgaattaaacaggcttatgataggaaccgtaagcattgcatcttttaagcttttaggggtagcattggtgctatggtttgagtgtgtttcccagattttatgtgttggaaacttaatccccaaaaggatgtgttgaatgaaggttggtctttagaattagataaggtcatctgggtgggctctcatgataagactggtggctttataagaagaagagagatctgagctgacatgcacactcttgacctgttaccatataataccctctgccatgttatgacatagctagaagcccctcaccagatgctggtkccctgatcttggacttcatagcctccagaaccatgagctaaataaacttttccttatagattaccagcatgggattctgctatagcaacagaaagcagactaagacaactgatttctgtgataacccccatattttatattgcttttgatttactcttttggtttgaggggcgatagtttcagaggcttctacttggcctttctcactatgatcactcttactccatggtccaggga

SEQ ID NO: 871792 - DNA, 633 bp, Homo sapiens
aagagtccaggaccagacggattcacagctgaattctaccagaggtacaaagaagagctggtactattccttctgaaacttccaatcaatagaaaaagagggaatcctccctaactcattttatgagaccaacatcatcctgataccaaggtctggcagagatacaacaaaaaaagagaattttagaccaatatccctgataaatatcgatggaaaaatcctcaataaaatactggcaaaccgaatccagcagcacatcaaaaagcttatccaccacgatcaagttggcttcatccctggaatgcaaggctggttcaacatatgctaatcaataaacgtaattcatcacataaacagaaccaaagataaaaaccacatgagtatctcaatagatgcagaagaggccttcaacaaaattcaacagctcttcctgctaaaaattctyaataaactaagtattgatggaacgtatctcaaaataatatgagttatttatgacaaatccacagccaatatcatactgaatggacaaaaactggaagcattctctttgaaaaccagcacaagacaaggatgccctctctcaccactcctattcaacatagtgttggaaattctggccagggcaatcag

SEQ ID NO: 871793 - DNA, 592 bp, Homo sapiens
ataaccaaaatgcagacgtgtacataactggttccatgtacaattctaagtggtttacaaagtatatgaaaaagataactttatttttaaacagaaaaataacaaaaaagaattgcagaccaggaggaaaagtatataagaagaatgaagccaggaattcaaatttaaattattatcyaaatcacatattttcaagctttaaaacttataaaagtgggcataaatttgtctctaggcttttctgtagctaatgcaaagagatatacatggtgtaaagctatataatattcaatatttgggtcataaaataataaaccatgttcatgagaatcacatattcctagccctgagaacagagagaaattcctccagtaaatcctcatttctcaaagtaggctgaaggtacaaaaaagataattcagtaaaagcaaagagaaaaaatatacacttcaggcaaggaaacatcgtttgttgcatgtttaatgatgtacagaacactatagagctaaggaaagtactagttgataatacagtcttttgtgttataattttgcaaacttgcaaactgtcaggaacatgttgagtaaatccc

SEQ ID NO: 871794 - DNA, 539 bp, Homo sapiens
gatggtgaggtgggagaagcagacaagggccagaccataataggccttatatataggctgtgctgagaaggtctgattttattctaagtgccaaaggaatcctctggaggatttcaaggagaagagtgacatgatctcacagaatgtaccttcacacaagatagacttttattctgtttttctcttagttttatcccccctaaaaytgctgttgtttgtccatgctatgctttttctttaactgctagttttatccttaacataaattatggaaagtattcaatgcaataaatctagtttgtgaaaaggcccatgaaaaatttatttttaaatgcaaaaagtaagccaccagaataaaaattagctacgtttttatctcagagtgatgatagctccaaaactaattagtgaaagaaggggacactgtatatcactgcacacttaaaaatacagagaaaggaaagaaagtttgggaagaataaaactgcttcatacgtgtctattatgttgcaggtatagtattagacaatttgcctata

SEQ ID NO: 871795 - DNA, 616 bp, Homo sapiens
tacatatgcccatgcatgtgcagatatgtaggtatatatatatatacacatgcacatatataaattatatgtccaaattatgtgtttttatttcaaattttaaaatatactgaagtgaaattatatgtcttcttctgaaagaggtaatgccttcactatatgctttttctttggttcctttgagaatatgcctggcacacaataaactctcaacagagattggatgaccagttatttgcaggcatcatgtaatctttttctccctttcgccccagaggaaaaataagcaatcttttatttttatatcactcatttgccaatgaaaggaatagacttcattgcttttctaartagcagatactgtatccctccagaatctgaagtaagtagaatattcagttatgctcttgtgtttataccaagaaaacagttagttttctactttcctccagtagaaccaagcttcatttcccccactgattttcttatagaaaagaaagtaagtctgaaaacttgtcaatattaaactttcaaagaaataataaaattaattttttctcaagcagctgaaaaatggttgtaatcccctgaccatcagtcttatgatgatcccttt

SEQ ID NO: 871796 - DNA, 589 bp, Homo sapiens
gctgaaagacatagactctatttaagaaggagtttcaaaaaaaaaataaataaataacctaagaaaaacagagaagatggaaacaaacacattagagaaaattttagccattaatgcctaaagctaagtcaaacagtaaatgcagccatacttctaacaagataaatataaaaattcatagtaaaggyctatttacttctgtatcttttatccaatacatcatatccatctttcaacaaaagttacaaagcatgctaaaagaaaggaagaaaatatagtttgaaaatataaagaaagcatcagaattaggcttggatatagcagattttgcaattatcagattgaaaatttaaaattactacaattaatatgctaagaactcaaatagacaaagtagattgcctgtaagaacaaatagaagataatgtaatcagagactagatattctgagaaagaatcaagaggaaatgctagatattaaaaacaccgtaatgaaataaagaatatctttgctgggcttatcaatagactggacatcactgtggaaaaaaaaaaatggtgagcttaaagatatgtcagtagaaactac

SEQ ID NO: 871797 - DNA, 643 bp, Homo sapiens
atggtggtttgctgcacccatcaaaccgtcatctacattaggtatttctcctaatgctatccctccccaagccccccagccctcgacaggcccctgtgtgatgttcccctccctgtgtccatgtgttcacattgtccaactcccacttatgagtgagaacatgtggkgtttgtttttctgttctggtgttagtttgctgagaatgatggtttccagcttcatccatgtccctgcaaaggacatgaactcatcctttttatggctgcatagtattccatggtgtatatgtgccacattttcttcatccagtctatcattgatgggcatttgggttggttccaagtctttgctattgagaacagtgccacaacaaacacacgtgtgcatctgtttttatagtagaatgatttataatcttttgggtatgtacttagtaatgggattgctgggtcaaatggtatttcttattctagatccttgaggaatcgccacactgtcttccacaatggttgaactaatttacattcccaccaacagtgtaaaatcattcctatttctccacaccctctccagcatctgttttttcctgactttttaatgatcgccttctaactggtgtgagatgttatctcattgtggtttt

SEQ ID NO: 871798 - DNA, 643 bp, Homo sapiens
atggtggtttgctgcacccatcaaaccgtcatctacattaggtatttctcctaatgctatccctccccaagccccccagccctcgacaggcccctgtgtgatgttcccctccctgtgtccatgtgttcacattgtccaactcccacttatgagtgagaacatgtggtgtttgtttttctgttctggtgttagtttgctgagaatgatggtttccagcttcatccatgtccctgcaaaggacatgaactcatcctttttatggctgcatagtattccatggtgtatatgtgccacattttcttcatccagtctatcattgatgggcatttgggttggttccaagtctttgctattgagaacagtgccacaacaaacacacgtgtgcatctgtttttatagtagaatgatttataatcttttgggtrtgtacttagtaatgggattgctgggtcaaatggtatttcttattctagatccttgaggaatcgccacactgtcttccacaatggttgaactaatttacattcccaccaacagtgtaaaatcattcctatttctccacaccctctccagcatctgttttttcctgactttttaatgatcgccttctaactggtgtgagatgttatctcattgtggtttt

SEQ ID NO: 871799 - DNA, 676 bp, Homo sapiens
agtcaacggtagcttgatggggatagaattgcatctataaactactttgggcagtatggccattttcatgatattgattcttcctatccattagcagggaatgtttttccatttgtttgtgtcctctcttattttcttgagcagtagtttatagttctccttgaagaggtccttcacaccccttgtaagttgtgtttctagatattttattctctctgtagcaattgtaaatgggagtccactcacaattggstctccatttgttatcggtatataggaatgctcgtgattcttgcacattgattttgtatcctgagactttgctgaagttgcttatcagcttaaggagattttgggctgagatgatggggttttctgaatataaaatcatgtcatctgcaaaaagagacaatttgacttcctcttttcctagttgaatacgctttatttcttcctcttgcctgattgccctggccagaacttccaatacgatgttgaataggagtagtgatagagggcatccttgtcttgtgccagtttccaaagggaatgcttccagtttttgcccatttagtatggtattggctatgggtttgtcataaacagctcttattattttgagatatgttctgtcaatacctagtttattgagagtttttagcatgaagggctgttg

SEQ ID NO: 871800 - DNA, 647 bp, Homo sapiens
cagccatgtggtagaaaagaaaaaccccttttctggggagaaattcaagcctcctgcaaaaaattgcctaagtaaagtagtaccaaacgttagtagccaagacaatgggggaaattttctctagggcatttcagagaccttcacagcagcccctctcatcacaggcccagagggctcagagaaaaaaatggtttcctgggccaggcccaggtcccacctgctctgtgcagcctcagaatatggcaccctgagtcccagccactccagctccagcagtggctaaaaaggaccaaggtacagcttggaccattgcttcagaaggtgcaagccccaagcattggtagcttccatgtggtgttgggcctgcaggtgtgcagaaggcaagagttgaggtttggaaaccttcatctagatttcagaggatgtayggaaacacttggatgtctaggcagaagtctggggcaaggatggagcctttatggggcaaggatggaacctctactagggcagtgcagaggggaaatgtggggttgaagcccccacacagagtctccactgggggtctgcctagtggatctgtgagaagagggccatcatcctccagaccccagaagggtagatctatgaacagcttgcaccatgcacct

SEQ ID NO: 871801 - DNA, 619 bp, Homo sapiens
cttctatactggtaataaaagtaattgtgaagccaccatctctaataatcactggttatctggtgatacatacagcagttattatatagaataatattataatttcttgtctaaatacttttagtaaaaaataattaataaatatctgggtaaaggcagcaagtaattcagggtcacacacatttttccaatattaaacaaaataaaatttaaaaagttaaccaaaaaaaagcagccaaaaatttactagtagcaatcaaaccaggaaaaatactaaattttatgacaaatatttctaaaggtgaagccaaggaaaaaacttgaaatgtttctaygtaggtttaagccacagtcagaccaacagccagaagcaataccaatgaaagaatgataattaataaaatcttatgaatatgtatcactattctttaatgtggagagatgtgagtcaatgaaatgagtaggaaatactgggaaattagaaaaatatttaagtatgaaacacctacctgtcactataagaccagagcaaaggcagagaggacagtgagggtttgcagttttctggtcccttgctgaactgggagaatggaaggagtctacatccatggtgggtgga

SEQ ID NO: 871802 - DNA, 603 bp, Homo sapiens
attgtatttctaccatgttagtggttacccttaaattgttcacattagtaattgatttaacacagtctaaagttaatcattatctttattatcttttcacataatgcaaggaccttagaatagcttaaagctaaccagttcctcttaagtgttattgctagctagtgcaccatttcaatctttttagagttctaagaacaagtattattattattgtttgaaatagtatttrtttagatataaccatgtgtttaccattttctttgctccttctccttagtggatctccaccctccctgctggaatcattttatttgcttatagtgtactttttaaaaagtgcattgtatgttatggcatattctcttgtttttgtttctcgtttgaaaagatctattttttggtcttcattcttgaatgatagttaagttaatggctattttcccacagcattttagagatattagttcaccacggtcagtcttccattgttactgttaagcaatctactgcctgttaaattcctttgtggttaatctcctttcctctctgaccttttttgcggttttctcatagtcaatatatgtaattgctaactgtcat

SEQ ID NO: 871803 - DNA, 579 bp, Homo sapiens
cagaggcttaaaacagccacatcgaatgctgtcttagggttctgcccccacatagtattatcttactctgtaatcctgggtggacttgcaggccatcatagcagaacgaaagaagaaaatggtgaagtatgcactgattcttctgctgagaattcttttctcttctttttcttttcttttcagacagggtcttgctctgttgtgcagtctggagtgcagtggagtgatcacagctcactgcagcctcaaattcccagtctcaaacaattctcccacctcagcctccagaatagctgggaatacagacacgtgccaccatgcctggctaattaaattttttttgtagagatagggtcttattatgttgccyaggatggtctcaaactcctaggctcaagcagtcctcctgcattggcttctcaaagtgctgagattacaggcatcagccactgcatctggccccttctgctcagaattcttgtcacaaggccacctacttcatgtggagttgatgcggttctacatatgcctggaaggggagagcagggataatggtaaaacaccccaatggctatcaca

SEQ ID NO: 871804 - DNA, 619 bp, Homo sapiens
tctcaagagttcaattctttctgcttttgtttcattattctagacaggtttttgtgctttagaaatgctcagcagagtactttttaattcactgtttttcaagtaagattaattttcacatttcccacaggtttagtctttaatctgctatattataggactagaaaaacatagcaacaatgagtagatgaggttttgaatttcaagacgyggagccaagttgatggtacaacagaagggaaaaatatatctttctcacacacagaaacatcagtaatgtgttttgtggaaacttttaggtagctagatcccaaatttaaaccaaaaacaaaaaagtaagcaagctagggaatctatgaataagtaagcagaggaaatcaggctcttccattctcagtgggtttgtctgatctatatatttcctccaattttaggcccaaatttccccagaaaggcatttttaaaaaattgtataagccacagtgacttaactcttcaacaccgttatgtttgtaacttggcaaatgatcatctccagctctttggagagggttgttaaaattcatcttttaaagaaaccacttaattggctcattctaggaaaagcaacaacgctttt

SEQ ID NO: 871805 - DNA, 460 bp, Homo sapiens
gatgattataggtgtgtggttttatttgagtctctattctgttccattggtctgtgtttgtttccttaccagtaccatgctgttttggttactgtagccttatagtatagtttgaagtagggtagcatgatgcctccagctttgttctttttgttagggttgtcttggctattcaggctcttttttggttccatatgaattttaaaatagtctttctaattctgtgaaaaatatcaatggtagtttaatgagaatagcattgaatctataaattacttttggcartatggccattttcatgatctttattcttcctgtccatgagcatggaatgttttcccatttgtttgtgtcctctctaatttccttgagcagtgtgaagacgtttatgtggcccacaaacatgaaaactcaacattactgatcattagagaaatgcaaatcaaaaccacagtgagat

SEQ ID NO: 871806 - DNA, 541 bp, Homo sapiens
ctggtaccatttcttctgaaactatatcaaacaattgaaaaggagggactcctccctaactcattttatggggacagcatcatcctgataccaaaatctggcagagatacaacaaaaaaaaacttcaggccaatatccctgctgaacatgcaaaaatccccaataaaatgctgacatattgaagtcagcagcacatcaaaaagctaatccaccatgatcaagttggctccattcctgggatgcaaggctggctcaacatatgcaaatcaataaatataatccatcacgtaaacagaaccaatgacaaaaaccacatgatcatctcaatagatgcagraaaggccttcaataaaattcaacatcccttcatgttaaaaactctcaataaactaggtattgatggaatatatctcaaaataataagagccattcatgacaaattcacagctaatatcatactgaatgggcaaaagctggaagcattccttttgaaaaccagcagaagacaaggatgccctctctcaacactcctatttaacat

SEQ ID NO: 871807 - DNA, 657 bp, Homo sapiens
tgactttgcctttgacattggctgctttgaccttatttaagggtgccattttggttttatccaaggtggagatgaatgtgggggcactttggggaggtattccttcactgagctcctgtctgctgtccagtctcatttcctgtttcatctttcacagctatacctcatggtggtagccaggtcctattactaacagtgcctgaaggcactttgtgtcaggattcctttcacactcattctcctttgaaatagccttactggcctgaggtaggagctgctgggagtgtctccatggcctccagcatctccctttaatacacttacttcactgtctgatgccctgggaagacagcatgcctctygagaacaggaaccatggttttagttctctttgttgtcctagggcctcccaaggaacatggctgaggtttgctttggattgactgtattattagctaatgtaatatttacttttaagattttttaaagtcaaagactaattgcataatataatgacattagaacccaaaataaaatgaatattcccctttgatgttttaaagaatcatgcagtttcccatttataggttgtcataatcattattggaagagacgtgaactaggcaggaaagggacaatatgtgtgtttagccctgt

SEQ ID NO: 871808 - DNA, 656 bp, Homo sapiens
actggctattccttcccggttttctttgctgcatttttcctccactagatctctaaatgtcagctttttccttggacttttcctccccttttactcactctccaaactctaaaatagatattttctgagctgaaatcttctctggatcctagactcacatagcctaatttttactagacacttctgctcagaggtctcagagcaagttggatttcagaaactaccggttcaaaataaaaattatygtttccttttcttcccttatcaaatcatctcagtatctggctccactatccatctaatttctgaagcagaaacctagcagtctaattcttgttctcttcccatagctaatctattagcaagtccttgtggttcagtctccaaggacctcagaaccagcaacttccctccacctctctgccaccactcgaatccaggctgtcttcatctctctcttggaatgtgcaggagctctctaactgttctttctgtctctacccatgacttctgacagtccacttaccatgtgcagacagagaaatattttaagataacaatcgaattacatcctcaccttgatgaaattcatcatgattttccattccatatagcataatgcccagggtccccaaaagggcctacaaaggcccaca

SEQ ID NO: 871809 - DNA, 675 bp, Homo sapiens
gcatggaatgttcttccatttgtttgtatcatcttttatttcattgagtagtggtttgtagttctccttgaagaggtccttcacatcccttgtaagttggattcctaggtattttattctctttgaagcaattgtgaatgagagttcattcatgatttggctctctgtttgcctgttattgctgtataggaatgcctgtgatttctgcacattgattttgtatcctgagactttgctgaagttgcttatcagcttaaggagattttgggctgagacgatggggttttctagatatamaatcacgtcatctgcaaacagggacaatttgacttcctgttttcctaattgaataccctttatttccttctcctgcctgattgccctggccagaacttccaacactatgttgaataggagtggtgaaagagggcatccctgtgttgtgccagttttcatagggaatgcttccagcttttgcccatttggtatgatattggctatgggtttgtcatagatagctcttattattttgaggtaagtcccatcaatacctaatttattgagagtttttagcatgaagggttgttgaattttgtcaaaggcgttttctgcatctactgagatagtcatgtggtttttgtctttggtcctgtttatgtgctggattacgtttat

SEQ ID NO: 871810 - DNA, 462 bp, Homo sapiens
gtgcgcgatgcgtaaaagcaatatcactgtgctagcaaccaagtagaccatatctcactgacagtgtcaaaggttaggcccatttgttttcaattttaatagaagaatccatttgcagaggattctctgcaaattctaattctcatttctgactttcccccagctcgactgtttagttcctttccttctgtggacatcttttatgcattatcccacatgctctcagcccaatgttttagctcctgcttttgctgtagcacccagtgcagctgcacacaggtataagctgacagcaccttgcytcagttacaccccgtagctcttgatttctgcccagggctgctatgcatcaccatggagggagcctgtggaagccctgtcagctacactagcatatgtccaaacctggaactgtgagggatctaacaccccattagggttcttagaccaatggggggcagt

SEQ ID NO: 871811 - DNA, 645 bp, Homo sapiens
tttataaatcttttctttcatggattgtgcttttggtgttatatctaaaaagtcactgccaaacccagtcacctagattttctactatgtttattctaaaaattatatagttttgctcgtccattttgagttagcttttgtttaagctaaaacagcgtgttagacagagtgtaagatctctgtctagattcattttgtgtgtgtccccagttttttccagcataatttgttgaaaagattgccctttctccattgaattacctttgatmctctttgccaaagatcagttgaatgtatttccaactatttccgttgaatttatttctgagttatatattttgttttattcatctgcttgcctattattttatccatatcataccatcttgactgctgtacttttttagtaaattttgaagttggatagtgtcaattctctgacttttttttttcttcaatattgtgttgcctattccacatcttttgcctttccctataacctttattatttatttatttttgagatggaggttaactctttttgcccaggctggagtgcaatggcgtgatcttggctcactgcagcctccgcctcctgggttctagcaattctcctgcctcagcctcctgagtagctgggattag

SEQ ID NO: 871812 - DNA, 645 bp, Homo sapiens
tttataaatcttttctttcatggattgtgcttttggtgttatatctaaaaagtcactgccaaacccagtcacctagattttctactatgtttattctaaaaattatatagttttgctcgtccattttgagttagcttttgtttaagctaaaacagcgtgttagacagagtgtaagatctctgtctagattcattttgtgtgtgtccccagttttttccagcataatttgttgaaaagattgccctttctccattgaattacctttgatcctctttgccaaagatcagttgaatgtatttccaactatttccgttgaatttatttctgagttatatattttgttttattcatctgcttgcctattattttatccatatcataccatcttgactgctgtacttttttagtaaattttgaagttggatagtgtcaattctctgacttttttttttcttcaatattgtgttgcctattccacatcttttgcctttccctataamctttattatttatttatttttgagatggaggttaactctttttgcccaggctggagtgcaatggcgtgatcttggctcactgcagcctccgcctcctgggttctagcaattctcctgcctcagcctcctgagtagctgggattag

SEQ ID NO: 871813 - DNA, 645 bp, Homo sapiens
  misc_feature 544, 545, 546, 547, 548, 549, 550, 551, 552, 553, 554, 555,556, 557, 558, 559, 560, 561, 562, 563, 564, 565, 566, 567,568, 569, 570, 571, 572, 573, 574, 575, 576, 577, 578, 579,580, 581, 582, 583, 584, 585, 586, 587, 588, 589, 590: n = A,T,C or G
  misc_feature 591, 592, 593, 594, 595, 596, 597, 598, 599, 600, 601, 602,603, 604, 605, 606, 607, 608, 609, 610, 611, 612, 613, 614,615, 616, 617, 618, 619, 620, 621, 622, 623, 624, 625, 626,627, 628, 629, 630, 631, 632, 633, 634, 635, 636, 637: n = A,T,C or G
  misc_feature 638, 639, 640, 641, 642, 643: n = A,T,C or G
tgaattagcaattgccagggtttaaggactgagtgtggcgggggtgggggctggagggaagtatatgtggctgtaaaagtaaaacatggaggactcctgtgcagatggaaatgttctgtatcttgactttatcaatatcaatttcctggttgtgatattgtactatagttttgcaagatgctaccactgggggaaactgggtaaagsgttcattgtatctttctatattatttcttacagctgcagaagaacctatgattagctcaaaataaaaagtttaatttttaaaaaaagcaaaagaaatgcaaaattatgtagttgtgctaaatagtgttagacacaaggccatggtgactgccacaagaattatccctaacatgtctggatggaagtggagatgtgacccaaggcatgtatcagttacatggtgaatgctccaaacaggtgtggaaagccttctaaagtggaattccaagtaagtaggatgggcactggtgtgacgtcttatcccagttctgtctcaaggggatcctcgtagagtgannnnnnnnnnnnnnnnnnnnnnnnnnnnnnnnnnnnnnnnnnnnnnnnnnnnnnnnnnnnnnnnnnnnnnnnnnnnnnnnnnnnnnnnnnnnnnnnnnnnag

SEQ ID NO: 871814 - DNA, 655 bp, Homo sapiens
gggttttcccatgttgaccaggctggtctcaaactcctgacctcaagtgatccagccacctcagcctcccaaagtgttgggattacaggcatgagccactatgcctggccagtattgtacattctatgggtttggacaaacacataatgtcgacatgtatccatcattatagtatcatacagaatagtctcactgtcctcaaaatcctctgtgctctacctgttcatcccttcctcccccaaccccaggctaccactgatttttgttttgttttgttttgktttttttgagatggagtctcgctctgtcccccaggctggagtacagtggtgcgatctcggctcactgccagctccgcctccaggttcacgccattctcctgcctcagcctcctgagtagctgtaactacaggcgcctgccaccgcgcccagctaattttttatatttttagtagacatggggtttcactgtgttagccaggatagtctcaatctcctgaccttgtgatctgcccgatttggcctcccaaagtgctggcattacaggcgtgagccactgcgcctggccccactgatctttttatctttttcctttttgttagtggcagcttggggggtgggatggggtgcaggaaacatattttacatttttatg

SEQ ID NO: 871815 - DNA, 655 bp, Homo sapiens
gggttttcccatgttgaccaggctggtctcaaactcctgacctcaagtgatccagccacctcagcctcccaaagtgttgggattacaggcatgagccactatgcctggccagtattgtacattctatgggtttggacaaacacataatgtcgacatgtatccatcattatagtatcatacagaatagtctcactgtcctcaaaatcctctgtgctctacctgttcatcccttcctcccccaaccccaggctaccactgatttttgttttgttttgttttggtttttttgagatggagtctcgctctgtcccccaggctggagtacagyggtgcgatctcggctcactgccagctccgcctccaggttcacgccattctcctgcctcagcctcctgagtagctgtaactacaggcgcctgccaccgcgcccagctaattttttatatttttagtagacatggggtttcactgtgttagccaggatagtctcaatctcctgaccttgtgatctgcccgatttggcctcccaaagtgctggcattacaggcgtgagccactgcgcctggccccactgatctttttatctttttcctttttgttagtggcagcttggggggtgggatggggtgcaggaaacatattttacatttttatg

SEQ ID NO: 871816 - DNA, 548 bp, Homo sapiens
gggagagctgttctaagagaaagtggtcagcaggccctgaggagaggagactggaggggaggggagttgctggtcaagacagacaggtcccaatggagcatttggagttggtgacgtaaggccccaatgggccatcagcactggctargcttttcagccaaattcctcaggagtgggaacctctgtctggggtgctctctgggggggctgcctgggccaaagaagctggctgttctcatctgaccctctggaggatgctgccatgtcctatatcagaggaaggggtgggaagtgtgccccacctatgtgctctcctctcaaaggcctgagaaccctgggagttggacctgccccttctgtgcaggcaaacaggggcaaaatctgtaggtctgagttcaagttgcagctcagactcttataagctttgtgcacttgggcaagtcatggacctctctaagccccaatttctctgcctcccaaatggacagaataatatctctccaacttctgggatgatgccagtatgataatcccaaaccaagaacgta

SEQ ID NO: 871817 - DNA, 593 bp, Homo sapiens
cccccagatctggagctcccagatgccaggtcagtctggctgaaggcttcttgcatatattgctgatctctcccagccagacggtaagcctccaaagggcaggaactgtcatgaggacatggcaagtgtcaaataaatatttttaaattattgattattttatagtgcctgaaaattttacatatatgatctcatgtcatagtttgctcaaaaagtgaaaaaatttaaaagatactctttatgctggaaaattaggaaaggagggcaaagaaggaaattgattggccatgcaggttcctgttagcctttgcaaaaaacagagaagtcttccttctttccttcctttcttccttctctattttctcccttccttccttccctcttttmtcctttccttccctccttcctttcttcttccctccctccctctctcattccctccctccttctctccctctttttcttcttctctgctttctttccttatttattcatttatctgctcattcatcctccatatagcatgtgcacctaccatatgcagaattctgtgctggggtgggtagggtgggaggcatgaatatgatgttctt

SEQ ID NO: 871818 - DNA, 581 bp, Homo sapiens
ggaaggaacacatgatcctgtaagattcatttagggagggcctgcaactctgtagaaggcagccaggcagtgggtggaattttggggtcactgggaaccagaaaaatcctccagcccccaccactctaccaaagggtctgggcttcaytggagtcactttggggacaaggcagcaattctcaaagaatttttccatcagtgaaagaaaaaaaaaagcatccctgggtaaaattggtttcaaaaactgtgtcaaaaaacttttgtaaagaccttctctctacaaaaaaaaaaaaaaattaattagcaatgcatggtagtgtgtgcctgtagtcacaactacacgggaggctgaggtgggagaatcacctgagcctgggagacgaaggctgttttgagccaagattggaccaccgcattgcagcttgggtgacagaagaccttgtctcaaaaaaaaaaatacattttttttgtttgatgaacttttcagaacctttaccacaccaacagtcattgtgttatttttccctgatatatttggccagattttatttactagtagagcttgggttctagaatattct

SEQ ID NO: 871819 - DNA, 581 bp, Homo sapiens
ggaaggaacacatgatcctgtaagattcatttagggagggcctgcaactctgtagaaggcagccaggcagtgggtggaattttggggtcactgggaaccagaaaaatcctccagcccccaccactctaccaaagggtctgggcttcactggagtcactttggggacaaggcagcaattctcaaagaatttttccatcagtgaaagaaaaaaaaaagcatccctgggtaaaattggtttcaaaaactgtgtcaaaaaacttttgtaaagaccttctctctacaaaaaaaaaaaaaaattaattagcaatgcatggtagtgtgtgcctgtagtcacractacacgggaggctgaggtgggagaatcacctgagcctgggagacgaaggctgttttgagccaagattggaccaccgcattgcagcttgggtgacagaagaccttgtctcaaaaaaaaaaatacattttttttgtttgatgaacttttcagaacctttaccacaccaacagtcattgtgttatttttccctgatatatttggccagattttatttactagtagagcttgggttctagaatattct

SEQ ID NO: 871820 - DNA, 581 bp, Homo sapiens
ggaaggaacacatgatcctgtaagattcatttagggagggcctgcaactctgtagaaggcagccaggcagtgggtggaattttggggtcactgggaaccagaaaaatcctccagcccccaccactctaccaaagggtctgggcttcactggagtcactttggggacaaggcagcaattctcaaagaatttttccatcagtgaaagaaaaaaaaaagcatccctgggtaaaattggtttcaaaaactgtgtcaaaaaacttttgtaaagaccttctctctacaaaaaaaaaaaaaaattaattagcaatgcatggtagtgtgtgcctgtagtcacaactacacgggaggctgaggtgggakaatcacctgagcctgggagacgaaggctgttttgagccaagattggaccaccgcattgcagcttgggtgacagaagaccttgtctcaaaaaaaaaaatacattttttttgtttgatgaacttttcagaacctttaccacaccaacagtcattgtgttatttttccctgatatatttggccagattttatttactagtagagcttgggttctagaatattct

SEQ ID NO: 871821 - DNA, 694 bp, Homo sapiens
gggatacatgtacagaatgtccaggtttgttacataggtatacacgtgccattgtggtttgctgcacccataaagtcgtcatctacattaagtatttctcctaatgctatcccttccctagaccccagcccccaacaggcccccagtgtgtgatgttcccctccctgtatccatgtgttctcattgttcaacttccacttatgagtgagaacatgtggtgtttgactttctgtccttgtgatagtttgctgagaatgatggtttccagcttcatctatgttcctgcaaaggacatgaactcatccttttttatggctgcatagtattccatggtgcatatgtgccacattttctttatccagtctatcattgatgggcatttggattggttccaagactttgctcttgtgaacagtgctgcaataaacatatgtgtgcatgtgtctttatagtagaatgatttataatccttcrggtacatagtaatgggactgctgggtcaaatgatatttctagttcaaatccttgaggaatctccacactgtctttcacaatgattgaatttacactcccaccaacagtgtaaaacttttcctatttctccatatcgtctccagcctctgttgtttcctgactttttaatgattgccattctaactggcatgaggtggtatctcactgtggctttgatttg

SEQ ID NO: 871822 - DNA, 694 bp, Homo sapiens
gggatacatgtacagaatgtccaggtttgttacataggtatacacgtgccattgtggtttgctgcacccataaagtcgtcatctacattaagtatttctcctaatgctatcccttccctagaccccagcccccaacaggcccccagtgtgtgatgttcccctccctgtatccatgtgttctcattgttcaacttccacttatgagtgagaacatgtggtgtttgactttctgtccttgtgatagtttgctgagaatgatggtttccagcttcatctatgttcctgcaaaggacatgaactcatccttttttatggctgcatagtattccatggtgcatatgtgccacattttctttatccagtctatcattgatgggcatttggattggttccaagactttgctcttgtgaacagtgctgcaataaacatatgtgtgcatgtgtctttatagtagaatgatttataatccttcgggtacatagtaatgggaytgctgggtcaaatgatatttctagttcaaatccttgaggaatctccacactgtctttcacaatgattgaatttacactcccaccaacagtgtaaaacttttcctatttctccatatcgtctccagcctctgttgtttcctgactttttaatgattgccattctaactggcatgaggtggtatctcactgtggctttgatttg

SEQ ID NO: 871823 - DNA, 625 bp, Homo sapiens
tgaaactaggcccctatctctcaccatatacaaaaatcaaatcaaaatttattagagactttaatctaagacctcaggctgtgaaaccactacaagaaaacattgggaaaaatctccaggacattggtctgggcaaaagtttcttgagcaatactctacaagcacaggcaaccaaagaaaaaatgggcaaatgggattacatcaagttaaaaagcttctgcacagccaaaraaaacaatcaatgaagtgaagaggcaacccacacgatgggaggaaatatgtgcaagctaaacatgtgacaagggattaataaccagaatatataaggatcttaaaccactgtataagaaaaaaattaataatccgattaaaatggactaaagatttgagtagacatttctcaaaagaagacatacaaatggcaaaaaggcatatcaaaaggtacccaacatcactgatcatcacataaatcaggcaaatcaaaactataatgagataccaacacatcccagttaaaatggcttatatccaaaagacaagcaaaatagaaccctcatgccctgttggggggaaggttaattagtacaaacactatggagaacagtttggtagtccctctaaaaac

SEQ ID NO: 871824 - DNA, 628 bp, Homo sapiens
aaccctattcattgtgatgatatctaatctaatatccttattcagatgtcttccctcagttccagatttaaatacataatcatctactggatacgggcacttggttttatgacagaaacccaaaacatagcaggttagaaacaaaccagtttggcttcccttttaaaacctcctcttgccctttacatcatagtgaatgaatgcaagsacttttattcttgatttcctgccttcatgcttcccatttagtcactaggtcatgacaattattatgactcaataacatttcgaatactattttcagtgttggtgacataaagtaggtcaccatcctctcctacataggtcagaagattgtcacatggtttatttgtttctactttagtttgggagttggggtcgttttacgcaaaatgcagatcagatcccctggtttctaccttgactttttatatattcgaaagaatattattttctacataacaaatatataatatcataacaaagacataaaagatacgtcatctcctgtgtgtttgtatccaggtatctagaaaacaaacaaggaaacaaacagaagatgacctgatctactactaagaacaaatccggcagttttcttgttgtc

SEQ ID NO: 871825 - DNA, 628 bp, Homo sapiens
aaccctattcattgtgatgatatctaatctaatatccttattcagatgtcttccctcagttccagatttaaatacataatcatctactggatacgggcacttggttttatgacagaaacccaaaacatagcaggttagaaacaaaccagtttggcttcccttttaaaacctcctcttgccctttacatcatagtgaatgaatgcaaggacttttattcttgatttcctgccttcatgcttcccatttagtcactaggtcatgacaattattatgactcaataacatttcgaatactattttcagtgttggtgacataaagtaggtcaccatcctctcctacataggtcagaagattgtcacatggtttatttgtttctactttagtttgggagttggggtcgttttacgcaaaatgcasatcagatcccctggtttctaccttgactttttatatattcgaaagaatattattttctacataacaaatatataatatcataacaaagacataaaagatacgtcatctcctgtgtgtttgtatccaggtatctagaaaacaaacaaggaaacaaacagaagatgacctgatctactactaagaacaaatccggcagttttcttgttgtc

SEQ ID NO: 871826 - DNA, 643 bp, Homo sapiens
tggctccttctgactttttattgttccctaatcttaaacaacaaatctttaaagggcacacttttttcaaaagttagtaatgtaaaaaagactgcattgacatggttaaattcccaggcccctcaattctttggagatggactgaatggctggcactatcacttacaaaagtgtcttgagctcagtggaggttatgctsagaaataaagtttgtattttttatttttatcatttaattccattttctacaaactttttgaagtatgtctataacccttccacaggaaagggtataggatattttatgtaataatataatctaatagaaactccacccttccctccttttccataaaaataagagaacattatgggtttaataagtactgaaatattactcagggcaaaaatttatgatatcttttcattatatgacaggtatatccttcataaatgagatgtttttcacatgtctggctgatgcattgagatacataaagctaagcattggccttttgtcactgtatcaaaatatcatctttagccaacattgattattatgttaccaaaatttttagataatgataaaaatctaattgtaatgagaatctctgatgtttgaaacatatgagttaggcaagaa

SEQ ID NO: 871827 - DNA, 629 bp, Homo sapiens
taatggaaatatcgggatttatgtagacatatcttaataatgcagctccagtgcactacgaaaaccattctgtagttcaaggtttatcaaccttagcactattgacactttggactgaatattttgttatcagactgtctcataaattgtagaatgwttagcagcatccctggcctctattcacaggtgctaatagtaacccttcccacttgtgacagccaaaaatgttcacagtcacaagataccctctttctctatattgggaaccactgctgtagtttaagtagccagaataagcattttttttccttccacaagaggaataatgatatctaggcaatgaagttcctagagaaataaaagtgtagttaccagatttgtgacataaagatgttacatatacatatattaaaacatatatatatatatatatatatttgcaaagaaaagagagagagaaagttatgctttcaagtatctaacaagtggaagaggctgaagttataaaacccaaaaataaattaaccattatatctaagcagatgtgccagagggtagtattttcagttagtggcaaatacaattaaatagacagtcagtttgaagcaaataaaattctccatatatct

SEQ ID NO: 871828 - DNA, 597 bp, Homo sapiens
tgtcacattgcaaactaagatcttgtagatttggtcataatggcaaatgtggacatatggtcatgctccatgcagggccactgaagaattcttagttattgttcccatctttcattttaacagaataagagggtagttccttttaatggctctgtactgtatcttcctttggacaarataactagacaggttggacagcaaggtgaatcacctttggtagatactgagtatgaagtacttactcaggctgctccaagtgctgtcaatgagagggagaagggggaaagttctgagcacattagaaagtgggtgaaatttcaagtcctcctttttgtgtacttgacacaaaggaaaagaaaagcattcacagccctcatagaggctgcagggcttttcccagaaccacagaccaccacttacatcccttattgcacaacaggggtttccattctcagtttggtctgtgtgaatgattccaacaggagctgtgtgatgctacagtcctgatggtcttcatagttagtttgataatttggggtagctgcttgaactttttttaattttataagttgaatttatcatattttatattttaaa

SEQ ID NO: 871829 - DNA, 597 bp, Homo sapiens
tgtcacattgcaaactaagatcttgtagatttggtcataatggcaaatgtggacatatggtcatgctccatgcagggccactgaagaattcttagttattgttcccatctttcattttaacagaataagagggtagttccttttaatggctctgtactgtatcttcctttggacaaaataactagacaggttggacagcaaggtgaatcacctttggtagatactgagtatgaagtacttactcaggctgctccaagtgctgtcaatgagagrgagaagggggaaagttctgagcacattagaaagtgggtgaaatttcaagtcctcctttttgtgtacttgacacaaaggaaaagaaaagcattcacagccctcatagaggctgcagggcttttcccagaaccacagaccaccacttacatcccttattgcacaacaggggtttccattctcagtttggtctgtgtgaatgattccaacaggagctgtgtgatgctacagtcctgatggtcttcatagttagtttgataatttggggtagctgcttgaactttttttaattttataagttgaatttatcatattttatattttaaa

SEQ ID NO: 871830 - DNA, 597 bp, Homo sapiens
tgtcacattgcaaactaagatcttgtagatttggtcataatggcaaatgtggacatatggtcatgctccatgcagggccactgaagaattcttagttattgttcccatctttcattttaacagaataagagggtagttccttttaatggctctgtactgtatcttcctttggacaaaataactagacaggttggacagcaaggtgaatcacctttggtagatactgagtatgaagtacttactcaggctgctccaagtgctgtcaatgagagggagaagggggaaagttctgagcacattagaaagtgggtgaaatttcaagtcctcctttttgtgtacttgacacaaaggaaaagaaaagcattcacagccctcatagaggctgcagggcttttcccagaaccacagaccwccacttacatcccttattgcacaacaggggtttccattctcagtttggtctgtgtgaatgattccaacaggagctgtgtgatgctacagtcctgatggtcttcatagttagtttgataatttggggtagctgcttgaactttttttaattttataagttgaatttatcatattttatattttaaa

SEQ ID NO: 871831 - DNA, 589 bp, Homo sapiens
actttctcttctttttccaattaaaaatatactatacacaaatttattcactcaatatttattcaacagtgccaggccatatgtttgacagtggatataaaaactacaaccatagttttatagcattatattataagcacttacactgttattaaataattaaaaaaataactttcaaagcataataagaatgtactaaaattcatttaacatttgtattagtctgttttcacactgctgataaagacatacctaagactgggcaacttacraaagggagaggtttaattggacttacagtcctgtgtgtagctggggaagcctcacaatcatgtcacaaggtaaggaagagcaagtcacatcttacatggatggcagcaagcaaacagagagagcttgtgcaggggagctcctctttttaaaaccatcaaatctagtgagacttattcattatcaagagaacagcacatgaaagacttgcccccatgattcaattacctcccactgggtccctctcaaaacatgtgggaattcaagatgagatttgggtggggacacagccaaaccatatcaacattggtccaatatt

SEQ ID NO: 871832 - DNA, 589 bp, Homo sapiens
actttctcttctttttccaattaaaaatatactatacacaaatttattcactcaatatttattcaacagtgccaggccatatgtttgacagtggatataaaaactacaaccatagttttatagcattatattataagcacttacactgttattaaataattaaaaaaataactttcaaagcataataagaatgtactaaaattcatttaacatttgtattagtctgttttcacactgctgataaagacatacctaagactgggcaacttacgaaagggagaggtttaattggacttacagtcctgtgtgtagctggggaagcctcacaatcatgtcacaaggyaaggaagagcaagtcacatcttacatggatggcagcaagcaaacagagagagcttgtgcaggggagctcctctttttaaaaccatcaaatctagtgagacttattcattatcaagagaacagcacatgaaagacttgcccccatgattcaattacctcccactgggtccctctcaaaacatgtgggaattcaagatgagatttgggtggggacacagccaaaccatatcaacattggtccaatatt

SEQ ID NO: 871833 - DNA, 608 bp, Homo sapiens
acaaacttttaaacaaccagatctcatgagaactcactcactgtcatgagaacagcaaggagaaaagagactccaatgattcaatcatctcccactaggcccctctaccaactttaggattacaaatctacatgagatttgggtggagacctagacccaaaccatatcacacacctaatatcaaatccatcagccactatttctagcatctgttaaccatctttctaccctctckgcccatgagttcaattatttttatttttaaatcccacaaataagtgagaacatgagatgattttctttccatgcctgtcttactcaacataattatctctagatccatccatgttctcacaaatgcctgaatctcattttttatgcaccattttttataagttccccattttactatccattaatcttttgatggcacttaggttgcttccaaatcttggctattgtgaacggtactgcaacaaacatgtgaatgcagatatctcttttacatattgattttccttatttttggatgtatgcccagcagtaagattgctggatcatatggtagctctatttttagtttttttgtggaacctccatgctgtttc

SEQ ID NO: 871834 - DNA, 600 bp, Homo sapiens
taagattgcttggtattggaacaaaaatcagtcattcctgatcagcacacagcataaaaaaaaatcttctaaaaatgttgcataatggtttaatgttttgctacagatatatttatacatagcccacttttgatcagttgagtgacctcatgataaatatatytgggcatttaattcaatttctctctatactgcccatttattaggtatatcacttattagcattttcatgaaagttgggaagaagaaatggtgtttgaattagttactttctctatatgttggcagcttctctaaaatgtcttcagggaaagattttaaattttggctgtagtaaaaatataaaaggtctagaaatttctattacccatgctatttcttagaaaaacagaagtttacaattaggtttttttgtgttcttattagggagatgttgctagccctgggactgtagtcgtatctccactttatttactattataacctaatgagatgttagcatcgttataaattattctttatagttaattgtatgagattatattaatttccatcagctactgttccacttaatagaggatatgcagctacgggtagcaa

SEQ ID NO: 871835 - DNA, 600 bp, Homo sapiens
taagattgcttggtattggaacaaaaatcagtcattcctgatcagcacacagcataaaaaaaaatcttctaaaaatgttgcataatggtttaatgttttgctacagatatatttatacatagcccacttttgatcagttgagtgacctcatgataaatatatttgggcatttaattcaatttctctctatactgcccatttattaggtatatcacttattagcattttcatgaaagttgggaagaagaaatggtgtttgaattagttactttctctatatgttggcagcttctctaaaatgtcttcaggraaagattttaaattttggctgtagtaaaaatataaaaggtctagaaatttctattacccatgctatttcttagaaaaacagaagtttacaattaggtttttttgtgttcttattagggagatgttgctagccctgggactgtagtcgtatctccactttatttactattataacctaatgagatgttagcatcgttataaattattctttatagttaattgtatgagattatattaatttccatcagctactgttccacttaatagaggatatgcagctacgggtagcaa

SEQ ID NO: 871836 - DNA, 535 bp, Homo sapiens
agcatgagcctgttagatttacagtgattgaagtttattaaaaatatatatcacttatatagcaactgaaatattgaaagcacttgcatgtatgttattttaggcaaatactagaagtattttataaatgcattgtatcagacttttttccatatatttctgccatgatatttgaacataaatgcaggaatataatattcatcctgtttaaatttcattttattcttcagacaatgttctgtctatcttaratgctactttgacaacccggataaaacaaatatgccctggaaatggaaggctggatccttacacactttaaaaattatttattttagtctctactaatatacacttatttgtcacaaagcatgcaaagagttggtaaataaacgctataacattttggatttaatcattgtggcatagtggttaagtgtggtctctgtgtccaaaaagcctgagtttaaatcctagctctgctatttaattgtataactttagacaactgacttaatcattctctgccgcaagt

SEQ ID NO: 871837 - DNA, 641 bp, Homo sapiens
cttacttttgtcaagtttgtcaaaaatcagatggttgtaggtgtgtggctttatgtctaggtactctattcagttacattgctctatgtgttttttgtttgtttgtttgtaccagtaccatgctgttttgattactttaacctttgagtacagtttgaagttgggtaatgttatgactctggctttattctttttgcttatgattgctttggctattcaggctcaattttgttccatatgaataccattcctatgaaattaccaacatcatttttcacagaattagaaaaaaacttcaaaaatgtcataggaataatgttgaatctgtagattgctttgggtagaacggccattataacaatattgattcttctaatctttgaacgtgcaaagttttttcatttgtttgtgtcatctgtgattcctttcagtagtattttgttgttctccttgtagaaatctttcacctcyttgtttagctgtattgttaggtatctgtgtgtgtgtgtgtgtgtgtgtgtgttgtgtgtgtgtgtatgtgtggctattttaaacgggattgggttcttgatttggctctcagctacaacattattgatgtatataaatgctaataatttttgtacattaattttgtatca

SEQ ID NO: 871838 - DNA, 578 bp, Homo sapiens
cttagagacctacaaagagacttacactcccacacattaatagtgggagactttaaaaccccattgtcaatgttagacagatcaacgagacagaaaattaacaaggatattcaggacttgaattcagctctggatcaagaggacctaatagacatctacagaactctccaccccaaatcaacagaatatacattcttctcagcaccacatagcacatattcaaaaactgaccacataattggaagtaaaacactccttagcaaatgtaaaagaacagaaatcataacagtctctcagaccacagtgtaatcaaattagaactcaagattaagaaactcactcaaaactgcacaactacatggaaatggaaaaacatgctcctgaatcactactgggtgaataacaaaattaaggcagaartaagttccttgaaaccaatgagaactaagatacaacataccagaatctctggggcacagctaacgcagtgattagagggaaatttatagcactaaatgcctacaggagaaagcagaaaagatctaaaattgacaccctaacatcacaattaaaagaac

SEQ ID NO: 871839 - DNA, 574 bp, Homo sapiens
ctttcagagaaagatggacttgatacagataataaccttctacttgctttggctgcattgactttatgtgttacaggggaataagatgttttatgaccaagagatatacttggttgtgaaatagaagaggctccacgatgctgggcgtctgtactaacttgatcttctggagaacatcgttggaagctctggtcctctttgcagcagctaagagtgagaaragggtcaaatgaggaaaaaaaatagggagcagagtggagacctgccaagcctcctgaagaataatatccaccttttggtgtccaccaattggtattgtttccatactaatatgaaaacagcagggaataagaagaataggggagcttaagttaatggtcacacagatgtacccaaaagaatgcgggagtctaagaggttatctctacctacacagtacctacccactctattaaaccttgggaagagaagttgaaaaaatcagggaagcaggtagaaagaaagatcaggggaaacatatgcaaggataccagaacaaaaagattcccaaaggaaaagatagaactggttttaa

SEQ ID NO: 871840 - DNA, 628 bp, Homo sapiens
gttttagaaatagggtctcacactttgtcacccaggttaggagtgtagtggtgcaatcacagctcactgcagcctccaactctaagttcctgggctcaagggatcctctcgcctcagtctcccagctatctggaactagaggcatgcaccgccacgcccagctaattttttttttttttaaataaaaatcatctttttgttttttttgagacagggtctcgctctgtcacccaagctggagtgtagtggcgcaatcttggctcactgcaacctctgcctcccgggttcaagcgattctcccaccttagcctcctgagtagctgggactacaggggcacgccaccatgcccaggcccagctaatttttgtatttttagtagacagagggttttgccatgttggacaggctggtatcaaactcctgacctcaagtaatcctcccgsttcagtctcccaaagtgctgggattacaggtgtgagccaccatgcatggcccaaaaccgctatttttaatgagctgcatagtattaatttcaaggatgcgccaaaatttgcctaaccaataccctgctgccatatgctcatggttacttaatttggaggcatgatgggaagggttgtcatgaaa

SEQ ID NO: 871841 - DNA, 497 bp, Homo sapiens
ctaagatcttttgccttcctattaaaatttaaaattatcttcttaatttctatataagtaaaagcctcctgtggttatgatatggattgtgtggaatctaaattgaagagaattcacattttaagatatactgaggcttccaggcaatgaacatggtataactttccatttgtttatgttttccttgttttttctcagtaccattttgttttcgttatacaggttatgtacatctttaaaaaactgatttttttcttttttgctattatragtggaattttaaaagtttattttccagcaggctgggtgcagtggctcatgcctgtaatctcagcactttgggaggccaaggcgggcagatcacgaagtcaggagttcgagaccagcctggccaacagggtgaaaccctgtgtctactaaaaatacaaaaattagctgggcgtggtggcgtgcgcctgtaatcccagttacttgggtggctgaggcaggagaactgc

SEQ ID NO: 871842 - DNA, 624 bp, Homo sapiens
ctgtttctactaaaaatacaaaaatcagccagacatggtggtgggtgcctgtaatcccagctactcaggaggctgaagcaggagaatcacttgaacctgggaggcagaggttgcagtgagccgagatcacaccactgcactccagcctgggcaacagagactccacctcaaaaaaaaaaaaaaaaaaagaataaccacctagaattaaaggaaaaaaaaatttagagatgagsgtcttgctatgttgcccaggctggagtgcagtggctattcacaggtgtgatcatggcacattgtagccttgaactcctgggctcaagaacttctcctgcttcagcctcccaagtagccactgtgcccagcaatttttaaggggactctgtccacatgggcttcttcaaaaagaccttggcagaaaaaggtggaggcccaactggagatagaggctgaaggaggaccataagtgaccagctgaaggagaggcccctttggactcttgaagactgcagtcccaggggaccaagagggttccatacaaggtgacaaaggtaccaaagagggaagcaccagccatggccagggaaggtcaaagagatacttcatccatgctagaaacaaaggatg

SEQ ID NO: 871843 - DNA, 619 bp, Homo sapiens
atataaacagactgctttaaggagtcaaagttgacttatagagccaataaaagccccttgggaaaactggcctcacaccttgtctatgcagtccctgtacagggttcttgacttgtggtaagtaaaaatgtcactttctgacaggcccaggagccccaagttaccttgggacctcgagaggagaggaattcacccaactcataaaggcgtttgttggcacagataaatctgtggctgggctcaagaccttaaaaaacctaatctgagattatttatgtaacaaagttccatcaaagcctatttamaaagagcctatatggcagataattattcttgctgccctttatgcaaaaatcaggcaaaatataataagactaaaacttattttgcaaacaaattggtcctaccacgatttatcttttataaaaatgagagacttcagagagaaaaaattatactacaaaaaactatagtacacgtgttgttagattctagtcttgaccattgttttttgggtttttattattgttcaaaatttggactgactcctaaattctttctgggttacaagtccccaaactgttttcaaatttttcttccatttttctgagtaaattca

SEQ ID NO: 871844 - DNA, 608 bp, Homo sapiens
ctggcctagggcaggtcaagaaacaccatccaagagtcaagtcctggaatcagggaccctaaagagcctgcttggtgctttaccccactgtggttgtgctggtacctaaggggcttttcttaagcagaaggagttttgtcccatagccaccagagctggtaatatactgaatcttacctgaagccagcaagtctcagaggctcaccctcggcccacgatgtagtacttgggtattgctgctggttattcaggacccaaggactcttcagttagcaggtgatgaatgccgccaggagtaagtccttcccttcaaggcagtgagttcctttctggcccggggtgtgtctagaaatatcatccaggagctagcgcctcacaattctgaccagtgctctaacctgctgtgaytgagctggtatctgagatgtaagtcaatgttcttcccactcttccctctcctctcctcaagtataatattaatagaaggaaggcgtctcttttggagccgtgagctgtgcagcctggagttaagggaggggttatgccagcactcagtcaccctagctggtgtctcaattagtcatatgccccccagtccactgtctttg

SEQ ID NO: 871845 - DNA, 442 bp, Homo sapiens
agaattgttgataagatttgagtggagatacactggattccatatgcaaaagtgagactgtagaaaggcaagaatgcttgtgaagagggcagataaaaagatataatccagaggagagatgcttcctggaactaaaagtgattgcagtaagtatasagtaagaaatggtctatatctttatctatagatgattgatagatagatggatagatagatagatagatagatacatagatacatagcgagagagagaaagagagagagagacaaacatacatacatacatatatgtatgtatagctaccccagcctctcaaagttctgagattacatgtgtgagccaccatgcccagcctgacaacttggttttgagtagagaaattaagcaaccctaaagagtatatgaggatatgaggatataagaaattttgttgctgacaga

SEQ ID NO: 871846 - DNA, 442 bp, Homo sapiens
agaattgttgataagatttgagtggagatacactggattccatatgcaaaagtgagactgtagaaaggcaagaatgcttgtgaagagggcagataaaaagatataatccagaggagagatgcttcctggaactaaaagtgattgcagtaagtatacagtaagaaatggtctatatctttatctatagatgattgatagatagatggatagatagatagatagakagatacatagatacatagcgagagagagaaagagagagagagacaaacatacatacatacatatatgtatgtatagctaccccagcctctcaaagttctgagattacatgtgtgagccaccatgcccagcctgacaacttggttttgagtagagaaattaagcaaccctaaagagtatatgaggatatgaggatataagaaattttgttgctgacaga

SEQ ID NO: 871847 - DNA, 442 bp, Homo sapiens
agaattgttgataagatttgagtggagatacactggattccatatgcaaaagtgagactgtagaaaggcaagaatgcttgtgaagagggcagataaaaagatataatccagaggagagatgcttcctggaactaaaagtgattgcagtaagtatacagtaagaaatggtctatatctttatctatagatgattgatagatagatggatagatagatagatagatagatasatagatacatagcgagagagagaaagagagagagagacaaacatacatacatacatatatgtatgtatagctaccccagcctctcaaagttctgagattacatgtgtgagccaccatgcccagcctgacaacttggttttgagtagagaaattaagcaaccctaaagagtatatgaggatatgaggatataagaaattttgttgctgacaga

SEQ ID NO: 871848 - DNA, 442 bp, Homo sapiens
agaattgttgataagatttgagtggagatacactggattccatatgcaaaagtgagactgtagaaaggcaagaatgcttgtgaagagggcagataaaaagatataatccagaggagagatgcttcctggaactaaaagtgattgcagtaagtatacagtaagaaatggtctatatctttatctatagatgattgatagatagatggatagatagatagatagatagatacatagatasatagcgagagagagaaagagagagagagacaaacatacatacatacatatatgtatgtatagctaccccagcctctcaaagttctgagattacatgtgtgagccaccatgcccagcctgacaacttggttttgagtagagaaattaagcaaccctaaagagtatatgaggatatgaggatataagaaattttgttgctgacaga

SEQ ID NO: 871849 - DNA, 618 bp, Homo sapiens
tatggcatattcccattgcaatgcctattcctgaatgaatattttcttttagagggtctctcaatgttatgtagacagtgcttcagaagtgggaccaaaatgaggtcaccttggatgaactggctgcctctggaatccagtgtggtaccaactgagtccttcacactctacrtttccatgaattgccttttttgccctaatgaatctcctctgggattatctgactactcattatttgcaaattcatttttacattatttgggatctgagtcagtgataagcccaccttaaatacaggacctggcatcccccttgagactacaaaagtattgtttgcttttggcaggccttttctggtataaagacaagtgtccttatttgaatactctggtttccaagaatagatgttttgtctgtgagacacatcttatctggtgaattcactttggttctgtttccctagtttaaaatgttgttttgtctgaatgcctggcttaaaatttctgtgaacactattattttggtttggttacatgcatctgtaagtgatttggctctttcatgtttgattctccccttgcttgctcttccaagagcaaaaataaccattctaaatag

SEQ ID NO: 871850 - DNA, 647 bp, Homo sapiens
gggtattttcaaaaacaaataaaaggcaaacaaactttgccaatttgttaggcaaaattttgtaatttatctttattttcatttgcattagtaaaatgaatgatagttcactatttgtttttcctcctttcgaaaatatctgtttatataatttgcytatttaatcctactgcattcttcttttttaaagaagaggcaggactactaattcttcagtgactcatttgatcatgcagatggtgccaaacataaaatggtttgttttcttgaactgaattgattactttcctgtgaaagaacccagggaaatgaattctaagtgatgtgacttgtccgattcccagaagcataatgatttcagtaggaagagttatttttgctgatggagtttttcagaagaaaatatttatataactctgaaaagtcagttttcacatgcaaatttactcttctgcattatagaaagagtccagttgcggaactgcctcatattttttcatcactgacatttcaatatccttttatttccttctaatctctttttctcttttactcagctcatgcaaaccaacaaacattggacccagaccaagttttttacttaccccttttttctctcttagaaatgaataagaattgctttcaaa

SEQ ID NO: 871851 - DNA, 649 bp, Homo sapiens
tctcctgcctacacctaccaccacctcatttcatgccctcctttgccttacacactgctcaaactccgctggtctggtttaaattcctggcacacccagtcccttcttgcctcagagcctttgcacatgctactccctctgtctggagtgtcccctcctccttgcccttcagactttgcttcactgtcacttcctctgagaagccttctcctcccctagaactactataacttaggtcctcctctcttattttttctcctaataccatgttctttttcttctcacatttaatatttgtaatcataggcttagctatttatttaatactttaatccatctctcctattagaccttaagtccatgacacaaaacaagtcttttggtttaacaccatacccccagttcttagcactgtgtctggcacatattagggattcagtatatatttgcatgaatgaatcattgartgtctttataaaaagggaataatatcatattcctgatttttcccccttggttcttaaagatagtaggtagccttctcaactggaaggcatttgatagatatgcttttatagttttatatgattctgaatatcctggcatttgctatgcagagggagactactgcttatgcttatttcatggt

SEQ ID NO: 871852 - DNA, 626 bp, Homo sapiens
cgggaggctgaggcaggagaatcacctgaacctgggaggtggaggttgtggttagccgagatcatgccattgcactccagcctgggcaacaagagcaaaactctgtctcaaaaaataaataaataaaaataaaaataatttttttttaaatatgctgttttgtcgtcttccatcctaaaacaaaacctgcattaccccagtttgtatcctatattcccaattccctttataacaacactcttctaaaagttttttatatactttttgcttctaattccttctctccagagattgaactgcctgtttaacrtctctacttgtgtgttaaatgtacatctcaaacttatctctaaaacaaatctcctgatatattgcccaaagttaatctatccagtcttctccattttagcaaatagctattccatttttccagttgcttaggatacaataaaacaaacaaatacaacttggaatcatcctttattctcttttgctgcatagtcaacccattagcaaaggttctcagcttttccttcaaaatatatctagaaatgaatgtcttctcaacacttccacgagtggcccaagattttagtacctctcacatgattattgaggtttcctta

SEQ ID NO: 871853 - DNA, 683 bp, Homo sapiens
tgggcaatgtgtgtacaacctagtactaaagtacttggagatgtcagtttaaagctctagatactctttaagggtttcaaactgatgatttactaaaatgtttagtgtcggcaagcttacaaagtaccacttctactagatatgagggataaaccaccagaaaaataaaatctatggtttaatttataaattatactctaagcaccactaagaaaacccaataagacctctgattatgtgattagttttggtcttacacaattcaacagcccagcttaattaataattacattaagttggtcaactgtaccaagtaytaggaaaggaatttttttttgcctatggtctcttgtgcctaatacaggagactgatttataatggtaatagaccttcctccttatggatattgtgttgcttagggacacatgttatgagtgccttaggaaaaaacatcggcaattgaaaggcttttgggtatacatattctgtcatttagcgcccaaaaaacagtttatatgggaatcacaaaggctgattggctaagatttctaagataaattctagggtttaatttataaattatactctgagcaccactaaggaaacccgataagacctctgattatgtgattagtttttgtcttacacaattcaacagccctgcttaattaataatgacatt

SEQ ID NO: 871854 - DNA, 613 bp, Homo sapiens
tagacaagtaatgactatccatagtgacatatcttgaaccaggccttgtatttttttaatagaatgaaattttgaatggcacagatattataaataataacaccctgcacttacttagtactttttagttactcaaaaacaatcatactcattcttttttagtaaccttatgggagaaatagaagagagattctgatttccatttttgttagtgtggaacctgatgggaagagaggcaattttccgaaagtcagataagtcaaagatggcagaccaggactagaagccatttttttggagctccagtctgatattcttcctgataatcttctctctgtttgttccttcccctgtcaatgtaaccctcaaaatytacagtctatgacagggttaatcatgaccttataaattttatgtgtccctatcctctatagaaaaatgtttaatctctaactcactctcaatatgccccataatctccctcccaaatttctttgctgtgttatttgcactacttctttcagttttttttttcctttcgatctccagccttataccacaagcatttctaactactcaatctaattcccactttcctcaaattctttgtggt

SEQ ID NO: 871855 - DNA, 599 bp, Homo sapiens
taaattttaatatttgaataatttcaagagtttgcagattggagggttttcatctatttgctttttacagttacatttgccatgaagactgcaaatccacaaatttctcccctctattattctgaaacacaagcctcaataacaattaaccttattttactggcaactagattgtcattaaacaagataatgttttaattacaaagattaacctgaggttactgggatagaaccgtgcatctsttttgtgctgaattgctaatgatagggtattttatgagttctgaatcatgctgaattaagtaaaatacaaatatatttgtttactgtatttcattagtaaatctgaccacattaggtatttgctatactcattttcatctagtttaatttaaagcacaatttagtataaactctatgtgttgtttcagtttccaaagtggcactttttgaaagtttatcacataagagtgaattgaaacaatacatttgttacagcaaaaactaacaaaacattttttgaaaccagagtagataataaaaaatctgaaaattgacgtaacatacccaaaatgatactgaaatttgttttaagaaca

SEQ ID NO: 871856 - DNA, 681 bp, Homo sapiens
cagaagaaggttttagggcaagccacaggtgttttgtggttgtgattgcagagctaatgatcacacttcttcagtcttgcatcactggtgaggatgtttgctttggtacccaacacaaataaggtatactgagagctggccaaatgaaaaacagttaccaaaacttaaaaggagagaaggaaattaataaagagatgaagttggagagaaagagaaaaaataagagaaggggaagaaagaagtaaggagaaaagaaaaataatggaaagagatttttcaaatccactgaaatggtaatctagagaaaaacagtagcagagtattatttaaaagataagagaaaaacacaagaagttcagaaacactgaggaattcaagctgcatagaaatctagaggggagaccattaacttctaaatatacacggcttttctcaacattcattgctttgaagaattctgcacgcactctgactgccacccttgcctttttttcttacttaacccayaatcaatagaaaagcaaagaaaattagaagaaggtggaaaaatataggaaaagaaaagaagtatatgtaaaagataaaatggagctatccttaggaaaatgccttggagaaaaggaagaggagaattagaatatcttggaaaggatgggagtaggctggtggctgttgtttcaa

SEQ ID NO: 871857 - DNA, 640 bp, Homo sapiens
gactcaggaagtacataaactgatagtaatacgtgtacaaaacactctatccagaagaacagtttctttagctatatagatttccagaaaagccatagttttatttaatattttctttaatggaatatatgaaagtggagaaaacactcacaaattttgctttcatatattcatactgaaagtgatctggaaatacatatattagggcttagaaatcttttacttttggtccagctattccagttttgttaatcaatactaaagaaataatccacaatataaataagctttatatacagtgacatctatcattacaacaaattgccactaaattaaacacagaacaacaaataatggttattgatgcacatccagtcaactcaatattaatcttytaaagaattatttttcaaaattatttagcattgtgggaaaagtgtgcatttaaaatttaaatttgacatatcaggatgcaatactgtagtttacataaaattacaataatgtttaaatgaagactggaggaaaacacatgcattcttttctctttttatttgtatcctttggaatcactttaacaaggacagctcttgtaaatgaggaaaaaaaaaaacccactaaaatatatgtagtgaccgcc

SEQ ID NO: 871858 - DNA, 571 bp, Homo sapiens
gcctgtaatcccagctacttaggaggttgaggcaggagaatccttgaacctgggaggcagaggctgcagtgagctgagattgtgccactgtactccagcctggataacagtgagactctgttgcaaaaaatttaaaaaaaaaagtaatgctttattcttttattctaactctagattcaatcacctgactaccttatagttaaaagtcttttctgaccttattaattttgaaattgagacccaacctttttaggccttattacytcattctactggttatataccccctttaaaccataagaaatgggattcacatcctttgattctataactgctagaagttagaagatctgttttactttgaaatgcctaccatttgttgagaagtgggaactgttgtgtatcaggaaatgaagaaaagtagttctacctattaacaaagttttccccccaaaaagacaagagacagtgggacataggtaaaagtccacatagctgtcactcctggatgtttctgtttacaccggatggataccagaatcatgctttcattctctaaggcagcatgttt

SEQ ID NO: 871859 - DNA, 587 bp, Homo sapiens
cctgcccctgggtgtgttcattttggaaagaaagctgatatggcccaaagatctcttgaggctctggaggactgacagtggagcaacacaagcatgactggtctgtgcttcctgattaacaagagcagaggcaacatcagaaaacagcaatgaggaaatgcggattaggccagatgctgagttgaggagartgcctttactggtcttccttggaggcagaggtgtgtctcccttggaggcagaggtgtggctctcttgacccactaaactgcatgaagccattgctgtgtttgcatctgatgttaggccaatcacagtactccttgcaggagttttacacacccaccatgtcacatttatatggtacaaatattgagagcttattctgtttctgctaaagttgtaagagctttacctgagtaaccttttaatcttcacgctacatttactttttttttggagatggagtctcgctctcgctctgtcgccaagctggagtgcagtggcacgatctcggctcatggaaacttccgcctctcaggttcaagtgattctcctgcctcagcctcccgagtagctggaactac

SEQ ID NO: 871860 - DNA, 543 bp, Homo sapiens
ataaatggaaagttctatcatgtttatggatcagagaactctacgatgttaagatatcaattctcctcacattgatctatagagtcaatgtaatccaagctaaatctaaaaatctaaaatgtatacagatatacaaaggactagaagagccaaaataatcttgaaaaagaaaaataagttaaaaacttgcattaactgacctcaagggttactacagaacaacagcaatcaagatagtgtgatattggcataaggaaagacaaatagattaatggaataaactaaagaatccagatatatatccattctttttytttctttctttctgagacagggtctcactctgtcacccaggatggagtgcagtggcacgatctcggctcactgcaacctgtgcctcccaggttcaagtgattctcctgcctcagcctcccaagtagctgggattacaggcatgcaccaccatacctggctaatttttgtattttgggtagagatggggtttcaccatgttgcccaggctggtcttgaattcctggcttc

SEQ ID NO: 871861 - DNA, 627 bp, Homo sapiens
ctcatagctctgggattctaggttcatttctgagtctcaagcatctcatctgtcaagtgaataatataaatcttatctgcatatttcacaaggtttatgtaaattatttctccctctgtctctccctggaagtacgaagtgttatgactataatgatggaaatgatgtagatggtgatgatgaagtgtatcagctgtctgcttgcgcatatgagactactacataagaagaaacctggtttggaatgaaaaaccaaacatcatatgttctcactcataagtggtagctaagttatgaggatgcaaaggcataagaatgacacgatggactttggggactcrgggaaagggtgggaagcagatgagggataaaagactaaaattgggtgcagtgtatactgcttgggtgatgggtgcacaaaatctcacaaatcaccactaaagaacttactcatgtaaccaaacaccacctgttccccaatagcctatggaaataaaaataaatacataaaaataaaaaaagaagaagaaacctggtttatatgggacaaaattcctctccctctttaaagcaatagctgctgatagaaaggagagggagtttggaagctgggaagtccaagatctg

SEQ ID NO: 871862 - DNA, 571 bp, Homo sapiens
ctctttgggctcccttttctaaaaactgcacagaaataatcttcctcctcttgtttcttgaaagaccttacccgatactttattagactgtagttatcttgaacatttaattatatttgctggagagattgactggacttgagtgttcctagatacatattcagacacagtgtatttgggtgggtttcttcrgtgggtaaggagttgtcttatttttccttttagtaacctgattttcaaggttactagggtactagcagagtattactttacctctgtttggtattgatttatttatatttgtttatatactttatataaagtataaattactttacctctgtttggtattgattaatccaagtaggaacttggcagccattgctaaatgaattgaagagtgctaagtatttttatagtaaaagtgtatataaatattagtgtatatataaatacaccatttggtgtattgcaaacccccaaatggacataatttgcattattttattctcatcctacaggtttgggaataaacaaaattgatatacatcatttttcaacaaagatttga

SEQ ID NO: 871863 - DNA, 583 bp, Homo sapiens
tttctaataatgatgtagttagaggaaggtgatatccaaaaacaaacaaacaaacaaacagaacaatagtctggatatgaagggaagacctcaatggtgagaggaccctgtggagtaactgtggtccaggatagctcttccaggttaaaaacttttcttattctcaagagtgatgagcccgtgggatctaacacagaccatctatatttacaagaaattaatttayataccagattatttatctgtgtgtgtgtgtgtgtgtgtgtgtgtgtaaaactgaaatacttgagcttgctatccgagtaagtaacttaattatatcagagcacctatgaaatccatcaaataatcagaaggttatccaatggtggccatggaggtagaacaaaataagttagagtgtttcaaggattattttacccaggctgaggaagagccttgtcacacagaatatggtaatatctccctgatgactaggagaaagtaaacaggttataagatctcaagtatacctttgaaagacttgatgaatttatttgctaacagaaaacaatctttttaatccagaaaaatttcagtggca

SEQ ID NO: 871864 - DNA, 583 bp, Homo sapiens
tttctaataatgatgtagttagaggaaggtgatatccaaaaacaaacaaacaaacaaacagaacaatagtctggatatgaagggaagacctcaatggtgagaggaccctgtggagtaactgtggtccaggatagctcttccaggttaaaaacttttcttattctcaagagtgatgagcccgtgggatctaacacagaccatctatatttacaagaaattaatttacataccagattatttatctrtgtgtgtgtgtgtgtgtgtgtgtgtgtaaaactgaaatacttgagcttgctatccgagtaagtaacttaattatatcagagcacctatgaaatccatcaaataatcagaaggttatccaatggtggccatggaggtagaacaaaataagttagagtgtttcaaggattattttacccaggctgaggaagagccttgtcacacagaatatggtaatatctccctgatgactaggagaaagtaaacaggttataagatctcaagtatacctttgaaagacttgatgaatttatttgctaacagaaaacaatctttttaatccagaaaaatttcagtggca

SEQ ID NO: 871865 - DNA, 627 bp, Homo sapiens
agagaggaggtggagatgacatttgggctgatattgtattaaatatatatatatatatatatatatatatatatatatatatatatttttttttttttttttttttttacaaagcttcccaggtctttcaaatgtgcagctaaagttgagaaacactggtctagaaaaaaagtctcaattttttgtttgtttgtttttggtttttgaacattgcctatgaracatttaattttaggtgtctacttgactgggctaaggaacacccagagaaccagtaaagcattatttttaggtatatctgtgagggtgtttccagaagagattggcatttgactcagtgcactgagtggggaggagatgccctcacccaatgtgggcaggcaccactaattggttgagggcccagatagaaaaaaaggcagaggaaaggtggattctgtctctgttagtgagctgggacatctttcttcttctgcctttggactagaactttagattctctggctttggcctctggggcttgtaccagtctgcccccacaacctccacatccctcactaggttctcaggcttttgacctcagactgagagtgatgttattggcttccctggttctcaggcctttgg

SEQ ID NO: 871866 - DNA, 627 bp, Homo sapiens
agagaggaggtggagatgacatttgggctgatattgtattaaatatatatatatatatatatatatatatatatatatatatatatttttttttttttttttttttttacaaagcttcccaggtctttcaaatgtgcagctaaagttgagaaacactggtctagaaaaaaagtctcaattttttgtttgtttgtttttggtttttgaacattgcctatgagacatttaattttaggtgtctacttgactgggctaaggaacacccagrgaaccagtaaagcattatttttaggtatatctgtgagggtgtttccagaagagattggcatttgactcagtgcactgagtggggaggagatgccctcacccaatgtgggcaggcaccactaattggttgagggcccagatagaaaaaaaggcagaggaaaggtggattctgtctctgttagtgagctgggacatctttcttcttctgcctttggactagaactttagattctctggctttggcctctggggcttgtaccagtctgcccccacaacctccacatccctcactaggttctcaggcttttgacctcagactgagagtgatgttattggcttccctggttctcaggcctttgg

SEQ ID NO: 871867 - DNA, 627 bp, Homo sapiens
agagaggaggtggagatgacatttgggctgatattgtattaaatatatatatatatatatatatatatatatatatatatatatatttttttttttttttttttttttacaaagcttcccaggtctttcaaatgtgcagctaaagttgagaaacactggtctagaaaaaaagtctcaattttttgtttgtttgtttttggtttttgaacattgcctatgagacatttaattttaggtgtctacttgactgggctaaggaacacccagagaaccagtaaagcattatttttaggtatatctgtgagggtgtttccagaagagattggcatttgactcagtgcactgagtggggaggagatgccctcacccaatgtgggcaggcaccactaattggttgagggcccagatagaaaaaaaggcagaggaaaggtggattctgtctctgttagtgagctgggacatctttcttcttctgcctttggactaraactttagattctctggctttggcctctggggcttgtaccagtctgcccccacaacctccacatccctcactaggttctcaggcttttgacctcagactgagagtgatgttattggcttccctggttctcaggcctttgg

SEQ ID NO: 871868 - DNA, 552 bp, Homo sapiens
atagtaggcttactagagtcacttccaaagtgataatactgaaagataatactcagttgaactgaaaaattagtaactagtttaatatccctttttctctactgcttgctgataatgaactgcattctttctcttagtaatgcattccactagctttccaacttcatacctgtatacaatggcagccagcatctaggcacagcagggcagatctggggattgaggggttccttatttcatctcttagctttaaaggcatttaatgcacggaagaaagtaaattcagatcaacccaaaatttactattgtagcctgtttcctccttaccctttcctacttcacctatcactatccmctgtgcactttaatctactgtcatacttgggtcatgccatctttttttttttttttttttttgagacggagtctcgctctgtcgcccaggctggagtgcagtggcgcgatctcggctcactgcaagctccgcctcccgcgttcacgccattctcctgcctcagcctcccgagtaggtgggactacaggcgcccgcca

SEQ ID NO: 871869 - DNA, 584 bp, Homo sapiens
cagaataaaggataaaaattatatgatcatctcaatagatgcagaaaaagcatttttaaaaatcaacatgtttcatgataaaaactcttaacaaattaggcacataagtaatgtatttcaacataataaaggccgtatatgacaagctcccagctaatatcatttcaacggtgaaaatctgaaaggttttcctctaagaagtagaacaagacagacaaggatgtcctctcttgccgcttctatttaacatagtactggaagtcctagccagagcaattagggaagaaaaacagatcaaagatatctacattggaaaggaagaagtaaaattgctgtttgcagatgatatggtcttgtacatagaaaatcytaaagacttcaccaaaaattggttagaagtaatcaacaaatgaaatataatatcaggatagaaaatcaacatattaatatcagttgtatcagtttctacatttcaacaaggaactatccaaaaaacaaatcaagaaaacaatcccatttacaatagcatcaaaaaaattaatgtatttgggaataattttaactatggaggtaaaagctctgta

SEQ ID NO: 871870 - DNA, 587 bp, Homo sapiens
ttgggtgatgggggaagaaggcataggtttgcttcttattacttttcacttgaagagtgtaactatttttttcaaagaaaatgaggaaaagaaacaaacatttctcttaatagtctgacaatttgtgtattctttcaaatgtttaaaaatatctagattgttaatatcgagtagacaaaatgtttagatctctttaattttggatattgaagataatatccttttctggaaaaattgaacaatcaggtatttttgcttaggtcatgtcataaattgggtgggagactctgaaatactacaaatctctgacctatgaaacaagagatatggttcactttgttcaaatgaataacacatgraacttttacctacaaagtcatttatggaaagtaactatcatcccctcaaattagtagatgttaacaaaaccaacaactatggaaatatgcctatacttaatagagaatgtgtctgcttatggataatcaatatatgtgttaatacataaaacataagcaatttgtatgtatttgtaagaaatcttattttactttaaagcattgcttagttttctttagaaagtccaa

SEQ ID NO: 871871 - DNA, 652 bp, Homo sapiens
aaatgttgctgtctgatccttcttctggaagcttcatctcagaggggcacctggctgtattaggtgtcagtaggcccctactgggaggtgtctcccagttaggctactcgggggtcagggacccacttgaggaggcagtctgttccttctcagatctcaaactcagtgctgggagaagcactactgtcttcaaagctgtcagacagggacgtttaagtctgcagaagtttytgctgcattttgttcagctatgccctgtccctagaagtggagtctacaaaggcaggcaggcctccatgagctgaggtggcctccacctagttcgagcttcctggctgctttgtttacctactcaagcctcagcaatggcggacgcccctcccccagcctcgctgctgccttgcagtttgatctcagactgctgtgctagcagtgagcgaggttccgtgggtatgggaccctctgagccaggcgtgggatataatctcctcatgtgtcatttgctaaggccataggaaaagtgcagtattagggtgggagtgtcccaattttccaggtaccatctgtcacggcttccctttgctaggaaagggaatttcccaaccccttgtgcttcccgggtgaggagatgccccgccctgctccgtgggct

SEQ ID NO: 871872 - DNA, 617 bp, Homo sapiens
tttaaaaattcactaatttttaaattagacacagtggcttcatggctgtaatcccagctacttgggaggctgaagcacgagaatctcttgaacccgggaggcggaggttgcagtgaaccaagatcatgccactgcactccagcctgggtgacacagtgagactccatctcaaaaaataagtaaataaaaattagtaatggaacaaatwatcatgaggagagcagcataaaatgtaaaataaaagggaacataaaatcaagtcatgctctttagatttacaagaatgtcttttatcagactcttactatgtgtcagattcctggcaaaacactcaatatgcattgcatcacttaataatgatagctaataaataaatgacacatcatttaatatgcattcatttgtaatttgaagtatcttaaatattcattatgaattccaagctcaaatatgtactttaacaaatgctaatctgttacatctgtgaatttgcccaagtgtatattgatagatagtgatgaagtttcattccagaataatcaagcttttgaatcatcaggtaaacatacaagcatgactaaacatttcatgaaagttttctctaggcactaattttt

SEQ ID NO: 871873 - DNA, 598 bp, Homo sapiens
ttgtcagatggatagatagtgaaaattttctccctttccataggttgcctgttcactctgatcatagtttcttttgttatgccgaagctctttagtttaattagatcccacttgtcaattttggctgtggttgcagttacttttggcattttcatcatgaagtctttgcccatgcctatattctgaatggtattacctaggttttcttttagggtttttayggttttgtgttttacatttaagtctttaatccatctttagttaatttttgtataaggtgtgaggaagggatccagtttcaattttctgcatatggctagccagttttcccagcaccatttattgaacaggagatcctttcttcattgcttgtttttgtcaggtttattgaagatcagatggttgtagatgtgtcatgttatttctggggtctctgttctgatagaataatttatattctgatagaattggtctatatgtctgttttggtaccagaaccatgctgttttggttactgtagccttgcagtattgtttgaagtcaggtagtgtgatgcctccagctttgttcttttgcttaggattgtcttggctatatg

SEQ ID NO: 871874 - DNA, 599 bp, Homo sapiens
tgttattgttgtatctctgccaggttttggtatcaagatgatgtgagcctcataaaatgagttagagaggattcccccttttttaattgtttggaatattttcagaagaaatattccaccattgcctctttgtacctctggtagaatttggctgtaaattcatctggtcctgggatttttttggttggtaggcttttattactgcttcaattttagaacttgttattgatctattcagggattcggctccttcctggcttagtcttagtagggtgtatgtgtcctggaatttaatcatttttttctagattttctagtttatttttgtagaggtatttatagtattctctgayggttgtttgtatttctgtgacgtcagtggtgatatcccctttatcatgttttattgtatctatttgattctttcctcatttcttctttattagtctagctagtggtctattttatttttttaaaaaaaacaggtcttggattcattgattttttgaagagtttttcatgtctctatctccttcagttctgctctgatcttatttattgtcttctgctagcttttggatttgttagctcatgcttct

SEQ ID NO: 871875 - DNA, 667 bp, Homo sapiens
agcattttttcatgtgtcttttggctgcataaatgtcttcttttgggaagtgtctgttcatatcctttgcccactttttgatggggttgtttgtttttttcttgtaaatttgtttaagttccttgtagactctggatattagccctttgtcagatggatagattgcaaaaattttctcccattctgtaggttgcccattcactctgatgataggttcttttgctgtgcagaagccctttagtttaattagatcccatttgtcaattttggcttttgttgccattgcttttggtgttttagtcataaagtctttgcccatacttatgttctgaatggtattgcctagattttcttctagggtttttatggttttaggtcttacrtttaagtctttaatccatcttgagttaatttttgtataaggtgtaaggaaagggtccagtttcagttttctgcatatggctagccagttttctcaacaacatttattaaatagggaatcctttccccatttcttgtttttgacaggtttgtcaaagatcaggtggtggtagatgtgtggcgttatttctgaggcctctgttctgttcctttggtctatatatctgttttggtaccagtaccatgctgtttttgttactgtagctttgtagtatatagtttgaag

SEQ ID NO: 871876 - DNA, 640 bp, Homo sapiens
gtggtgctgacaagaatgtgtattttgttggtttggggtggagagttctgtagctgtctgctaggtctgcttggtacagggctgagttcaagtcctaaatatccttgttaattttctgtctcgttgatctgtgtaacattgacagtgaggcgttagtctcccactattattgtgtgggagtctaagtgtctttgtaggtccctaagaacttgctttatgaatctgggtgctcctgtatggggtgcatatatatttagaatagttagcccttcttgttgcattgatccctttactgttatgtaatgccctttgtcttttttgatctctgttggtttaaagtctgttttatcagagactaagattgcaactcctgccttttttttttttttgctttccatttgcttggtaaatattcctctatccctttattttgagcctatacatgtctttgcacatgakggtctcctgaatacagcacaccaatgggtcttgactctttatccaatttgccagtctgagtcttttaattgggacatttagcccatttccatttaaggttaatatttttatgtgtgaatttgatcctgtcattatgatgctagctggttattttggccagtagttgatgcagtttctttag

SEQ ID NO: 871877 - DNA, 587 bp, Homo sapiens
ttgggtgatgggggaagaaggcataggtttgcttcttattacttttcacttgaagagtgtaactatttttttcaaagaaaatgaggaaaagaaacaaacatttctcttaatagtctgacaatttgtgtattctttcaaatgtttaaaaatatctagattgttaatatcgagtagacaaaatgtttagatctctttaattttggatattgaagataatatccttttctggaaaaattgaacaatcaggtatttttgcttaggtcatgtcataaattgggtgggagactctgaaatactacaaatctctgacctatgaaacaaragatatggttcactttgttcaaatgaataacacatgaaacttttacctacaaagtcatttatggaaagtaactatcatcccctcaaattagtagatgttaacaaaaccaacaactatggaaatatgcctatacttaatagagaatgtgtctgcttatggataatcaatatatgtgttaatacataaaacataagcaatttgtatgtatttgtaagaaatcttattttactttaaagcattgcttagttttctttagaaagtccaa

SEQ ID NO: 871878 - DNA, 611 bp, Homo sapiens
cacaccttctagatatgtgacctttgtcagtgacagcatctctgctacagaccctaaagtggttgtgcataatgagtcagggagatgacaagacacgatgttcagtgcagaatctgaatatttactcattcaggtatacagtttgctgacggtgttctgtgtatggactcccatcttcagagaagccagctgcgatttcaactatacatatttgtgtgtgtgtatatataaatgtatgtatatatgtacatatatgtgtgtatatgtatagtatatatgtgtgtacatatatatgtagttgaaatcatagccgaagtctctgaagacaattcacaaatatacacacacacatatacatgcatatgtaattgtatatacagttgtatactatatatatctatatattgacttatatacaygtatacatatatacacatatatttatgtattgaaaactaacaaaatttatcttcctaactgagcatgaggccccttgcagggactcagctttacccatctttctgtacacctagggatgtgtgaaataccagactaccttgctgaagggaccctacaggccaccttgtagcccagaaaaaaaaaagtccagt

SEQ ID NO: 871879 - DNA, 571 bp, Homo sapiens
aatgatatcaaactgtgataaagcattgtttgaaaccaaaagggacaatagtgttctggtacagagggtggagactaagaaaggtagataatgctcactttttccatggaacataatgggtcctaggagcttttattagcaaagaaacagaggtgtccacatttgagttactttatggtggatatatgtttctgtggaggttaatatgatggaaaaaggaagttgataataaggggaaaatacacctaagaaaaccagtcatatggtattatcacaatgctggctggtargctttgcttatgggctgttttattaggagttaacaagttggctctgaatatcttgctctaggcagggactttgcaagcaagttctcaacccagagacaaattctcttgaacaaatttagagaaaaacaaaatctttgggtttggtggcaagttttttgttttttcttttttctttcttttactcttcagctctttcaagctcaataatttttttaaattatatttggtgaactcatctggtagttttatttgttcgttttaatggtatgggatttatatct

SEQ ID NO: 871880 - DNA, 654 bp, Homo sapiens
cataactgattgtgatttcagaggccacacaagcctaaaaatggctgagctgcagtcagagggagccttctagtctaagccaaccaggctgagaaggtgtacactgggttggggctctgctggagtctgtgtgggagastattgtcagggctatgttgtccctgagaacaatgtggggaccagcagccaagtcctggggtgagactgtgccttcagtcacctagttatcttagagaaggctgaggggtatatgtgtatgggtgtgtgtgcaagtgtgagtttggtgtgttgcatgtgtgaatgtgtctgtgtgtgtaggtgtgtgcttgtgtgtggtttttgtgcgtgtttatattttagaagggctgtcagagcttcctggctctagaggactgtctgggtctctgagtagcttcctcctcatttctaggaaaatgctcactgaacaaccaagtcagtgacctggaagatcagggagaggcagtgtttccaatctcaaaggaaagaatgagggagaaacagagggacccagaggacagatccaggatatctagcacatggatagcaagagctccagaaggggaagaaggaacagatggggaagaggtaatagttaaacaaataatagaggaaattttcactgatctgaagaaa

SEQ ID NO: 871881 - DNA, 589 bp, Homo sapiens
tattctattgtcatttcataacctcttccatgtaggttataagccactagcccgcctcttagaatctctcatttcctttccattgtggaaatctatcctcaaggaaatcacttcttcgttgttccatctgctattctactactcctcagggattgttcaggccccttcccttccctacacatcaagctcgtggatttgcccccacccaggactggcaaattgactttactcacatgctygagtcaggaaactaaaatacctcctggtctaggtagacactttcactggatgggtagaggcctttcccacagggtctgagaaggccaccgtggtcaattcttcccttctgtcagacataattcctcagtttggccttcccacctcagtttctcaggctcttggtattcagtggcacctggttttacctcaaactgccacccttaagtctctctttaagtggatagaagatcttcagtgacaaagtacactccaatactttcaccgtgatgaagtcctattctttacttttatactcactcttattctggttcccgttcttattccaccctctacctctcccagctatctc

SEQ ID NO: 871882 - DNA, 542 bp, Homo sapiens
aagtgttctttatacagcaaaaatgtagagatagcttaaatgttcagctacagagagttttttttattttatttttttattttttatttttgagagaagtgtcactcttgtcccccaggtttgaatgcaatggcttgatctccgctcactgcaacttctgcctcctgggttcaaatgattatcctgcctctgcctcccaagtagctgggattaaggtgcctgccaccatgcctggctgatttttgtattttttagtagagatggggtttcaccatgttggccaagctggtctcaaactcctgacctcaggtgatctgcccgcctcggcctcccaaagtgctgggattacaggcatgagccaccrtgcctggctatagggagtttattaaattaactgtggtatgcacatgtgatactctataaccactaagaataatgttgtacatgaaatagtgtttaagatttatattaataagtgaaaaaattaggtgataggtgaaaaaaataatagtgtagtataagctcatctatttacatgtttt

SEQ ID NO: 871883 - DNA, 649 bp, Homo sapiens
ttccagttctccttactaattatgcgaacttgggcaagttacataacttccccggtgcccagttttctgtgaaaaaaagggaataatagttctcattttacagggttgttgtgtgaatgaaacattctaagcatttaaaaggctcagaacagtgtctggctcacattgctattattttctttctcatatcacctggggcagggggtgggggcagtggttaaagaggagataaagagacaagggaataaacagatgcagacaccttaaaaattgcaaggcaaagctggtgttaagacatagctctctaggactttcccctagagtctccctggctcagtgggtgctgttcatgcaggggaaagcttgaccaagagtgagtccatcacgctgtgagtcactgggtcagggttgcgcgccctcacagacacctggcacgcttcttggctgacttcttctgtgaccagggcctctgatagccctgttcccctccctgcatgttgtttgtwtcttcttttcctagttttctttgattcagataagctcaggggctcctgagccgatcttgtcttcctttgatggatgggtggcaagggagtagggctggggccaggggcccgtctgtggagggtggaggcagatggcgtggggc

SEQ ID NO: 871884 - DNA, 600 bp, Homo sapiens
ccttattttagtggctagaattttcagcactgtgttgattcagagtggagaaagcagatatcttgccttgttctcagttttgggggcaaagcattcagtctttcaccattaagtataatgttcactgtaggttttttgtagatactgtttatcaagataaggaagttctcttctattcctatttttctcagggcttttatcaataatggatgtttaattttatcaaatgctttctctgcattgatttatatcwtgtgattttctttgttaatgtgatggattacatagatttgcaaatactgaaccagccttgcatctgtggaataaatcccacctggtcatattgtataattatatataattatatgtctctatttgctaataaaatattatacatatatataactgatctctatttgccattattttctaagaattttcgcatctatttttatgagggatattggtctgtagttttctcatttttctgtacaattttgtgcggttttggtatcagggtaatactagctttgtagctatataaaatcatttagagagtactccatcatcttctgtttttctagtggagattgtgtagaa

SEQ ID NO: 871885 - DNA, 564 bp, Homo sapiens
gtaatcccagctacctgggagactgaggcacaagaattgcttgaacctgggagatggagactgcagtgagccaagatcatgccactgcactccagcctgggcgacagagcaagactctgtctcaaagaaagaaagaaagaaagaggctgggcacagaaagaaagaaagaggctcacgcctgtaatcctagcactttgggaggccgaggcgggtggatcacgaggttaggagatcgagaccacrgtgaaaccctgtctctactaaaaatacaaaaaattagctgggcgcggtggcgggtgcctgtagtcccagctatttgggaggctgaggcaggagaatgttgtgaacccaggaggcggagctcgcagtgagccgagatcgcgccactgcactccagcctggcgacagagtgagactctgtcaaaaaaaaaaaaaaaaaaaaggaaaggaaagaaagaaaggaaggaagaaagacttcaaataaagaacctagtgatgcatcttaaagaaaagcaagagcaaacaaaagccaaagttagtacaagaaaggaaacaataaagatc

SEQ ID NO: 871886 - DNA, 657 bp, Homo sapiens
aggaagaatattttatttgtgtgtcaggttctgttgttgctggtgtttaaatgtctcaaatcgttctcccctgaggtataaggtagcttcttttgaaataaaatactaaggagtcacagtgcctttccaagggcaaggagattcccagtgtacaagaatcaaggtgttgctatgtgaaaggtccctccacagccaccatggaggctcagggattgatttcaggaaaagaagaaaaaaaggaatcttcctgatgagagagcagaatctaaataatagttatgaagaaaaacaagatgtaggaatgacmaaaataattttagtcattctactactcttgagttctataagtttccagaacaaaccaaaacatgaatctctcttttgcttcctgttccacaaacaacaaactgaaaggacaataaagagataccttccacttcatcttacttagggcatcctcttctaccaatgggcaatactgtgcctttgcagtatgcagtccctgagcacacttaatgttaaaagttagaagttgcttagcaacccctttactacttacgtgttgtagatacaactgacaagaccaagggcataagcaatgctctacctttctactaacaggtttgcatacactctcccaagctctcatttattgta

SEQ ID NO: 871887 - DNA, 585 bp, Homo sapiens
aggagtttgaggctacagtgagctatggtttcaccactgtactctagcctgagtgtcagagcaagatcctgtctctaaaaaacaaaataaaataaaaattagaaatgcagcaactgcaaaacttcaaaatttcatgccttgagtccaagtccattctaagcaagttcagtacaaacagaaagggaactgaaactgaaggcctgacatgtgccccacatcaggcttggttttcagagtggcttccactagattcagaggggctattctcccctccataagaaacttgaagttcgtgtgatctaccggtgccagatgtggagagagaacctaagctccatgcccaccttagtccagcacacaatcacctccctaggaaacatgcttctcctgcccagcgctgctgctggaacgcacgcctcagccttcaygcatagcccaccagtggccacaggcagcctctcggctgggcccgtgtagtttatgacttagtgaagctatccagtgaccgtgacttctgctgcctgccaaatgtcccttttccttctggataccttttgtcctgctatacagctcattgattttcga

SEQ ID NO: 871888 - DNA, 562 bp, Homo sapiens
ttcgcgctccagtagcatcagcccatgaagctcctgacaacaaagctgttctgtctttggggaacacaaacatattgcctgttagtcatggtacagcatgattgtctgtgtgcatgtgtgtcagcatgtgtgtgtgtggataaatgagaaatgaagaccaaacagcccaaacagaataagatctgcaaaggtggaccatgggctcttggatgttgctatgttgctctggtctgttctgactttggagatgggatactacttctgsaagtaatgttgtttttctaaatttaaaaattagtactattttgaacatcattatgaataatcaataatattaataatgtcatcatcattattaagggcacttcctctggatttgaattgccttggttcacatctggcatctccttctgattagctgtgtgattcagggaaaataacttggctgttttctgcctccatttcttcaacagcaaattggaagttacaggtggttttggggtggtttaataagttattgtgggtgtatagaacttgagacataataagcactccacgaatg

SEQ ID NO: 871889 - DNA, 539 bp, Homo sapiens
ttcctgaagcaataaagcgaagcaagaggccaaaagacacaatcatctcaggcagctgcaagagcatagcgcacagtcagtgcaccttaactctgttacatccaaaacaccacttgattgaggctgtgtaagaagcagtaaggttgaacaaaacccaagaagcagcgagttgacaaaaacagaggatgaatccaacagtggagtccaacctctttttagtaactctgaagccaatagcttgtcttgatgttgcatatgaccataattcatgtctaaataagaataagccctctcaattttatatacactcttaaatgtgagattttatatttcattagtcagtgttctccagagaaacagtmccagtagggtgtacataaatatatatatagagagatttattttaaggaattggcttatgcaattgtagaggccagcaaatccaaaatctgtaggatggggctgcaggctggagactaggaaagggctgacatttcagttcaagtccaaaggtcatctattggcagaattctctcttg

SEQ ID NO: 871890 - DNA, 547 bp, Homo sapiens
agagacaacgtggctcaaaatacagtttcatgatatcattttgaaatatttgttcatccttcatcatccacccagggtattatttctcacccttcctattagcacacgtctacttaatttcagcattcagctcaaatgttctatttgctatgaaaattttcttgcctcatctttggcttcaagagaaagtagccattcacttttatttgtcttctaaactctaaaacttttatagactatttaggtactatctgtcctggcaaaattaattgtacatttcttggaaagatgattcattttctcctgaccatccagcataagatttggatattggtagccatcaatcaaatgttctttagtgaatgaatgaasatgtgttcatttctggccaacctccttttagttattcttgctgtggtataatttattggctttatctctattttttaggaaagtttgcacccaaaatctttattggaaaattattgttaggagctcagaagaaacataaagatgaatgcatgtactatcctttctttaataatat

SEQ ID NO: 871891 - DNA, 600 bp, Homo sapiens
aagatagttttgtgtgtgtgtgttgtgtgtgtgtgtgtgtgtgtgtgtgtgtgtgttgtgtgtgtatgtttgtgaatattgagcaaccatagtagaataggaattgtggttgtatggcaaatttgtattaagagggctcagaattgtacttgatctttwcaactcattgaagtctgggacagggatgcttctactctcatttatattataaaactttaaagctaattaacttgagtaaacatcaaggaatacaacataaacaaaaaaaatcagagaaattttgttctttgaaaaatataagtccttaagatattttactttttaagtcatattatgaactacaagcccagaataaaatgattttaagagtagaagcctgagaatactgaaacaaaagtaaagccaatcatcatggtctttacttctgctggagacaatccaaattctcagtttctatgctctgtaatatatttaagaccactctagcactgaaagcgattgtgttttcaaagtcaggtctctcttgcttcacaagtttaataaattctgttttgctttaatatgccttactatcttgaggtttcttttattaaaaacatc

SEQ ID NO: 871892 - DNA, 626 bp, Homo sapiens
gattacctgacttcaaaatatattacaaggttacagcaatgaaaaagaatggtattcgtataaaaacagacaaaaaccagtggaacagaatagggaacccagaaataaatccatcaatctacaaccaatcaattttcaacgaaggtgccaagactatacattggggaaagggcaagctcttctataaatgatactgggaaaattggataatcatcttcmggagaatgaaactggacccctatctcttgccttatacaaaagttaattcaagattaatgaaagacttatatgtaacactcaaagctataaaactactagaaaaaaaacacaggggaaatgccttcagaccttggtctaggtaaaagttttatggctaagtccttaaaagcccaggaaacaaaaacaaaaataaacaaatcagacttcattaaattaaaaatcttctacacagcaaagggaacaatgaacagagtaaagagacaacttgttgaatgagaggaaatacttgcaaactattcatccaacaaggcactaatatcaggaatatagaaggagctcaaacaactcagcagtaaaaacacaaataatcccactaaaaagtaggcaaaggacatgaatagacattt

SEQ ID NO: 871893 - DNA, 648 bp, Homo sapiens
ttcacattatttgtagactttgtggataattccgacatggttggtctgtagacctcctctgagaaacactgctatgtgggtattggaagagattatcagtgtaacaataaaaatggctgaatttaaatagggcattcaatcttaaggattttttaaaattatactttaagttctggggcccatgtgcagaaggtgcgagtttgttacataggtatacacgtaccatggtggtttgctgcacccattaacatgtcatctacattaggtatttctcctaatgctatccctccccttgcccccatcccccgacaggcccctgtgtgtgatgttcccctycctgtgtccatgtgttctcattgtttaactcccacttatgagtgagaacatgtggtgtttggctttctgttcctgtgttagtttgctgagaatggtggtttccagcttcatccatgtccctgcaaaggacacatactcctcctttttatggctgcatagtattccacagtgtatatgtgccacattttctttatccagtctatcaccaatgggcatttgggatggttccaactctttgatattgtgagtagtgctgcaataaacatacgtttgtatgtgtctttatagtagaacaatttataatcctttgtg

SEQ ID NO: 871894 - DNA, 640 bp, Homo sapiens
ttccttccaccactaggttcaggatggatgaactgtttctgtttcctagacctgtggtgctttttctctcttggactcagagtctgactctattttatatctacttgagctatgggctaagctgttttcctttacgcacttgccacagcagttttctgacttgttttccttttsttttgaaacttggaggctttctacctccaacctcacatccaactcagaattgtgttttatctcttcttctcactttcagctgcttgaccaaagttttatcttctttgctcattaacattctaatacaaacagtccccttcattttttttattataccccattctcaagtagttctagactagagctgcttatatcaaatctttgccacttcttttggataacaccatctacctatagtggcaagtcaggaaattttgatttagcccatttagcttgaaattatcttacagtatttgtacagaacaagagtacatctacattgtagtgtttacttactaccaaattcaacacaacttcagaagaagaaaatatttaattataaggtgttaattgaggtgataagataaacaatttttcctttagttgactaaagttaaaattttaatttctgtatgataatggaaaa

SEQ ID NO: 871895 - DNA, 508 bp, Homo sapiens
ggttcaaaaagacctttccatactctcccacagaagccctagaaattgtcattttgttaatcattctggatgcctgagaacttgtaatccaatgagtagaaagtttggtaccccatttatggctgtcaacctgccagttctcaggagtttgtataagcctaaatcygaaaggatctcatcccattaggacccttgtctccttttctgttgcctttgcccactggctatggcaacaggggtctttctttctccttggctatctttggatatgggggctccgtcttctgtgccaccttagggaatgccttttgcaggcatggctaagtcattaaaaagcctacagtttcagtaacattttgagtgagcactctctgaagctgcgttggaatctcaggcttctttgtctggaagataactcttgggctacaagtttcttatcctagctttggttttgaggcctctctgttctcctcttgggttggaagttattcctggctttttgtttcaa

SEQ ID NO: 871896 - DNA, 608 bp, Homo sapiens
ttatataacaaatattttttttattcctctgtagtgctactttagtctctgagctaattttcatgaagccaatctaaaaatcgtgttacttctaaggatgtggagcgagtgagatgaacagttgtgctgtcatattgcccctccccagtgcagacagtgaatgaggacccactgatttaaaggcaacactgcagccccttcttgcctcattgaagtcccaagttttattacagtaaaagcacttaatgttgacatttctgaaaaaatgaagaggccgggcgcggtggctcacgccggtaatcccagcactttgggaggctgaggcragcggatcatgaggtcaggacatcgagaccatcctggctaacacggtgaaaccccgtctctactaaaaatacaaaaaattagccgggtgcggtgacgggcgcctgtggtcccagctactcgggaggctgaggcaggagaatggcgtgaacccgggaggcggagcttgcagtggtcctagattgtgtcactgcactccagcctgggcgacagagcgactccgtctcaaaaaaaaaaaaaaaaaagataagaaaaaaagagtggggagccagagccaggcatag

SEQ ID NO: 871897 - DNA, 643 bp, Homo sapiens
tgatcaggtagcaagccggttctgcagtgccagtcggagacacagatggggacaatcaaagaagatgcaggtcaggacaaggatgcagacatgtacctgtcactaccatggacttcagcagcttcttagcaggtttatgattaaagaagaaagacatcgttgatatgtaagcatgttacaattaatttgctgtttagttattagcaaactacatccagtttttagtttttaggtttttttttcttttttcttttttgaaacagtttcttgttctgtcatccaggctggagtgcagtcgttatccaagctcacygcagccttaaactcctgggctcagtggatcctcccacctcagcctcccaagaagctgggactacaggtgcacgccaccatggccagctaatttttcctatttttttgtagagatgaggtcttgctgtattgtccaggctgctcttgagctcctggcttcaagccatcctcctgtcttggtttcccaaaatgctgggactataggtgtgactcaccatgcctggcctacatccagtttaatttatactacagtgtgggtttagtcctcaaacatgtttttgttttacatataaaaatttgagataaaagaacatttttacattggtcaata

SEQ ID NO: 871898 - DNA, 643 bp, Homo sapiens
tgatcaggtagcaagccggttctgcagtgccagtcggagacacagatggggacaatcaaagaagatgcaggtcaggacaaggatgcagacatgtacctgtcactaccatggacttcagcagcttcttagcaggtttatgattaaagaagaaagacatcgttgatatgtaagcatgttacaattaatttgctgtttagttattagcaaactacatccagtttttagtttttaggtttttttttcttttttcttttttgaaacagtttcttgttctgtcatccaggctggagtgcagtcgttatccaagctcactrcagccttaaactcctgggctcagtggatcctcccacctcagcctcccaagaagctgggactacaggtgcacgccaccatggccagctaatttttcctatttttttgtagagatgaggtcttgctgtattgtccaggctgctcttgagctcctggcttcaagccatcctcctgtcttggtttcccaaaatgctgggactataggtgtgactcaccatgcctggcctacatccagtttaatttatactacagtgtgggtttagtcctcaaacatgtttttgttttacatataaaaatttgagataaaagaacatttttacattggtcaata

SEQ ID NO: 871899 - DNA, 637 bp, Homo sapiens
tggcagcagcccccagacaggttaaaacattcaagtaacttctgctctgttctccctggttccagagagggaattgtgaactgggttgctatcttctccagaccaagactgcacaatgctggggagaggagggaactagggtgagtaaaaacatcacacaatttccaactgtttttaatgtgttttttttttcttgatcaggcatttgtttagtcrccattgacttttggctattttccaaagctctcacaaaattttagttgggtgctttttgttttttaaatgtttctgtggggaaatgatacctgaagcttcttagtcttgtcatttttttaaactaatgcttttaatttgtcttcttgttgatatctgtatttataattttatataaagaacagcaatttctcttataatgagaaaaggtaaaaattgctgagaaagagactattatgagaagggatctcacttagaatagcaaccaaagaaatataaactgcatgggaatagaccttacaacagatgcttatgaacccaaataaaactatatgttacataggagttaaatcacaaactgagctctcacctgaaatcttgtacagtcaacataaacacaatatcacatcaagcaccctgagat

SEQ ID NO: 871900 - DNA, 613 bp, Homo sapiens
gtactgttatcctcacaatgccagaaggatagccccatttcattgatgagaaaactgaggcttggggaattcaaaaaaatgtgcccaaggtcttgtaacttagagatgaaaatttaaactctaaagcctaagaccattamaatgaatattctgccctgaagaagttcatgatctgatagagacatattttaggtgcgatgactattaattcattctaaatttcatgttataaattcttactgtcacttcagttatttgaaagcttttgccaaaagcccttgagggatgacattgtccagataatgacttgacagacagcctcagaatgtggactatcctagtagtaataacatcaaagccttgaaagtgtgcctggcagtgtgcttcatggacatattcatttgtgaagctctccctgggcttgccctctcgcacattccaaacgagtccttaggctcttgtatttccttgccttggggaatttttgcacgcagcacgtaaacaaaaactgctggaagtctatgattcctcctgtgttcagtaaatgcttatggcagattgggtagaggaggtggagaaaagagggattctaagggtcaaagaaggacaagag

SEQ ID NO: 871901 - DNA, 541 bp, Homo sapiens
aacaatcggagccccacagagatggaattgatggccccaggaggtagagaattccccacgctggaggtgttgcagcagaggacaactgaccactgggtgagaaaggataatgctggtgcctgtattagaccttttccaaaaatttcttcccacatgagattttatgatccctctttcagaaatagcaagagtcctgtagggtcttcacattaagagggccatagtggttctagaggaaacccataagacacgataggcccacacacatgttagggaggagagagaaaaaataaacagttttgtaaasagcaataggttgggagaatttagtgtagggacattgtcttttgtactttaatggcctaaaaacaatcactttgttagagccctgtacaattttgtatatttacaatggccattgagccagaaaagttaaaattaaaattcaatggaatttaaaatttagaggaaggacttctgctttaaattggtgttatgatgcctgatatgtccctcttttccccagaaatgctggtgtaaa

SEQ ID NO: 871902 - DNA, 598 bp, Homo sapiens
tgatctgatggttttataaggagaaacccctttctttcacttggcactcactctctttgcctgctgccatctatgtaagatgtgacttgctcctccttgccttctgccataatgtgaggcttccccagccacacatagaggtgtaagtccagttaaacctctttcttttgtaaattgtccagtcttgggtatgtctttatcagcagcatgaaaattgtctaatacagtaaattggtaccagtagagtgaggtgctgctgtagaaacccaaaaatgtggaagcagatttggaactgggtaacaggcagtggttggaacagtttggagggctcagaggaagagagaaaaatgtgggaaggttgggaacttcctagagacttgctgaatggctttgaccaaaatgctgataatgatatagacaatgaaatctggtctgaggtggtttcagatggagatgaggagyttattgggaactggaacagtggtgactcttcctatgttttagcaaagagactggtggcatttttcccctgccatagagatatgtgggcctttgaacttgaaagagatgatttaaagcatctggtggaagaaacttc

SEQ ID NO: 871903 - DNA, 615 bp, Homo sapiens
ataaattagaatttcttggattccctatgagtacaaattattttgctctatcttgttattttaaaggaaatagtaaatgtcctatttgtgtggcacctgtggatttttttctcaaaggagaaggtgcagatacacctgagtgctgccttctctgttttactactcaaagcataaacattgaagactttttaaagacagtcaataaagaacaatagtttagtgtgctgacatatgctttttgcttgtttgttttgagacaggatcttgctctgtcattcagactggagtgcagtggtgagatctcagctcactgcaacttccatctcccagactcagttgattcttgtgcctccaccacctaagtaactgagactacargtgtgcaccaccatgcctggctaatttttttgatgttttttattgagacagggtcttactatgtgtcccagactggtcttggcttcccgggctcaagtgatccatctgccttggcctcccaaaggctgaaattacagctatgagcgtgcccaactgtaaactgatatatgttattagaatctgcaccatatccaaatgaactttaattttcttccactcttcaagtttggaggaaga

SEQ ID NO: 871904 - DNA, 593 bp, Homo sapiens
caatactttttctcccttactccattactacctccataaggaacactagaccagttatgaaaaataaagatggtattttttttgcacatctgaatatagcatacaatattttaactatcctacactgacactaatcaacatgctgtgccagatactatgctaagtactttgattagggtccttttctttttttttcttttttttttttttttttgagacagagtcttgctctgtcacccatgctggagtgcaayggtgcaatctcggctcactgcaacctctgcctcccaggttcaagcaattcttctgcctcagcctcctgagtagctgggactacaggtgcatgccaccactcccagctaatttttgtatttttactagagacagggtttcaccatattggccaggctggtctcaaactcccgacctcgtgatctgcctgcctctgtctcccaaagtgctgggattacaggtgtgagccaccacgcctggcctattagggtccttttcttaatcaatggaagtccgatggcctttaatctcctcttccttgaaatcaagcctcttctctccccatcctctggttctgcaca

SEQ ID NO: 871905 - DNA, 704 bp, Homo sapiens
caagagttttcttatgctgatctattttattgttatccctaaaacttcaaaatacaaagaaagaacctcacagaagctgacaaagttcaccttgctggttgtctccagcttctgtgaatgatgtcatccacatcttaacttcagcagggaatgccatcatcttgagtctcacccacattggtcatgtatgttttcctgagagtgttggttagttcagtgactttatacactcatccttattctacaatactttctagtctcatagctcagaaccaggagattttcttggtctttgtcattttttttttaatttctgggttctttctttcttttttaaaaaaatttatttaagatttaaaacaatttttatgagtatgtagtaggtgtatatatttatgggcatgcactgtgaaataagcatatcatagagaatggggtattcatcccctcaagcatttatcttttgaattacaaataatgatctttgccatcttgaccaccattgactgctgtgtatttgtctgggaattcckggagtgcacagtctttgtgaataagagggcatgtgcccagctggcgtgtggtgccttttgcattggcctgatcatgacagtggtctaaataaccacagtgtcacagaggtacaaaaggagcacatatgctatttagactgcttcttgtttgacacccttcttgtcatgaaa

SEQ ID NO: 871906 - DNA, 680 bp, Homo sapiens
agcaaagtcttcttgcatacatagcaaagctttgttttaggccagttgaaacccagacctcattcatagcatgcccctatgctttgtagccaaggcctaacctcatcattacagttctgctaattccacaaacgtttatcaaatgcctgttaaatggcaagtatactcccctgcatacacacctaatacaatttctaattgtgtacagaggtcttacttctgaargttgaataaaattcttacatgttaccagatgggctccgttgagatctaaacaattttgcaaaatcctatttatatgtaagcagtttattgatcacttacacagttggatgaatataaacagtttgttttttttgttcagcttctgtttccaaccatgctctgtaaaatttctattttctgcctcttactgccattttgggcagatcccataatgtttccttctctttcaattattacaagttgagatttccctttcctaactctctctgctggccttgtaaatggctagatttgtagcttgcaggagaggaaaaccagtgggaataatggcttgttcttttgattttcttcctatgccagctatttgtactgagggcagggatgagaaaggtggggtctactatttatctgtcttcctctcctacttaagcagcttttgaaagtgtgattgaggg

SEQ ID NO: 871907 - DNA, 542 bp, Homo sapiens
tctaagaatactgattgcaaatgtcaactatctactactacgtaaaacaccaccaacaccctcaaaagtatgtaaacacaggaaaaatcaaaacaaaaaaagtattgaagtccatatgttattaaatgttttacagctattttatttaaatactagctgtacctgccaaagcatatattttcctagcagatcatggaataaaatattaatgtatcctatttattcacatatttcattgcaaatataacatgatcacattcttcctagatttaacccttargaagcccaatgatttgagtcttaacaacacacagttgtcaatagacaaccagaggcttctggaggtacaagctgaatgtcaagtctcagaaattttcacaaatacgtttaggcaatgtattaaattcagaataagtgaagcacatttaatgatacatgttgcagaatctctacagttgactttttaagttaaggtaatgaacagtcagaaaaatgcatacagttttataggtagtcgttacccacttgtcacctgtcagtgt

SEQ ID NO: 871908 - DNA, 633 bp, Homo sapiens
caaaaattaacagggtgtggtagcaggcgcctgtaatcccagctgctcgagaggctcaggcagaacaatcgcttgaacctgggaggcagagattgcagtgaggagagatcaggccactgcactgcagcctgggtgacagagcagagcgagactccgtctcaaaaaaaaaaacaaaaacaaaaaaaagagagagagaaaaggaaaagaaaaaaawtattaaaatttcagtgcttccactgctctagccccattcaagtggtcaaaagctatatgtggctagtgctaccatattgggtaatgcaaaaagaacatgtttctggtctccgaaagctcttctaaacagcactgaaggaaaacagtgcagctcactctccagatgagaaaacaatatacaaatgcctgaaacaagacacaaataaaggttaacacactaaagcaagcctatagctccatagttcattataaataattaacaagggagcagtaagcctaaaagtaaccagagtttgaggtttgaacagggagaaagagtgaagttgattttatataatctaaagatcactagtttcaaacacgtgtcaaaattggagttgtcataagctatgagagacaacataggtcacttttttaaaa

SEQ ID NO: 871909 - DNA, 551 bp, Homo sapiens
gtgaaccagtattttccaaatgaccaatgtttgactttacaaaattatgcacgtataaaagattaattcaaagtgcaagacagatcaatacatattaatgtaacaacataaaaagttcattactatggtttccgtgcacacagttttcagggttctattattcaaggtgcatctccatcacctgccaaagtggaggcagatggctcaagctcaggcaatcaggctgtctcctccactggaaattgatcttgggtgaaaataaaaaagcatagaaawctgttgaaattgacactgggaagagatttttcacttattcttgctacctgaatcctgagaattgccctgattcctgccccttctgaggtctggtccctcaactttttcttagatttgggagccacctgtatccttaaaaaagtattttttgctcaagggagctacagtctgattctgttgctttccaccaagaactctgatagagacgtagaaacctactgtgagtcctctcttgctgggacaccgaagctctccctgccatgctgtgcttcctg

SEQ ID NO: 871910 - DNA, 605 bp, Homo sapiens
acgtcaataatttaccgaatgcactgagcagaataaacattctagtaaaggcctagagagctgaaaaacatttttactacatcttgcctctcgcagtttgaaactggggttaggaaacatggcctatggatggtagtggcttgtggtccctggttttaaactgctcccatggtggaatcacttgagtctctctcctttcatctccacacaaatattctccatcccacctcttcgtgcaggcttctggctttctgtgcactttcagacattttggacatataatgctcctctgctatctgttctctcarggcttccatattctagtcctgagccctgtgtttcaggggtatctaggaaatcttgatttctttcaggtgttaacatctcaagttcctttgcttcatattcacacttgaaatcagatataacattccttactttttcctcctgttatttttgcatgcaaattaagagattctccaattgctctgtgtcatacgttttcttacgaataacagggcttatagtttcacttgagtaatttttccaccctcttaaactgcagtttaaggtcttgatgaggttaccaaatctctgacaagcat

SEQ ID NO: 871911 - DNA, 605 bp, Homo sapiens
acgtcaataatttaccgaatgcactgagcagaataaacattctagtaaaggcctagagagctgaaaaacatttttactacatcttgcctctcgcagtttgaaactggggttaggaaacatggcctatggatggtagtggcttgtggtccctggttttaaactgctcccatggtggaatcacttgagtctctctcctttcatctccacacaaatattctccatcccacctcttcgtgcaggcttctggctttctgtgcactttcagacattttggacatataatgctcctctgctatctgttctctcagggcttccatattctagtcctgagccctgtgtttcaggggtatctargaaatcttgatttctttcaggtgttaacatctcaagttcctttgcttcatattcacacttgaaatcagatataacattccttactttttcctcctgttatttttgcatgcaaattaagagattctccaattgctctgtgtcatacgttttcttacgaataacagggcttatagtttcacttgagtaatttttccaccctcttaaactgcagtttaaggtcttgatgaggttaccaaatctctgacaagcat

SEQ ID NO: 871912 - DNA, 605 bp, Homo sapiens
acgtcaataatttaccgaatgcactgagcagaataaacattctagtaaaggcctagagagctgaaaaacatttttactacatcttgcctctcgcagtttgaaactggggttaggaaacatggcctatggatggtagtggcttgtggtccctggttttaaactgctcccatggtggaatcacttgagtctctctcctttcatctccacacaaatattctccatcccacctcttcgtgcaggcttctggctttctgtgcactttcagacattttggacatataatgctcctctgctatctgttctctcagggcttccatattctagtcctgagccctgtgtttcaggggtatctaggaaatcttgatttctttcargtgttaacatctcaagttcctttgcttcatattcacacttgaaatcagatataacattccttactttttcctcctgttatttttgcatgcaaattaagagattctccaattgctctgtgtcatacgttttcttacgaataacagggcttatagtttcacttgagtaatttttccaccctcttaaactgcagtttaaggtcttgatgaggttaccaaatctctgacaagcat

SEQ ID NO: 871913 - DNA, 602 bp, Homo sapiens
tctctctttctcccctcacaggtgtgagaactacaacagggtgtgaaggctgtcctggcctactcctgctgtcttcccctttatctttcaaaagtgtcccctaatctatcacatttctaatccagttgaggcaacagcttcccaggggtgctttagaaccttgaaatatcaataccataaaacatggtccagaaaarctaacttttatttgatagtatgtataaaaccatctgttcatttcccatacctcttccagacatgaccttcaactggaagggattaaaacaaacaaacaaacaaaaaaaaaaaacacaaaaaacacttgtgccccagagcctttggtttaccacccagggctctgatcactcgagatacattccagaattcatttaacatgtgttcccaccggagtcagcagaatgggtaaccacgggcagacagcacattctggcaattctcaggcccatgctccagaaagacagccttaagttcatactcagggtttataaatagtgagtcatcaaccactaccagttgtcttggtactagtgacataatcttgtaactcctggtgactagagagcttcattaattttgtggag

SEQ ID NO: 871914 - DNA, 623 bp, Homo sapiens
caatccaaaaggaagaaataagccaaaagaaaggcgcaacagaccacatacaagtctgaaattcagcagggaagtcattaaatcttaaagctccaaaacaaattcatttgactccatgtcctatattcaggtcacactggtccaatgggtggggctcccaaggccttggaaacctgcccctgtggcattscagggtacagcccttatagctgctctcacaagtaggagttgagtgcttgtggtttttccaggcaaagggtgcaatctgccacgtggaaataccattctgtggtctggagggcagtggtctccatcccatagctccattaggtattgctctcatggagactctatgtggggtctccaactccacatttccccttgtcattgccctaggaaagttcctctctggggccttcatttccatggtaggcttctgcctaggcatccaggcttttctacatgtcgtctgaagtctaagtggaagccaccacacttccttcatgcttctattctgagcatctgtagactcaatatcacatggaagccaccaaggcttatggtttgcaccctgtggtgcagcatccaaactgcaaatggagccttttgagtcatggctagag

SEQ ID NO: 871915 - DNA, 623 bp, Homo sapiens
caatccaaaaggaagaaataagccaaaagaaaggcgcaacagaccacatacaagtctgaaattcagcagggaagtcattaaatcttaaagctccaaaacaaattcatttgactccatgtcctatattcaggtcacactggtccaatgggtggggctcccaaggccttggaaacctgcccctgtggcattgcagggtacagcccttatagctgctctcacaagtaggagttgagtgcttgtgrtttttccaggcaaagggtgcaatctgccacgtggaaataccattctgtggtctggagggcagtggtctccatcccatagctccattaggtattgctctcatggagactctatgtggggtctccaactccacatttccccttgtcattgccctaggaaagttcctctctggggccttcatttccatggtaggcttctgcctaggcatccaggcttttctacatgtcgtctgaagtctaagtggaagccaccacacttccttcatgcttctattctgagcatctgtagactcaatatcacatggaagccaccaaggcttatggtttgcaccctgtggtgcagcatccaaactgcaaatggagccttttgagtcatggctagag

SEQ ID NO: 871916 - DNA, 623 bp, Homo sapiens
caatccaaaaggaagaaataagccaaaagaaaggcgcaacagaccacatacaagtctgaaattcagcagggaagtcattaaatcttaaagctccaaaacaaattcatttgactccatgtcctatattcaggtcacactggtccaatgggtggggctcccaaggccttggaaacctgcccctgtggcattgcagggtacagcccttatagctgctctcacaagtaggagttgagtgcttgtggtttttccaggcaaagggtgcaatctgccacgtggaaataccattctgtggtctggagggcagtggtctccwtcccatagctccattaggtattgctctcatggagactctatgtggggtctccaactccacatttccccttgtcattgccctaggaaagttcctctctggggccttcatttccatggtaggcttctgcctaggcatccaggcttttctacatgtcgtctgaagtctaagtggaagccaccacacttccttcatgcttctattctgagcatctgtagactcaatatcacatggaagccaccaaggcttatggtttgcaccctgtggtgcagcatccaaactgcaaatggagccttttgagtcatggctagag

SEQ ID NO: 871917 - DNA, 623 bp, Homo sapiens
caatccaaaaggaagaaataagccaaaagaaaggcgcaacagaccacatacaagtctgaaattcagcagggaagtcattaaatcttaaagctccaaaacaaattcatttgactccatgtcctatattcaggtcacactggtccaatgggtggggctcccaaggccttggaaacctgcccctgtggcattgcagggtacagcccttatagctgctctcacaagtaggagttgagtgcttgtggtttttccaggcaaagggtgcaatctgccacgtggaaataccattctgtggtctggagggcagtggtctccatcccatagctccattaggtattgctctcatggagactctatgtggggtctccaactccacatttccccttgtcattgccctaggaaagttcctctstggggccttcatttccatggtaggcttctgcctaggcatccaggcttttctacatgtcgtctgaagtctaagtggaagccaccacacttccttcatgcttctattctgagcatctgtagactcaatatcacatggaagccaccaaggcttatggtttgcaccctgtggtgcagcatccaaactgcaaatggagccttttgagtcatggctagag

SEQ ID NO: 871918 - DNA, 668 bp, Homo sapiens
cttctgaaagtattcaaaaccattaaaaaggagggactcttccataactcgttgtatgaggccagcatcatcctgatacccaaacctggccgagatacaacaaaaaaagaaaacttcaggccaatgtccctgaacatcaatgcaaaaattctcagtgaaatattggtaaatcaaatccagtagcacatcaaaatcaagttggctttatccctgagatgtaagtacacaaatcaataaatgcaattcatcacataaacaaaactaaacacaaaaaccacatgrttatctcaatagacacacacaaaaaagccttcaataaaattccttcatgttaaaaactttcaataaactacgtattgatggaacacaactcaaaataataagagccatatatgacaaacccacagccaatatcttattgaatgggcaaaagctggaagccttccttttgaaaactggcacaagacaaggatgccctctctcaacactcctattcagcatagtattggaagttctggccaaaacaataaggcaagagaaagaattaaagggtattcaaatagaaagtgaggaagtcaaactgtctctgttttcagatgacatgattctatatctagaaaagcttatggtctcagcccaaaagcttcttaagctgataagcaacctca

SEQ ID NO: 871919 - DNA, 612 bp, Homo sapiens
tccctcatactgttctcatggtagtgaagaagtctcattagatcttatggttttataaggggaaatacctttcacttagttcccatttctttcttgcctgccaccatataagatgtgacttttgccttctgccatgattgtgaggcctccccagccacgtgggactgagtccattaaacctcttttcctttatacattactcagtctgtgtatgtctttatcagcagcatgaaaatgaactaatacaacccagcmatcccattactgcatatatacccaaaggaatataaatcattcttttataaagatacatgcatgtgtatgttcattgcagcactattcacaatagcaataacatggagtcaacccaaatgcccatcaatgctagcctggataaagaaaatgtggtacatatacaccatggaatactatgaagccatgaaaaagaatgggatcatgtgttttgcagggacatggttggagctggaagccactatgctctgcaaactaacgcaggaacagaaaaccaaacactacatgttctcccttataattgggagctgaacaatgagaacacatggacatagggaggggaacaacacacactggagt

SEQ ID NO: 871920 - DNA, 622 bp, Homo sapiens
ttctcaaagtttccaagtccggagttccttaggtcatcctcctactataatattatatgcctgaaaatgttcattgatcatcttttcctgcctatatgcgttcttgctcatcaaaattgcattgcagctgatttcaattaattgctagaagtttggtgataattattattattgctgttattattttgtgtcttgkggagatggcagggtcttgctgtgttgctcaggctggtcttgaactcctggcttcaagtgatactccagcctgggctttccaaactgctggtattataggtgtgagccactgcacccagcctatgttttaataagtgttaatttagggtaaataaatatgtttcaagttaagtcattatttgacaaatgtcaattttataaaattagttttattttgttccaagaaaaaaaaatcgatatctatacacattttataaattgggacaaatatcccaatgaaaaaatttgtataactttattaacatgaaatatttaatatctttaacatatttgaatctcaataacataaagatagctttctaatatttccttttgaattgttatagatttcagtttatatcataacactgagcagtcttaaactttc

SEQ ID NO: 871921 - DNA, 645 bp, Homo sapiens
acagtgtctgaccaaggcagggatgagattcataaaagcagagggtgctggttaattgagagaagcccatgccttgtcagctcaggattgacaggttacaggagttccacacaggcagatgctttctcctcaagtcctaagcttctagaattctgctagtggcttgcaatcaggctgcccaggccattagatggagttgaagcagtatggtgaagtcacagaccacaaaacattgtaagttgcaaacacaggctgttttgatgccagtctgattggcttctgagaagctattgctttgcattcctctccctggacttccggtcacttgtcatctagaaattgtcacatcatccacactcagggtcatgcgacaggcaagttcctaagcacatgctcaaagttcgcttaaaattttcctatcatgattttcttattcacagttctggaatccattatgagatatrtggtatgaggtttcaattcactttagaaaaagaattttggtcacccattggtgttattaaagtccttatgcaaagaaactgttttgagacatagtaagacatgcttagtaacgtactactcattatgcatttttagcctaatcatatattacattattgttatgggtagaacattgtaatg

SEQ ID NO: 871922 - DNA, 516 bp, Homo sapiens
aaatgcaaatcaaaaccacagtgagataccatctcacaccagttagaatggcgatcattaaaaagtcaggaaacaacaggtgctggagaggatgtggagaaaaaggaacacttttacactgttgtggggactgtaaactagttcaaccattatggaaggcagtgtggcaattcctcagggayctagacctagaaataccatttgacccagccatcccattactgggtatatacccaaaggattataaatcatgctgctataaagacacacgcacacatatgtttactgcagcactattcacaatagcaaagacttgggaaccaagccaaatgtccaacaatgataaactcggttaaggaaatgtggcacatatacaccgtggaatactatgcagccataaaaaatgatgagttcatgtcctttgtagggacatggaagaagctggaaaccatcattctcagcaaactaccacaaggacaaaaaaccaaacaccacatgttctcagtcataggtggg

SEQ ID NO: 871923 - DNA, 516 bp, Homo sapiens
aaatgcaaatcaaaaccacagtgagataccatctcacaccagttagaatggcgatcattaaaaagtcaggaaacaacaggtgctggagaggatgtggagaaaaaggaacacttttacactgttgtggggactgtaaactagttcaaccattatggaaggcagtgtggcaattcctcagggacctagacctagaaataccatttgacccagccatcccattactrggtatatacccaaaggattataaatcatgctgctataaagacacacgcacacatatgtttactgcagcactattcacaatagcaaagacttgggaaccaagccaaatgtccaacaatgataaactcggttaaggaaatgtggcacatatacaccgtggaatactatgcagccataaaaaatgatgagttcatgtcctttgtagggacatggaagaagctggaaaccatcattctcagcaaactaccacaaggacaaaaaaccaaacaccacatgttctcagtcataggtggg

SEQ ID NO: 871924 - DNA, 550 bp, Homo sapiens
cggggcctgttgtggggttgggggaggggggaggaatagcattaggacatatacctaatgttaaatgacgagttaatgggtgcagcacaccaacatggcacatgtatacatatgtaactaacctgcacattgtgcacatttaccctagaacttaaagtataataataaacaaaagaataaaatgtaacacaaaaaataaaatttttaaaaatcagctatttcacagatgatgaatccctaccattggctatcagtaaattggacacctcagataaaataattagcaaacttgtaaacaggacaacagaaaatataggaattgaaacaaayaaacaaacaaaaagattggaggaaaaaaacatcaaacaaaaattaggacagagcatctgagaactgaacggcaatataaatgacctagcatacatatatatgaactcccagaaaatgataagaagaatgagtcaaagaaaacagttgaatagattattattgacaatttttaaaacatacagacatcaaacaaaaacaattccaaaaatctgggagaaca

SEQ ID NO: 871925 - DNA, 716 bp, Homo sapiens
tatttctaagtacttttatataatgaactcttctgttaaactcttttgtatcgaggagttttagaggttaatgttacttttacgggataattagagtatatcactgtgtcaggtagcagcataatctacttgataccactcaggaacaacaggagtatagatttgcattttaatatttaaattggcaacatatgaacacttgactgctgtaaaaattttatacaraactgaacacttatggatgttttagtaatctaaatattactttccatcttacctctgatatattctactatatttcctatcaaatgtattcaaaattatctgaatctattgtccatggatcccagtttattctttatactgtacattctgttactcatgccatttgtggagtttttcttccaagttttttctttattatatgaaacctctaattacttctttcccaaacaaatatctcatcatctacttaattttgcttttattgtggttgtttatgatacaatatggatgatgatagtctgcacatttcaaaaattacatttttccctaaaaacatttttacagtattgcatctatattttataattaaggtattttgatttttaaaaaatattcaagctatttatacatattaaatataatattatttaaaatatatcaaagatatatttttcttatttgtagttcaaagcgtgcttgatcaatattgg

SEQ ID NO: 871926 - DNA, 716 bp, Homo sapiens
tatttctaagtacttttatataatgaactcttctgttaaactcttttgtatcgaggagttttagaggttaatgttacttttacgggataattagagtatatcactgtgtcaggtagcagcataatctacttgataccactcaggaacaacaggagtatagatttgcattttaatatttaaattggcaacatatgaacacttgactgctgtaaaaattttatacaaaactgaacacttatggatgttttagtaatctaaatattactttccatcttacctctgatatattctactatatttcctatcaaatgtattcaaaattatctgaatctattgtccatggatcccagtttattctttataytgtacattctgttactcatgccatttgtggagtttttcttccaagttttttctttattatatgaaacctctaattacttctttcccaaacaaatatctcatcatctacttaattttgcttttattgtggttgtttatgatacaatatggatgatgatagtctgcacatttcaaaaattacatttttccctaaaaacatttttacagtattgcatctatattttataattaaggtattttgatttttaaaaaatattcaagctatttatacatattaaatataatattatttaaaatatatcaaagatatatttttcttatttgtagttcaaagcgtgcttgatcaatattgg

SEQ ID NO: 871927 - DNA, 643 bp, Homo sapiens
gaatactggattgttaccagttaagacaacatttcttctcctgagattctcaacagagtattgagactctgattaagggaaaatgaagaagaaaaacaaaatgcaaaagcactagattattaacaagccttgagctccaacttcacaattcagtagattgtttaatagggtgtatctggtggcttaaatgtgatatttaaatggtttctctgtggccctgagcctagagccaattggagaatgagagttcagagtgacaagagtaaacgagtgtgtgaaaaaagggaggaaracagttcacatctgctactgtgcagcaacgaaaccataggcttttgacatccagcatcctgaaagaatatagccaacaattttcatctctgtgacagtgatggttataaaataaggggccctcattttatcatatgtgatcacattttatcatatgtgatatcacaatacacatgttaaaatcatttaggagatggtttaattctcagtgaaacatttcaaaaatagtctgaaagtaaatatgagaaaagttgtgacataattataactaatattaagaaacttacccaggactacacagataagtgtcctgttctctgtaaaacaacactattttcgtttttagttttaa

SEQ ID NO: 871928 - DNA, 614 bp, Homo sapiens
caagcggacagcaccacagactgctctggcattaactcatcaggggctgtttcagtgtgtcatggaccccactgttcagggcatccaagttgctgccctggagcttggctatctgaaacagcactcctgaaaacatttttggtctttgacttcttcagtgggaggaaatatcctctgaacactgcatgtgcctgcttgaggctacagaggcaaacttgtgaggattcatgaaacatctgtgctgctcagagtgacatcttccttgtggtgcctggtatttattcattatatacaaaagtatacmccttgcggtagatattactagtgcccaccaaaatctggtttcccactctctctaggcacacagaagacaagctttcccagccctttttggttagatggggcttggtgactccataccaatgggatgtgagcaaaagtgacaccgatcactcctactgaagcactgaagcgcaggagagaggtccaggctgccgaggagaccgaaggagtcctgtgttgtagatgtcctagctgttgccggtactgatggtagagcctccatcagcctggatccttgagttactgatggagcagaattccctcaacacata

SEQ ID NO: 871929 - DNA, 645 bp, Homo sapiens
agattttaaaagcaaccatagggtacttatcaggcatataaggataatgacttcttgtcaaaaataatgcaagagggaagacagcaaagcaacatctagaaaaagcagaaaggggaaaataaaaaagctaccaaccaagaattctatgccttggaaaaaaaatctcaaaaacaaaggcaaaataaaaggtttctagacataaagaagcagaaagaattcatcatcgtcagcagagccacgctactagaaatttttttttttaattgtactttaagttctgggttacatgtgcagaacgtacaggtttgtgacataggtatacgtgtgccctggtggtttgctgcrcccataaaactgtcacctacattaggtatttctcctaatgttatccctcccctagacccccacctcccaacaggccccagtgtgtgatgttcccctccctgtgtccatgtgttcttattgttcaactcccacttatgagtgagaacgtgtggtgtttggttttctgaccttgtgatagtttgctgagaatgatgatttccagcttcatccatgtccctgcaaaggacatgaactcatcctttttatggctgtatagtattccatggtgtatatgtgccacattttcttaatccagtctat

SEQ ID NO: 871930 - DNA, 686 bp, Homo sapiens
cataggggctggggaaagatgcaatgaaatatttgcttctgtaaccaactggcattctcctgtttcagtccccaagtatgtctgaggatctgggtcctgagtgtaaaataaaacatacttaattttctcaaatatcactagttaggaaaaaagcaaaagaaaagcagagtaatttccttcctcatctcctgccrcaggtgattggattgcaggattgcatggagggagaagtgattttgtttcttggatggtgaaattaagtgagcacttcccaatttattcctaaaaacacggagacaccgcgtttatgttcctgaaatgagaaatcagtagaaacacaactgggtaaagaaagggaaattaaaaagaaaatcaccaatcatttgattatatgacaacacgtgaacactcacatacttgattgtactctgcaagtctgtagaaaggaggatcatttaagaaaaaaaaaaaaagacgctggtttcagcatgttttttgtaaggatgggctatggcagctggaaagctaagtgtcctgaaacaatggatggccctcacatttgtgcaaggtcttcagagtttacaaagcgctttcagacgtgttgtatttctcctccatgtcctggcttatgccaggctctccagctcccctttcaacccaccctccctgttcctgctccatgcttt

SEQ ID NO: 871931 - DNA, 654 bp, Homo sapiens
ccacatggtcatgagggtgaacggttgttgccctgcagcctggtcctgactttattataattcttaaaacccactgttatggattgaattcccaactaccccacccccaacaaattaatatgttgaaaccctaatccctaatgtgactgtatttggagacagggcctttaaggggtaattagggttaaatgaggtcataagggtggggccctaatggaataggactgctgtgcttttttttttttttttcaagatgtagtttcactcttcttgcccaggctggagtgcagtggcatgatcttggctcactgcaacttctgcctcctgaattcaagtgattctcrtgcctcagcctcccgaatagctgggattacaggtgtgtgccaccactcctggctaattttgtatttttagtagagacggggtttcgccgtgttggtcaggctggtctcaaactcctgacctcaagtgatccacccgcctcgtcctctcaatgtgttgggattacaggcacgagccaccatgcccgaccaggaccggtgttcttataagaagagagagacatcaggaatgggtgtgtacagagaaaaggacacagcaagatggtggccatttgcaagccaaggagagagacctcaggagaaaccaacccgc

SEQ ID NO: 871932 - DNA, 595 bp, Homo sapiens
ttccatacatcaattttgcctgaagggtaagagacaccttaaagccatgaatccttcccctgggctggtggtcatgcacagaaggaacttgtcataagcagcatgtaaaagtgtccttcatgttagccagtcagctatattaatayagcaggaagcagaaatcaggtgtttaactcatttatagaagacataagtaatttctatttgaatggacctgatcaaatggaaccaaaggtcttagaaaataaaaggttaaaacccaagcaaaacggtatctcactcatcatatccagtagtaagaagtcctattaggccttttcccacaacacgtcagcttccaaatacagcacatgacaaagaaatacttcagggagatggaggaatggggggctcgctactgtgctggctaatgacattattacaaggctccaaccagcttcgaggccgtggtagacacagcactgtggtcctagggttagaaaggagccatagaagcagcatgaacaatctaatgcccagagcatggatgaggcgcctccatgcccaggactgctcccacccaccgttgctagagcacctaggaaagggcacagac

SEQ ID NO: 871933 - DNA, 595 bp, Homo sapiens
ttccatacatcaattttgcctgaagggtaagagacaccttaaagccatgaatccttcccctgggctggtggtcatgcacagaaggaacttgtcataagcagcatgtaaaagtgtccttcatgttagccagtcagctatattaatatagcaggaagcagaratcaggtgtttaactcatttatagaagacataagtaatttctatttgaatggacctgatcaaatggaaccaaaggtcttagaaaataaaaggttaaaacccaagcaaaacggtatctcactcatcatatccagtagtaagaagtcctattaggccttttcccacaacacgtcagcttccaaatacagcacatgacaaagaaatacttcagggagatggaggaatggggggctcgctactgtgctggctaatgacattattacaaggctccaaccagcttcgaggccgtggtagacacagcactgtggtcctagggttagaaaggagccatagaagcagcatgaacaatctaatgcccagagcatggatgaggcgcctccatgcccaggactgctcccacccaccgttgctagagcacctaggaaagggcacagac

SEQ ID NO: 871934 - DNA, 596 bp, Homo sapiens
agttttgaggtactaggagttaggactttgacaaatcttttttattttttatttttttgagatggagtctcaccctgtttcccaggctggaatgcagtggcacaatttcggctcactgcaatttttgcctcccaagttcaaatgattttcatgcctcagcctcctgagtagcygggtttacaggcacatgccaccacacctggcttttttttttttttttttttgtatttttagtagagacgaggttttgccatgctggccaggctggtcttgaactcttgacctcaggtgatccacctgccttggtcctcccaaagtgctaggattacaggtgacagccactgcacttggccttttttttttttttttttttttttttttttttgaggacacaattccactaataactctgaaggaaataaaaatattttacctcaaaatatattttttatatttaaagaaataaaaatggctgccacaaagtgagcaaacagaagtgaccttgcaaagctgtattttgtggcgaaaaatttgcatctgtggagcatctccattaagtgtagtcaggctctttccatgcctttccaggatctaga

SEQ ID NO: 871935 - DNA, 643 bp, Homo sapiens
atgatgagtccaacatcatcctgataccaaagcctggcagagacacaacaacaaaaaaagacaattttagaccaatatccctgaagaacatcgatgcaaaaatcctcaataaaatactggtaaaccgagtccagcagcacaccaaaaagcttattcaccacgatcaagtcagcttcatccctgggatgaaaggctggttcaacatacgcaaatcaataaacataatccatcacataaacagaaccatcgacaaaaaccacatgattatctcaayagatgcagaaaaggccttcgacaaaattcaacagcccttcatgctaaaaactctcaataaactagttattgatgggatgtatctcaaaataataagagctatttatgacaaacccacagccaatatcatactgcatggacaaaactagaagcattctcttttgaaaaccagcacaagacaaggttgccctctctcaccactcttattcaacatagtgttggaaattctggccagggcaatcaagaaagagaaagaaataaagggtattcaattaggaaatgaggaagtcaaactgtccctgtttgcagatgacatgattgtatatttagaaaaccccatcatctcagcccaaaatctccttaagctgat

SEQ ID NO: 871936 - DNA, 556 bp, Homo sapiens
agtacattccttagcatttttttttctttcttatttcttaaactctcacaacaacacgactactgtctcaatctttatgtccggaagaaaaattacttaaaacattgatataaaaaggctatggtatatctacttttcttcttatcatttcagtgatattagataataaaaagtacttcttgaatttgtcaatattttaataaaattcctgaagctgcatamaagcagtgagaaagtccacacttttcttttaccggatcttaatggaaaagtttcccattttattccattgattataatgtttgctatggttttcccataaatgccctttattatgttgagaaacttttcttctatatcaaaacggttgagagattttatcaagaaagaatcttggattttgtcaaatgtttctttctctgtcaattgagatgatcatgtggtttttatttttcattccattaatgaaatgtatcacattgattaatttgtgtatttttcaagcaggcatacacaccaggaataaaccccacttggtcacaaagtataatctttt

SEQ ID NO: 871937 - DNA, 608 bp, Homo sapiens
ccagagacacaacgaagaaagaaaacttcaggccaatatccctaatgaacatcgatgtgaaaatcctcaataaaatactggcaaaccgattccagcagcacatccaaaagcttatccaccacgatcaagttgacttgatccctgggatgcaaggctggttcaacatatgcaaatcaataaatgtaatccatcacataaacagaaccaatgacaaaaatcacatggtcatcccaatagatgcaggcctttgataaagttcaacawcccttcatgttaaaaactctcaataaattaggtattgatgaaaaaatctcaaaataataagagctatttatgacaaacccacagccaattcatactgaatgggcaaaagctggaagcattccctttaaaaaccgacacaagataaggatgccccctctcaccattcctattcaacatagtattggaagttctggccagggcaatcaggcaagagaaagaaataaagggtattcagataggaagagaggaggtcaaattgtctctgtttgcagatggcatgattctacatttagaaaaccccattgtctcagcccccaaactccttaagttgataagcaacttcc

SEQ ID NO: 871938 - DNA, 554 bp, Homo sapiens
cctgcaaaagacatgatctcattctttttttatagatgcatagtattccatggtgtatatgtaccacattttctttatccagtctatcattgatgggcatttaggtgggctccaacgttgtttttattgtgaatagtgctgcaatgaactaacctgtgcatgtgtctttataatagaacaacgtatattcttttgtgtatatacccagtaatgggattgctgggtggaatggaatttttgtttttaggtctttgaggaattgctacattgtcttccacaatggttgaactaatttacaccttcaccaatagtgtgtaagtattcctttttctccacaaccttgccagcawtggttattttttgacttttaagtgatagacattctgactggtgtgagatggtatctcattgtggttttgatttgcatttctctaataatcagtgatgctgagcttttttttcatttgatttttggctgcatgtgtgaaaagtgtctggtcatgttttttgcccactttttaaagggcttgtttgtttttatttgtcattgtcat

SEQ ID NO: 871939 - DNA, 620 bp, Homo sapiens
gaattcggacaacggaatagggcagacgtggcaaagatatggctgtcttccaactgtgacctctgcctgaaggagccctgtgaaccagaacacccaacaaaagaaggtactggtacaaaaacagacatctagactaatggaacagaatmgagagctcagaagtaatgccacacacctacaaccatctgctatttgacaaagtagacaaaagcaagcaatggagaaaggactcccaattcaataattagtgctgaggtaactgactagctatatgcaaaagactgaagctggtcgcctttttatgccataaacaaagatcaactcaagatggactaagacttaaatgtaaattctaaacttataaaaacactggaagataacctaacaaatatcattctggacagaggctgtagcaaaaatctcatgatgttgatgctaaaagcaattgcaacaaaaagaaacattgacaaatggaacctaattaaactaaagagcttctgcacagcgaaagcaactatcaacagagtaaatatatgacctacagaatgggagacaatatttgcaaaccatgcatccaacaaaggtctaatattcagaatctattaggaacttaatagaca

SEQ ID NO: 871940 - DNA, 658 bp, Homo sapiens
ccaaagctctgattcgccgatgaatcttaaccagtctcttaagtgagttaaaaatgccctcagatataatttttgaacaacagccgtatcaggcatagattcagtttctcaactgcaaatgacacataaatggcaggtcccatgagaagctgcatcattccagkgccatttccttctcagataataaaggagaccctggaaaaccacaaaaccctagtgaaaatggtatcttatgtccagctcttcatccctgcacagtgctttcctccacgagtctacagagaacttcacaaaggcatcaaaccctcatctccagttctgactcgcagtttacaccactgaagattcagaacgctcaagaacaaagggacctggccctggtgctcctgtaaaaggtctttgggctctggtccacagcccccttccaggacagcaggcagaggctgacactgtccctaatacaagtctgatagaaacaccaggaccttcccagttgctctcctaacttcctgtgagggctgtgcagatgttgacaggctctgcttacatgcctctgtgtccagaatctcctaggctttttgggactgaccacaggagccagatgaggacctgcagtacacctgacttaactttgctgtgcccctggacaccgtccatt

SEQ ID NO: 871941 - DNA, 658 bp, Homo sapiens
ccaaagctctgattcgccgatgaatcttaaccagtctcttaagtgagttaaaaatgccctcagatataatttttgaacaacagccgtatcaggcatagattcagtttctcaactgcaaatgacacataaatggcaggtcccatgagaagctgcatcattccagtgccatttccttctcagataataaaggagaccctggaaaaccacaaaaccctagtgaaaatggtatcttatgtccagctcttcatccctgcacagtgctttcctccacgagtctacagagaacttcacaaaggcatcaaaccctcatctccagttctgaytcgcagtttacaccactgaagattcagaacgctcaagaacaaagggacctggccctggtgctcctgtaaaaggtctttgggctctggtccacagcccccttccaggacagcaggcagaggctgacactgtccctaatacaagtctgatagaaacaccaggaccttcccagttgctctcctaacttcctgtgagggctgtgcagatgttgacaggctctgcttacatgcctctgtgtccagaatctcctaggctttttgggactgaccacaggagccagatgaggacctgcagtacacctgacttaactttgctgtgcccctggacaccgtccatt

SEQ ID NO: 871942 - DNA, 656 bp, Homo sapiens
ggtagtatgaacctgaagccattcttttatcataaatcttcttacccctttattgaatttgggaaataataagtgctcacaccttttgctctgcctggcacctacatctgcttcccagcagccatcacacatggtgcattatgaaaatcctggtgagatgtgacacaattatgatggagattgaagcgtccagtgtaatatatttcactcaragatgccaacacttacaattcaaatcccaccctcaccccatcaggatttgttaggtgaaattagtttttaaaaaaagatgaatagagatgtaattctttctaaagaacaaatcacctctaccattcctatttaattatttaaaaaatattcaaatgctacttgaaaaattaccacataatttttaaaattctatacatgggattacatttatacaagtttgctaagatgcaagtggcatttggaatagtcaacaattaggcattttccaaagcatttatttttgaaagatgtctggcctaaatatgtcattatcattagagtttagtgatttttacaatcagaacatagctgtcaaaagggctggtttttgacatcatggttactgttgaggaaaaccacagccctgaatttgaaagctcttctcctaggagaggcccttgcct

SEQ ID NO: 871943 - DNA, 644 bp, Homo sapiens
ttgctagattgggaaagttctcttggataatatcctgcagactgttttccaacttggttccattctgcccgtcactttcaggtacactagtcagacgtagatttggtcttttcacatagtcacttatctcttggaggctttgttggtttcttttttttcttttttctctaaacttctcttctgacttcatttcattcatttcatcttccatcgctaataccctttctttcagtttatcgcatyggctactgaggcttgtgcatttgtcatgtagttctcgtgctgtggttttcagctccatgaggtcctttaaggacttctctgcattggttattctagttagccattcgtctaactttttttcaaagtttttaacttctttgtcattggtttgaacttcctcctttagctcggcgtagttggtcttctgaagccttcttctctcaactcctcaaagtcattctccatccagctttgttccattgctgctgaggagctgtgttcctttgcaggaggagagacactctgatttttagagtttctggtttttctgctctgttttttccccatctttgtggttttctctacctttggtgtttgaagatggtgacgtacagatgggttgttggtgtggatgtcctttc

SEQ ID NO: 871944 - DNA, 599 bp, Homo sapiens
taggggcagactgacacttcacacgactgggtactcctctgacacaaaacttccagaggaatgatcaggcagcagcatttgcggttcaccaatatctgctgtactgcagccaccgctgctgatactgaggcaaatagggtctggagtggacttccagcaaactccaacagacctgcagctgaaggtcctgaccgttagaaggaaatctaagaaacagaaaggacatccacaccaacaacccatctgtacgtcaccatcttcaaagaccaaaggtagagaaaaccacaaagatggggaaaaaacagagcagaaaaaccagaaactctaaaaatcagagtgcctctcctcctgcaaaggaacgcagctcctcascagcaatggaacaaagctggatggagaatgactttgaggagttgagagaagaaggtttcagaagaccaaactactctgagctaaaggaggaagttcaaaccaatgacaaagaagttaaaaaccttgaaaaaaaattagacgaatggctaactagaataaccgatgcagagaagtccttaaagaacctcatggagctgaaaaccacagcatgagaactacatgacaaa

SEQ ID NO: 871945 - DNA, 630 bp, Homo sapiens
cttccaattatgtggtcaattttgaataagtgtgatgtgatgctgattagagtgtatattctgttgattttgggtggagagttctgtaaatgtctattaggtctgctttgtgcagagctgagttcaggtcctggatatccttgttaaacttctgtctcattgatctgtctaatgttgacagtggggtgttaaagtctcccactattattstgtgtgagtctaaggctgtttctaggtctctaagagcttgctttatgaatctgggtgctcctgtattggttgcatgtatatttaggatagttagctcttcttgttgaattgatcccttcaccattatgtaatggccttctttgtctcttttgatctttgttggtttaagatctgttttatcagagactaggattgcaaccccttcttttttttgctttccattttcttggtagatcttcctccatccccttattttgaacctatgtgcatctttgcacgtgagatgggtctcctgaatacagcacactgatgggtcttgagtctttatccaatttgccagtctgtgtcttttaattgggtcatttaacccattacatttaacgttaatattgttatgtgtgaatttgatcctgtcattgt

SEQ ID NO: 871946 - DNA, 628 bp, Homo sapiens
tacacactgctttaaatgtgtcccagagattctggtacgttgtgtcttgttctctttgctttcaaagaacatctttatttctgccttaatttcgttatttacccggtggtcactcaggagcaagttgttcagttttcatgtagttgtgtgtggttttgagtgagtttcttgatcgtgagttctaatttgatatcactgtggtctgagagacagtttgttgtgatttctgttcttttacatttgctgaggagtgctttacttccaattatgtggtcaattttgaataagtgtgatgtgatgctgattagagtgtatattctgttgattttgggtggagagttctgtaaatgtctattaggtctgctttgtgcagagctgagttcaggtcctggatatccttgttaaacttctgtctcattgatctgtctaatgttgacagtggggtgttaaagtctcccactattattgtgtgtgagtctaaggctstttctaggtctctaagagcttgctttatgaatctgggtgctcctgtattggttgcatgtatatttaggatagttagctcttcttgttgaattgatcccttcaccattatgtaatggccttctttgtctcttttgatctttgt

SEQ ID NO: 871947 - DNA, 564 bp, Homo sapiens
gttcaagtgattctcttgcctcagcctcccaactagcttggattataggcatgcgccaccaccaggcccagctaagtttttgtatttttagtatagacagagttttaccatgttgcccaggctggtcttgaactcctggcctcaagtgatgcacccaccttgacttcccaaaatgctgagattacaggcatgaaccacygtgcccagccaagagttctcttttaagagttcctcaagccagagctaaatgtatttccttgactttctttctgttccacagtggtacttctagattttgaccatgttgagagccagctggagatcctggaggaaaaatattgtaaactaactgcttgtttggtgctacttgaaatttttctattcttccgcatctgcctatgactgcaggtagaggggcagtagcaccatcctctgaagaaaggaaccagccacttggtagcaggttgactttgtttcatccttcaaccctcacaggggcagtcattcatcctgactgctaaccttacttttgtaagctccaggaacacagatcactaagaattc

SEQ ID NO: 871948 - DNA, 645 bp, Homo sapiens
tgggggcaggagatgaaaatgatgacaggttttgttttttctctacactagaaatatgggtaaggatggaaatttagagagaccctggactgggtgaatatgccagagccaaggaaacttttgcaaggcaaatggcattgctattggaggtatcctgattttaaaagttgtttgcaagggtgatttatttgcaaaaaggtacttcaggaaaggtttttaaaaagtctttgctgttgtaggccaccctaacagtgtaaaatttcctaggattaggtatgatttccagacttactgtttagttattaaaagactcactggtctttttaagagggtcaatggaattaaaaaawatatgggtaaggcctttttacactctatttacttcaaacagaccagatatgccaagaaaatgttcacaagtctgtatcttacaagacagacagatttgagctggctggacctgtaatgtttatcattttgctgtttttatgttgctgctcctcatggtgggctcctatcatactttttttcagagtagtaacacaaagctatttttcatttgtaaacttcaattaaatctgagagattcaaaagtataatgatatttctttttacagaattgtactgtgagtcctagtccccagc

SEQ ID NO: 871949 - DNA, 620 bp, Homo sapiens
ctatgtaaaagtataaatggaaggttttatgaagtatcataaagacttatgcccaatatgccacaaatttacatttttacttgagagtttcagtacattacacctgcaagctcttcatgagtgacttagcttactatgacatttattgcagattcaaaaatgtagttcttctggggccaggtgcggtggctcatgcctgtaatcccagcactttgggaggctgaggtggatggatcacgaggtcaagacatcaagaccatcctgaccaatctagtgaaaccccgtttctactaaaamcaaaacaaacaaacaaaaaaaaacaaaaattagccaggcatggtggtacgtgcctgtagtcccagctactcgggaggctgagggaggagaatcacttgaacccgggaggcggaggttgcagtgaggcaagatggcaccactgcatgccagcctggctagcctgggcaacaagagcaaaactccacctcaaaaaaaaaaaaaaaaaaaaatatatatatatatatagttcttctgggtgatatttttaaatcttctaataggtacaaatctcagtgactcagctgtgtaagtaatatactagagcttttgctacttttctatgt

SEQ ID NO: 871950 - DNA, 620 bp, Homo sapiens
ctatgtaaaagtataaatggaaggttttatgaagtatcataaagacttatgcccaatatgccacaaatttacatttttacttgagagtttcagtacattacacctgcaagctcttcatgagtgacttagcttactatgacatttattgcagattcaaaaatgtagttcttctggggccaggtgcggtggctcatgcctgtaatcccagcactttgggaggctgaggtggatggatcacgaggtcaagacatcaagaccatcctgaccaatctagtgaaaccccgtttctactaaaaacaaaacaaacaamcaaaaaaaaacaaaaattagccaggcatggtggtacgtgcctgtagtcccagctactcgggaggctgagggaggagaatcacttgaacccgggaggcggaggttgcagtgaggcaagatggcaccactgcatgccagcctggctagcctgggcaacaagagcaaaactccacctcaaaaaaaaaaaaaaaaaaaaatatatatatatatatagttcttctgggtgatatttttaaatcttctaataggtacaaatctcagtgactcagctgtgtaagtaatatactagagcttttgctacttttctatgt

SEQ ID NO: 871951 - DNA, 690 bp, Homo sapiens
gaggctatggagaaaaggaaacatttatacactgctggtgggaatgtaaattagttcagccactgtggaaagcagtttggagatttttcacagaactaaaaaaagaattgtcatttgatgcagcaatcccattactgagtatatatccaaaagaaaagaaatggctgggcatggtggctcacgtctgtaatcccagcaatttgagaagccgaggtgggcagatcacttgaggtcaggagttcgagaccagcctggccaacatggtgaaaccccatctctacacaaaaattatctgggagtggtggcgcatgcctgtagtatcagctactcgggaggctgaggcaggagaatcgcttgaaccgggaggtggaggttgcagtaagyagagattgtgttattgcactccagcctgggtgacagagcaagactctatctcctgaaaaaaaccacacacacacacaaaaaaaaaaccccacaaaacaaaacagaaagcaaaagaaaagaaataattctatcatggcagtattcacaatagcagagacatggaatcaacctaggtacccaacaacagtggattgaataaagaaaatgtgatacacatgcaccgtggaatactacacagctatacaaaagaatgaaatcatgtcctttgtagcaacatggatgcagctggaagctattatcctaagc

SEQ ID NO: 871952 - DNA, 620 bp, Homo sapiens
acagatcaatgttttggtaccagcaccatgctgttttggttagtgtagccttgtagtatagtttgaagtcaggtagcgtgatgcctccagctttgctcttttggcttaggattgacttggcattgtgggctattttttggttccatatgaattttgaagtagttttttcaattctctgaagaaagtcattggtagcttgatggggatggcawtgaatctataaattaccttgggcagtatggccattttcattacattgattcttcctatccatgagcatggaatattcttccatttgtttgtgtcctcttttattttgttgagtctacctctccctttagatcagcagtccccaacctttatggcatcagggaccaattctgtggaaggcaattttttcatggaccaagggtggggagggggcatggtttcagaatgaaatggtcccacctcagatcattaagcatgagttagattctcttaaggagtgtgcaacctagataccttgcatacacagttcacaataggatttgggcttctatgaaaatctaatgctgcagctgatctgacaggaggtagagctcagacagtaatgttcactcactgaccactcacctcct

SEQ ID NO: 871953 - DNA, 700 bp, Homo sapiens
gccttttcagactgccttctttcacttagtcctatgtatttatggttcatctatgtctttttgtgatttgatagctcagtttttttgttttgttttttgagacagagtctcgctctgatgcccaggctggagtgcartggcgcaatctcggctcactgcaagctccgtctcctggcttcacgccattctcctgcctcagcctcctgagtagctgggaccacaggcgcccaccaccacgcccagctaattttttgtatttttagtagaggcggggtttcattgtgttagccagggtggtctcgatctcctgacctcattgatccacctgcctcagcctcccaaagtgctgggattacaggtgtgagccacctcaccccgccagctcagttttttaaaatcactgaatgttgcctcacatggatatatcacaagacatctgttcacctataaaataatatcttggctgcttctagtttttgataattatcaataaaactgctaaaacattcatgtgcaggtttttgtgcagacataagttttcaattcatgtgggcaaatacctagaagtgtgagtgctgaattgcatgataagactatgtttgtttttgtaagaaactgccaaaatgtcttccaaagtagctgtaccattttgcattcccaccagcaataaatgagagtttctttgctctgctctgcattt

SEQ ID NO: 871954 - DNA, 706 bp, Homo sapiens
tgagaaaaaactgaactaagaatcaaaagccctggccgggtgtggtggctcacacctgtaattccagcactttgggaggctgaggtgggcggatcacttgaggtcaggagttcgagaccagcctggccaacatggaaaaatcccatctctactaaaaatacaaaaactagctgggcgtggtggtgcatgcctgtggtcccagctacttgggaggctaaggcaggagaatcgcttgaacccaggaggcagaggttgcaatgagccaaggtcatgccactgcactccagcctgggtgacagagcaaaactccatctcaaaataaataaataaagaatcaaaagccctaagtcctcaaactttgttctttctctaatcctaacatgattcattaattttctcatttttctgtttcaataagtatttattgagtatctactccatgcccggcactggcccctaaacccatgacattaccagttagaagctgttctaaatgaatgrgtcccagacctcttttgaggcatgcttcccacctgcactgggaggaggagaggcccactcgcattgccactgctgcaccccctccctaaaccccgagggcctctcaggctaggggctgggagcaatgggagactggggccagagctggttttctggattgacaggatagggcgtcccagaccaatgggaactctcagatcccttt

SEQ ID NO: 871955 - DNA, 564 bp, Homo sapiens
tactcaaaaagacacataagcaatacattgtgaacgcagaaggattgcttcaccctgcctggaaagttatagaagttagcccggataaggtgttactaaaactgggtttttatttaatatttattaaagactaatatatattaatataacatatattaatatatttatagaagcatatatatgtaagtgtacatttcagtgaattttcaaagtaagaatatggtaaaatcctaccaccaacatgcaaatcagaatatagaaactagccatyacttaagcaatctcccctgtgccccatctttagcaccatccccagtagaaacctttagtctgaattatatcaccaaagattagttttggctgttgctatgcattatagaggtaagatcctaaagtatgtattcttctgtacttaccttctttagctctatatgttgattttagattcatccaaatgttgtgtgtagcagtaatttgaatataccataatttatgtatcaatttcttggcgaacatttaaataatttctagttttggctgctagaaatattatttccataacat

SEQ ID NO: 871956 - DNA, 646 bp, Homo sapiens
tctcacaactcctattcaacacagtgttggaagtgctggccagggcaatcaggcaagagaaagaaagggtattcaattaggaaaagaggaagtcaaattgtctctgcttgcagatgacatgattgtatatttagaaaacctcatmgtctcagcccaaaatctctttaagctgataagtaacttcagcaatgtctcaggatacgaagtcaatgtggaaaaatcacaagcattcctatataccaataacagacagagagccaaatcatgagtgaactctcattcacaattgctacaaagagaaaaaatgccaaagaatccaacttacaagggatgtgaaggaactcttcatggagaactacaaacctcttcctcaaggaaataaaaggggtcacaaacaaatggaagaacattccatgctcatggataggaagaatcaatatcgtgaaaatggccatactccccaaggttatttatagattcaatgccattcccatcaagctaacaatgtctttcttcacagaattggaaaacactactttaaagttcatatggaacgaaaaaagagcccacattgccaaagcaatcctaagcacaaggaacaaagctggaggcatcatgctacctgacttcaaattatactacaagg

SEQ ID NO: 871957 - DNA, 646 bp, Homo sapiens
tctcacaactcctattcaacacagtgttggaagtgctggccagggcaatcaggcaagagaaagaaagggtattcaattaggaaaagaggaagtcaaattgtctctgcttgcagatgacatgattgtatatttagaaaacctcatagtctcagcccaaaatctctttaagctgataagtaacttcagcaatgtctcaggataygaagtcaatgtggaaaaatcacaagcattcctatataccaataacagacagagagccaaatcatgagtgaactctcattcacaattgctacaaagagaaaaaatgccaaagaatccaacttacaagggatgtgaaggaactcttcatggagaactacaaacctcttcctcaaggaaataaaaggggtcacaaacaaatggaagaacattccatgctcatggataggaagaatcaatatcgtgaaaatggccatactccccaaggttatttatagattcaatgccattcccatcaagctaacaatgtctttcttcacagaattggaaaacactactttaaagttcatatggaacgaaaaaagagcccacattgccaaagcaatcctaagcacaaggaacaaagctggaggcatcatgctacctgacttcaaattatactacaagg

SEQ ID NO: 871958 - DNA, 646 bp, Homo sapiens
tctcacaactcctattcaacacagtgttggaagtgctggccagggcaatcaggcaagagaaagaaagggtattcaattaggaaaagaggaagtcaaattgtctctgcttgcagatgacatgattgtatatttagaaaacctcatagtctcagcccaaaatctctttaagctgataagtaacttcagcaatgtctcaggatacgaagtcaatgtggaaaaatcacaagcattcctatataccaataacagacagagagccaaatcatgagtgaactctcattcacaattgctacaaagagaaaaaatgccaaagaatccaacttacaagggatgtgaaggaackcttcatggagaactacaaacctcttcctcaaggaaataaaaggggtcacaaacaaatggaagaacattccatgctcatggataggaagaatcaatatcgtgaaaatggccatactccccaaggttatttatagattcaatgccattcccatcaagctaacaatgtctttcttcacagaattggaaaacactactttaaagttcatatggaacgaaaaaagagcccacattgccaaagcaatcctaagcacaaggaacaaagctggaggcatcatgctacctgacttcaaattatactacaagg

SEQ ID NO: 871959 - DNA, 562 bp, Homo sapiens
agcacagaggcctcagaaataacaccacacatctacaaccatctgatctttgacaaacctgacaaaaacaagaaatggggaaaggattccctatttaataaatggtgctgggaaaactgactagccatatgtagaaagctgaaactggatcccttccttacaccttatacaaaaattaattcgagatgggttaaagacttaaatattagacctaaaaccataaaaaccctagaaggaaacctaggcaatacctttcaggacacaggcatgggcaaggacttcatgattaaaacaccaaaaacaatggcaacaaaagccaaaatwgaccaatgggatctaattaaagtaaagagcttctgcacagcaaaagaaactaccaacagagtgaagaggcaacctacagaatgggagaaaatttttgcaatctacacatctgacaaagggctaatatccagaatctacaaagaacttaaacaaatttacaagaaaaaatcaaacaaccccatcaaaaagtgggcacaggatatgaacagacacttctcaaaagaagacatttatgcag

SEQ ID NO: 871960 - DNA, 562 bp, Homo sapiens
agcacagaggcctcagaaataacaccacacatctacaaccatctgatctttgacaaacctgacaaaaacaagaaatggggaaaggattccctatttaataaatggtgctgggaaaactgactagccatatgtagaaagctgaaactggatcccttccttacaccttatacaaaaattaattcgagatgggttaaagacttaaatattagacctaaaaccataaaaaccctagaaggaaacctaggcaatacctttcaggacacaggcatgggcaaggacttcatgattaaaacaccaaaaacaatggcaacaaaagccaaaatagacmaatgggatctaattaaagtaaagagcttctgcacagcaaaagaaactaccaacagagtgaagaggcaacctacagaatgggagaaaatttttgcaatctacacatctgacaaagggctaatatccagaatctacaaagaacttaaacaaatttacaagaaaaaatcaaacaaccccatcaaaaagtgggcacaggatatgaacagacacttctcaaaagaagacatttatgcag

SEQ ID NO: 871961 - DNA, 608 bp, Homo sapiens
gggaacaggtagaaccactggagtaagggagagtggttgggagggtgtggctttctatagaaagagattagtgaagctctacactgaggcaaggcaaggagttgcagaagaagatttgagatacatttagaaggaagaagctttaggatttggtaaattttttttttttttttttttttttttttttacagaaaccagtacatctgtagctttgggcatataaaagtatagttttgagaaraaggtcagctactgccacgtctttatgagatgggcacctatttccctccttatattttctttatccagatcacatcctattccattcttgggatttaaaattccatgttttatgcaaggatacatcttcacatgggatggacagaattctaggattgtcagagaactctaccacattactggctgggtttaaggataaaaactggcatctgtctattggctgtgctttgattaggacagcaagagcaccatatattagagacacaaagttctgggaatttcttaaagataggctaaagtcatccatatatccaacaaatatttattgagcacctcctatgggttcagtcatggttgctactttcacc

SEQ ID NO: 871962 - DNA, 608 bp, Homo sapiens
gggaacaggtagaaccactggagtaagggagagtggttgggagggtgtggctttctatagaaagagattagtgaagctctacactgaggcaaggcaaggagttgcagaagaagatttgagatacatttagaaggaagaagctttaggatttggtaaattttttttttttttttttttttttttttttacagaaaccagtacatctgtagctttgggcatataaaagtatagttttgagaagaaggtcagctactgccacgtytttatgagatgggcacctatttccctccttatattttctttatccagatcacatcctattccattcttgggatttaaaattccatgttttatgcaaggatacatcttcacatgggatggacagaattctaggattgtcagagaactctaccacattactggctgggtttaaggataaaaactggcatctgtctattggctgtgctttgattaggacagcaagagcaccatatattagagacacaaagttctgggaatttcttaaagataggctaaagtcatccatatatccaacaaatatttattgagcacctcctatgggttcagtcatggttgctactttcacc

SEQ ID NO: 871963 - DNA, 636 bp, Homo sapiens
ggagaaattatggattccacattggtcacattcagtttgagatgctgttcagaagctgaagtggagatttccaacagggagttagatgttcaaaagccccagaggtaggtctgtgtggaagacatatttgaaagcctcagcttagtacccattcattgaaatcatgagcataggcaagaccaccagtgaggaaatgggaccagcaatgaacttcaggaaactaatatttaaggaatacatggaagaaagggagcyaacaacagcgaagctcgaaacaatggccagagagagacagagacagagagagagagaagagagagaaataaaataactgagttgttttactctttaattcctttctttcttgttagaggaccaaatgcaatatcacatttagttatctggggagaagaagggtccttttgagtttgtccaggtagggacaagggagaggtggaatatggggagtttgtgggggcaaggggagatgaggtaactgggcattatccctctagcccagggtggattgagggatgggggaagaaggctgtgccacaccatacactcctagaaaaagagagatgggacatttcacctggagaaagatatttgttgtttagtttatgacacaggtgg

SEQ ID NO: 871964 - DNA, 666 bp, Homo sapiens
tccaaggaatgggaaagaggtggaccccactcccctggagatctaaccttcaaagcagaccacctctaaggaaggagggagcacagcccacccaaagctccctccggatcaaaggaaatgtgaatatggtgccagctgctgaaggggacatcaacaaagcctgggaacatacttggaaagtgtcagcttctgagcccaagctaagccatcataacccctgtgacctgcacatatacatccagatggcctgaagcaactgaagaaccaaaaaagaagtgaaatagtcagttcctgccttaactgatggcattccactattgtgatttgttcctgccccaccytaactgatcaattgaccttgtgacattccttctcttggacaatgagtctcaggagctccccatcgagcaccttgtggcccctgcccctgcctgcaagagaaaaaacccctttgactgtaattttccactacctactgaaatcctataaaactgccccacccctatctccctttgctcactcctttttcggactcagtccgcctggacccaggagattaaaaagctttattgctcacacaaagcctgtttggtggtctcttcacatggacatacataacatttggtgccaaagtcctggcacagggggactccttcaggaggccgg

SEQ ID NO: 871965 - DNA, 633 bp, Homo sapiens
cgggccatgccatagggacctatctttgcttgtttaatgagaaagcattaaagctgtgtggtagaaaaacgcagaacctaacttttcatattctcctagataggcatctagattacttatagttcgtttcagaatataacatcatttacctcagggagaaaccttttgagttaatacaaaatgtaatattatttttctttaaagtaaatttcragcttcatggaattgtcagagagataacagaggacacaaataattcaagaaaatataatgatgtgatccacaatttcttataaatgtgcatatttcttggaaaactctgagcaaaaacataaatcaaagccagtgttcattagcaaggattttcttgtatcatcctattattgtttctttgaacattattctactaattaacagcacttctacctagaggttaataatgtgtgaaaaaagtcttaggcctattgtttaacttcttagaaacacgttatttaaaattttatttcagctagttatttccactaattacaatctctcaacattctgatacaatttatatttgcttacaaacatgtaaaggcattcattgaatattctccaagactgctagtaatttgcttgtataatatatct

SEQ ID NO: 871966 - DNA, 574 bp, Homo sapiens
ggatgcaaggttggttcaacatacacaaatcaataaatgtgattccatcacattagcagaactaaagacaaaaactacatgattatctcaatagatgcagaaaaggccttttgtaaaattccacatcttttcatattaaagactctaaataaagtaggcattgaagaaacatacctcaaaataataaaagccatatatgacaaccccatagccaatattatactgaatggrcaaaagctggaagtattctttttcaaaacttgcacaagacaaggatgccctctctcaccactgttattcaacgtagtattggaatttctgaccagggcaatcaggcaagagaaagaaataaagagtattcaaataggaagagaggaagtcaaattgcctttgtttgcagctgacataaccctatatctagaaaccctcatcatctcagccccaaagcttcttaagttgataagcaacttcaacaaattctcaagatacaaaatcaatgtgcaaaaattgttagcattcctatacaccaacaacagacaagcagagagcggaatcataaatgaactcccattca

SEQ ID NO: 871967 - DNA, 577 bp, Homo sapiens
atgaagggctaactgaagctgacacttttgttccttccactgtctcttcctgaatgagaaatccccaagtcctcctccctttctactggggactctgacaaatgttcttccccaagtccagacattagacttaagagacaagtcccactgttggtgagatcttacgttctccaaattattaaaacaataagtcagatggctcttggatgccacattgtatgactatgayatttgttctgccctaagcaactccccataaatacaaaggccaaatcttgtaattgaaaccatatgttaaccaatgccctaaacatacttgtacattctctctttccaaatctcaatgttctccaaaaactgctaatgagctaaaaggggactggcattcctgtatcacttcaataacagcaaaatctgtggtcaatgtcatttttaatgcatcctcccccaccgcctccttcaccttcattgttctgcagacttcctttctcataaaatgcagaatgacctcctggcaaggaagaactgaaaatatttcagttctacaggtcagtggtatttttatggactttaaatt

SEQ ID NO: 871968 - DNA, 617 bp, Homo sapiens
ccaagtgttgtcctcaggcccacagcagcagcagcacccagggagttgttagaaaggcaaagtcctggtccccaccccagacccagtgaatcagaaactctgtgggtgaagtatatagcaatctgtgtttataagccctctgggtgattctggtgcccactaaagtttgagaaccattattctaaaatgttcagactgctatatacatggacttgagatgaataagtgttcctttactacttttaaagtcagtattttgattacttgaaaaggtaacmaagaggtctgttttttctctttgaaacatggtagtaaagttatgtcagttaatatatgtacatattactttcttattgctgctgtagtgaattattaaaaattttactgacctaaaacaggaaaaaaataattttcttttagttctggcaattagaagccccaaaggggtctcactgggctaaaatcaaggagtcagcagaactgctttcgttcttggaggctttaagggagaatttatttccttgtcttggcaacttctagaggacacccacattcctaggctcatggtctctctagcttcaaagccaaaaacatccgatgaagtcattgtcaggtcg

SEQ ID NO: 871969 - DNA, 673 bp, Homo sapiens
cctcctgcactggcgggtggttagaggaagtgaccccttatgcccctgcccactggaccattctgtcactttgaaaatgagtaaataagtgctgatagccagggtgtggctgatcagcccgaaggaaggaggatggactttgcaccagtcttaacatacacaaccttcaaaacttttacttaatgctctcagaaccacatctggtggtggcagtggtgacaggaatgaccagtaatggctcaaagaaccaaaagtgtttctggaacacctgctggtgccagacaataattcagggaatgtgtaaaatgacagggctgtgacaacaagctatcaacattttcttactctggacgatttaaagacagtattggccgggcgcagtggatcacgcctgtaatcccagcactttgggaggcygaggtgagcagatcacccgaggtcaggagttcgagaccagcctggccaacatggcaaaaccccgtctctactaaaaatccaaaaattagctgggtgtggtggcatgtacctgtaatcccagctacttgggagactgaggcaggagaatcacttgaacccagcaggcagaggctgcaatgagctgagatcacgccactgcactccagcctgggcgacagactgagactctctctctcaaagaaaaaaaaaaaaaaaa

SEQ ID NO: 871970 - DNA, 677 bp, Homo sapiens
cttagcatgctggcttgttgcctcttggttttaaaatggttgctgtaactacaggtatcataactatgttccaaataggaaatggggtggggagagcaaaaaggtgaaggaggccttctcccagtgaggttctgcctttttatttggcaaggaggtagttcacgaaccaattttgtgcctcactggccagaactggtcacatgccaccccccagctggtcagtggctgggaaaaggggtgaaggatggggttggtcagccagccaagattgcctrcttgcaatgtcttcctgttcctcatcatcatcctggaagaggctctcaagttgattcattacataaatgaaccagttttctaaaatcaattctgttcatttgcattaccaatacgaattttaattctgtgatttttctttttggtttccatggtttttaatttttattttattattataattactttgttatttcaagtatctgccttttaaagtttcattctgcatgtcagcctaaattttaccacctaattctgatctcttcttatggttttttattgttatttttctatagagactgtgagtttgtctgtcttgttgaaaacaagaagtctattttttatttcctgtaacgaaccatttataatcatgtaatttcctctgagactttgatataataata

SEQ ID NO: 871971 - DNA, 657 bp, Homo sapiens
taatacaaacaaaggaggcacactaacacttacctaccaggaataggtatgaatacctgctgtctgccaggtcctggccaaaagagtatacatgattatgcattaaacagtcaccaaaaatatttttgacaaataccatgacacctacttcataaaattaaaaaaaacctaaaagctcagagtatatygttaatttgccctaaataacatagtaaacaggtagcaagtatgaaaggaaggggtgttgttcatctgagaagaacagtggaaaaataaaagtgttattaaaaaaacagaaccaaggaaaccgagatcaaacatagcttaaagtatgactatgacacagatttaatgagaaactcacagtgaactagaagattttaaaaataatttttaatcaatttatttatttgtacttttgatattgactctacatcatttaaccctgaacatggatgaggaaatcaacaggaatgtcacaaggcccaggggtcattgttgctgagtgtggatatcacagctcccgtacatggctacagagacatggcatgttctcgtatgtaaccctttcagactgctttttgtttatcaatagcaatattcaatattcatgcttctaaaacatcactctgcccaagaagcaaatatctgatccac

SEQ ID NO: 871972 - DNA, 621 bp, Homo sapiens
actcagtttagcaaaaaaaaaaaaaccttgaacagccacctaaaaagataaaagctttgacctatgctcttggagagctattcaggttgtttgattggatgtatagtctatgagggtctctgttttttgagccaagaatcaagagaaaaaaacaggtgcttcctccctccatttctttttttgttttctctgagtaaataaagatgcgacaaataatctttaaaaattaaatctgtgattttagttttagttcctgggcagccctaaggtaaaagaaaataattttttaaaacctttaggtattataaattcagatccaaaagcgattctatcttataggcaagcataaaatgggagtgctagtagtacttgttttacaaggctatctggtgaattaagtgaaataactttcgagcawctgagctataaccttgtaaccagtctctactttgccacgcattcatgaggaaagtaaatgtgagtccacacaaaatacctgaaaaatcatgaatgttttctctatatatcttttgggagcactagggaggagcttagacagtatgccacacagaaaaccaaatctttacccatttgtattccttagatccaaccccacagggc

SEQ ID NO: 871973 - DNA, 628 bp, Homo sapiens
tggaggagtaaatactgctagagctagatcgacattggcacaaaaacaaaaacaaacaaaacaaaaaaacacttggtctttcttctcttacagattgctacttcagagagaaagagctcccactgcctgcttacagccaaccagttagaggaaaggccctaattatccttccaagttctggcactcagactctgtctatttcttcttttggctccagaccaaacaaaatgtgaaaaggaaaaaaaaaaaaaaagtcaagaaaaaatgcaacagggcaataatgcttgtctgtgtggcacacaatcagaaaattacttcctctctacaaaatactgttattaactttcttccagtgatcagaagtttaagagttcatacaatgcttaaattaatgaataaaaccctattagcatactatgtttccttattacaacagaaagtcttttgaaggagatatatccatcttcagttgcaaaatsatgttacttctattaccagggatgaattttaagcatattgagatgcatataaaacatttactctgtattctttatgtttcccatcagggactacttttctactttgaaatcagaatttttgtcttttctctctttttggcattccttat

SEQ ID NO: 871974 - DNA, 618 bp, Homo sapiens
ctgagaactggaacaagatgaggatgcccactctcactactcctcttcaacatcatactggaagtcctagccagagcaatcagacaagagaaagaaataaagggcaagcaaatcagtaaagaggaagtcaaacagtcactgtttgctgatgatatgattgtttacctagaaaaccctaaagactcctccagaaagctcctagaaatgataaaagaattcagcaaagtttctggatacaaaattaatgtacataaatcygtagcttttctatataccaacagcgaccaagctgagaatcaaatcaagaactcaactctttacaatagctgcaaaaaaattaaaataaaatacttaggaatatacctaatcaaggaggtgaaagacttctccaaggaaaactacaaaatactgctgaaatatttcacagatgacacaaatggaatgggtagaatcaatattgtgaaaatgaccatactgccaaaagcaatctacaaattcaaagcaattcccatcaaaatatcaccatcattcttcacagaattagaaaaaaaaaattctaaaattcatatggaacaaaaaaaaagcccacatagtcaaagcaagactaagcaaaaagaa

SEQ ID NO: 871975 - DNA, 605 bp, Homo sapiens
aataagtaagtttttctaactttgcatttaaaaccactgaccagatctttgcacaaagagaacacttcctttctttattacaatgtaagaactatatccattttaattattgtccagctttccacagttgagttacagtgttttaagctgtgytcctgtaaattcttttttttttttctttgacatggagtcttgctctgtcgcccaggctggagtacaatagcgcgatcttggctcactgaaacctccacctcccacgttcaagcgattctcctgcctcagcctcctgagtagctgggattacaggcaagtgccaccacgccaggttaatttttgtatttttagtagagacagggttttgccacgttggccaggctggtctccaactcttaacctcaggtcatccacccaccttggcctcccaaagtgttgggattacaggcgtgagccactacgccccaccttcctgtaaattcttaagtattatctttattttgttaagttttgcaagctatgcatgtgatcaccatagccctagatgtccaatcatctttccaactcttcctttcttcaattacatattaaacgcaaggcattccctgtaa

SEQ ID NO: 871976 - DNA, 568 bp, Homo sapiens
ttgaatctcagtccactttccaataaaacacagtaatcttccactaaatacataagaatcaaagtagtcaatttaattcaacttttatcaagcacctcctaagaactgcaaagcactattatagacagtggcgacatcacactgaatagtgtccctgcccttgagaagttcacagcctagaagtaaagcctgagaacatgagttcagaactgaattgcagtctctactccggggttccttgagcctggactgcagcatgaatagggccattgaacggtgtatcactgtggcccagaaaacaggatccagttcattcaagtctgcctctcagtgatcaygagcaagttaagttactgtaagctagtgttcttatttttgcaaaagtaaaataatacccttccttgcagggtctgtgtgaccctggcagggaaagctttgcaatataggcacacagtagctaggcaataagtgacacccaagggagaagaacaatctccaaacatagtgagtactgaaagtgtcagctaatatagaaggatttagatggtatttgagagcaagttctagg

SEQ ID NO: 871977 - DNA, 586 bp, Homo sapiens
cataagcatatacttatacattctgggtagtgctggctgcttgaaataaactctgaaataaatccactttatgcacaatagttgaaatggcacagttacgctctgatctaaggccttatgttatgccatttttttttttttttttgagacggagtcttgctctgtcacccargctggagtgcagtggcgcgatctcagctcactgcaagctccgccttctgggttcatgccattctcctacctcggcctcccaagtagctaggactacaggcacccgccaccacacccagttaatttttttgtatttttagtagagacggggtttcaccatgttagccaggatggtctcgatctcctgaccttgtgatccgcccacctcggcctcccaaagtgctgggattacaggcatgagccaccgcacccggccatgttatgacttttattcttataccttgactcattctaatttggctctgctttgaacttttccattttaagatctctctgtgggcgcttcttgctctgtaaatttaaaacagtctgtgtcaaaaacagtctcactctgacctgaccagcttagatgact

SEQ ID NO: 871978 - DNA, 483 bp, Homo sapiens
ccctcaaagagatgctgtgtaagcagtagggactcatcagcattaatctcattctaatatttcctgggggcaggaaatgacatgttggttttactttgatggtttttatgtcattgcattacttaaagtgtagcagtcactctattctaggccattagtttgtcatttttttccatgattcttgcaaatgtgcttcttacataagaaaaataccaaagactttgttctcgaaagcagccttagtgaaattcatttatttcaagatcacagtgtggataatacctccatgartaggtctgaccaagagacaggaagagaaaggctggaaaacttgtgaagtgtagtgtatccacttacttagaaagtttgggaatgaaaaaggatttttttttttgcataaacattcagaaacactgactcataaaaaagaagtggattaaacgcaattgaaataactaaaaatatgtctgagtgaataatgca

SEQ ID NO: 871979 - DNA, 608 bp, Homo sapiens
aaaagatgctatgtaatctattagagcaattgttttaatattgaaaaagatacttcaactgattgtttttttacttccagacattaatggtcttaaacatattcatccattctgaacgtaacaaaacaaactaaaatcctgcctgtaaccatatagtaattgttttttatactttctcccttttgatgtatatgctataacctctatttccattggaatcaaatttgtattaataacttactatttataacatttttaacacatttctgcaatataagtagcttatttataacctacttctcaaaaatgcatactagtttcatgctgcagatggcctcacaccatccggcacttgtcttactcttttgccctctctctctttttttgtgtgtttgtgtgtgtgtgtatttccctctmtctctctccattaggttaagagttaagaagtgtcaacacaagaaaatgggaccaggcgtggtggctcacgcctgtgatctcagccatttgggaggcttaggtgggtggatcaggaggtcagcagttcgagaccagcctcatcaacatggtgaaaccccatctctactaaaaatacaaaaagtagccaggtg

SEQ ID NO: 871980 - DNA, 675 bp, Homo sapiens
acttgtggatatggtttggctgtgtccccatccaaatctcatcttgaattgtagctcccataattcccacgtgttgtgggagggacccagtgggagataactgaatcatgagggcggtttctcccattctgttctcatggtagtgagtaagtctcacaacatatgatgattttataaggggtctccccttttgcttgactctctttctctcttgtctgccaccatgtaagacrtgcctttcacctcccaccatgattgtgaggcctccctagctacgtggaactgtgagcccattaaacctctttttctttataaaatactcattcttacatgcacatgtatgtttattgcagcactatttacaatagcaaagacttggaaccagcccaaatgtccatcgatgatagactaaagaaaatgtggcacatatacaccatggaatactatgcagccataaaaaagaatgagctcatatcctttgcagggacatggatgaagctggaaaccatcattctcagcaaactaatgcaggaacagaaaaccaaacacggcttgttctcactcataagtgggagttgaacaatgagaacacatggacacagggaggggaacatcacacactgggacctgttggggggtgggggacaagaggagggagagcgttaggacaaatcc

SEQ ID NO: 871981 - DNA, 654 bp, Homo sapiens
acctgatggaagtttcccgaatactaacccccacattttcccatacttcaatggacatacttccattctatatctgaatcccaaaaacaccgggaagaaaaacaagataaaatttaaccattatgtcctgaaccctacctctaattggggcaaaaaaaaaaaaattgaacctgataaaatcagtctagctgtctttcactagcagttagagggaaacttattccaagacgtcttaggggaaaagagagaaaacagaggagatatttgaaatggagaatttaaagtcactcttgaattttctctgagtatcatagacagtgaatgcctctcccttgtctgtgaatactaaataactccttgtctttctgacttggtgttgctactgctggtaytctctctaaaatctcatagctctctgaattattgcctccagggacactgaggctggggggaagtgagcaagtgtctccagggaatgcacaatgttttatctcctcgttcaacatccttttcatttatctcacaagtactctaaaattctagcagaattaggaagttaaggacaccaaggacctctttcagtctatcagatttacgtacatctaagacacattgttgagtgggaaaatgaagagtgagcaaatgacaaagtag

SEQ ID NO: 871982 - DNA, 656 bp, Homo sapiens
cgtgtgtaaaaatgtccttaaataccccggagacacaccaactatcttaccagaattaaatatttcttatgtaatttgacattatgtttttttcagacataacaagagtgtaaaatgacacaattttaactgtcaagaaacacagaagcatcatacttatatttcaggcctaccattttgtcacttctctctttttttgagaatttgatgggcaaaattaggaagctccgttccttagttttctttctttttttttttctaattttaagttttagggcatatgtgacaacgtgcagattagttacatatgtatacatgtgccatgttggtgtgctgcacccattaactcgtcatttaacattaggtatgtctcctaatgctgtccctcycccctacccccaccccacaactggccctggtgtgtgatgttccccttcctgtgtccatgtgttctcattgttcaattcccacctatgagtgagaacatgtggtgtttggtgttttgtccttgcgatagtttgctgagaatgatggtttccagcttcatccatgtccctacaaaggacttgaactcatcattttttatggctgcatagtattccatggtgtatatgtgccacattttcttaatccagtctatcattgttggacatttg

SEQ ID NO: 871983 - DNA, 656 bp, Homo sapiens
cgtgtgtaaaaatgtccttaaataccccggagacacaccaactatcttaccagaattaaatatttcttatgtaatttgacattatgtttttttcagacataacaagagtgtaaaatgacacaattttaactgtcaagaaacacagaagcatcatacttatatttcaggcctaccattttgtcacttctctctttttttgagaatttgatgggcaaaattaggaagctccgttccttagttttctttctttttttttttctaattttaagttttagggcatatgtgacaacgtgcagattagttacatatgtatacatgtgccatgttggtgtgctgcacccattaactcgtcatttaacattaggtatgtctcctaatgctgtccctctcccctacccccaccccacaactggccctggtgtgtgatgttccccttcctgtgtccrtgtgttctcattgttcaattcccacctatgagtgagaacatgtggtgtttggtgttttgtccttgcgatagtttgctgagaatgatggtttccagcttcatccatgtccctacaaaggacttgaactcatcattttttatggctgcatagtattccatggtgtatatgtgccacattttcttaatccagtctatcattgttggacatttg

SEQ ID NO: 871984 - DNA, 656 bp, Homo sapiens
cgtgtgtaaaaatgtccttaaataccccggagacacaccaactatcttaccagaattaaatatttcttatgtaatttgacattatgtttttttcagacataacaagagtgtaaaatgacacaattttaactgtcaagaaacacagaagcatcatacttatatttcaggcctaccattttgtcacttctctctttttttgagaatttgatgggcaaaattaggaagctccgttccttagttttctttctttttttttttctaattttaagttttagggcatatgtgacaacgtgcagattagttacatatgtatacatgtgccatgttggtgtgctgcacccattaactcgtcatttaacattaggtatgtctcctaatgctgtccctctcccctacccccaccccacaactggccctggtgtgtgatgttccccttcctgtgtccatgtgttctcattgttcaattcccacctatgagtgagaacatgyggtgtttggtgttttgtccttgcgatagtttgctgagaatgatggtttccagcttcatccatgtccctacaaaggacttgaactcatcattttttatggctgcatagtattccatggtgtatatgtgccacattttcttaatccagtctatcattgttggacatttg

SEQ ID NO: 871985 - DNA, 578 bp, Homo sapiens
agtaattttacagcgtggatgagatcagtcaaaactgttgtataaagtgagtgtatttgtgaatattggtatgaggaaatgacactgaaaacagcctaaagtaaccaaacattactggagggagtattctggcaaaaggtagtgtctcytgagatgtgaccactgatgacctgagagttaacaaggaaatgttgatctgctgagagataagaggaaagttagctgaggctgctagctgtccataaaatatttgtggttcattttctatattctagtcattggccagagctgcccagtcagggattctattttccagtcactgttacaactacatggggctgtgtgactagttctttacaaaataatgaaaaagatgatgcctgtgactttgcgtcaaagtggttaagatgcattccttttcctcatctatacagaggactttgaagatgtaagggatgaggaagccacaggataaaaggaacttggtggccctggtggaccacacttcccagtatttacatccttgtgtagcctgtttgaatctgggctggccctataacttgctttaaccaggagaa

SEQ ID NO: 871986 - DNA, 578 bp, Homo sapiens
agtaattttacagcgtggatgagatcagtcaaaactgttgtataaagtgagtgtatttgtgaatattggtatgaggaaatgacactgaaaacagcctaaagtaaccaaacattactggagggagtattctggcaaaaggtagtgtctcctgagatgtgaccactgatgacytgagagttaacaaggaaatgttgatctgctgagagataagaggaaagttagctgaggctgctagctgtccataaaatatttgtggttcattttctatattctagtcattggccagagctgcccagtcagggattctattttccagtcactgttacaactacatggggctgtgtgactagttctttacaaaataatgaaaaagatgatgcctgtgactttgcgtcaaagtggttaagatgcattccttttcctcatctatacagaggactttgaagatgtaagggatgaggaagccacaggataaaaggaacttggtggccctggtggaccacacttcccagtatttacatccttgtgtagcctgtttgaatctgggctggccctataacttgctttaaccaggagaa

SEQ ID NO: 871987 - DNA, 626 bp, Homo sapiens
ggaatgctgagttggtcatgttccatgggccctcggctccctgcatatccccctttctgtttatgaattaattgaaagaatgtaaggccaggctgggcagctctttctccgattggcagtccatccgattttacagactataaacagaagacagagacaaaacaacattattccaagaactacatataagctgttaatgtggtgccttagataggtccaagggttgaggctccccaggccttgctggaatttggtccggtcttctaaagaaggctgaaactctggagtttgcctatttaaatcaagaattttgttttgttttataattcaccaatatcaaaggtgatgttggatgtgaaagctccccgcaaatgggctttcacraggtcccatggatactcactttggttatattctaagttggctacacaaatatgggtgtgattaaaatgacaacgcaattgctgctgcaagtgcaagctttgtacttgttcctttaaccatagaatcatggatcataacgttgccacttcagtttgtaactcagtgttaattttattctgaagtagccatgcttggttagctgtatgtgtccagttctcttcgtactgagctgtttaaacaga

SEQ ID NO: 871988 - DNA, 645 bp, Homo sapiens
taacccacgtgagctgactctggatcccaaactactcaccagtatccccttaagaagtgaatagattggcccattagacttaaaggacacagaagcccctaaacagtttttgaagaggcagtaattttacagtaacaacactaacaatggcagtattttatatttttgtagtggttcacaatatccaaaacacattctcaagatgttccacaaaaatttctcataattctcaaaacaacattttcctccattaaatccctttctgatttatctaaataacaagggctcatattatgccttttactggaatttgtatacctgtttgtcctgttaaactgtgatctctttaaaggtagaaacaacctccccttcaaagaaaacagtattagtgagttgaatatattcaatgaataggtgttgaattgaatagtatacytgaggcagaatatggtttggggtactggaaacctaaaatacacgtggtagactcttcctttaatgacccccaatgaaccatgacttccagtattcatgccctgtgtaatcacctctcaacttgacttgggatgatatataactattttaaccaattgaatatgatgaaagtgatattgtgccagttctagttccagcccttccttgacc

SEQ ID NO: 871989 - DNA, 645 bp, Homo sapiens
taacccacgtgagctgactctggatcccaaactactcaccagtatccccttaagaagtgaatagattggcccattagacttaaaggacacagaagcccctaaacagtttttgaagaggcagtaattttacagtaacaacactaacaatggcagtattttatatttttgtagtggttcacaatatccaaaacacattctcaagatgttccacaaaaatttctcataattctcaaaacaacattttcctccattaaatccctttctgatttatctaaataacaagggctcatattatgccttttactggaatttgtatacctgtttgtcctgttaaactgtgatctctttaaaggtagaaacaacctccccttcaaagaaaacagtattagtgagttgaatatattcaatgaataggtgttgaattgaatagtatacctgaggcagaatatggtttggggtactggaaacytaaaatacacgtggtagactcttcctttaatgacccccaatgaaccatgacttccagtattcatgccctgtgtaatcacctctcaacttgacttgggatgatatataactattttaaccaattgaatatgatgaaagtgatattgtgccagttctagttccagcccttccttgacc

SEQ ID NO: 871990 - DNA, 703 bp, Homo sapiens
tgaagtcaggtagcatgatgcctccagctttgttctttatgcttaggattgacttggcaataagggctctttttggttccacatgaactttaaagtagttttttccagttctgtgaagaaagtcattggtagcttgatggggatggcactgaatctataaattrccttgggcaatatggccattttcacgatattgattcttcctatccatgagcatggaatgttcttccacttgtttgtgtcctcttttattttgtcgagcagtgttttgtaattctccttgaagaggtccttcacatcccttgtaagtgggattcctaggtattatattccctttttagcaattgtgaatgggagttcactcatgatttggctgtttgtctgttattggtgtataggaatgcttatgatttttgcacactgattttgtatcctgagactttgctgaagttgcttatcagcttatggagattttgagctgagacaatggggttttctaaatacacaatcatgtcatctgcaaacagggacaactcagagagtttaacatcctcaacttgaggcagcggacaagagcaatgcaggacatatttatctggaagatacttggcactgcatctgatagagactaaactgagagaaaacctttttaaccggcctgtcttgatatcctgcaattccaccacattgcaatccaaaaaac

SEQ ID NO: 871991 - DNA, 541 bp, Homo sapiens
attgaactgaaggtgtttagtatttctatcagtcgagaagcatctaaatctcactaaaaatggcccagatttttgttcactgctccttcttggcccactctccacccagtaccagagacagaggatgtacatcctcagcctgttgcaccaaaggtgtaaactgaggccaacctgggcttactctcaaacccagctagtttttgtgctagtgtctaggtggagcatttaaggtttaaaggctctctctaccacctgtggataccaaagagtggctgaagatccctttctgatggcaaagttctcaacagaactgagtagcaatgtcaagttaaggactgcctgggatctggtctttaagccagtggtttccaaaagcagctgacagaacccatcagaagagcattgratctgaactgtccactaaggcaagccatttgtggcgatttacatttaaattaaaatttaaaattcagttcctcagttgcactaggcacatttcaactacttaacaaccacatatgtctagtggctgccctcttga

SEQ ID NO: 871992 - DNA, 584 bp, Homo sapiens
cttgcaaatgttgccctctggtggaaggatatgttaatattttagagacaattgtggtccttaattatgcaattacacctactgttttctctctctttcttctttctttctctttctttctttctttctttctttctttctttctttctttctctctttctttcttctttcttcttttggatatttgttaaattaaatctacatctgaaactataaagtcttttttgtgggcaacacatttgcagttgtcttagtactaaatgtatttagaaataagttgattgagaatcccccagttaaccaaaaaactagtactaaaggaaacttcactgtattaagatttagtaatggtrtggtaatcacataggtaaaaatgatatacaatagaataaattgtgataattttataaatattttgaaatagtaacataaatttgatgttttgctccctattaccaaaaatacaaacatgttttaaaggcattctatttaagatcattcaaaaactatttctgtggtatttttaaggcaaactgatttttaagaaatacctcaagtacatacctcaaggtggtggtgtgcat

SEQ ID NO: 871993 - DNA, 601 bp, Homo sapiens
ttaggaaaaacagaagtggataagaaagacaaaataacactagtttaggttaacaccatgagctagacattttattaaccttcttggcttttgttgtcgttgttcttaataaaagaacctgccagtttttagctatgtaaaaggcacaggaatcgaaaacacatttctcagcttcctttgaaactaaggtgtggttatgtgactgagttctggtgagcaaaatagaagtgtgttacagcttcttaaagatgccctaaaaaggatgatattgtgtgctgtttgcacgtttcttcattaccattttttccatcctgctgtctggtacacagatgtgttggtaggagtctgacaatgtgtcagagyggtgaattgaaactgacctaagtttctgacatctttgaggagccacatagcaaccctgcatctcctatctcagaacatttttccatgtagtcaaaataaacttttatctcatttaaactacatcatttgaggtttttgttatctgaaactaaacataatcctaactgatattctcttaatttacagatgcaaaacctgggaacaaaataaaatacctattcaattgcaaagtggtagg

SEQ ID NO: 871994 - DNA, 637 bp, Homo sapiens
gaaccttctatttggccatcttgctccaactaccataatttttgaagaaataatgaagataaacaatatttgaagattggaataactagtggatatgaaaatatctattattcctatcgatggcaaagtcatagttattgctaaagctactgtggtttattggctacacatataattaaatgaaatattaaattttaattacaagttagagaaaataaagtgtaatttttttctcttccaagtacatggaccaagtgaagatgccctgctatataaatggaagrtgctgacttcagtgaaaacatctgataggaatagaagactttgcctgagtccaggttgcacaaaacccaccacctttcacctctttcctcttctctattctcattctatgtgggataggcttcatctctcagctctaggggaacaatatttaaccaaaaatgaccagtaaaactacccgtgcctcctaggagaccctcactctttctcacaggatgtgattattaaaattattgctgttactttgtgatgtggaagaaataactgtttttaagactagagtcaatattaagaataacacaactaaaggacagagaggaacttggtccagaggaaataatgcagtctttgatca

SEQ ID NO: 871995 - DNA, 551 bp, Homo sapiens
gttgaaagacttcccatggctgcttttgttaatggtgcctcaggaaagagacaaggaagccatttggtacgataaaaaggaaaacgggacccttcaggtcagctacaaaaaaaaaaatagctacacaaatccaagtaataactagtaaacagataaatctaccttggtacaattaagcagtgagacacagaaagacatgctactgtgagatagcatacytcagggacactatgaggcagaaagagatgctgggggcttttggagattccaaaagaatcatgttctgcagaaatgtgtgcctccagtttttatgggcactgtaaaattgctgcaaaaagactaaaatttctttttaattaagagcacaatataaaatatacagtgtactccaaatgcagatgagaaaaataattccaaaaaggaatgtaggtagcaaagacaaaacagaaaaaaatcttgagcgatttatctaagtcaccagaagatccttgaggtgaaataataagcattactgtgcagttttagaatatgccattagttatgacacaaag

SEQ ID NO: 871996 - DNA, 721 bp, Homo sapiens
agccaattatcctagcaccatttgttgaaaagggtgtcttctccccactttatgtttttgtttgctttgtctaagatcagttggctgttaagtatttgggtttatttctgggttctctgttctgttcctttggtctatgtgcctatttttataccagtgccatgctgttttggtgactatggccttatagtatagtttgaaattggttagtgtgatgcctccagatttgttatttttgtttagtcttgctttggctatgtggctcttttatggttccatatgaattttagaattgtttttttctaattctgtgaagaatgatggtggtatttttatggggattgcattgratttgtagattgtttttggtagtatggtcattttcacaatattgattctactcatccatgagcatgggatgtgtttccatttgtttgtgtcatctatgatttctttcaacagtgttttgtagttttccttgtagaggccttttgaccccttggttaggtatattcctaagtatttaatttttttgcagctattgtaaaaggggttgagctcttggtttgattctccacttggttgctgttggtatataaaagaacaactgatttgtgtacattaatcttgtatccggaaactttgctgaattcttttatcagttctaggagctttctagaggagtccttagggttttcaatgtacatgatcatattgtcag

SEQ ID NO: 871997 - DNA, 657 bp, Homo sapiens
aatatcgtgaaaatggccatacttcccaaggtaatttatagattcaatgccatccccatcaagctatcaatgactttcttcaaaaaattagaaaaaaaaaactactctaaagttcatatagaaccaaaaaagagcccacattgccaagacaaccctaagccaaaagaacaaagctggaggcattacactacctgacttcaaactatactacaaggctacagtaaccaaaacagcatgatactggcaccaaaacagaaatatagatcaatggaacagaacagagccttcagaaataataccacacatctacaaccatgtgatctttgacaaacctgacaaaaacaagcaatggggaaagattccctatttaataaatggtgctgggaaaactggctagccatatgtagaaagctgaaacaggatcccttccttacaccttatacaaaaattagttcactatggattaaagactttaatgttwgacctgaaaccataaaaaccctagaagaaaacctaggcaataccattcaggacataggcatgggcaaggacttcacgactaaaacaccaaaagcgatggcaacaaaagccagaattgaccaatgggatctaattaaaccaaagagcttctgcacagcaaaagaaactaccatcaga

SEQ ID NO: 871998 - DNA, 646 bp, Homo sapiens
tgtgatgaagcctccatataaagtacaggttttggagagttctggaatagtgaacatatccacttgctggaagagtggcacaccccaccccaacagagacggaaactccttcacttgggacccttccagatcttgccttatgtatctcttcatctggctgttcttctgtatctgttgcaatgccctttgtatacatttgtaaatgtgttttcctgagttctgtgagtcatcccagcaaatgataaaacctgaggaggggatcatgggaatatcccttctgtctgtagccaagccagacagaagttgtgagtaacttgggacccactacttgtgatgggcatctgaagtcagaggcagcattgtgggattgagcccttaacctgtggaatctgtgctaactcyaggtagatactgtcataatttaattgaattataagacagccagttggtgtccaaggggaattggagaaatgcctggtgtggcacgtgattaaaatgggtttcttgtgggcagaaacccatacacatgcacatctggtgtcagaagtgttatgactatacagaaggaaacatgtttttactatgcagtatgcttcttcactttcaagggttattatactacttcacatacagtaaaagaacccta

SEQ ID NO: 871999 - DNA, 586 bp, Homo sapiens
tgggtgttagtagcccccacttcaacataagagggcaaaaatccagactaacacagaaaacaaactagatcaatgtttcccactgagatcaatgtttcccgctgagatcaatatttcccactgtgtgttccacagaacaagtcaccaggaataaagggttctgtggtccaataagtttgggaaaagcagaggtaagcagatttccatagcagacttcccagggcctttaatgtgctaatacgcatggcgaatctccaagagggaggcagagcatgtggcgcagcccagccttatgtgaccaaggaaccctttcatcacagtggatttctcaggaccaaagtgctagggaacatgctttggaaaacagagaactagaccaaggtgatccagattccaaactgagtttttagtctcatgtgggattcggtgatckagtggggtagacagggctaagacttagctcttctactctctcagggggcactttgtctctctgggcctccatgtcctcatctcaataatgaaacctgtgctgcccaactgccgtctcccaggattcttttgaggatcaaagcaaatacgtaga

SEQ ID NO: 872000 - DNA, 559 bp, Homo sapiens
agatgagtcagtatacctggcctgccaagaatttgaggtttggtggtacacttcaagcttgtctaggtcctggctgcagtttgttgccatttgatgtctattttctgatatgattcacaaactcaaagggaatattctgggacctgtggctagctaagatttgtaggacaatgacagcaatttcagaagtcttctacctgattagaactagttacatcatcgtgctcatgagaggctgagctgakagactataagtgaaacaaaatactgagtgacccagcctctgtgtatcatttcctgagacggaagtttctacttttctgcctagttacgctgttctctatatgtacacctccttcttcttgcagatgctataaagactgttgcataaaactatttgaaaacagaacaagcagaaaacagaagccaacattctgtgttttaccaaaattcatctcatcacaacttctgtaaccataggattctgctgtatttttcccatttattcatttatctgtcgatagacatttgggttgtttccagcttttagctattacaa

SEQ ID NO: 872001 - DNA, 604 bp, Homo sapiens
ctctgtcctatgagcctttacctggcattctagccttctaccttgatgtctgctttacagggtttggtaactcctcctcccctacccccacacccacacacacttctcccatggtcaggatctggaagggaaagtggcaggtgctggcaagaaatactaaccttgtcctcagggcaaattttgaattgttgctaccacagagatatctatcaggagggattgagtaacagtggcagctggacaagagcagcagtgagggcagcacgtgattctagcaacaacggacaagccaagactaaagcatcccatagcaatgcctgaagcaaatgccagggcttctaagctctatgcaactacattcttcctagagttttcttagctggagagaacattcccatacccagtcatgtttgcaataatatcttttaagtacaaaaawtgagaccaatttacatacctacaaatatttgtacacacacacacacacacacacacatacattgcaccaaaggcagaacctataaaagattgttattctattccattgaatctaagactttgttttttcacattttaacatctctgaaatcaatatatgtcatac

SEQ ID NO: 872002 - DNA, 604 bp, Homo sapiens
ctctgtcctatgagcctttacctggcattctagccttctaccttgatgtctgctttacagggtttggtaactcctcctcccctacccccacacccacacacacttctcccatggtcaggatctggaagggaaagtggcaggtgctggcaagaaatactaaccttgtcctcagggcaaattttgaattgttgctaccacagagatatctatcaggagggattgagtaacagtggcagctggacaagagcagcagtgagggcagcacgtgattctagcaacaacggacaagccaagactaaagcatcccatagcaatgcctgaagcaaatgccagggcttctaagctctatgcaactacattcttcctagagttttcttagctggagagaacattcccatacccagtcatgtttgcaataatatcttttaagtacaaaaaaygagaccaatttacatacctacaaatatttgtacacacacacacacacacacacacatacattgcaccaaaggcagaacctataaaagattgttattctattccattgaatctaagactttgttttttcacattttaacatctctgaaatcaatatatgtcatac

SEQ ID NO: 872003 - DNA, 600 bp, Homo sapiens
cagccactacaaaaacacaccaaaatataaagaccaatgacactacgaagaaactgcatcaaataatgtgcaaaataaccagttagcatcctgatgacagaatcaaattcacacataactgtattaaccttaaaggtacatgggctaaatccctcaattaaaggacacagactgccaaattggataaagagtcaagacccatcagtgtgctgtattcaggagacccgtctcacatgcaaagacacacataggctcaaaataaagggatggaggaatatttaccaagcaaatgaaaagcaacaaaaaaaaatcagggtttgcagtgctagtctctgataaaacagattttaaaccaacaaagatcaaaaaggagaaagaatggcatcccataatggtaaagggatgaatgcaacaagaagarccaattatcctaaatatatatgcacctaacacaggagcacccagattcataaaacaagttcttagtgacctacaatgaaacttagactcccacacaataatagtggaagactttaacaccccactgtcaatattagatcaacgaaacagaaaattaatgaggatatttaggacttgaat

SEQ ID NO: 872004 - DNA, 623 bp, Homo sapiens
ccactctcttctggcttgtagggtttctgcagagagatccactgttagtctgatggacttctctttgtgggtaacctgacctttctctctggctgcccttaacattttttccttcatttcaaccttgatgaatctgacaattatttgtcttggggttcctcttcttgagaagtatcttagtggtgttctctgtatttcctgaatttgaatgttggcctgtcttgctaggttgggatgttgtcctggataatatccagaagtgtgttttgcaacttggttccattctccctgtcacttccaggtacaccaatcaaacatagatttggtcttttcacatagttccatacttcttggagcctttgttcttttcgtttggcggttttttctctaatyttgttgtcttgctttatttcattgagttgatcttcaatctctgacacactttcttccgcgtgatcaattcagctattgatacttgtgtatgcttcaagaaattctcgtgctgtgtttttcagctccatcaggtcatttcttttcttcgctaaactggttattatagttagcaatttctgtaactttttatcaaggttcttaatttccttgcattgggttagaaaatgctc

SEQ ID NO: 872005 - DNA, 527 bp, Homo sapiens
ctatttaaactatgtcaacctacataaaaagggaaaattttcctattcattataacaagtcagcagctctaacacccaaattgtataaaagaaatataagaaatctatacaccaattttacttctgaatatagatgtaaaaattctaaataaaacattagtgaaacaaatcagtaatgtttcaaaaaatggtacactatcaagcagggtttattccaasaatgaaaaagtggcttaatatcaggaaaacctaagaaataaaagcattattttattagcacaagctgaaaatgcagttaaccaaatttatcagttgttcttaataaaaactccaggaaccaaggaaaactacttaataaagatggtccaccaaaattaacagcaagtattattttgaactacaaaacactaacatcattttaattaaaccattaactacagagggatactcattctcaccattattcaacattgtcttggaagttgtagtgaatgcaatgaaataagaacatggaataatttctataa

SEQ ID NO: 872006 - DNA, 641 bp, Homo sapiens
gttagtatggttatgtgtgaaactgatcctgtcattatgatgctagctggttattttgcatgttagttgatgcagttttttcatagtgttaatggtctttacaatttggtatgtttttgcagtggctggtacgggtttttcctttccatatttagtgcttccttcaggacctcttgtacagcaggcctggtggtgacaaaatctctcagcatttgcttgtctgtaaaggattctatttctcctttgcttatgacgcttaatttggctggatatgaaattctaggtgaaaattcttttctttaagaattttgaatattaccctcccactctcttatggcttgtagggtttctgcagagggatctgctgttagtctcatgggcttctctttktcagaaacccgacccttctctctggctgcccttaacattttgtccttcatttcaaccttggtgaatctgacaattatgtgtcttggagttgtttgctcttctcgaagagtatctctgtggtgttctctgtatttcctgaatttgaatgttggcctgtcttgctaggttagggaagttcttctggataatatcctgaagagtgttttccaacctgcttccattctccctgtcactttcacgtacaccaatca

SEQ ID NO: 872007 - DNA, 619 bp, Homo sapiens
ctagaatccaagatttatggaccccagagttatgctgattcctgatccctttgtatcatagagattagagacaatagagacgattagggatgagcttcccctatttcactctcttgctttttctacacttacttatatccctacattcttataatgtctgttcttccttctctctgaggttatcttatccaagtatcatttgaattccatctcttcctgcctcgttggcatatttccctggcaatgatcttctttctctcctaatcttacaactatgagcataaaaatgaactctttactcaaccttctctctctttcaagctgctctttcttttcaaagagaaatctattcactgtatccatgttctattcacttgtcaattcacttcagtgaagcactcaccaaggttatcatggacctcctggttaccaaatctagtggcctcttttcagtctccatttckctaaaccttcatgcagcttgaaattttctccttctttgacatccatgatggcagatatccttctactttgcttaacatttctcgttagtctcattcaatggctcttttttcccctgcccaccacttacgtgtagatgttcttcagggtttaatcc

SEQ ID NO: 872008 - DNA, 632 bp, Homo sapiens
attacagatttatcactgctctagtatgtcctccatatagataagatttattgagatacccaatgataaaattgctcccatttcttgatagtatccaatccaaggtgaggtcttgctccttagaccaactaaagcccaaatcttataactggttcttttaacttcttcttactaagataacctatgcttctccacrgtgtgtgctctccctcactgcaatgagtaataaacccaacttgtttaactatagatgcgtttctggagtccttggctagaggttattgacgctaacaaggggacagtagcagtacatgtaagcaatggcgagggcatgaaataaacagtggtaccagggattgagaagagtgtgcagattgtggaataatttcaaaggcaaaatcactagtacttgactagttagagttggaagttgaaagaatgggacggtcctaggcaaagacttagtctgtactgtgagtatgtaggtgaatagtgacggtattcatgaaaattgggaaaacaaagaggggaccttttagggggaatattatgaatatttgtaatgagagtgcctgtgagacatccaggtagagaggtccagcagacagttgggcaaatgggtttgaagatag

SEQ ID NO: 872009 - DNA, 609 bp, Homo sapiens
ccattctcaccttactataaataactgcccgagactgggtaatttaaaaggaaagaggtttcattgactcacagttctgcctggctgaggaagcctcaggaaacttacaatcatggtggaaggggaagcaacatgtttttcttcacaaggcagcaggggagagaagtgcagagcaaagggggaagagtcccttacaaagccatcagatctcatgagaactcatacactatcatgagaaccacccccatgatccagtcacctcccaccaggtccctcccccaacatgtgaggattacaattagggttacaattcaagatgagattttggtggggccgcagagccagaccatatcaccgtttaatcttagtgtatttaactagaaccgcttgacattttctgttatcatattcactttccatgtagctcaaaaytttgaataatattatcaccatagatttcttttggtaatagtaaaaaaaaaacattatcatttagagaaagtttgggaatttatgtatttcgaattgtaataaacatctttattgtttcccttgtgcaacattttctacttataatactgttctgattttgtaattgagtttaattaa

SEQ ID NO: 872010 - DNA, 625 bp, Homo sapiens
ttgtctgtccaaaagagagagggcaatgaatggtaaagaccaagtgaaaggagctgaatgcagagcaaatgacattactgaaaatcttagatcatgtgaaagaaggaaattatgctgtttttgatgagacagtttttctttgtatattgagtatatgagtgtcaatacaccaaagactttcatttttaatttctccctctaagagcttgtattagttcrttagggcttccataaaacataccccgaacatttaggtcataacagagtcttgtagatttcttagatttgaatatatatttcaaacatgaaagatatttgaagaaaagaaatattgcatttggaattaaaatcacatttctatatcatttttggaaagtcatctatactgagcatatgagggtaggcccactcctgacagttgtagaatctgggaaaagggttaaatgaaagcctatgaatcattttatctaaatatttaaaagttctgaatcatgctaacagagtactaaataaaatacagtagtcccttggtatccatggggattgtttccaggactcctgcaggtaccaaaatccgtggatgctcaaatccctgatataaaatggtgtaatgtttgcatataac

SEQ ID NO: 872011 - DNA, 625 bp, Homo sapiens
acataaagtacaatttacagccttcgatatatggttctatgaattttgataaatcatcacagttgtacaatcacagtctctccctctcatacccagcccctggcaaaaacttacctgttttctttccctatccttttacctttcccagaaagtcacattaatggaatcatatgtaatgtattccctttggagtctgaatttgtgcacttagaaaaatgctttggaactttgtccatgttgtttcatgtgtcagtagtttgttactttgtattgctgagtagtagtgcattatgtgcatatatggacatstaccacagtttaatcattgtttagaagacactgggttgttttcccttttaggagattatgaataagcctggcataaaaatttgcatagaaatatgtgtgtgaatacaagttttttattctctcaggtgaatgtacagaagcaggattgctggattgtatggtaattgtgtgcttactattatgagaaactgctagctgatttttgaaagtggctattctgcattgccaccagcaatatatgttgctgaacatttttgccagcactgggcattgtcattaaaaaaaatcgccagcctgatatgtgtgaagtgatacc

SEQ ID NO: 872012 - DNA, 683 bp, Homo sapiens
catgctgatacagtgttccatggaaggaatacatagaaatgcattttaatcaaccactttctggacacataggctgtttcaaatggtttaatattatagacaatgctgttatggacatcttcggacacaaaacattatctacaattttgattattttattggctgtattcctagaartaggatcactttgttaaagtgtataaacttttgagtacagttgaccatatttccctctaaagtggtttggccagtttagactgcccccaatagtatgtgagaatccctgtttccccacactcagaaccagcagaccatcattaacaaaattaataagaaatgtttaaaggtagtcagttttaaaattgaaaaatagtattaattattatttaaaatactcttttgttctgatttttaactttttttattgtggtaaaatatatataatacaacatttaccacttttaccatttaccattaagcatttttaagtgtacagttcggtggcattaagtacattcatattgttgtgcaaccatcaccaccatccgtcaccagaactttttcatctttcccaactgaaactctgtacccatgaaacactaactcaccattcctccttccctcagcccctggcaaccactcttctactttctgtccctatgagttggactacactagggacc

SEQ ID NO: 872013 - DNA, 635 bp, Homo sapiens
tattaaatcataaatcatgaaattctgggaaatgaaagaaattagcataaccaaatgatatatagatctcagtcctcttaggatgaatagatggtgcaacatgttataacaaagtgaattttctgttgagaagtgcatttaaaagtagaagtggccaataatccatgtttcttatccaacctctggcattttgagctcagggtgttttgtttgtttgttttgttcattaatagattccaagcattagaacaactctgagcacaaagtaggtacacagtaaawatttgttaaaggaaaaaagcagtaaagaaagatttgatgcttaaaaggctccttgctgttcctgatcaagactttttaatagatcatctctttaaattcttttttttttttttttttgagacagggtctcactctgtcgttcaggctagagtgcagtggccagacctcagctcactgcaacctctgcctcccaggttcaagcaattctcctgcctcagcctcttgagcagctgggactacaggcacccaccaccacacctggctaatttttgtatttttagtagaaaaggggtttcaccatgttggccaggctggtcttgaactcctgacctcaacctcaagtgacccacaca

SEQ ID NO: 872014 - DNA, 291 bp, Homo sapiens
ttaacaaggtttcctttattttgtgctctcttgctttcatgtttaaacaccattttctctccccacaataaagtataacaatgataaaaattaagtttcaaaaaaggtttctaagcataccattgaaactgttacatttctcctcaaaarcaacatatttgactccccttttattaactctaataacattcaattattgtgcaaagttcccaaacttcattccaaaggcagccatctgggaaaggaagtcatgctcagaaacttctccagaaccagtcttcaaactagata

SEQ ID NO: 872015 - DNA, 630 bp, Homo sapiens
cccaagtggaaacctcagaggatcttgcaatggtaaatgagtgaactatgggtccaggatttccaaatggtaatggtttcatgtcaataagctagatatttcaaaccaaactattaaagcttttgttcaagtcaatcaggaagctatattaatatgtctcataggtaaatattctaacttagatggttatggttcaacttcaaatacaaatagtggcatcctaaatgtggtgtttatgaatgaactaataaaccaagttttcagtatcaaagccttacctatgaggccaaggaattgctttgctgttaagtttggtctaagtcatagtatctatgaaaaagtataaaaaatataaaggaaaaatataaaggaatagcacagttgggttagtgttctactgcatttacttgggataaccctagtttgggarttaaaatgtgttaactgtgtattctaagactgtccactgaaagaatataaggcatgccaaaatgttacaatattcctttgccaatctttcttttttttttttttggtaatttcctgtctttgagagtcaagagctagaatggaacaaagttaatttttatcagagcattctaaacaatccgcaataaatattcatcatac

SEQ ID NO: 872016 - DNA, 606 bp, Homo sapiens
tagctaatggatgctgggcttaatgcctaggtgatgggatgatctgcgcaggaaaccaccatggcacatgtttacctatgcaacaaatccacacatcctgcacatgaacccctgaacttaaaagttggaaaaaagtttaaaaatagaaaaatatatatattttaaawgcatccgtttacttctacatgttgtggcagaagtatttgcctgccaaaggcttctaaatcctacttgaatgctgaagtctctcttagataaagctggttaggctgctctcctgctcaaattatactttcccattggcttctggattaatcttaccttagcactcatggctctttgtgatctctatttacctgttcagcttaaccccatgcttttatcctgtaactgactctggcaataccatgtttcccatactttcccaaccgctgcatattctcccaggccaggaagattttgtcttctagagtgttttagtctgaaatgcctttccctggtttcacaccttacaaacatctattaatccttcaaattccaactcaaatgttacgttctttgaagcaggcttgggtatcccatttcttgtgcttccccactgccatg

SEQ ID NO: 872017 - DNA, 701 bp, Homo sapiens
ataagcaaagcttcaaggcccagagcaacacccacttcccctgcaaggcttctgactgtgggatcctggctactgcccctggctagaagactcttggccagtacctcagcctgctgaccctagcccaggtcagaagtgtgcttggtcacctgagctctccagcccctcccggcccagaaaaacaggtgtgcatgctcagtaacttgagcctaccttctgaaggcctgggaaattgagagaggacagataactctttctctggacaaccacaaggccaataaacaagtcttcagggagaccatggccagctgtaggttgtgcagggccggctgtcagtttgggggattatctaggacttttgcttttcatagcagcagcagcagccgccaccaccatttgttgatcacccagtgccaggtactgtgccaggttctttccatgctctttcccacttcttcycttgtgcagccctgtgaggagaggagttgcttacagcacagacatcggagtcagacagaccagggcttggaccccagccctgccacaggctgattgacttggagcaagtcagtgtttgagaattagaagaggaaatgtaggtaacattggtagcccagagcctggcatggagtaggccctaaacacgtggcagacaaattctgggagaggtgcccccactttatacaggagggcactgaagc

SEQ ID NO: 872018 - DNA, 608 bp, Homo sapiens
cctgcattaagagatcattctgtgatttccatcagcttagaaagctgccttggctgtccttgatatgttggcttgtccatgacagatcgttcaccttgcaaaactttgggagtttccattcacagagaatatgatgttgtgagaaaaaaaaaagaatggataaaagycacatgtgacatagcttgtgcaatgtggtggtcctggtccttcaggtgtaacatgttacctcctgaacattatgcacaatcctgaaatcttctactccatcagtgtggggatctcacattggttggcttaaatacctttgtgtctatccatcagcaaagcccaaacaaaattagacagatacagtcttcaactggactccagggagagggccaccccccttcaggaggttgaagcctgacctaaagtgctccattcttctccccagcactggcctgtgatgtagccagctgcccagcccccaccccatctgagccagctgccctcccagaggtaggtagtgtgacttgggataactttgtgggagactcacctagagctatactgaagactacctatccacacagagagatactggcttcctccacctgagcttccatgac

SEQ ID NO: 872019 - DNA, 616 bp, Homo sapiens
gtttttcttttttttttttttctgttagtttgagccacatgaaattgtgacatgcacatacccgtacacacacccacacacacagacaagcaaacctttatatttactttactgcaaaacttgatttgtttttgccaaatataaatagaataattctgtatgtttaaatataccttttataaaagtatcatggattttattaaatgagtctcacaatttatttaattattttctgtcattagatacttgggttcttctctcattccatttttccaatatggtgttgtaaataagactacaataaacattcttgtttctatctgattgtttttaagagcaaatctttagaagtagatttcctgggttaactggtttgaatattttaataatattgatggtgagcgcaaaaaagggaggggtggagcaatgaaaaaaaacactaaacagggctttccacacacccagrgttgaatccttcatcatccaatagcttaacccaactttatccttcggtaaatggtgttatattggctttaaagaattgatataaaaattaaataaggtatcttatgtaaagtgcctactgtattgctggcctctaggagaaactcaaagg

SEQ ID NO: 872020 - DNA, 619 bp, Homo sapiens
tatttccttgagcagtggtttgtagctctccttgaagaggttcttcacatcccttgttagctgtattcctaggtattttattctctttgtagtaattgtgaatgggagttcattcatgatttggttctctgcttgcatattgttggtgtaaaggaatgcttgtgatgtttgcacattgattttgtatcctgagacttgctgaagttgcttatcagttcaaggagtttttgggctgagaagatgcggttttctaaatrtaaaatcatgtcacctacaaaccaagacaacttgacttcctctcttcctatttgaatactgtttatttctttgtctttactggctctatttttctcttggatttcaatgatttagtctctttttgtggcatgtctcgtaatttttgtttgaaatttttattgaattatgaacactgtatttaaacattttagaaactttggatgatgtgttctgttgtcttatgcctgggagaagaataagtcccttgcctccgcctttatctccccctcctcttcttctctttttttctttttcttcttctggttttgaatctttaatgagaaaaacaaatataatattgatctcaagaacactgtgtgtt

SEQ ID NO: 872021 - DNA, 619 bp, Homo sapiens
tatttccttgagcagtggtttgtagctctccttgaagaggttcttcacatcccttgttagctgtattcctaggtattttattctctttgtagtaattgtgaatgggagttcattcatgatttggttctctgcttgcatattgttggtgtaaaggaatgcttgtgatgtttgcacattgattttgtatcctgagacttgctgaagttgcttatcagttcaaggagtttttgggctgagaagatgcggttttctaaatataaaatcatgtcacctacaaaccaagacaacttgacttcctctcttcctatttgaatamtgtttatttctttgtctttactggctctatttttctcttggatttcaatgatttagtctctttttgtggcatgtctcgtaatttttgtttgaaatttttattgaattatgaacactgtatttaaacattttagaaactttggatgatgtgttctgttgtcttatgcctgggagaagaataagtcccttgcctccgcctttatctccccctcctcttcttctctttttttctttttcttcttctggttttgaatctttaatgagaaaaacaaatataatattgatctcaagaacactgtgtgtt

SEQ ID NO: 872022 - DNA, 619 bp, Homo sapiens
tatttccttgagcagtggtttgtagctctccttgaagaggttcttcacatcccttgttagctgtattcctaggtattttattctctttgtagtaattgtgaatgggagttcattcatgatttggttctctgcttgcatattgttggtgtaaaggaatgcttgtgatgtttgcacattgattttgtatcctgagacttgctgaagttgcttatcagttcaaggagtttttgggctgagaagatgcggttttctaaatataaaatcatgtcacctacaaaccaagacaacttgacttcctctcttcctatttgaatactgtttatttctttgtctttactggctctatttttctcttggatttcaatgatttagtctctttttgtggcatgtctygtaatttttgtttgaaatttttattgaattatgaacactgtatttaaacattttagaaactttggatgatgtgttctgttgtcttatgcctgggagaagaataagtcccttgcctccgcctttatctccccctcctcttcttctctttttttctttttcttcttctggttttgaatctttaatgagaaaaacaaatataatattgatctcaagaacactgtgtgtt

SEQ ID NO: 872023 - DNA, 507 bp, Homo sapiens
cactgggatttaaaaacgggaaaaattagcacaatgtagtgtggagaagtgaatcgggcatcattagggtgtttcaagctgacccaccaccctgagtattgtaactttagaaaatcaaagaatgtctaaaccggacgggctccagggatgctaaatccaactttattttagtagtgctgggtccccaagaggggcagagggagacctgtggtctcactgccagtcagtatcacctacagatggcacccccaggctctaaagtctttcccacccctctgaccacaaagcagctttaatcgcctgtcttttcacccgagccagtgcagcyttgtgtttatacctgcatcactgccttcagagggagtgctcatggaagtagagatgtcttcctcactttcttgggaacacccatcatgcgggctggtgaacagcaatcagcccacaaacatttgttgagtgaatataggaacttcacccactcactgttgagtcaaatcaggaggctag

SEQ ID NO: 872024 - DNA, 573 bp, Homo sapiens
gtgatagccagacatccttggtgttccttggcttgtctctgtatccttctagtctctgcctctgtggtcgtggtgctctcccagtgtgtcttcaccctatcttcttagaaggacaccagtcattttggtttcagagcccactctactccagtatagccttatcatagctagctacatcttcaacaaatctgtttccaaatatcacattctgaggcactggaaaataggatgtcaataaacgttttcttaatgggggcgcacatgtcacctataattcccaccctatttaaaattgtaccttgccctccgcgtggcatactccgcttcttctgtgctctgtttctyttcttgctgcttgtgacctcccaacacactctatgttttacttctctatttggcttcctgtcaggctccctccactggaatttaagtttcataagggcaaggattcttgtccctttcattttcatacccacaaaatccatagcttttagaatatacctggcacacagtggctccatatatatttgttgaatgaatgaaaatgatagatcactaacaatatcatttagt

SEQ ID NO: 872025 - DNA, 630 bp, Homo sapiens
tgagattcaacatacagaatataaataccaaccagtaaaataataaatgataattaattcctctgtatcactttaagtctgtgatcaaagtagaagtctaagttcatgatatctcttgtggattaagacccagtaggcactgttcttccagtactgctcttagggccatcaggagttaacatccaatcactattcaccaggatgttcttggytttaattattattgcttaactttggttcatttagaactgaatgctaaagtccatgcagcttgagtgtatgaaaacctgttttatgacatggagagtttactgcattcacttttcttaattcatgtcaaactttcaaatgttttacttggtagaagtggaccatagggtgttgcatctttcctaaaacacaatttatctggaagcatcatgaaggaatgttttcttaaatgcattttggaaaataaattgttcatcttttggtctttattttactaccaagaaattttccaactccagtattcaggatctatgaccagaaagctaatacaaattttattttgtttcttcccggcaaaaaatatgcctaaacaattcaattcagagtatgttgaaaaggcttttgtaacatatctttgaa

SEQ ID NO: 872026 - DNA, 635 bp, Homo sapiens
aatgtgggaaagcttggaacttcctagagacttgttgaatggctttgaccaaaagcctgatagtgatatgaacaataaggtccaggctgaggtagtctcagatggagatgaggaacctgctggaaactggagcaaaggcgactcttgttatgttttagcaaagagactggtggcattttgcccctgctcctgtggaactttgaacttgagagagatgagttaggttacytggtggaagaaatttctaagcagccaagcattcaacagatgacttgggtgctgttaaaggcatttagatttatacaggaagccgaacctaaaagttcagaaaacttgaacccagacaatgtgatagaaaagaaaaacccattttctgaggggaaattcatgctggctgcagaaatttgcataagtaatgaggagtggaatggcaatgttaatccccaggactatgggggaaaatggctccagggcatggcagaggtcttcacagcaaccccttcaatcacaggcctggaggcctaggagaaaatggttaccttggccaggcctagggttcccatgctgtgtgcagtctagggacttggtgccctgtgttccagccactccggccgtgactaaaaggggccaaggta

SEQ ID NO: 872027 - DNA, 635 bp, Homo sapiens
aatgtgggaaagcttggaacttcctagagacttgttgaatggctttgaccaaaagcctgatagtgatatgaacaataaggtccaggctgaggtagtctcagatggagatgaggaacctgctggaaactggagcaaaggcgactcttgttatgttttagcaaagagactggtggcattttgcccctgctcctgtggaactttgaacttgagagagatgagttaggttacctggtggaagaaatttctaagcagccaagcattcaacagatgacttgggtgctgttaaaggcatttagatttatacaggaagccgaacctaaaagttcagaaaacttgaacccagacaatgtgatagaaaagaaaaacccattttctgaggggaaattcatgctggctgcagaaatttgcataagtaatgaggagtggaayggcaatgttaatccccaggactatgggggaaaatggctccagggcatggcagaggtcttcacagcaaccccttcaatcacaggcctggaggcctaggagaaaatggttaccttggccaggcctagggttcccatgctgtgtgcagtctagggacttggtgccctgtgttccagccactccggccgtgactaaaaggggccaaggta

SEQ ID NO: 872028 - DNA, 646 bp, Homo sapiens
gaagccccaagccttggaagtttccatgtggtgttgagcctgcgggtgcacagaagtcaagaattgagatttgggaacctctgcctagatttcaaaaattgtatggaaatgcctggatgcccaggctaaagtttgctgcaagggtggaaacctcatggagaacctctgctagggtagtgctgaagggaaacgtggggttggacccccacacagggtccctactggggcaccacttagtggacctgtgagaagagggccatcatcctccagaccccagaacggtagatccacttagagcttgcaccatgcacctggaaaagctkcaggcactcaacaccagcctgtgaaagcagccaggattggggctatatcctgcaaagccacaggggcagagctgcccaagaccatgggaacccacctcttgcatcagcatgacctggatgtgagacatggagtcaaaggagatcattatggagctttaaggtttgactgccctgctggattttgaacttgtgtggggcctgtagctcctttgttttggccaatgtctcccatttgcaatggctgtatttatccaatgcccataacccccttgtatctaggaagtaactaacttgcttttgattttacaggctcataggtggga

SEQ ID NO: 872029 - DNA, 644 bp, Homo sapiens
aaccaaggtaagcaatgattcattatttctttatgcctatgagattatatgttcatgtaacaggcaaaaaagacatcactcatagatagactcattttttataccatgtttttaaaaaaggagaagaaagatgagaccaagagagggagagattgaaaggagagattatgaaatgagttacaattacaaattgggtataaagctgcggagttttaaataatcaatgagaaagatgattacaaggagtgaaacagctcattcacaggaaaataatgacagctttattttcataaatatttaacaaataacttcaaaggactaggactgcgctgttcttggtttyttgcatgcacacacacacacacacacacacaccactaaaatttctctccctagtctacaaaaaaagactttcattaccttcctttttctcactagtgcttagttatttcatactttaatgtttagttactaaatattcaacgtttaaattttctcggtgaggaaataatccagaactttctgaaacacaaagtatcactatttgcttctttaaaaaatagtctattaatttcttaccatctcctgatttaaatctgaattactttgcatggcttgtgtaacttatcaaacccctatcttaa

SEQ ID NO: 872030 - DNA, 644 bp, Homo sapiens
aaccaaggtaagcaatgattcattatttctttatgcctatgagattatatgttcatgtaacaggcaaaaaagacatcactcatagatagactcattttttataccatgtttttaaaaaaggagaagaaagatgagaccaagagagggagagattgaaaggagagattatgaaatgagttacaattacaaattgggtataaagctgcggagttttaaataatcaatgagaaagatgattacaaggagtgaaacagctcattcacaggaaaataatgacagctttattttcataaatatttaacaaataacttcaaaggactaggactgcgctgttcttggtttcttgcaygcacacacacacacacacacacacaccactaaaatttctctccctagtctacaaaaaaagactttcattaccttcctttttctcactagtgcttagttatttcatactttaatgtttagttactaaatattcaacgtttaaattttctcggtgaggaaataatccagaactttctgaaacacaaagtatcactatttgcttctttaaaaaatagtctattaatttcttaccatctcctgatttaaatctgaattactttgcatggcttgtgtaacttatcaaacccctatcttaa

SEQ ID NO: 872031 - DNA, 661 bp, Homo sapiens
cttcaatggcagatttcaaaacccatgccttttgtattagttagctattgttgcataacaaatcacccctaactcagtagcttaaaacaaaaatcatcattcagctcacagttctttgggttgacaatttagcctaagtcagctaaacggttcttttgttctcagctggactcctccttgaatcygttattagctgcacttccacagaataattctgcttctgggagtaggccagctattagctgggttgatgtggaagcagtaggacaatgtgtctcttatccttaacagccaagccacagtgagtctcaaaatggctaggcaggcttctgagagagcgaacataagcatggaaagcctctttaaggactaagcttgaaacccacacttactcatgtctgctacattctaatgtccaatacccctaaactgtattcaagaactctacctcttgatgggaagaagagaaaagtcatattaaaaggcatctttgatacaaggaatcaaataattgcaactattttcgtaaatgatctatgttatccttttaactatacatttttgtatttcctttaggatccttcatcattacatgtcaaatccaagacaaattataaatctattttgaatatcaggatttagcccgaaataaaaagatgcc

SEQ ID NO: 872032 - DNA, 640 bp, Homo sapiens
tctatatttttgggagaacacacactagaaagattgtttatttcttgaattttttataaagggtatgaacaactttaaaacaataaattatttatcattatttatttcaaaatgaccaaccagctcctagctagggattaatttaacaagcataaggtattttggaaatactagataatggggaggaaaaggatgaaaacatggtaaccaaattcccgaatcctaacattttgtctcccacctgatactttgtacaaattcttagcataattatccttcattatttctgtatttgttatatgcttactatgtccaaagcagtgtattaagcattgacagaaagaagagaatcttccctcagggtgcttacagctcaaagtaaaatgtggatagttaaatcagtgtggtttattgtgaagggtaacaagctctgtataaagtcytatggagacctggaaggtgtaaacaataaatggctcaggcaattaagaaaagtttccataaagaggtctagtgtacacattaacgacatctaatttataatatatttggcatttttaagaatttgacattccatttttcaaaataacaccttgaatgggatgcaaaatacaacttcacaactgcccgacatagccat

SEQ ID NO: 872033 - DNA, 640 bp, Homo sapiens
tctatatttttgggagaacacacactagaaagattgtttatttcttgaattttttataaagggtatgaacaactttaaaacaataaattatttatcattatttatttcaaaatgaccaaccagctcctagctagggattaatttaacaagcataaggtattttggaaatactagataatggggaggaaaaggatgaaaacatggtaaccaaattcccgaatcctaacattttgtctcccacctgatactttgtacaaattcttagcataattatccttcattatttctgtatttgttatatgcttactatgtccaaagcagtgtattaagcattgacagaaagaagagaatcttccctcagggtgcttacagctcaaagtaaaatgtggatagttaaatcagtgtggtttattgtgaagggtaacaagctctgtataaagtcttatggagayctggaaggtgtaaacaataaatggctcaggcaattaagaaaagtttccataaagaggtctagtgtacacattaacgacatctaatttataatatatttggcatttttaagaatttgacattccatttttcaaaataacaccttgaatgggatgcaaaatacaacttcacaactgcccgacatagccat

SEQ ID NO: 872034 - DNA, 619 bp, Homo sapiens
aaaaaaccaaacaccgcatgttctcactcataggtgggaatggaacaatgagaaaacatggacacaggaaggggaacatcacacaccggggcctgttgtgggcttggggtagtggggagggatagcattaggggatatacctaatgttaaatgacgagttaatgggtgcagcacaccaacatggcacatgtatacatatttaacacaactgcacgttgtgcacatgtaccctaaaacttaaagtatcataaaaaaaaaaaaaaaaaaaaaaaaaaagaggaatctcctagaggacattacctagagacttctagrgcaacgacaagatagccaaatcaagatttgaagaattctctgtacccagagcatagaagagctttagaatgtctgcccagaaggatttcagaatttctgcaaactgtgacacctgttatctcccgtttttccactttggaaatggaaatgtttattgtggttatcctcttcttgtccaaccactgcctattagtactggttgtggtggggccactgggacaggtaatttcttttaatccactgatttctgtaactttagctagacccttttctagatttaatatagtaattactctacatcact

SEQ ID NO: 872035 - DNA, 704 bp, Homo sapiens
aaaaacacttctgcaacccgctcttcagcacttgaggtcctgaacatggacacttttcctgcagtacatccacacccattctcaggtagttttgttgttattctcttgcgttttccatttaaacacactgaaagatatttaactgtggtgaggaaaaattccaacacaatgttgctaccaaaataaatgccaatgtcaaatgaattattttatatttcaagttgacctattttcagaaagtctgaggagagtaagaatgatttcttgaacacttacatttttttctagcaaatatgttgatctcaacacagcccttttttgttttcatgactgttttcagtggtgttaatatgtaattttatgtaacactatattgggcaatgtagagaaaggaagaaacaaaacagggagaaaaaacaaaagaccctagcatttaagaggaggcagagcaggcacatgtgatgagaatatattatcttccactttgtagtaggaacaccgttgcccctgaactgtgtggcacttcctcctaaggggaraaatgacagttcgatgaggaccctgttagagtaagcactcagaggaaacctcatgcaatactgaaagaagtcaagtgtggaagaaaggagagaaagacattgctttatctagtatttttgtcacctagcaatataagcaaggcctagatgtttggccagtttaat

SEQ ID NO: 872036 - DNA, 662 bp, Homo sapiens
  misc_feature 27: n = A,T,C or G
taatcatattataaaaatagaatatanaaagtcaaacctcagaaaaatgccctaactctgaaaaatgacaaaaaatgatattttccaagcaagtcataatatagaactatttaaagcaacagacaattatggcactatcagattaaaaaggatattgactatattctagaatttgccattatatggaaatacacccttcacttgtaagyatcttcatagaatgcatggtttgtttcacaatataacgaaacccatatattaagacccttttgttctttttaaaaactaatgttgccactaaagtttacagacttaatttcacagggcaactgctgcttaacactaatgaaacaacagcgcaatacattactactaaatagaaacatgtatatctccatattacatatgaagaaaaaaatttatgtactccaatgaataaaaggagaaacttgggcctgcatggctcacatttcaaaaccatacagtccatgcacaaagcttttgatcagttttatttaaaataaatagaagccctagtaagaagagaaaaattaacctgcctcgtatatgcaaatgtgaaagcttcttaggcaaagggaatgcacaggggcgagggaggtgcagtcacacacagccgactttggtacaaatatgccttatct

SEQ ID NO: 872037 - DNA, 622 bp, Homo sapiens
acacagattcatttcttcaaaaattattttgccatacatatatgtgaaaacaacacagtcccctgaacttgagcgtatcaaataaacttccagtgttcccatctccatagcctcttccttcccacttaagaataaaaatattcaatgttacagataatatgtcaagtaaaaatggaacaacagaaattcattcccaaaactagactagagtacacacaatttcttgagcagagaaaaaaaaataattcttaacctggacacaagcaaggaagaaaaaatttcataaatcaataagacttgaaattacattaatcatttatatgtaaactagaaaagaggttctttttatgtagctgaggtaaraatcagagtgatcacacttattctattaaaagtacccttaaattttttctattatttggaaagttttctgtattgttcagattgtaattttaaatttatggtaggtaaaagaaaagaaaaaaatctcctgacctgtaatgatttttttttctatttagaaatgtaggaagtattccttcctacatactgtttttttactagtgcatgtttttctaaaaataaattcaaataaagccttaaatcgtacttccctactgga

SEQ ID NO: 872038 - DNA, 615 bp, Homo sapiens
  misc_feature 131, 145, 150: n = A,T,C or G
acctgtgctcttcattatactcacaaagtccaaggaaatgctggacacggtggctcacacctgtaatcctagcactttgggaggctgaggtgggtggatcatttgaagtcaggagttcaagaccagcttgnccaacatggtgaancccangagctactaaaaatacaaaaaccagctgggcatggtggaacacgcctgtaatccctgctacttgggaggctgaggcaggagaatagcttgaacctgggaggcagaggttacrgtgagctgagatcataccactgcactccagcctgggtgacagagcgaaactgtctcaaacaaacaaacaaaaaaagacaaaacaaccaaactccaaggaaataatatcagtctcatacctatgagttacttaaaagacttttgaaatatctttcattacaggatcccaagtgaaaaaacattcatcttttaatataggatactggctttgtgcaagaagataaagataggaaacatttcagaatgtggccctcaattacttgagaattgggtatgaactgccattagatttagcatatgaaacatgatcatagagcaaaatccattttagtaagaagaataaatgtatgacta

SEQ ID NO: 872039 - DNA, 621 bp, Homo sapiens
ttaacatgcacactaactggggactggttgtacctagagtttagatgcttaaggagtttttgtagggtagagatcaaataggtgtatttgcattaaaacccaaatcagtattccctgcagtgaaaatcatttcaggcaacacatctgaacctctactcctctctccatctctgctgatgtgaacaggaatcactgactagcatgcaaacagagggatgtaatgtggcaagactgcctgcaactgtcaaagctattgctgtccttctgggaggaaaaatgtgytccctctggactcaaactcctcttggcctttgacgacagcatttggtcacttctgtgaaacccaggagtagacaacaatggatggcattcctcagtgtcaaccccatggcaaaataaagttgcttatgaagccaggagctgagaatatcctgagttccctgcaccatgctatgccacaatgccaggctgttctgatgccctttaatcattagtgctgtccgggtctgtttagtaaaccacaaatgctgttccatcaggaagtatgatgtcagcttctccaaaaaggatgagtaagaaaataatttggagaagcagtgcaagttaaggagttgaactcct

SEQ ID NO: 872040 - DNA, 658 bp, Homo sapiens
caaagttttggggggatttgtattttctgcttgactgagtgttggctatagtggagaaagggcataatgtctttctttttcaatatcttcaagaggaggtgattctgtagtccttcacatatcgattttgaaaaaatctgcttttaaatgtttttaaggaataacaaaattacaataacaatcttttaaggaataacaaaagttaagcttgagtgacattttcatttttttcagtagctcacatgaaaattagagaactctagatattattaatatttctgaaagaaaaggaagatttagataattggattagggaatacataaattgtaaatcggtctccatttctagagtacacaattttcttatttgaaaaaaattatttcttatttcttattgttaaacagaatagactttacagtaacaacaacaaaaaagaaaaatttttaaaagaatcttccaattttcttattagcattttttaaaaggtaataccatctctgacttaattttcmgaagtcttttcatttttttctaaagggagtctatgtcttgcatctatagttactttatttaaattgttctggaagagaagattatcttctttaagcaaagcttctaaataagtgtcagtctgctccaggtcaccttctggaccac

SEQ ID NO: 872041 - DNA, 716 bp, Homo sapiens
tttgaaaaaatctgcttttaaatgtttttaaggaataacaaaattacaataacaatcttttaaggaataacaaaagttaagcttgagtgacattttcatttttttcagtagctcacatgaaaattagagaactctagatattattaatatttctgaaagaaaaggaagatttagataattggattagggaatacataaattgtaaatcggtctccatttctagagtacacaattttcttatttgaaaaaaattatttcttatttcttattgttaaacagaatagactttacagtaacaacaacaaaaaagaaaaatttttaaaagaatcttccaattttcttattagcattttttaaaaggtaataccatctctgacttaattttccgaagtcttttcatttttttctaaagggagtctatgtcttgcatctatagttactttatttaaattgttctggaagagaagattatcttctttaagcaaagcttctaaataagtgtcagtctgctccaggtcaccttctggaccaccctggaaaagagaagcaacagtcacaccagggaaaraagctgcagagcttattcctgtaatttgggcagcctcctaacagtcttccctatgactcatgctgcaacaaaagccaccttacatttgaatcatgcttttaacctttcaaaaggttttctcatttaatgtcattttatgctaacaagc

SEQ ID NO: 872042 - DNA, 693 bp, Homo sapiens
gtaatgagaattctgcatcctgatttcagtaatgagaattctgcatcctgatttcggtaatggttatacaaacttccatgtatgataaaatgacatacaactatacacacacattttaccaaattcaatttcctggttttgatattgtaccataattatgcataattatgcactggggaaaccgggtgatgagtacacaggacctctctgtactatttttgcaacttcctatgaatctataattattttgaaattgaaagaaagaagcaaaaacaaaaagcctcgacactattaatacgagatgagaccaagaatgtttatatagtacactacaaagtcatattcagtctctgaaagtttaccttttagtaaccagtaaactacgtttttatcaaattctacaggccagccttttggtttattctcttgcctttctctccaggaggttctgctaacctctccaggaagtttcyatgaaaggtaacacttttgacaacttttcaagctcagtgtaaaaggacatctagttgtactagcttttttgtgtgttaacattttaattaaggtgagaaaataattgtaacaagatgagaggcttagttctgctggttaaacccactcttgtagaagtatctgcagatcaaaaaccaaagtctttccgaactacattaattcagaatggaattaggattt

SEQ ID NO: 872043 - DNA, 615 bp, Homo sapiens
tttcaatcctaaaaggctagttaccatattttctgggaagatgttcctgtcctatcagagtcaaaaacccttattataaacagtcatgctactgtgtcataaaaactgccatagtagcagttgacgtttgtctctgtaattattgggtgtctgtctctatcactagactgtaagtttgatggtggcaaaaaccatatgtggttttattagcaaatctcctgtgactggcatactgaatggcacacagtaaaattatacatatatatatatatacacacacagacacatctatgtttacattggtatatgtatacatatatgtgtatatatatctacatgaagtgtgtgtatattgcttcacatagctttacatattatatgtktatgcacacacacacacacacacacacacacacacacacacacgcatgcatactgagtccctgtatttaatgtctaaaatgttttgctctaatacttggacacactcccaacttctcaatggactgtatgtttttagagcatgcaacatatctatacaataaactgacaaatcctaaatcttgaaactgcacagctaatgagtttttctggaattccaagttaaaagagata

SEQ ID NO: 872044 - DNA, 591 bp, Homo sapiens
aactggaggggtgagagtgaaactcccttgcctcattcctgaccttagtgggagaacattgattctttcactaataagcaagattttagctgcaagtgttttgtagatgccctttatcagttgagagagttttcttctattcctgattttctgaaaattttatcaggaatggctatagttgcttcttttttgtcatttatattttgctagaattctttaacgtttttcttgcagtattttatttatgttatataattatatggtttcttattgacattttactggaatctttgtttttttagtgtatctgtttagatgctayactagtttgtttttttaaacatgtcattataaaagttggattttccaggaccagctctttgccagagctttctatagaaagcgttaagtggagggcaaatttctaggcaagttatttttcacaagcctagcttcttttcctctgatctctacaaaaaatactgcttctgcaaattgtgacttatttgagtcctttcatgtgcatttcacattttctactaatgtgaatcaaagttggtccagtagggttcctgttgcctgctggctatt

SEQ ID NO: 872045 - DNA, 563 bp, Homo sapiens
gggcacggtggctcaagtctgtaatcccagcattttgggaggctgaggtgggtagatcatttgaggtcaggagtttgagaccagcccggccaatatggtgaaaccccatctctactaaaaatacaaaaattagctgggtgtggtggcgtgcccctgtaatctcacctatttgggaggccaaggcacgagaatcacttgaacttgggaggtggaggttgcagtgagccgagatcaagatcacaccactgcactccagcttggctgacaggcaagactctgtctccgcctccaaaawataaataataataacagctgtccttaaagacatttgctggcattcccaagagctaattaacagagcaattatatttctaaaagctcaatgttaaatggacctcattttaagagcatgtaaaattgtgttaataaaatgactaactgcaagccagtttcacacattagtaaaaatatgacttgtaataagtcatatgatttcgaaaccaaagcccttggaaaatgatcatcagttcatgtcagaactggtaaagagaaagaagcaataa

SEQ ID NO: 872046 - DNA, 572 bp, Homo sapiens
ttaggcatgtgcaaagacctaaggtaggtaagaacacggtttatttgagtaactcaagaaggagagctgaatggggtggacaggggatagggatgtcaggggtagagttaatccacaaatagttaatctgtccccagaaaataaaaagttcactgtagctgacttcaagttcatatttacatcttaatgacagtaatattttttcttttttgtagttttacaatatctactaaacttagctaggattactttattagtcaattatttgtccatctaatcacacaggtttgtcttaggaaaaaacaaatcatatttccataatatgttacaagtattaacagtaaatggatttgtaagccaaagcatccttgaaataaatgctaagggaaaagccagtgtgtatcaaatgaaataggagaggatatgattaamttttcccctgtattttcttagatgatgacactaatggaatttttgatgtaatttaaaaaccactctgcactaaagaaagaaaacactacctgatttgataacccataccagataaaaataaacaagcagaaagatcatca

SEQ ID NO: 872047 - DNA, 635 bp, Homo sapiens
atttttagggcggtgaagctattctgcgagatactacaacagtggatacatgccattatacacttgcaccaatagaatgcacaagatgaagaatgaactccaatgtaaactattaacttggggtaataatgatgtgtcaatgtaggttcatagattataaaaaatgtgccactctggtatgggatgytgatagttgaggagggtgtgtgtgtgggaggatgggggcacatgggtactttctgtactttcagttcaattttactatgaaccttagcaactgtgtaataaataaagtttattttttaaaaggggtccatctcaaatgaccacatattatgtttccatttatatgaaatgtccagaatatgcaaataggtatatagagaaagtagatcggtggttgcctctgcctgagggtgaaggttggggatttcgaaagttctggttaagggatatgagctttctttttgagataacaaagatactctaaaactaactattgcaatgaaagtacagctctgtgaatatgttagaagccactgcatcttatactttaagtggatacattgcatggtatgggaatcacatctcaataaagccattaaaaaactacctaagccagcatgagtaaaggt

SEQ ID NO: 872048 - DNA, 642 bp, Homo sapiens
gtctaactttgttctttttgaatcatattactgttttctaaacgtcagtcatgtatcatttttgtcatgttttgctatttaaaaaaataacttggtttaagaaaaattaaacatctattttaccttcatctcaataatattcacacaataattagcttgatgtgctagttacatttttgggcactctctaaaataaatgaatttaatgccttatataaacattctaaatttttataatgttcgcgaactaccttaagatcatctcttaccaccactggtaagaatgacaatatttgggaaattttggaccagagaaactttcacccatgttcaaaatgctattattagtaactaatacttagtwcacgtctataatatgttagggattacagaatgtgctttaatataatttacttaatcctcattatattgcattgtaataaagcccatttctgtacatacataatctggacccagagagttaaaatttaaaaagattgtataagcatgttcatgacagcattattcaaaagatgggtggatgaacaaaatggggcatttacctataatgaaatattattcagccttaaaaacataaaatttggacacatgctataacatggatgaaccttgtggacatta

SEQ ID NO: 872049 - DNA, 649 bp, Homo sapiens
gacacatagcacatatatacatatgtacaaacatagacacacatatatacatatatacagacatatatacacatgtatatgtacatacacaaatatacatacactcatatatacatgcacacacatacttatatttctaaagagacatatatgcacacatacatacacacggagtacacatgagcccagctcactcatcctgaaggttcatgaggcttggcttcggacttccttcctgtttttcctctatcrcatcccctttcctatggtgaagatctgccagtgttacagtagtcaacagagcgtatcacaggccctgaaggtggttccagaggacagcacaggaggaggagactggaagccctcgcagcacttttttgaaagtaagaactcaggtagatgtttacacataagccacacatctcacaaacacagaaacttacacacacagaggccaatggtggcccaagtacaaatggccatgagccctggccaaccacttcaaaagtaaaagaactgtggactgagatttccaacaagcaagttaaataagcctcttgatcagagggactaggtttgcctttctaatccatcacagccaggggctgaaagcaacagggactttcttctgcctgtcctggtccccttt

SEQ ID NO: 872050 - DNA, 682 bp, Homo sapiens
atagcaataatatcattgtgtggattatcaactggttgaataactttattgtaggatatctattagcttatataactctcattatgatcatgcaattaattttggagcaaaaatgcccatcaatgatagactggattaagaaaatgtggcacatatacaccatggaataatatgcagccataaaaaaagatgagttcatgtcctttgtagggacatggatgaagctggaaaccatcattctcagcaaactatcgcaaggacagaaaaccaaacaccgaatgttctcactcataggtgggaattgaacaatgagaacacttggacacaggaaggggaacatcacacastgaggcctgtcgtggggtggggggagggaggagggatagcattaggagatatacctaatgtaaatgacgagttactgggtgcagcacaccaacatagcacatgtatacatatgtaacaaacctgcacattgtgtgcatgtaccctagaacttaaagtataataataatttaaaaaatgccaaatgaattactaccacacattgaaaatatgaaaaagcagaaaacatgttttctcctttcatacagcttacaatcctgtggaagacaaaaagtaaataacaatttcaagtatttacagaagtatccacaggaccatacaaatgaaagtgccaact

SEQ ID NO: 872051 - DNA, 682 bp, Homo sapiens
atagcaataatatcattgtgtggattatcaactggttgaataactttattgtaggatatctattagcttatataactctcattatgatcatgcaattaattttggagcaaaaatgcccatcaatgatagactggattaagaaaatgtggcacatatacaccatggaataatatgcagccataaaaaaagatgagttcatgtcctttgtagggacatggatgaagctggaaaccatcattctcagcaaactatcgcaaggacagaaaaccaaacaccgaatgttctcactcataggtgggaattgaacaatgagaacacttggacacaggaaggggaacatcacacagtgaggcctgtcgtggggtggggggagggaggagggatagcattaggagatatacctaatgtaaatgacgagttamtgggtgcagcacaccaacatagcacatgtatacatatgtaacaaacctgcacattgtgtgcatgtaccctagaacttaaagtataataataatttaaaaaatgccaaatgaattactaccacacattgaaaatatgaaaaagcagaaaacatgttttctcctttcatacagcttacaatcctgtggaagacaaaaagtaaataacaatttcaagtatttacagaagtatccacaggaccatacaaatgaaagtgccaact

SEQ ID NO: 872052 - DNA, 632 bp, Homo sapiens
  misc_feature 615: n = A,T,C or G
gaaaccccaagccttagcagcttctacatggtgttgagcctgccagttcacagaagtcaagaattgaggtttgggaacctctgcctagatttcagaagatgtatgaaaactactggaagcccaggcagaagtttgctgcaggggtgggtctctcatggagarcctctgctagggtagtgcagaaggaaagtttggggtcagagcccccacacagagtcctcactggggcactgcctggtggagctgtgatattatgccactgtcctccagaccccagaatggtagatccaccaacagcttgcaccatgtacctggaaaaactgcagatgctcaacaccagcccgtgaaaccaaagccacaggggcatagctgcccctcttgcatcacctcttgcatcagcataacatagatgtgagacatgcagtctaaggagatcattttggagctttaagatttgactgccctgctggattttggacttccatggggcctgtagcccctttgttttgggcaatttcttccatttggaatggctgtatttacccaatgcctgtacccccattgtatcctgggaagtaacaatctgcttttgattttacaggctcaggggcacangggacttgccttgtctc

SEQ ID NO: 872053 - DNA, 633 bp, Homo sapiens
gtgtagcctaactaggagacacttcccagtaggggccgacagacacctcatataggtggctgaccctctgggatgaagcttccagaggaaggatcaggtagtagtatttgctgttcggcaatatttgctgttctacagcctctgctggtgataaccaggcaaacggtctggagtggaacttcagcaaactccaacagacstgcagctgggagacctgactgtcagaaggaaaactaacaaacagaaaggaatagcatcaacatcaacaaaaaggtcatctacaccaaaaccccatctgtaggtcaccaacatcaaagaccaaaggtaaataaaaccacaaagatggggagaaaccagagcagaaaagctgaaagttctaaaaatcagagtgcctcttctcctccgaaggattgcagctccttgccaacaacggaacaaagctggacagataatgactttgatgagttgacagaagcaggcttcagaaggttggtaataacagacttctccaagctaaaggaggatgttcgaacccattgcaaggaagctaaaaaccttgaaaaaagattagacgaatggctaactagaataaacagtgtagagaagaccttaaatgacctaatggagctgaaa

SEQ ID NO: 872054 - DNA, 622 bp, Homo sapiens
ggagcattttctaacccaatgcaaggaaattaagaaccttgataaaaagttacagaaattgctaactataataaccagtttagcgaagaaaagaaatgacctgatggagctgaaaaacacagcacgagaatttcttgaagcatacacaagtatcaatagctgaattgatcacgcggaagaaagtgtgtcagagattgaagatcaactcaatgaaataaagcaagacaacaarattagagaaaaaaccgccaaacgaaaagaacaaaggctccaagaagtatggaactatgtgaaaagaccaaatctatgtttgattggtgtacctggaagtgacagggagaatggaaccaagttgcaaaacacacttctggatattatccaggacaacatcccaacctagcaagacaggccaacattcaaattcaggaaatacagagaacaccactaagatacttctcaagaagaggaaccccaagacaaataattgtcagattcatcaaggttgaaatgaaggaaaaaatgttaagggcagccagagagaaaggtcaggttacccacaaagagaagtccatcagactaacagtggatctctctgcagaaaccctacaagccagaagagagt

SEQ ID NO: 872055 - DNA, 640 bp, Homo sapiens
atacttctgaagaatagttgcaacagtttcaatgcaataggagttattggaaaattaagtatagcaggacaatcaccctctgggtcagtgtacacactgtcattgcctttttctgaaaacatgagaacaatcacctgagaatctatgaattgtgatattcaccaacctggctgtattattcgtcttattgccagaatgaataactggcacaaagtagctactcggaaagtgtttgttaaactgtgctggatattgcaccaatctgtctattttgcccacatattagatctcaaatgaattagggatctccctagcctcagtttcatccctaataaaatacagtgactttatcttctactaagtatctcccaaaatatatctcatagaatamtgattattaaatacataggaggagtgagttctatcatccagatatgggaacaattctgtttgaaacagtgataaatttttagctgtaagacttctcagggtatttaacattaaaccatccattgtatctattatggaagacggacagtatttctcaatttatttgacgttagaatgatttttaattaaaatattacagtaggttgattaagccttctcatagttattgaacattaaatatcatgaattt

SEQ ID NO: 872056 - DNA, 677 bp, Homo sapiens
ccacaccacccctactcctacacatagtacacactgtgatctaattttaaataacctgagtcagtgtgggacatttgttacaattaatgaaccaatgttggtacattagtattaactaaagttcatagtttacattaagattcactttttgtgttgtatggttcactttgttttgaaagatgcatgatgacatacatgcaacatcacattgtcatacaggatgttttagmcatactaaagatactccagtgcttctccagttcatctttcccccctctcctcaagaccctgacaaccactatgcttttacaatctgtggagtttcccttttctgaaatgccatgtggttggtgatcacacagtatgtagccttttcagactggtttcttttacttagaaatatgcatttaaagtccctctatgtttttcatggcttgatagtttatttattgttattattaaataatattccattgtatgcctgcactacagcttactcacctattaaaggacatatttgttgcttgtaatttttggtgattatgaatatagctgctataaacattcatgtgaaggtttttatgtgtacataagccttcaactaaattgagtaaataaaattgttggcttttgtggctaggctaagtatagctctctaagaaactaccaaaatgtct

SEQ ID NO: 872057 - DNA, 584 bp, Homo sapiens
taaagaagaaatggtcaagtacttcatttcccaactgttttctatttttcttttcccaaaactattccaaaaagtttatggggctttgtgtttattgtttatgaggtaaacaaatatgagtttttactcccagatttttccaaattaaaaaggcagtgacaaatatccatttaaattaaaaatccaagccattattgacattggaacttgattctacatatgcattaaaaaaaagacctaacagggggaaacctacattgtgttcataactggggatatccaacagcatcagtatgtcaaatttccataaatgaatccatgtattcaatgycattcctttaaaaaatttcacggccttttcccacagaatttgacaagacggaaaaaaatcatttgaaagagtcaaggtaaagaacagccaaaatgtgattaaaagaaaggaatgcttgtctttctagacataaagatactctttaatcatagtaatcaaaggactgtatcattaaagctcaaagagaccaactgaactcagtggacaggcaagaaacagattcacacatttatgtcaagaccatggggaaaga

SEQ ID NO: 872058 - DNA, 584 bp, Homo sapiens
taaagaagaaatggtcaagtacttcatttcccaactgttttctatttttcttttcccaaaactattccaaaaagtttatggggctttgtgtttattgtttatgaggtaaacaaatatgagtttttactcccagatttttccaaattaaaaaggcagtgacaaatatccatttaaattaaaaatccaagccattattgacattggaacttgattctacatatgcattaaaaaaaagacctaacagggggaaacctacattgtgttcataactggggatatccaacagcatcagtatgtcaaatttccataaatgaatccatgtattcaatgccattcctttaaaaaatttcacggccttttcccacagaatttgacaagayggaaaaaaatcatttgaaagagtcaaggtaaagaacagccaaaatgtgattaaaagaaaggaatgcttgtctttctagacataaagatactctttaatcatagtaatcaaaggactgtatcattaaagctcaaagagaccaactgaactcagtggacaggcaagaaacagattcacacatttatgtcaagaccatggggaaaga

SEQ ID NO: 872059 - DNA, 627 bp, Homo sapiens
cctgaaatatattttccaagttgcttgctttcttcccatctttttcagcgatgccaatgaatcataggtgtggtctctttacatagtcccatatttctcagaagtttttttccttcctttttgttttgtgtctgactcatttagttctgagaccagtcttcaagacctgagatttctccttagtgtagtctattctgctgttattacttgtgrttgcattatgcaattcttgcagtgtgttattctgctcacatctgtttggttcttttttataatgtccattttctctatcagcttcaatgtcattttactgtaatccttagattccttggattgggtttccaattgctcctgaatctcagtgatctttgttcctatctgtattatgagttctatttctgtaatttccatcattttagcctgtttaatcactcttgctggggaatagtatggtcatatgggaaaaagaagacactctggctttttgagttgccagagttcttgcactagttctttctcatctgttgttctattacttgtggcataatttgagtgcagtcagtaaacttcttttctgaatgttttcagaggaccagaactttgtgcagggtatttgtttgtagctga

SEQ ID NO: 872060 - DNA, 627 bp, Homo sapiens
cctgaaatatattttccaagttgcttgctttcttcccatctttttcagcgatgccaatgaatcataggtgtggtctctttacatagtcccatatttctcagaagtttttttccttcctttttgttttgtgtctgactcatttagttctgagaccagtcttcaagacctgagatttctccttagtgtagtctattctgctgttattacttgtggttgcattatgcaattcttgcagtgtgttattctgctcacatctgtttggttcttttttataatgtccattttctctatcagcttcaatgtcattttactgtaatccttagattccttggattgggtttccaattkctcctgaatctcagtgatctttgttcctatctgtattatgagttctatttctgtaatttccatcattttagcctgtttaatcactcttgctggggaatagtatggtcatatgggaaaaagaagacactctggctttttgagttgccagagttcttgcactagttctttctcatctgttgttctattacttgtggcataatttgagtgcagtcagtaaacttcttttctgaatgttttcagaggaccagaactttgtgcagggtatttgtttgtagctga

SEQ ID NO: 872061 - DNA, 658 bp, Homo sapiens
taagtaatatttggtcctgtaccatgtgtgtgtatgtgtgtgtgtgttcaatatttaggattaatttagagacagaatatttaaacactctttctaagtgtcttgaaaaatggaccctgatacaaccccttggggggatattgtttatgtgggacctgatccaaggaagagcaaataaggaagtaggaaaagtgaggcagtgaaaggagaaaatataattatgggtgaattaacgcaaaggtcacttttgtgaccacctataaatttaattccactggagacccttgaaggaatagtgcagagcacatttcagacttgtttccttgaggatacattttttgggtaatatatccactaatgtctaccttttaytgattaagcattgaccatggagatgtgaaaactcagcacttccatactctcttctttgtggtctgaaggaccctctatggatctggagaacactcccaggcagagaagcagagatgcaggctcttgaggaaggaagccttcagcatacacataaaaattccactgcagctataaagagcttccggatgggcagaaaggatacacatagggcggggaaaccacagcatatgttatacaattaaatggatagctgtatttgcactctaataatgaaagttaatgcaag

SEQ ID NO: 872062 - DNA, 671 bp, Homo sapiens
tgggtgcagcacaccaacatggcacatgtatacatatgtaacaaacctgaacgttgtgcacatgtaccctagaacttaaagtataataaaaaataaaaataaaaataaactgtgtctatgcttattaatatatttacatacactttattgcctacctcatgataagtgtttgcaatttgattaactgaattttaaaaatgctaaaacttccttgtgttcttgaattatcacaataaacacaagcatatattctcagtaaatggcaaaagtatcagaaaagaaaggcttttatttccttgtcaattcatttgggcattttaaaacctacttaggtattatcacctttcaaaagcactattttcttttcagtgatatttccttgcttctatcctctacacatatttgtttgagtatagtccttggcttagaaataaaaaagaaaaagcaaacaattttatctatctatcttccttactgtagaaagtttaatgagttaaagtaaattagattgtcartactacattttcttgaaaaacttaagtggaattcaaaatgcactctaggaattttgtttccttaaaaaaatgcatttttgaatttaacattatttctactttctttttcttttgtcgtctgacaactgcaaatatttttgacaagtagcaaataag

SEQ ID NO: 872063 - DNA, 656 bp, Homo sapiens
acattgaagtgtcaataatattcctctcccatcccctggcaggggccatgtggcacagagaatctgtgcacttgggagagagaaagccaagtgactattaggcttggcattgaattcagtgctgccctgtcacagcagaaagcagaagcaggctgtgtctgcccgaagagggagctttgaaacagcccttagccagaggggaatcgcccgtcccagtagttggagcttgagttctggcgagccttgccaccatgggctagagcrctctgtggccctaggtgaacttcatggccacaaggaatgtaattcctaggcaagttgtatggctgatctggggctgagacccagtggaatgagaggaatcattacctactaagacaccagccaggacagctaagggagcacttactccacacttccccataccccagcagcagccacgtggcacagagaaatctgtgagcttgggagagggagaacacagcaactggaggctttccattgaagtcaatgctgccctgtaacagcagagacctgaaaggattcatcacctgcagactgaagaggccctgggctctgaataaccaagagttatacccagttaattcactgtgggcttggactctgagatgttctggcttcagatgtgacccagc

SEQ ID NO: 872064 - DNA, 584 bp, Homo sapiens
aaaagcacagacaatgaagactacaataaatacctaacccctcaatgctcagacatgaaagaacatatactaacaacaacaccatccagcaaaacatgacctcactaaatgaaataattaaggcaccaggaaccaatcctgaagaaacagacatatgtgacacctcagacagagaattcaaaatagccatattgaggcaactcaaagaaattcaagataacaaaaggaagggattcagcattctatcagataaatttaacaargagactgaaattactaaaacgaatcaagcaaaaattctggagctgaaaaatgcaactggcatactgaaaaatgcatcagaatcttttaatataagactggatcaagaagaagaaaaaataatgagcttgaagacaagccatttgaaaatacacagtcaaaggagacaaaagaaaaaagaattttaaaaagtgaggcatactttgggaggccaaggcgggtggatcacctgaggttgggagcttgagaccagcctggtcaacatggtgaaaccctgtctctactaaaaattaaaaaaaaaaaaagaaagaaaaaattagctg

SEQ ID NO: 872065 - DNA, 584 bp, Homo sapiens
aaaagcacagacaatgaagactacaataaatacctaacccctcaatgctcagacatgaaagaacatatactaacaacaacaccatccagcaaaacatgacctcactaaatgaaataattaaggcaccaggaaccaatcctgaagaaacagacatatgtgacacctcagacagagaattcaaaatagccatattgaggcaactcaaagaaattcaagataacaaaaggaagggattcagcattctatcagataaatttaacaaggagactgaaattactaaaaygaatcaagcaaaaattctggagctgaaaaatgcaactggcatactgaaaaatgcatcagaatcttttaatataagactggatcaagaagaagaaaaaataatgagcttgaagacaagccatttgaaaatacacagtcaaaggagacaaaagaaaaaagaattttaaaaagtgaggcatactttgggaggccaaggcgggtggatcacctgaggttgggagcttgagaccagcctggtcaacatggtgaaaccctgtctctactaaaaattaaaaaaaaaaaaagaaagaaaaaattagctg

SEQ ID NO: 872066 - DNA, 563 bp, Homo sapiens
tgggaccctcatgctccatgatagacaaagcctactgatgacactttaataatacaaccttctctcagcaaactgaaacatattgtagaagaaataatttgtccttgtcttcaataaactatgtccttaagagagaagaagaaaggagaaatatgtgcattattgaatgaaacagaaaatctttggaatatcttggataatcataaagtagggagcattttttttttttttttttttttttttttttttgtaggacagagtcttgctctgtcaccaggctggagtgcagtggcacaatctcggctcactgcaacctccgcctccagggttcaaacgrttctcctgcctcagcctcctgagtagctgggactacaggcacttgccaccatgcccgggtaattttttgtatttttagtaaagacgcggtttcaccatattagccaggatggtcttgatctcctgacctcgtgatccgcctgcctcggcctcccaaagtgctgggattacaggcatgagccaccacatccggcccataaagtagtgaatttaagcaagatttcaaa

SEQ ID NO: 872067 - DNA, 511 bp, Homo sapiens
aaaacactgataccactgacaactaatagccttactatcaacaatccttaacctaggaacccacagatggcccaaatgcattcaatctgtagcggcaactgctttgccaacagaagaaagtagaaaagtaactttyagaggaaacctcattgtgagcacacctcaccagttcagaattattctaagtcaaaaaagcaaaaagttagcttactaactcgaaaatcttaaagtatggggctattctgttagaaaaaggtgatttaacattaaccactgaaaattcccttaacacagaagatttcctaacaggggatttaaatcttaattaccttacaaaggtctgaccagacctaggaggaactcccttcaggacaggatgatacatggctcctcccaggtgattgagaaaaaaaccacaatgggtattcaataattgatagggagactcttgtggaagcagagttaggaaaattgcctaataattggtctgctcaaatgtgcaagctgtttg

SEQ ID NO: 872068 - DNA, 583 bp, Homo sapiens
ttggctactatatcctatatcattacatactggtgcttttacttctgttgaacaaacttgcaagaggaatattaatggaacgaagggaatgtttccttctaagttttaatttccaaagaggtcagaacttttcaaacatttctaccatcgaagtatgaaaatggccttctctctgcattcacatagcgataagttttatcctgtttttaaaatttgccaattttacaggtgtagagtgatattgcatcattactttcattgtgttatttttatttmtaataagttgagcatctttttaaatgcttgttggctattggatttatttgggggatttaattagtcatatgatttgcccattattctttggactctttcatttaaaaaaattatgagaacccttttattattacaaatattaactctttgtcatgtatattgcagttttccccaagatctattgtttgtctgttgactttcttataacttttaccaaaacaatttttaatttttataatcagagatatcttttctttcatatcttcagagtcggcaaggttggttaaaaatgtttcccacacctcaa

SEQ ID NO: 872069 - DNA, 664 bp, Homo sapiens
aattttccaatctatgttttgaaaattactgttgagttcaagaatgcctaatggctgagtcctgttgcttcactgtaagtataattgtatttccttatgaaggttaaaattcccatttcatttcttccatttatctaagtttccaggtgtcattcacaattagccattaaaaatgattgtgtttaattgagatttaccagtggctttaatacaagttttcacttaaagagcarttatgttttatattgcaagttgaaaactgtattaacggtgaattcagtgaaggaaatttagaggtctgaggctaatgaaaactttttaatgacatgcaatacctaggaaatcatattcatctgttgtttttcacaaaaactaactccaggaaaattgatattgttgtagaatattggaaaagttacagaggacactatttagaagtacattcattattcaacaactactttcagtacttactacatgccaggccccgtgaaatattttggggacaacataattaataattgctgtctcccactaaaaccagagacagacgcataaacacataatcatacagtacagtaagtgctggaataacagggcagtggaggcacaaaaagagaggggaagagataaccctgcctaggtctgagtgtttagggtagga

SEQ ID NO: 872070 - DNA, 633 bp, Homo sapiens
aacctcgtgaatcaaaataaatgtttacttctgtgagatgaatgtaacaaatcacatagcattttcactgatagcttatttctagtttttatcacagataattggttttttactgttggtctcaatgggctccaaaatgtcactttgtagagtttacaaaaaaagtgtttccaaccagctgatcagaaatgaaggtttaactccatgagataagtccacacattaaaatgcactttcacagatagtttttttttactgcgtttatcgagaaatatttgttttttcactataggccacaatgggctctgaaatgtcccttcataggttctacaaaaagagtgtttctaacctgcttaaagaaagggtttagtctgtgagatgaattcacacatcgtaatgtattttcccacatagtttgtttatagtttttatcrtgggatattcagtttttttttactacaggtctcaaggggctctgaaatgtcctttcatagattctacagaaagatggtttccaatctgctgaatcaaaactaaggtttaactccgtgagatgaacccacgcatcataaagcattttcatagataggttatttcttctttttatcatgggatattcaggtttttactaaa

SEQ ID NO: 872071 - DNA, 644 bp, Homo sapiens
tctggttctagtcagcataccaaagagtttggagaactgagctaatgcataggttattatataggtcccagactgacaactgagtagtgtacacaagggacaaatccaaatagtactgagccactgcaaaaactttgaaattgaactgaagcagtaactatatgctatagaagatgggtagaartttgcagcctgaacttttgttttaacaagtagattgcctgcaaaaccaaaaatatcaacattttccataggatttaagtaaaacccagagtcctataacataataatcaaaatatccaggatacgatagaaaatatatacgtgaagagagatgaaaatgtcaactttgatgggaaaatacaatcaacagatgcctacaatcagatgatgtagatgttggaattatctgacagggatattaaagcagctatttttaaattgctcaaatgtataatcatgaacatttttaacaaataaaaataaaatatataaattgaaattataaaatggagatatatatatatagtgatagaagtaaaatacttgaagaataaacttaatagcagagaatggaattgactaaagaaagagcaaagaaattatccatatgaaaaatagaaagaaaaaacttgaaaattcta

SEQ ID NO: 872072 - DNA, 644 bp, Homo sapiens
tctggttctagtcagcataccaaagagtttggagaactgagctaatgcataggttattatataggtcccagactgacaactgagtagtgtacacaagggacaaatccaaatagtactgagccactgcaaaaactttgaaattgaactgaagcagtaactatatgctatagaagatgggtagaagtttgcagcctgaacttttgttttaacaagtagattgcctgcaaaaccaaaaatatcaacattttccataggatttaagtaaaacccagagtcctataacataataatcaaaatatccaggatacgatagaaaatatataygtgaagagagatgaaaatgtcaactttgatgggaaaatacaatcaacagatgcctacaatcagatgatgtagatgttggaattatctgacagggatattaaagcagctatttttaaattgctcaaatgtataatcatgaacatttttaacaaataaaaataaaatatataaattgaaattataaaatggagatatatatatatagtgatagaagtaaaatacttgaagaataaacttaatagcagagaatggaattgactaaagaaagagcaaagaaattatccatatgaaaaatagaaagaaaaaacttgaaaattcta

SEQ ID NO: 872073 - DNA, 552 bp, Homo sapiens
gtacatgtgcacaacgtgcaggcttgttacataggtatacatgtgccatgttggtttgctgcacccatcaactcgtcatttacattaggtatttctcctatgctatccctgcctcataccccccacgccccgacaggtcctggtgtgtgatgttccccgccctgtgtccgtgcattctcattgttcaactcttgcctatgagggagaacgtccagtgtttggttttctgtcttcgggatagattgctcagaatgatggtttccagcttcatccacgtccctgcaaaggacatgaacttatcyttttttatggccgcatagtattccatggtgtatatgtgccacattttcctaattgatgaacacttgggttggttccaagtctttgctaatgtgaattgtgctgcaataaacatacatgtgcatgtgtctttatagtagcattatttataatcctttgggtatatactgagtaatgggatcactgggtcacaagacagacctattaaaacattccagggacataagaatgaagtaaatgctatcaaatggg

SEQ ID NO: 872074 - DNA, 552 bp, Homo sapiens
gtacatgtgcacaacgtgcaggcttgttacataggtatacatgtgccatgttggtttgctgcacccatcaactcgtcatttacattaggtatttctcctatgctatccctgcctcataccccccacgccccgacaggtcctggtgtgtgatgttccccgccctgtgtccgtgcattctcattgttcaactcttgcctatgagggagaacgtccagtgtttggttttctgtcttcgggatagattgctcagaatgatggtttccagcttcatccacgtccctgcaaaggacatgaacttatccttytttatggccgcatagtattccatggtgtatatgtgccacattttcctaattgatgaacacttgggttggttccaagtctttgctaatgtgaattgtgctgcaataaacatacatgtgcatgtgtctttatagtagcattatttataatcctttgggtatatactgagtaatgggatcactgggtcacaagacagacctattaaaacattccagggacataagaatgaagtaaatgctatcaaatggg

SEQ ID NO: 872075 - DNA, 552 bp, Homo sapiens
gtacatgtgcacaacgtgcaggcttgttacataggtatacatgtgccatgttggtttgctgcacccatcaactcgtcatttacattaggtatttctcctatgctatccctgcctcataccccccacgccccgacaggtcctggtgtgtgatgttccccgccctgtgtccgtgcattctcattgttcaactcttgcctatgagggagaacgtccagtgtttggttttctgtcttcgggatagattgctcagaatgatggtttccagcttcatccacgtccctgcaaaggacatgaacttatccttttttatggcygcatagtattccatggtgtatatgtgccacattttcctaattgatgaacacttgggttggttccaagtctttgctaatgtgaattgtgctgcaataaacatacatgtgcatgtgtctttatagtagcattatttataatcctttgggtatatactgagtaatgggatcactgggtcacaagacagacctattaaaacattccagggacataagaatgaagtaaatgctatcaaatggg

SEQ ID NO: 872076 - DNA, 552 bp, Homo sapiens
gtacatgtgcacaacgtgcaggcttgttacataggtatacatgtgccatgttggtttgctgcacccatcaactcgtcatttacattaggtatttctcctatgctatccctgcctcataccccccacgccccgacaggtcctggtgtgtgatgttccccgccctgtgtccgtgcattctcattgttcaactcttgcctatgagggagaacgtccagtgtttggttttctgtcttcgggatagattgctcagaatgatggtttccagcttcatccacgtccctgcaaaggacatgaacttatccttttttatggccgcatagtattccatggtgtatatgtgccacattttcytaattgatgaacacttgggttggttccaagtctttgctaatgtgaattgtgctgcaataaacatacatgtgcatgtgtctttatagtagcattatttataatcctttgggtatatactgagtaatgggatcactgggtcacaagacagacctattaaaacattccagggacataagaatgaagtaaatgctatcaaatggg

SEQ ID NO: 872077 - DNA, 638 bp, Homo sapiens
aaattcaacagcccttcatgctaaaaactttcaacaaactgggttttgatgggacgtatctcaaaacagtaagagctatttatgacaaacccacagccaatattatactcaatgggcaaaaactggaagcatttcctttgaaaactggcacaagacagggatgccttctctcaccactcctattcaacatagtgttggaagttctggccaggacaatcaggcaggagaaagaaataaagggtattccattaggaaaagaggaagtcaaattgtccctgtttgcagacaacatgattatatatttagaaaactccatcgtctcagcccaaaatctccttaarctgataagcaacttcagcaaactctcaggatacaaaatcaatgtgcaaagatcacaagcattcctatacaccaataacagacagagagccaaatcatgagtgaactcccattcacaattgcttcaaagagaataaaatacctaggaatccaacttacaagggatgtgaaggacctattcaaggagaactacaaactactgctcaacaaaataaaagaggacacaaacaaatggaagaacattccatgctcacacataggaaaaatcaatattgtggaaatggccatactgccccagg

SEQ ID NO: 872078 - DNA, 603 bp, Homo sapiens
cttgtacccctttttcttaccacttctagggaatctaagagtaaaatttattaaagcaaaaatagcaagccagggagacccaccaatctcaagtagtctaaaacatgattaaaggtggcattctatttaacaaaatatgaatagaaattttttttttttgctccttttcatcccatcatcaacctttatgcttgctataattaattctacccaactgggcctccctttgttaactccagagctggttctaaggaataagattaattttagttcatggaaaggcttccattcatagccttgtaaatttttcttcttgattaagaaattgtatttgaatatatggccactatatatgggaaatgagctatgggataaaaagaagatgtgtggatgacatgacatactcrgaatggtggagacccatgcagtgatggttgtggtagggctgtgagtcagcacaataggttattgcaattctcttatatgccctccttgaagttgttatttctgtcctggacagaagggacaaacaaagatcagaattaggaaggaagatttctaggcactcaaaggttaaggaaagaggtggccaagaaattattt

SEQ ID NO: 872079 - DNA, 583 bp, Homo sapiens
tgtacagctccctgaccgtttacatcaatgtcttgattttcttcctcctgcaatacgttataaaactaaagttttaaaaatatcactctcattttcatcttaaatcctttaaagactcttagaattcagcacaaactctgtaggttatcattcaaggctctttattacacaagcttttctgacttttagctttagtatacatgacttcactaaaggggyggcagatatggcgtgagagttaagagtgttaagttttggagctgtacagacaaggatccatgtcacagctctgtcacttcctagtagagaccttgggtaaattatttaaccttccgagcctcagttttctgatctgataaatggagaaaataataataatgcaacctcattttcttattaaatataagtctgagagaatttttcttctaaaaaactcttataaagatgagctctcttcttattgctagaaatttacttttcacattttaattattaaattgggttactgatataattacaataggcatctgtgataagagccagttgtccccagggccttcataaaaagaacagcagagctgaa

SEQ ID NO: 872080 - DNA, 608 bp, Homo sapiens
gaccatatgttaggccacaaaacaagtcttaaaaaatttgaaaaaactgaaattgtatcaagtgtattctctgactaccatggaataaaactagaattaacaagaggaattttggaattaaaaagatgaattttggaaactatataaacacatgaaaataaaatggtatgttcytgaatgaccagtggtccagtgaaaaaatttagaaaaaaaatttaaaagttccttgaaacaaatgatagtgaaaacacaacataccaaaacctatgagataaagcaaaagtagtaccaagaggaaagtttatagctataagcatctacataaaaaagtagaacaacttcaagtaaacaaccaaatgatgtatctttaaaaagcagaaaagcaagagcaaaccaaaaccaaaattagtagaaacaatagagatcaagcaaaataaatgaaattgaaatgaagaaaatgatacaaaggtcaatggaacataaagttggctttttgaaaagataaacaaaattgaaaaatatttagccagataaagataaaaagaaagaagacccagataaataaagttagagatgaaaaaggagacataatacaactgatgtcacaa

SEQ ID NO: 872081 - DNA, 513 bp, Homo sapiens
aagatttttagttgaaatgtattctaactattgtgtggtaaatgaattgtgaaggggcaggaatgaaggcagcaggatcagtttgatgttctcagactgggcgagggctaatggtggtatagacaagtatattcatacaagtagcgagaagagataagatctaagatggactttggtggtagaaccaacaagacttgctcctggattggatatgatggataaggaagagtaaaaatcaaaatratttctagaaatactactcagctaaaaaggaggggactagctatacacacaacaaccttaatgaatttccagggaattacgctgagtgaataaaagttacttcccagccgggcgcggtggctcatgcctgaaatcccagcactttgggaggctaaggcaggtggattgcctgaggtcaggagatcgagtccagtctggccaacatggtgaaaccccgtctgtactaaaaatacaaaaaaattaacagggcatgctggcgtgcacctgtaa

SEQ ID NO: 872082 - DNA, 552 bp, Homo sapiens
tgcagtggctattcacaggcacaatcatgcacctactatttttttaatcaacttttattttaagttccagggttcatgtgcgggatttgcagatttgttacacagataaacatgtgccatggtagtttgctgcacagatcaacccatcaggtaggtattaagcccatcatccattagctattcttcctgatgctctccccccagtgcaccttctgacaggcctcaktgtgtgttgttccccaacatgtgaccatgtattctcattgtttagctctcacttataagtgagaacatgcggtgtttggttttctgttcctgcattagtttgcagaggataacggcttccagctccatccatgtccctgcagaggatatgatctcattcctttttatggctgcacagtattccatggtgtacatgtaccacattttctttatccagtctagtgttgatgggcatttgggttgattccataactttgctattgtgaatagtgctgcaattaacatacatgtgcatgtatctttataacagaatgatttatattcctt

SEQ ID NO: 872083 - DNA, 552 bp, Homo sapiens
tgcagtggctattcacaggcacaatcatgcacctactatttttttaatcaacttttattttaagttccagggttcatgtgcgggatttgcagatttgttacacagataaacatgtgccatggtagtttgctgcacagatcaacccatcaggtaggtattaagcccatcatccattagctattcttcctgatgctctccccccagtgcaccttctgacaggcctcagtgtgtgttgttccccaacatgtgaccatgtattctcattgtttagctctcacttataagtgagaacatgcggtgtttggttttctgttcctgcattagtttgcrgaggataacggcttccagctccatccatgtccctgcagaggatatgatctcattcctttttatggctgcacagtattccatggtgtacatgtaccacattttctttatccagtctagtgttgatgggcatttgggttgattccataactttgctattgtgaatagtgctgcaattaacatacatgtgcatgtatctttataacagaatgatttatattcctt

SEQ ID NO: 872084 - DNA, 490 bp, Homo sapiens
tgaatctgggtgctcctgtattgggtgcatatatatttaggatagttagctcttcttggcgcattgatccctttaccattatgtaatgctcttctttgtctttttttatctttgttggtttagagtctgttttatcagagatgagaattgcaacccctgcttttttttttttattttkggctttccatttgcttggtaagtattcctccatcccttcattttgagcctgtgtgtgtctttgcacatgagatgggtctcctgaatacagcacacagatgggtcttgactctatccagtttgccagtctgtgtcttttaattggggcatttagcccattttcatttaaagctaacattgttatgtgtgaatttgatccagtcattatgatgctagctggttattttgcccattagttgatgtggtttcttcatagtgtcgattgtctttacattttggtatgttttcgcagtggctggtaccagttttcctt

SEQ ID NO: 872085 - DNA, 656 bp, Homo sapiens
cttgattcagctgctcttccttgcttcatattttatacatcagctacaccaaacagcttgttgccacctgcatccacctgcctgtgctcttgatgcctgtctgcttggaaaaatcttcctatccccctctgaatagttagctcctccttaccatttaaagcttctctcaatattgctatatccaggaaataccagtagcatccttacttgattcctgacaaccgcaaatgtctctagatattgccaaatgtctgtggaaagagtgggaaaaatcaactgcagttgagaatcactgttctatttctccctagatacacacacaaaaccttcttccccagtaaggagagagaaaaggcaagaggaaacaaaatattgaaaaacacaagcagcccacatcaagccttgctgcattgytataaaacagttctaagttaaatccaccttaaattagtgcatcctgtaccattttaacttgcacaatggaataactatttaaaaatcagagaaaggagaaaaccaggagacccatttaggaactgaggctctgcttttgtatctagaactccaacaacactgttaaacttcacgttggtgagatcaggactatactaaaaagacatcatcattactttttaattactgctaattactaccta

SEQ ID NO: 872086 - DNA, 656 bp, Homo sapiens
cttgattcagctgctcttccttgcttcatattttatacatcagctacaccaaacagcttgttgccacctgcatccacctgcctgtgctcttgatgcctgtctgcttggaaaaatcttcctatccccctctgaatagttagctcctccttaccatttaaagcttctctcaatattgctatatccaggaaataccagtagcatccttacttgattcctgacaaccgcaaatgtctctagatattgccaaatgtctgtggaaagagtgggaaaaatcaactgcagttgagaatcactgttctatttctccctagatacacacacaaaaccttcttccccagtaaggagagagaaaaggcaagaggaaacaaaatattgaaaaacacaagcagcccacatcaagccttgctgcattgctataaaacagttctaagttaaayccaccttaaattagtgcatcctgtaccattttaacttgcacaatggaataactatttaaaaatcagagaaaggagaaaaccaggagacccatttaggaactgaggctctgcttttgtatctagaactccaacaacactgttaaacttcacgttggtgagatcaggactatactaaaaagacatcatcattactttttaattactgctaattactaccta

SEQ ID NO: 872087 - DNA, 577 bp, Homo sapiens
ctgtctcctgatgagacacactgttctaccttggcactccccagttgtcctggatcaaccccatcttgccacttcttttctgcctacagctgattttagcatgtcttgttgccttacttcccttgcctaattctcacactagtatctccattttgctycggccttgactcctggtcttcccttcaattacaaggggattttgttcatgtcttcactcacccctaagcaatgacgattgatctatgaaaaataaagtgaagaggaggagggacgtgtgtaaagaggaaagcctttggtgtgacacattgtgtttttgagaagtattttctataaaattccttctttttccttgttgttctcacttcaggccatgaaatgtgatgcccaaggagcaaagtgtcttaaagttcctaactccactaacccacaagatccgatatcttgagagacctcagattatatgtcctctcttcttcctgctcttgattctatttttttcttttactgttagtaaactggtctctcaagattaaccatgagagcactctcctccatagaacatatttctgcattgacc

SEQ ID NO: 872088 - DNA, 577 bp, Homo sapiens
ctgtctcctgatgagacacactgttctaccttggcactccccagttgtcctggatcaaccccatcttgccacttcttttctgcctacagctgattttagcatgtcttgttgccttacttcccttgcctaattctcacactagtatctccattttgcttcggccttgactcctggtcttcccttcaattacaaggggattttgttcatgtcttcactcacccctaagcaatgacgattgatctatgaaaaataaagtgaagaggaggagggacgtgtgtaaagaggaaagcctttggtgtgacacattgtgtttttgagaagtattttctataaaattccttctttttccttgttgttctcacttcaggccatgaaatgtgatgcccaaggagcaaagtgtcttaaagttcctaactccactaacccacaagatccgrtatcttgagagacctcagattatatgtcctctcttcttcctgctcttgattctatttttttcttttactgttagtaaactggtctctcaagattaaccatgagagcactctcctccatagaacatatttctgcattgacc

SEQ ID NO: 872089 - DNA, 646 bp, Homo sapiens
cactgtgccctgccaaatgtatagattttactctaagtatagctctgtctacattcacagttttgatatttcttttcactgtaccatttaattcaaaatactttgagtttctttttgacttaaagggttagttgaaatacattgcttaatttcctgacaatggaacattttctagttattttgtaattgttgtctagcctaatgctagacacagaatatactctgaataattttagtcccttgatatttattgaatctttctctttcactcagtgtatgggcaacttcagaaaatatttcttgtgtgcttgcaaagattatgtattatcctattargtatagtgtcagtttctatgtcaattagatcagatttgttaatcgtgctcttcagatcttctatagcgtaccaaaagttataagggtgtattcatgtatactcagaagtgccaccccacaccacatcctccattcctgtactttccatcttggtcacacctctcccatgtgtaaccagtctcaatggactcccatttctactttgtggggttattttgcacatatgagcagatacatttatattttcctattttcccccttttattcaaaaggtatactgtggccgtgatttgcactttgggtttttaac

SEQ ID NO: 872090 - DNA, 557 bp, Homo sapiens
tcccttgctcagcattctcgttcctgttgccatgtgaagaaggacatgtttacttccccttccacggtaattgtaagttcttgagactgcaccagccctgtggaactatgagtcagctaaatcactttcctttgtaaattacccagtctctggmagttttttttataggagtgtgaggacaaattaatacagtaaattgacacctcagagagtggggtgctgctatacagatacccaaaaatgtggaagtgactttggaactgggtaacagagtttgaaacagtttggaggactctgaagaagacaggaaaatgtgggaaagtttggaactttctagagtcttggagtgctcagaagacagaaagatgtgggaaagtttggaacttcctagacacttgttgaatggctttgaacaaaatgctgataggaatatgaataataaagtccaggctgaggtggtctcagatggagatgaggaactttttgggatctagcatataggtgattcttgctatgctttagcaaagagactggcagtattttgctcctgacccaga

SEQ ID NO: 872091 - DNA, 651 bp, Homo sapiens
acaaagggaacaaaatacatagcaatacaacttacaagggacatgaaagacgtcttcaaggagaactacaaaccactgctcaaggaaataagggagtacacaaataaatggaaaaacattccaccctcatggataggaagaatcaatatcatgaaaatggccatactgcccaaagyaatttatatattcaatactattcccatcaaactaccattgacattcttcagagaattagaaaaaactactttaaatttcatatggaaccaaaaaagagcccgtatagccaagacaatcctaagcaaaaagaataaagctggtggcatcatgctacctgacttcaaattatactagagggctacaataaccaaaacagcatggtgctggtaccaaaagggatatacagaccaatgcaacataacagagacctcagaaataacaccacacatctacaaccatctgatcttcagcaaatcagacaaaaacaaggaatggggaaaggattccctatttaataaatgatgctgggaaaactggctggccatatgcagaaaactgaaactggaccccttccttacaccttacacaaaaattaactcaagatggattaaagacttaaatgtaagacataaaacaataaaaaccccagaagaa

SEQ ID NO: 872092 - DNA, 651 bp, Homo sapiens
acaaagggaacaaaatacatagcaatacaacttacaagggacatgaaagacgtcttcaaggagaactacaaaccactgctcaaggaaataagggagtacacaaataaatggaaaaacattccaccctcatggataggaagaatcaatatcatgaaaatggccatactgcccaaagcaatttatatattcaatactattcccatcaaactaccattgacattcttcagagaattagaaaaaactactttaaatttcatatggaaccaaaaaagagcccgtatagccaagacaatcctaagcaaaaagaataaagctggtggcatcatgctacctgacttcaaattatactagagggctacaataaccaaaacagcatggtgctggtaccaaaagggatatacagaccaatgcaacataacagagacctcagaaataacaccacacatctacaaccatctgatcttcagcaaatcagacaaaaacaaggaatgggraaaggattccctatttaataaatgatgctgggaaaactggctggccatatgcagaaaactgaaactggaccccttccttacaccttacacaaaaattaactcaagatggattaaagacttaaatgtaagacataaaacaataaaaaccccagaagaa

SEQ ID NO: 872093 - DNA, 668 bp, Homo sapiens
ttgggcattaagatacttaaaaatgcccatcccaggaattcacctaggaatttgttctaaggaaataatcaagagatcaggaaggagattaatgtgcaagtatgtttatcgcaagcatgatttataacagcaacacactggaagcagcccaaaaacctgtcattagggaaatgatcaaataagtgatttaagccacactatgtgtgtgacattaaactgccatcaaaaccatgacttcaacaaatctgtagtgtcaagagaaaacacaatatgttaattgaaaacgacctcataacttcctttaaattatctcaaatctatttaaacacacgatatagtcccttccatagtatagacctgggtttcctccagaatgatgtccatacaggcttggcaggatttggatcaaaagatagaggagggagaaatgattttgaagaattagcctcatctraagttttagctgctgccgccaccaaggggcaatctgtattttgacaatgtcgagcaatgcagaagcacctctccagatgaaatttaaattagtgctttttgtcattggtttacttcccctctccaaaccaggaagtgaaattcaggtgaatttgctcatgaattacttggcaacaggaacaccgtcagcaggaaacatctgccttatgcagcat

SEQ ID NO: 872094 - DNA, 600 bp, Homo sapiens
ctttctcatattacctgagggcctacctggcctggcagttctacaatgaggccaaggagttaaccatttggaggtcatctgaaggagccgaagcttaatgctcacaaggccaggttcatggacacaatccctgtacacccaatgaggttttcattgctccatggtcacaggtgactgtatctcccatcccaggtacctgttaccagcctggattctcaggtagagcaggaaaataggtacagctgacccagagcatctcaacccagctgctagcaaaacagccagtgatccctacctttaagacactaataaagatggaaaaacattactacctataaaccaccttacatatcctggagcctcaggaggaagatcctatgcaacaatttgggccaaatgctcttggattaaggtggtcattcattaataacagctgtggtggggtgatrctgtaaattcccagtttgctcctacctccagctgtatccctttattgtaccctggagaacagacccttccacacctcagcatttgaaacacgattcattcattatagaatcaaaaaagaaaggtagcaaatacttgactactgaattccaa

SEQ ID NO: 872095 - DNA, 504 bp, Homo sapiens
ataggagaaaatgaagctgagtaatgggctaatggctagagtggaggctacttgaacttggatgatcatgaacagcctgtcacagtcagcaatgtttgagacgaaacttgaatggtgagaacaagacaaccacagaaaggtccaggggaagaaattcccaagcaaacggaacaacamgtgcaaaggtgagtgtgaggaatgttccagaaagataaaggaccaagggaaaagagagcaggatttggtctgagatataagcaggagattatggtgctccttctaggccacagcaagcaattgattttaattctaggtaaaatggaaagctggaggaagattttaataaagatgcatgtgattcaagatatgggttttgtcatcgttcttactcactcgaccagcgaggtcatgcattgatcataggatgtcaaagctggaagaagataccagtttagaagatgctgctgtcactgaatgcagatttcataaggagttgcagtgaag

SEQ ID NO: 872096 - DNA, 568 bp, Homo sapiens
acacacaatctcaaaagtaacaaactggctgggtgcagtggctcacacctgtaatttcagcctttgggaggccaaggccagaggatttcgtaaagacaagagtttgagaccagcatggacaacatagcaacacccaatggctacaaaaaataaaaaatttgccagatgtggtggcatgtgctaaccaccacaagtcctaactacttgggaagctgaggcagaaggatcacttgagcctaggagttcaagttaatagtgagctacgaccacaccactgcactccagccagggcaagagtgagaccctgtcaaaaaaacaaaacaaaacaaaacaaacmaacaaaaaaataaaaaaacaccaaaaaaccttcacaaatgaaacccttgagagatatgcattttattgtctataatttataactcatttaaataaaatggcctaacttcccctttagaccccaagccagagtcttgcatgggtgccaaggagtggcctaatcagttcagcccagccatagactcaagaaaggaaacattttcctgttccctgccttatattatacaatccc

SEQ ID NO: 872097 - DNA, 630 bp, Homo sapiens
ggtaacacagtttaacttcttgcctcagtgtccccatcacctaaccatgatgctgtttgaattacactgcagccataccctccatcttctttgaagttcttcggatgcaaagtcaagatggaatcccagttctgccaagcacttgtcatgtggcattggacaagccctctccccatgtatagccaggcttggtggttagtgatctctcccttgaaatgtgagtctattatggcttgaaggagaatatgttcataatgcctaagcagaaaccctcaarcctagcaaattcttaataaaagtaactactactattataaaccgcatcttgtacatttttaaccaccaataaaaaggaaatgatactcacactgagatcctgacacttatggtctgtaaagtaacagttctttctactagatatttactattgtaggacaagactattattggaactagtatgaatgctcaaattttcatttcccatttgctatttattgtcaaaattttctctgtgctagagaaaagaaagtctcactgcattctacccatgtagaacaatttcagagaacaattaagtagatttaaaaggaaataaattagtttatagagctctcaaaaatgcaatgatat

SEQ ID NO: 872098 - DNA, 630 bp, Homo sapiens
ggtaacacagtttaacttcttgcctcagtgtccccatcacctaaccatgatgctgtttgaattacactgcagccataccctccatcttctttgaagttcttcggatgcaaagtcaagatggaatcccagttctgccaagcacttgtcatgtggcattggacaagccctctccccatgtatagccaggcttggtggttagtgatctctcccttgaaatgtgagtctattatggcttgaaggagaatatgttcataatgcctaagcagaaaccctcaagcctagcaaattcttaataaaagtaactrctactattataaaccgcatcttgtacatttttaaccaccaataaaaaggaaatgatactcacactgagatcctgacacttatggtctgtaaagtaacagttctttctactagatatttactattgtaggacaagactattattggaactagtatgaatgctcaaattttcatttcccatttgctatttattgtcaaaattttctctgtgctagagaaaagaaagtctcactgcattctacccatgtagaacaatttcagagaacaattaagtagatttaaaaggaaataaattagtttatagagctctcaaaaatgcaatgatat

SEQ ID NO: 872099 - DNA, 625 bp, Homo sapiens
ctgaaagtgacaaggagaatggaatcaagctggaaaacacacctcaggatattatccaggagaacttctccaacatagcaagacaggccaacattcaaattcaggaaatacagagaacaccactaagatactccttgagaagagcaaccccatgacacataatcatcagattctccaaggttaaaacaaaggaaaaatgtaaaggcagctggagagamaggtcaggttacctacaaagggagacccatcagactaacactggatttctctgcagaaactctacaagccagaagagagtggggacaaatattcaacattcttaaagaaaagaattttcaacccagaatttcgtatccagccaaactaagcttcgtaagcaaaggagaaatgaaatcttttccagacatgcaaatgctgagggattttgtcaccaccaggcctgccttacaaaaggaaataaggagaaaacatggaaaggaaataaatatggaaagaaacatggaaaggaaataaatatggaaaagaaaaactggtaccagccactgaaaaaacacaccaaaatataaagaccaatgacactctgaagaaactgcattgactattgtgcaaaataactagctagcat

SEQ ID NO: 872100 - DNA, 629 bp, Homo sapiens
ttcttctcagcaccatatagcacttattctaacattgaccacataattggaagaaaaaacactcctcagaaaatacaaaagaatgaaaattaaaaaaaaaaagtctctcggaccacagcacaatcaaattagaactcaggattaagaaactcactcaaaatctcagaactacatggaagttgaacaacttgctcctgaatgactactgggtaaataactaaattaaggcagaaataacgaagttctttcaaaccaatgagaatgaagagacaacatagcagaatctctgggacacagctaaagcagtgttaagagggaaatttatrccactaaatggccatatcagaaagctgaatagatctgaaattgacactcgaacatcgcaattaaaagaactagagaagtgtttagaatggcgatcattaaaaagtcaggaaacaacagatgctgccatggatgcagagaaataggaaggcttttacactgttggtgggagcgtaaattagttcgaccattgtgaaatacagtgtggcaattcctcaatgatctttaatcagaaatatcatttgacccagcaatcccattactgggtatatacccaaaggattatgaatatttctactgtaatg

SEQ ID NO: 872101 - DNA, 585 bp, Homo sapiens
cttcccgagaggtcccattgctactttttgtaactttctcctaatgtcaggggcagactgagtaataaaatgcacacctaggagaactttcccttccgggaggtcggggtctgtattagattacttcctgagtgcctcaactaaacaaccctgaattagaatgagattttcatcttcctcctgagttatttttctcactttaactggcttaatcacatactgtttcatgctgtctatgaaacaagttagcatatgatttctgcattcaagatcttgagatcctctctggtcattcgactgagggtccagaactgcatctcctcccacacgataaatggcatggcctggcttacatgcagccaccccatctgcatgttcccgagcagtacctagaatttgtrttttgcctctctaatacaagtggataataatatctgcatgtcatgccaaaggaaatcaaaagacatagtcaacttaacaaactcctctacaaacttccttggatcctccaaaaatagaccaaatttctccttgcataaagccaaatcagacatggaaaaggcacatatgctctgattgttcctc

SEQ ID NO: 872102 - DNA, 655 bp, Homo sapiens
ctgaatcaaaaaaggaaatataaacagaataataataagtaataagattgaatctgtaataaaatatctcccatcaaagaaaagccgaacacctaaaatattaattgtagaattgtgccaaatatttaaagaagaacgaacatattttttttcgaatattccagaaaattaaaaggaagagaacctttcaaacttattgtatgaggccaacattattccaataccaaaaccagtcaagaaaaaaaggaagggtataggccaaaatatctgataaacattgatgcaaacatcaacaaaatattagcaaactaaatttatttagcaaaatgttaaaaatarcatttaccatgatcaagtgagatttatctcagcaatgcaaggatggatcaacctatgcaaatcagtaagtgcaagtcattactttaatagaatgaagggcaaaaactgtattatttcaataaatacagaaaaagtatttgatattattcaacatccttcataataaaaactcttaacaagttaggcatagaaggtacatacctcaacacaattaaagccatatgtgccaacctcacagtttggggaaaagttgaatgcttttcctctaagatctggaacgagacaaagattccatttgcataacttttattccata

SEQ ID NO: 872103 - DNA, 584 bp, Homo sapiens
gtacaagaagccaactgccttatagatatttcccattgaatgtcccaccagagccctaaactgattttgtccagattataaggttatctttactaccagaactcctcctcacactgtatctctctctagtattgaataagttcagttgccccaataataaaaattatatactttgcttaactgctttctccactttatgcccagctttcaataaatcacctagactattgaatgtacattttaaatgtgtttataaatctgacttcctttacttaatatttactgcttagaagaaaccaatatccttcctacaagtycctcccacgagtcaattactcatgctcagattccatctgagtttttaacctcttcttgaaaactttcctggcttaggttgctctcttgttttcttaaccaccacagacttctgcatataattacagtgtattgcatcatatggtaattattgatttattgtttttatcttctattagattataaactttgtaaataactaagtctttcttgttagtcattgaaaaagtagcacctagcaaaatgacaggtataatgtgctaaataaa

SEQ ID NO: 872104 - DNA, 584 bp, Homo sapiens
gtacaagaagccaactgccttatagatatttcccattgaatgtcccaccagagccctaaactgattttgtccagattataaggttatctttactaccagaactcctcctcacactgtatctctctctagtattgaataagttcagttgccccaataataaaaattatatactttgcttaactgctttctccactttatgcccagctttcaataaatcacctagactattgaatgtacattttaaatgtgtttataaatctgacttcctttacttaatatttactgcttagaagaaaccaatatccttcctacaagtccctcccacgagtcarttactcatgctcagattccatctgagtttttaacctcttcttgaaaactttcctggcttaggttgctctcttgttttcttaaccaccacagacttctgcatataattacagtgtattgcatcatatggtaattattgatttattgtttttatcttctattagattataaactttgtaaataactaagtctttcttgttagtcattgaaaaagtagcacctagcaaaatgacaggtataatgtgctaaataaa

SEQ ID NO: 872105 - DNA, 540 bp, Homo sapiens
aaaatgtggggcaggggtttccagcatccagtgaatcagactaaggaattctgctctaacctcaagttagagcaagtcggctatttatttcctttattcaagttgcatctggggaactatttcaagctatttataaagacatcctttttttgattatcatactgtacaattatctgctttatttggtttcccagagtatccagctaaaaaccatgactgtctcttaaaattttcttaacaggtatatattaaactgagtgcttttgccaatttaaagacttcatgttgaatataaactattttgatgcaggctctggtacttattcctgcagatggttaatacttctcccatttgttaagtctggtaattatattacaaatagtaatattaytgattctgacagtaagatcagctagggtttattaagcctttactctgagtcaggtattatgctaaagcattttacatgacattaactttttaagtctttataccaatcctataagagatactattattactcaataatttgtacagat

SEQ ID NO: 872106 - DNA, 558 bp, Homo sapiens
ctagacctactgaatcagaatctttagttgtggggtctacatcttctctgttaagagaagttcaactaagcatcttttgactgttagtcatcaaaaatacagattcttaaaatcaggtagtaactattattatactaacgaaggaagatgaaaatgagttcttagaaaaagtaaacctgtttacttcacatttgtaatatctttacattagtaggattgttttcattttgttatcatcataatatgtctatatcttttaatatctctctctctcacacacacacacacacccacacacacatatttttmacaaactaggcttcccacccctcttcttaaaagctggtacaatatcctatacatacgtgatctacatggagcatactcaacagtctttgttccatcttgaagaaagcatgttccaacaggctctcgctcctgtttcatctcagttctccaatggtacaatggggcacaggcctaaaatcaaaggtttagtccacgacacgaagattttctaaaaatttagtgtttcagatgctctatactacttcagaa

SEQ ID NO: 872107 - DNA, 594 bp, Homo sapiens
accttagctgttccagtcttccagctttggagagtccaagcgaaagggagtgtggagggtggaagggatcccccagcacagcacagctgatctaccaaaatgtggccagactgctttttttaagtgagtccccgatcccattcctcctcactggacagaacctcccaaccagatcaccagctacctccttcaggtgcctttggaccagcaacaggcctgtacctccctgggatgaagctcctagagggtgggataggctgccatctttgctgtttcacagacttcactggtgatacctctaggtactggaaaatctgaggtgactagggactggaggggccctcagctactttagtagccctacagaaaactggccagactgttacatgggtgcccattcccatatctgctcattgggtaggtcctccaagcmtggggctctagccatccgccaccagagctattgagccagtagctgctcggcaactccctgtacagagcctccaggcccaaaagtataaaagccctgggagacaacataggcaataccattctggacaaacgaatgagcaaagttctcatgacaacaccaaa

SEQ ID NO: 872108 - DNA, 603 bp, Homo sapiens
gagtgagacctgcccttcggattgcgtgggagctgggtgaggcctgtgattgccagctttcccccacttcctgacaacctgagtgactcagcagaggcagccatagtcctcctaggtgcataactccattgacctgggaacctcacccctaacccccacatcagccacagcaagacttgccccaggagagtctgagctcagacatwcctagccctgcccccacctgatggtccttccctacccaccctggtatctaaacaaaaagagcatatactctttggagttctagggctccacccaccaccgttcctctccatatttccacaactgatgctctctggaaagcatcacctcctggcaggaagccaaccagcataaaaatggagcattaaaccataaagctaagaaccctcacagagtccatttcacccccctgctacctccaccagaacaggtgctggtatctgctgctgagagacccacagacagttcacatcataggactctgtgcagacaaccctcagtaccagcctggagcctggtagacttgctgggtggctggacccagaagagagataacaatcactacagcttggctctcag

SEQ ID NO: 872109 - DNA, 650 bp, Homo sapiens
tcataacattgaattgtaggctaggcaaattattttattcccactttaaaagtagacactctgaaacactctgaggttaagttatttgtgcaaggtcacccagctactaagtagtagattcagaaatctaatcctctccttttctctgttcatcactctaagtaattcacctgcaatttttttgtgtgtgtgtgtgtgtgtgtgacagagttttgctcttatcgcccaggctggagtgcaatggcatgatctcggctccctgcaacctctgcctcccaggttcaagcgattctcctgcctcmgcctcctgagtagctaggatcacaggtgcccgccaccatgcctggctaatttttgtatttttagtagagatggggtttcaccatgttggccaggctggtctcgaactcctgacctcctgatcctaccgcctcggcctcccaaagtgctgggattacaggcgtgagaattgtatatatgtgtaatttgaataattttccaatttgaaaattgatgttattttctttgttgtactttgcaagacagagcgttgcatagttgactaatcactacttaactttgttctcatttaaccgcagctattgtaaacaactagttccatttgcaacccacacatgcagagaacactg

SEQ ID NO: 872110 - DNA, 645 bp, Homo sapiens
taaaacctttttgctttggccacttcttggacttcactccacgtacatgtaaaactatactttcctcttgttaatctgcctggtgacaatttagtttctagatacagccaaagagcccacatgagagcttaaacggggatgatctctggtgatctctgctcccctacgctttcttctttaccatcttcccatatatgtgttggcttttgatgacttttaccctttttaaagtcatgggctaacattactaacctctttaacaggggaaaaagaaagcaacgtgctcagttagtatgacattcactgctggcgtctaatgatcaattaattgaaataatatctgcaaagcatttaaaacaaagtaaacatcaaaaatattkgctgttgttaaatggctacttgtatattacaccaagtcacagtaatgttgctctaattacgtacttgtatgctaccatggctgcggagcacagacagagtttgtggacagtacaactccaagggggcactattgatattatttaggaaatgactactgacttttggtttgctgttgataaaatgctgttattccttgtaatgtccatctactactgtattttaaaattatttatttacaaggaatacaaaataaaatgtacagat

SEQ ID NO: 872111 - DNA, 564 bp, Homo sapiens
ggcagcaacatttgccattctgcaatatttgctgttctgcagcctcccctggtgatacccaggcaaaacaggggatggagtggacctccggcaaactccaacagacctgcagctgagggtcctgactgtcagaaggaaaactatcaaacagaaaggacatccacactaaaaccccatctgtatgtctccatcatcaaagatcaaaggtagataaaaccacaaagatggggagaaaccagagcagaaaagctgaaaatccaaaaatcagagcrcctcttctcctccagaggaacacaactcctcgccagcaatggaacaaagctggatggagaatgactttgacaagttgagagaagaaggcttcagatgattggtaataacaaccttctccgagctaaaggaggatgtttgaacccatcacaaagaagctaaaaaccttgaaaaaaggttggacgaatagctaactagaataaaagcatagagaagaccttaaatgacctgatggagctgaaaaccatggcacgagaactacgtgacgcatgcacaagcttcagcaaccaattc

SEQ ID NO: 872112 - DNA, 599 bp, Homo sapiens
atctaattctcacaacaatacgtaatgtatgcttttactccactttacaaatgagaacatctaagcccaaagtcacatagctagaaaaactgcagagcaggacttaaacccagttctatctaaatacaaagaatgtgccctttaacacartggtaaataagaaataaagttcactagaatatcacttaaatgaaactgttggcctttctctcctggacagataatgtaaacacagcagtcatgaccaatttcactcccaccttaagaagaaccatcagaaagtaggtaagtgataaagggaataaccaagtcaactctgaatctgctgtagttaatgagggaataaatgatttatctaactcattggttaaaagattatctgaaacaaaaggataaaagcattactatgaaacttaaaacatatgtaaaatagttggacattattttttatgaaagacaaagaataaaacagatatggatcatgaatattttcattttagtgataaggattgtatttaaatgtagtaaaatatacataaaatggaaacattttacaatttagagatatactatggattggcacatgtatgtacattggg

SEQ ID NO: 872113 - DNA, 596 bp, Homo sapiens
caaatatgcatatgatgctccacattatacatcatcggaaaaatgcaaattaaaacaataatgagatattactacatacctattaaatggccaaaatctggaacactgacaacaacaaatgctggtgagaatgtggagcagcagaactctcattcattgctggcaggaaagcaaaatggtaaagccactttggaggatagtttagtggtttcttaccaaactaaacatatctttaccgtataaaccagcagctgtactctttggtgtttcccaaaggagtcgaaaacttatgtccacacaaaaacctgcacatggtttcttatagcagctttgttcatgatcaccaaaacttggaagcaagatgtcttggaagcaagaataaataaataaataaataaataaacaaataaataaacaaacatgttgagaatggaatattattcagtgctaasaagaaatgaactatcaagctatgaaaagacatgaaggaaccctaaatgcatattactaagtaaaataagccaatctgaaaaggctacatactgtatgattccaactatatgacactgtggaaaagccaaaactatagggataat

SEQ ID NO: 872114 - DNA, 584 bp, Homo sapiens
atcatacaaaatgtatcccttcatttaaatacttctcatatatactatgcaccaggcctcttgtgctaaagtacattttgaaaatgagtggaaaaatacatttaattttgtatgttttccaaataactttctcataaaattttcctaattctctcaaaacagtatgtgaatatgcctactttttttggacgtgataacaccgcaatgggtcagtctttcaatccttgagattccttttttttttttttttttttttttttgtgatggagtcttgctctgccacccaggctggagtgcagtggtgtgatctcagttcactgccacctccacctcctgggttcaagcaattctcctgtctcagcctcccgagtagctgggattacaggtgcgtgccaccaagcccggctaattttttgktttgttttgtatttcagtagagacggggtttcactgtgttgcccaggctggtctcgaactcctgagctcagacaatccacccgccttggcctcccaaagtgctgggattacaggcgtgagccactgcacctggccagtccttgagatttcaataggcaaattctatc

SEQ ID NO: 872115 - DNA, 675 bp, Homo sapiens
tgccaatttaatgtatgagttccttctagcaataatcaatatttaaaaatgtaaacacttaagaagaatttgagttaaaatgtaagtagtccatgatctccttattataaataactactcaagaatatcttttcttaagtgaggagtaattgaaaaaaatgtacccttcttattttaaggattaagacaggtacatttaaaatcaaacataaggtaaggttttaattcaacagatattcctagtaagtttatataaaccatattaagtagttggaaatgcctaattatggattttaaaataaataatccaagctcatccttacgtagtgaaaggtaagaaaaaaagtaaaaattcttactattgtcatctccataagggaaatgtaagtgaagtatttccataaatcctactatatgctcatcactataatgatatggagaatctgacctactaaaygaatatgtctgattcatctgaaacacaatacttatattttatattattaaagaacattgcctgaattattttgatcagtatttaaaaggtttcttatgtcatagagaaagttgggtaagaacaaatgatacttacaggggccactcccatatgacatgtaaaagttaaaaaaagaaggaagacaaatgtctatggaaatgatgaagatctatggaaaa

SEQ ID NO: 872116 - DNA, 616 bp, Homo sapiens
tgcctgcctctgtagactccacctctgggggcagggcatagccgaacaaaaggcagcagaaaactctgcagacttaaatgtccctgtctgacagctttgaagagagtagtggttctcccagcacggagtctgagatctgagaatggacagactgcctcctcaagtgggtccctgaccgccaaggagcctaactgggaggcaccccccaataggggcagactgacacctcaaacggccgggtacccctctgagatgaaacttccagaggaacattcagacagcaacatttgctgttcagcaatatttgctgttctgcagcctccactgctgacacccaggcaaacagggtctggagtggacctccagcaaactccaacagacctgcagctgaggaccctgactgttagaagggaaactaacaaacagaaaggacatccacaccaaaamcccatctgtacctcactatcatcaaagaccaaaggtagataaaaccacaaaaatggggaaaaaacagaagagaaaaactgaaaattctaaaaatcagagcacctctcctcctccaaaggaaagcagctcctcaccagcaacggaacaaagctggatggagaatgacttt

SEQ ID NO: 872117 - DNA, 679 bp, Homo sapiens
acactgggtgcagtgttccaaacccatccctactctcctgacaattatttggaatccaggtcatctcctaagcacaggccaggagtggctgcgggaaggtattgctttgcttcatgaggacaacctcccgggtagaggttttggcatagggaagggaaggggtgggggctctttaaatcttgtttcccttagtacccacctgagtctgcacaatcctcactgtggcaaatgccccatattaaacctaattctacttaaccactatcrcctttagtattattgggctctttttgttgttacagtaggtcccttttgatcatcacgaatttcgggatttctgagcaaatccaattcactctccccaccacttgctgatactgaaggttttgttactaccctgtccccagcctttacccttccaaagctctctgtcagccaaagctcaccacctttcttggccttctccgatgtcccacacctccctccaccacagggttctatgcaccagcagccagaaccacatagagcataacataagaaccaggctgtgtgaggcgctcaatgagggtgtgcgactccaccccagacccgtcagggatccttcggggggcacttctgaaagcatcagctgtgactactcgcactttcaaaccacctctcatgggaggagagcacctcc

SEQ ID NO: 872118 - DNA, 475 bp, Homo sapiens
tccttagtcactggtaaccacattgatgctaatttgaatcaacagatctcctttgtaccttgctttctctttggcatttgtcatgttgatcattttctccttagtcactggtaaccacattgatgctaatttgaatcaacagatctcctttgtaccttgctttctctttggcatttgtcatgttgatcattttytccttcactttccttggcttagttataccatactcgcccccaaccccaccctcttagtcattctcagtgttctttgcaagatatctttcttgtctgtcccttaaatattggtgaccgtcagcctaccaggccttggtcctcttctcgtttcattctacatgcagctcctggtgtatagtctgtgatggtgagatccctgtctttagcttcatattgataattttaaatacctcttggattgttccacttgaagttgctacaaataatcaattttaaaatgt

SEQ ID NO: 872119 - DNA, 614 bp, Homo sapiens
aagtcccaggatgaaatcacaagatgatggagaactgccctctcatgatgtgaagcatgtgctcagcagaggacaaattcgaggtaaattcaaggggccctttggacaagactgctattgcctctccccagtttggccacagtacagtgaaactctaggaaatgcctgtttttttggtgtcatgtgaccctcttctctcaagaagagtggcttattttgcaggggtgggtatgactcagatgcctgcacatctcaacccgcctccctattcactgaggattcatgatctacagaataataaggaacatagagccccacagcccaagaagagccaccaagacaatccaccaaagtggggagmcaaaaaaaaaaaaaaaaaaaaaaaagaattgctgaagtgtggtagccacattccttgaagtagactccacttataggcacacacacagaaatccaaccctcacaatactccctcagaaacacacagcccggcaactcccaaagttgtgcagttttgcgggaagccccaactgggagagagcaaccccaaggaaaaaaggcaggctatacctagaaatcacagtggggccagtttcaaaaagactcacccctac

SEQ ID NO: 872120 - DNA, 682 bp, Homo sapiens
ctacatgagtactggccatcaactgcctgaaatagaccaagtaagatcacaaataatcaaggactttctgttgcacagctacactgtggttgttccttgggtaattctagctctctcacttacccaagcactcaacctccagggtgcaaacccagtgcttccttgtggggagcacccactccacagttgggtgggtgagtaggacagggcrcatgggatgagctggcttagaaagtcagaaggagccgagtgaccagggggttaaggtctattatagcaccatgcatcaggcagttgctatggcagcagaaggagggagcacctaactacttactcaattatcatgtagactgcacaggctttctctcaagagaaaactcccattctttctagtttccctttaaaatccagcaaaagaaagaccattttttataatcttcgtgtcttcctgcactgcttggccatcagcctgaactgtttgttcatatctcatgcaatcgtgcaccaggcactgctcttcaggcctgtgtgtattacctgattcaatcctcacagcaattttaaagcctagctccaacactcagtggctcttatgggcacctgctgtgtgctgcaggacacaggcttagaaccaggaagattgagctccagatctgccctctccctcctagacccagaaagt

SEQ ID NO: 872121 - DNA, 616 bp, Homo sapiens
tggtgaaatcgcaaatatcacacatttaatagacagaatatcaacggttcataattattgaggaaacagtgaagattttagcttcactgtggtttttagatttgaacatcagatatgaaaacatttgttggcctgtaattttttatttgctcaacttttgatattttgggggagttttaataaatatttccatgaaagtattcaagtaaagtgccatgaatctttgcacagcgatcactgcctcatcagggtgctgcggtgcagcaagatttatttatgtgytgctgcactgacagtgttctcaagagggaagggttggttattccattctgccacaaattgataaataacactcatgtgttttgccgtggaacttcttcaagaagatggatgtgatgtctgtatcagctcaaacttatcagcttgagtgaagatgagacacatccatgttcctgcagaacttgagtctggtccaaattcaatcacctggatgcaggtgtaatgtcccccagtggaatgggtgcaccatgaactggaaatcagctgcccacacaccaccatggatggagcacgtggttatgcatgtatccttgaatttgatattttttgtttgttt

SEQ ID NO: 872122 - DNA, 625 bp, Homo sapiens
aatttccatcttaagtcaaaattgcatatcctagcaaaagttacagtgtgtgttaggtacctggtcaatcataaagtggaacttttttggatcattcatgggtagtgacaagcatgatgattagagattcagccaaaggaacatcttgacacacatctccaataatatgttcttttccatgatcaatgaagacatttaccatgggaatgaaggagaccaaattaccattttctacattaattcatcaactcacaatgcgaaccccatgaaatagttctcttcttttgttcttaataatttgtatcttttaactcccaacttcttgactgtgtctgacttctggctacatacattgggtgaaattgtcacattttattaatatgtcaatttttcatttacatcctggttcacctctttcttgttttatgactttggacataacccctgtaaaatagcatataagagcgttagtttcctaatttttyttccccagaatactaagtagacaataattttaaaatacacacaggcacttgaaaaataatagtaattacaaataaaatatatgtatatatataaaaatatgtgaatcaatgatatatatatcatatatatacatatgtat

SEQ ID NO: 872123 - DNA, 676 bp, Homo sapiens
tcatctggaaaatggggatgataataagaatatgatctatctcctccagattattgtgatgattacatgaaaaatgcacataaagcacttagaataattcctgggacagtcgtgtaactcaagcaatgttagttattataacactatttttttcactcacgcatatagcctctatgtaatacaattaataactaaatttcagaaatgttgccttgtacttttcagaaatatgatgggtcagaaggactggtgtggatatatggtggaataaagtactaaattagaaggataaaagagttattttaagtttcctgaaaaggacatggttaagtcttagttctgtaattagataatacttcaaaggattttagtaacattagagagaaggaggtctgagaaaatattctagctgaaaaaggaaaaatttggaggggaattcatgaaagcataccgcatcccggtaacattaaattttgctaagggaaggtttgggcttgcaagaatcataatattaytcgaatcagaaagggagatcaaactcagctaaatgtaatttgcattaaacattttatttaaaatgtctatttttaaagaaaatataggatttaatgtgtattggcatgaatggagaattagaattagcccaaaatacacattaaatccaagtttttggagg

SEQ ID NO: 872124 - DNA, 617 bp, Homo sapiens
gtcaaaccacatattttgaccatacctcccagttccaggattcccatttatgccatctggcttggagcacatgttcatagctagtatggtatgagtatggaatcaagaaatggattcagatgctctagagacattggtggctagagtcgttgtaggttagaaaaaggacatttgtttacacctaaaaatacccaaggtgttcaagttcaatcaaaagagagtatgagtttcaggatrtgtccactggttgctgctattctcatttcccatcagagattcctaggcaggaccctgtgcaaacatctgcataagaaaaatcatctcaccacttccaggtgtggtataattttcctctctttagtaacaaacccacatgcttcatttcttccaaagcacacttcaaacctcacatcttacacagtatgcttcctcaggaagccagagaagctgagtgtccctacttgatctccaaaagcccagccatttcattccctttctggttctatgtgtcttgggttggccaggtcctgcagctcatctcagtcactagcaaagttacacgtaccccatgacataactgaacaagcagaaataaggggggtgaagagggagtcgag

SEQ ID NO: 872125 - DNA, 595 bp, Homo sapiens
aaatgtggactgcagaagagaaaataatgtaaacaggatactcagatcatggaacatgtaaagcagtatgattaaaaaggaatgtgagtatgtcattaaacaggcaggggaaatgagatctcccagaatcaggtgagaagtttccttttctactgaaatgggagkctgggaaggttggacttcagggaaggactttggctttagtgaaatggctgaaaaggcatccaagcagatcaaaccaaagcaaatcagaaggatccactattactttcccaatctcagtctcttgattccattaatagtctcaaaagtgagcctctaattagcaatttgacctccttgccaagaattgcccagagaagttcgcttttctaaggacacagccagtatgttagaaagtatagcttttgtacaaatttagacagtgacattctggttcagaaattcattcgccttttagttgggttggtaggagttgaactgtgagaaccagatcagccagagctgcaggcccaccagcagagctccccgaaggagcaaagttgttgggcctctgcacatgcagtaattcttggcaccttccacttcctttgcc

SEQ ID NO: 872126 - DNA, 681 bp, Homo sapiens
agagaagacccaaacaaatggagaaacatgtcatgctcatggataggaagaatcaatatcattaaaatcgccatactgcccaaagcaatttacagattcaatgctattcttatcaaactaccaatgacattcttcacagaactagaaaaactatttaaaaattcatatggaaccataaaaagagccaaggccctaagcaaaaagaagaaagctggaggcatcacattacctgacttcatgctgtactataaggctacagtaaccaaaacaccatggtactggtacaatacaracacataaatcaatggaacagaatagggagcccagaaataaagccaaacatgtacaaccatctagattttgacaaaactgacaaaaacaagcaatgaggaaaggactctctattcaataaatcgtgctgggacaactggctaaccatatgcagaagattgaaactggactccttccttacatcatatacaaaaatcaactcaagatagattaaagacttaaatgtaaaactgaaaactataaaaaccctggaagacaaccaaggcaatataccatcctgaacataaggacaggcaaaaattttatcatgaagatgccaaagcaatcgcaacaaaagcaaacattgacaaatgtgatctattaaacttaaaacctggctgggcatggtgg

SEQ ID NO: 872127 - DNA, 594 bp, Homo sapiens
ccaggatggactatacattgggacacaaaataaatcccaaaaagtttattaaacaaagtttttaaattatactttaagtactagggtacatgtgcacaacatgtaggtttgatacataggtatacatgtgccaagttggtttgytgcacccgtcaactcgtcatttacattaggtatttctcctaatgctatccctctcccaggcctccaccccccgagaggtcccagtgtgtgatattctctgccctgtgtccaagtgttctcattgttcaattccctcctatgagtgagaacatgtggttttctgtccttgtgataatttgctgagaatgatggtttccaacttcatccatgtcaccacaaaggacatgaactcatccctttttatggctgcatagtattccatggtgtatatgtgccacattttctttatccagtctatcattgatggacatttgggttgttccaagtctttgctattgtgaatagtgccgcaataaacatacgtgtgcatgtgtgtttaaaagtagcatgatttataatcctttgggtatatatccagtaataggatagctgggtcaaatggtatttcta

SEQ ID NO: 872128 - DNA, 626 bp, Homo sapiens
attaaatgactactgagacttttggcagaaccagaaaaaaaaaactattttaaaatttatatgaaaccaaaaagaatccaaatcaccaaaggaattctaaacaaaaagaacaaagctggaggcatcacactacccaacttcaaacaatactacagggctacagtaaccaaaacagcatgatatcagtacaaaacagacacgtggaccaatggaacagaatagagaatccagaaataaggccacacaactacaattacctgatctttgacaaacttgacaaaaacaagtagtggagaaaggattccttattcaataaattatgctgttataactgactagccatatgcaaaagattgaaactggacctctttcctacaccatatccaaaaaaaaaaaaaaaaaaaagaaaaaaaactctatatggattaaaaacttaaaggtaaagcaaaaactataaaaaccctgaaagrcaacttaggcaataccattcaggatatagtaatagacaaagatttcataatgaagacaccaaaaccaattgcaacaaaagtgaaaattgacaaatgggaactaattaaactaaagcttctatatagcaaaagaaactattaacagagtaaccagac

SEQ ID NO: 872129 - DNA, 627 bp, Homo sapiens
tataagttttatatgttggtttccattttcatttgtctcaacatatttttaaatttttgttttatttatcttttaactcactggctgtccaggaatgtgttatttaatttccacatatttgttaatcatctaattttctttctgttattgatttctaattttataccattggtgtcagaagagatacctattatatgaaccttcattaatttgtgaagatttgttcagtgacctaatatatgatctgccctgtagaatgttctgtgtgtgcttgaaaagggtatgtatcctgctgcagttggatgtgatgttctacacatctgctaagtccatgtggtctataatatctttcaatccattggtcctttrttgactttttttgtctggaggaactatttagtgtggaatgtagggcattgaagtaccctaatattatggtgttgctctctatttttcttttcacttcttttaatcaattgatatcatgtatcaaaacagaatgaagaatcaaaagcatattttctcaatagatgtagaaagagcatttgacaaactttgacatccttttgttacaagtagttagacaggcatgagcctggcaagagaggactctcccctccctgcacc

SEQ ID NO: 872130 - DNA, 595 bp, Homo sapiens
gggcctgttaacaagaacctctctcactttgctgtattgtttttcctttttcgtttttgtccaataaattccataagcccctcacccttcaaaatgtctgagagcctaatctttcctgttcatgtcacaagaacctagtttttagctgaactaagaagaaagtcctgcaacacttttggcacccaacgtggggcttgagaaagggtgagtaagagacaaaacaaaaaattgttttttctttcactcctaagcacttttttcctcaaacttctgaaggtagatgaaactgtgcccccactccctgttgctcctggggattggaaatgtttgcctcagtccaacccagccttttcctggccttttccttctttttttcagcatggtagagcaagcaagctgtggtttcctgccaccttcccygcaccccaagcagggctaggatgcatggcccaagggccccacatggctggctagttatctctacctcctatccatggagtctcttcctccctagccagggagtccagctccatcccacagcaaattaatgtctcttgctagtggaggaactatttgcataagaataagaggttct

SEQ ID NO: 872131 - DNA, 541 bp, Homo sapiens
ttctcctgtttgcttatttgtctatttgtttttgtttatgcattctaagtagcaacttttttttttttttttgagacagagtcttgctctgtcaccaggctggaatgcagtggtgcatctcagctcaccgcaacctccgcctcccgggttcaagcaattctcctgcctcagcctcctgagtagctgggactacaggcaagcgccaccatgcccagctaatttttgtacttttagtagagatggggtttcaccatgttggccagaatggtctagatctcttgaccttgtgatccaccctcctcaggmtaccaaagtgctgggattacaggcgtgagccactgcgcccggccaagtagcaacatttttgtcttttcatctcatttactcctaaaaacaacatgaacaatttccgtgaacaaagatccactgcagtcaaactattttgtttactctatttatcctttttcttattaaggtaaaccatgcaattttggcctctgaactagtgtaaggacttaatgcctctacttagtatctgaca

SEQ ID NO: 872132 - DNA, 635 bp, Homo sapiens
ctaaaccagacacagtcattacaaaaaaggaaagctaactcatatctctcatgaacatagatgcaaaaaatccccaacaaaatatcagcatatttagtctaacaatgtatacaaaattatatatcatgaccaagtgggatttgtttcaggtatgcaaggctgattcaacattcaaaaattaatgaatgtaatacatcacatcaacaggctaaagaggaaaaatcatatgatcatatcaacagatgtaaaaacatcatttgaccaaactaggaatagaagatgcactcattttctagggctgctctaacagtgccacagaytgtgtggcttgaaccacagaaattaattttcctacaattctgaagttcagaagtctgagatgaagatgttgatagggctgatattttctgaggcctcgctccctggcttgatggcagatgactgggccatcttcttcctgtgtcttcacacgggcttccctctgtacatgtctgtgtccaaatttactctccttatattggattagggcccaccatagtgacctcactttaacttaattaccttttaaaagagcctatcaccaaatatagtcacattctaaagtactggatattaggacttcaacatatgaatct

SEQ ID NO: 872133 - DNA, 635 bp, Homo sapiens
ctaaaccagacacagtcattacaaaaaaggaaagctaactcatatctctcatgaacatagatgcaaaaaatccccaacaaaatatcagcatatttagtctaacaatgtatacaaaattatatatcatgaccaagtgggatttgtttcaggtatgcaaggctgattcaacattcaaaaattaatgaatgtaatacatcacatcaacaggctaaagaggaaaaatcatatgatcatatcaacagatgtaaaaacatcatttgaccaaactaggaatagaagatgcactcattttctagggctgctctaacagtgccacagactgtgtggcttgaaccacagaaattaattttcctacaattctgaagttcagaagtctgagatgaagatgttgatagggctgatattttctgaggcctcgctccctggcttgatggcagatgactgggccatcttcttcmtgtgtcttcacacgggcttccctctgtacatgtctgtgtccaaatttactctccttatattggattagggcccaccatagtgacctcactttaacttaattaccttttaaaagagcctatcaccaaatatagtcacattctaaagtactggatattaggacttcaacatatgaatct

SEQ ID NO: 872134 - DNA, 580 bp, Homo sapiens
attttgtaggcagaacaaaaggccaaaattaaccatgaccttttaaaggtgatacatgttaggtggctcatgaaaacaaagaaatgagaagatgcaaacttactcaacaagctacttgataaccctatggttaagttatttctaaggaactcattgatcatataggaggcagcatgttaccatattggaaagggtagagaagatgtcaagtaagatttctattaggaagttgagaattgaagaattgcattacctggagaagaaacaaagagaatctcatatgcaaagatacagagatgagtgtgaacatgtctgtctctgaaaaaatcaagstatttggcatgggtagaacatataatgtgaggatgggagtagtgacagatgatgtggaaaagttaagaatgggttggattgggcaaggcaactcaagttttacaaagatgacttgatttcattatgaaggcagtgaaacatcactgaaaggtgaaataagaataaaatgtatgtattagaaaggtcacttgagtagtttgaggaagatggatcaaactggtgaagtatacaggaactggagcactgc

SEQ ID NO: 872135 - DNA, 659 bp, Homo sapiens
atcttgatgtctttcaaaagggtgaaaaaacaagctctactattgtaaatcaggaaagacataccttaaataaaagccccaaagtataatgtaattttaagaagggaagtattgctgcttccagaaacatatcacagggggtgtcattcaatgtaggggtcaaggaaacatatttaggttcactgctgctgcagtgtctcgaaaagtctttatgctgatcaaacaaggtagaatattccaaatggaatgaacacarttcataaagaacttatgaataattgaaaaaaattaaggatagctgaaatatggaatatgcaatgcaacaacagaacaagaagtctatatgtgcatcatctggcacttaattggttatgaataaatatttgttgaataaatgaagctggtgaagagagattatgtcatgctgaggagtctgtattccattctaaaggcaatgaatgggatacctgtagatgtgtttcttaatgactattctggcttcagcgtgaagactggtgtaaagcaggataagattaagaagaggaaggctatttaggggtttgtggtcatggttcaggagagaggtgatggatggcaagagtaaaatcagagaaaagttaacagatccaagagatatttaaggaatgggatcaacggat

SEQ ID NO: 872136 - DNA, 659 bp, Homo sapiens
atcttgatgtctttcaaaagggtgaaaaaacaagctctactattgtaaatcaggaaagacataccttaaataaaagccccaaagtataatgtaattttaagaagggaagtattgctgcttccagaaacatatcacagggggtgtcattcaatgtaggggtcaaggaaacatatttaggttcactgctgctgcagtgtctcgaaaagtctttatgctgatcaaacaaggtagaatattccaaatggaatgaacacagttcataaagaacttatgaataattgaaaamaattaaggatagctgaaatatggaatatgcaatgcaacaacagaacaagaagtctatatgtgcatcatctggcacttaattggttatgaataaatatttgttgaataaatgaagctggtgaagagagattatgtcatgctgaggagtctgtattccattctaaaggcaatgaatgggatacctgtagatgtgtttcttaatgactattctggcttcagcgtgaagactggtgtaaagcaggataagattaagaagaggaaggctatttaggggtttgtggtcatggttcaggagagaggtgatggatggcaagagtaaaatcagagaaaagttaacagatccaagagatatttaaggaatgggatcaacggat

SEQ ID NO: 872137 - DNA, 659 bp, Homo sapiens
atcttgatgtctttcaaaagggtgaaaaaacaagctctactattgtaaatcaggaaagacataccttaaataaaagccccaaagtataatgtaattttaagaagggaagtattgctgcttccagaaacatatcacagggggtgtcattcaatgtaggggtcaaggaaacatatttaggttcactgctgctgcagtgtctcgaaaagtctttatgctgatcaaacaaggtagaatattccaaatggaatgaacacagttcataaagaacttatgaataattgaaaaaaattmaggatagctgaaatatggaatatgcaatgcaacaacagaacaagaagtctatatgtgcatcatctggcacttaattggttatgaataaatatttgttgaataaatgaagctggtgaagagagattatgtcatgctgaggagtctgtattccattctaaaggcaatgaatgggatacctgtagatgtgtttcttaatgactattctggcttcagcgtgaagactggtgtaaagcaggataagattaagaagaggaaggctatttaggggtttgtggtcatggttcaggagagaggtgatggatggcaagagtaaaatcagagaaaagttaacagatccaagagatatttaaggaatgggatcaacggat

SEQ ID NO: 872138 - DNA, 601 bp, Homo sapiens
ctctcacaagaacacaattagagtaactgcccccatgactcaattacttcccaccaggtccctcccacaacacatggggcttatgggaactacaattcaagatgagatttgggtggggacacagccacaccatttcattccacctctgacccctcccaaatctcgtgttctcacaattcaaatacaatcatgcccttccaacagtccccccaaagtcttaacacatttcagtattaacacaaaagtccaagtccaaagtctaatctgagacaaggcaagtcccttctgcctatgagcctgtaaattcgaaagcaagttagctacttcctagatacaatagggtcacagtcattgggtaaatacacasattccaaacgggaggaattgaccaaaaccaaggggctacaggcctcatggaggtccaaaatccaatagggccattgttaaaccttaaagtttcaaaattatctcctttgacttcatatctcacgtctaggtcatgattatgcaagaggtgggctcccacagctttgggcagctctgcctctgtggctttgcagggtacagccccactccaggctgcttttacaagctagtgttg

SEQ ID NO: 872139 - DNA, 625 bp, Homo sapiens
gatataaagcagaaatggggaggtctgggctgtcttccaagatcttttgttttcaacttgacattgtctctttttacatctgctgtgaacaaaatggtgaagcagataaaatataccttcgatgtctcccacgtcttatatttggggttccctgcaagcccttggcacccgcgggcctggctcccagctcccagggcctgtgcagtgctgtcctgcggcattgtcccatgctcctcagcttctctttccccaggaaaatttacttctccagtgttttgtgtcctaggaccctgttctctgtgctgtgaatatgattactcttgggtaaatgtgctgtttctctttgggtcacatattgcatttcagcaggcacctcccagagtttgccttaaccaaaggagtttacagtaggcagcygatatctttgggtgggtgtagcctgaaattgcactctatgctattaatcctttcagtagagttgggtttgccccttccatattatgtctttaattgcagaatggtgctatctggaccctgagaaaagttttgcttttaactgaatacccatgtacacaggatctgatagaatacacctgagttccttacttctgctcaagatacactt

SEQ ID NO: 872140 - DNA, 688 bp, Homo sapiens
ttccatgtagttgtgtggttttgtgtgagtttcttaatactgagttctaatttgattgcactgtggtctaagagactgttatttccgttcttttgcatttgctgaggagtgttttgcttccaattatgtggttgattttagaataagtgcagtgtggtactgagaagaatgcatattctgttgatttggggtggagagttctgtagctgtctattaagcccacttggtccagagccgagttcaagtcctgaatatccttgttaattttctgtcttgttgatctgtctaatattgacattggggtgttaaagtctcccactattattgtgtgggagtctaagtttcttgtaggtctctaagaacttgctttatgaatctgggtgctcctgtattgggtgcatatatatttaggatagttagctcttcttgttgcattgatccctttaccattatgtaatgcccttctttgtctcttttgatctttgttggtttaaagtctgttttatcagagactaggattgcaaygcctgattttctctgctttccatttgcctggtaagtattcctccatccctttcttttgccccaggctctttgcatagtattaagagcaagcctggaacatggacccttttctcccttcttgcggtcattgccccctgttaaatgtagccaaaatgttctgaga

SEQ ID NO: 872141 - DNA, 617 bp, Homo sapiens
tgattttcatttacatcttggacattttggatattatgagactctggatcttatttaaatctcctgatttagggctcctctggtttcacatcaccaaggggaaggggccttgcctgtaactgccaagtgagggtgaaagtccagctcccccacagcctttagtgacacttgtgggggtgctttgttactcctggggtggatggggggcaggctccacatcaggcttctgctggcaccgcctggctggcagggggtaggggccctcattactggtgtctgcatgccctccactgacactgagggagaggaggggctcactatccctgggaggtggtaaaagtcctggcttctcactcagcctcttctggctccaccctaccakgaagaggtggggcacctgggccattatgggaatagtgtactgccgtaatatgaccggctcttatcattttcaagaaactttttacatatacacaaaagtagagagacaaatataatgaattccatatactcatcatccaacttcaacaatgatattttgccaatctagtttcatctgtctcccccaaacttgtcttgcttatatatgttatagcaaaccccagatattatcttat

SEQ ID NO: 872142 - DNA, 562 bp, Homo sapiens
ttcatatgcaggtttttttgtggacataaactttcaaataagctaggtaaatggctaggagtgcaattgctggatcatatggtaagattatgtttagctttgttagaaacattgtcatccaaaaagtaccattttgtgttcccagcaccaatgagtaagttcctggccaggcrtggtggttcatgcctgtaatcccagcactttgggaggccaaggagggcagatcacgaggtcaggagtttgagaccagcctggccaatatggcgaaacctcatctctactaaaaatacaaaaattagccgggcgtggtggcacacactcgaagtcccagctactcgggaggctgagacaggagaattgcttgaacctgggaggcggaggttgcagtgagccgagattgcgtcattgcactttggcctgggtgacagagcaagactctgtctcaaaaaaaaaaaaaaagtttcttcctactgctccacatcaattggtattgctagtttttaaattttagccatttaataggtttgtagtgatatgtcacttttcaatttcctaatgacaa

SEQ ID NO: 872143 - DNA, 548 bp, Homo sapiens
ttatatttatctatctcttctaattcgacataagctccaagagggtaggatctttctttttttcagtcttgctccaaatgcctaaaacagtgtctggggcgtactgggcactcaataaatatttgcttagcgaatgaaggaatgactaattctacagaatataaagacatcaatagttttctcccagagaggtgttagttgtgttaaattctaamctgttttaaaaatttcaaagataaaagaaagactttaatgacctagagttaaaaaaattacccttgccaccattttttcctgataaactaaaatgcttaaaatgactcaattgtctagaggactctcatgatctgaagttgtctacctctttgatactccctcctaccactctcaccacagctcaggaggcttcagccaccccagccaatacacaaagccttttgccatgttagggtgtttgcccttatccatcccctagcttctacccccaaatccttcatggctggccctttcatatcactttgcctcagatcagatgtcacctcttcaga

SEQ ID NO: 872144 - DNA, 644 bp, Homo sapiens
tatgacaaccatctcaatctgctcaagtagcactcatggtgagggtgaaattttatcaacattggttaacttatggtgttttaaaaaactagcaaggagataaattgatggattaaaagataaactactcacaggcagacaaacagaaggacagatagagttacaatcaaacatgtactttactcaggcagaaagataataaccagcccccaagaagtgatgtgtctgctagaaaagccctgaacatagaatttcctgactttgtttttaatttagttctttcaggcatcacgctgcataaccaggtgtaactctctaaaagtctctatgacagaattttccatctgttaaattaggctaataatattttcatctttttttagggtaaagatgtgaaatatttgkagaactctggaaaacatgccccctactaattagagctttttgatgtgacatcattttcttcagtacttggagtttagtcaatagatatacagtgtagctgtgaaattatgaagcatgagaatgcattaccaagggaccgtaggaggctctttactgaaaagtgtagctggctatatttctggaagtaatttaaacataggctgagggagaggagtaccctctagatcctttccagacct

SEQ ID NO: 872145 - DNA, 626 bp, Homo sapiens
aagttcaaagtaccacaaatctctagggcaggggcaaaatgccaccagcctctttgctaaaacataagagtcacctttgctccaattcccaagttcctcatctccatctgagaccacctcagcctggacattgttgctcatatcattatcaacatttttgtcaaagccactcaacaagtctataggaagttccacacttttgcacattttcctttcttctgagccctccaaactgttccagcctctgcctgttaagtagttccaaagtcacttccacatttttgagtatcctttcagcaatgccccactctatccttatgaatttactgtattagtccattttcacattgctgataaagacatacccaagactgggcaatttacaagaaaaagaggtttaattgtacttacagttccacatggctggggaggcctcacaatcatggtagaagrcaagaaggagcaagtcacatcttacgtggatggcaacaggtaaaaagagaacttgtgcagggaaactcctgtttttaaaaccatcagatctcatgagactcattcactatcatgagaacagcacagaaaagacccacctccataattcaactacctctcatcaggttcctccc

SEQ ID NO: 872146 - DNA, 666 bp, Homo sapiens
tttgaaactctctttttgtagagtttgcaggggacatttggattgccttgaggcctatgatggaaaaggaaatagcttcacatgaaaactagacagaagaattctgagaaaccactttgtgacgtgtgcattcatcccacagagttgaacctctctttttattgagcagtttggaaacactctttttgtagaatctgcaagtgtacatttggagtgctttgcagcccatkgtagaaaaaaaatatcttcacataaaatctagacagaagcaatctgggaaacttctttgtgatgtgtgcattcatctcacaaagttaaaactttcttttgattgagtagttttgaaacactctttttgaagactctgcaagtggacatttggagcactttgaggcctatggtggaaaaggaaatatctccacataaaaactagacagaagaattctgagaaacttctctgtgatgcttgtattcatctcaaatagttgaacctttctttcgattgagcagtttggaaacactcttttggtagaatctgcaatttcaaatttggagctatttgcggcctatggtagagaaggaaatatcttcacatacaatctagacagaagcaatctgagaaactgctttgtgatgtgtgcattcatcttacagagttaaacctta

SEQ ID NO: 872147 - DNA, 666 bp, Homo sapiens
tttgaaactctctttttgtagagtttgcaggggacatttggattgccttgaggcctatgatggaaaaggaaatagcttcacatgaaaactagacagaagaattctgagaaaccactttgtgacgtgtgcattcatcccacagagttgaacctctctttttattgagcagtttggaaacactctttttgtagaatctgcaagtgtacatttggagtgctttgcagcccatggtagaaaaaaaatatcttcacataaaatctagacagaagcaatctgggaaacttctttgtgatgtgtgcattcatctcacaaagttaaaactttcttttgattgagtagttttgaaacactctttttgaagactctgcaagtggacatttggagcactttgaggcctatggtggaaaaggaaatatctccacataaaaactagacagaagaattctgagaaacttctctgtgatgcttgyattcatctcaaatagttgaacctttctttcgattgagcagtttggaaacactcttttggtagaatctgcaatttcaaatttggagctatttgcggcctatggtagagaaggaaatatcttcacatacaatctagacagaagcaatctgagaaactgctttgtgatgtgtgcattcatcttacagagttaaacctta

SEQ ID NO: 872148 - DNA, 612 bp, Homo sapiens
tcttttgattgagcagttttcaatctctctttttgcagaatgtgcaagtggatatttggagccctttgtggcttgtggtcgaaaaggaaatattttcaaataaaaactacacagaaacattctgagaaacttctttgtgatgtatgcattcatctcacagggttgaacctatcttacggttgagcagtttcraaacactctttttctagaatctacatgtggatatttggagcactttgaggcctaccgtggaaaagccaataacttcagataaatactacacagaagcattctgagaaacttcgttgtgatgtgtgcattcatctcacagagttgaacctttcttttgatgagcagttttgaaacacttttcgtacaatctgcaagtggatatttggagccttttgaggccttttgtggaaaaggaaatatcttcacataaaaactacacagaaacattctgagaaacttctttgtcatgtgtgcattcaattcacagagttgaatctttcttttgattgaacagttttgaaacactttttttgtacaatctgcaagtggataattggagccatttgatgtctattgtggaaaagaaaataccttcaatta

SEQ ID NO: 872149 - DNA, 612 bp, Homo sapiens
tcttttgattgagcagttttcaatctctctttttgcagaatgtgcaagtggatatttggagccctttgtggcttgtggtcgaaaaggaaatattttcaaataaaaactacacagaaacattctgagaaacttctttgtgatgtatgcattcatctcacagggttgaacctatcttacggttgagcagtttcgaaacactctttttctagaatctacatgtggatatttggagyactttgaggcctaccgtggaaaagccaataacttcagataaatactacacagaagcattctgagaaacttcgttgtgatgtgtgcattcatctcacagagttgaacctttcttttgatgagcagttttgaaacacttttcgtacaatctgcaagtggatatttggagccttttgaggccttttgtggaaaaggaaatatcttcacataaaaactacacagaaacattctgagaaacttctttgtcatgtgtgcattcaattcacagagttgaatctttcttttgattgaacagttttgaaacactttttttgtacaatctgcaagtggataattggagccatttgatgtctattgtggaaaagaaaataccttcaatta

SEQ ID NO: 872150 - DNA, 612 bp, Homo sapiens
tcttttgattgagcagttttcaatctctctttttgcagaatgtgcaagtggatatttggagccctttgtggcttgtggtcgaaaaggaaatattttcaaataaaaactacacagaaacattctgagaaacttctttgtgatgtatgcattcatctcacagggttgaacctatcttacggttgagcagtttcgaaacactctttttctagaatctacatgtggatatttggagcrctttgaggcctaccgtggaaaagccaataacttcagataaatactacacagaagcattctgagaaacttcgttgtgatgtgtgcattcatctcacagagttgaacctttcttttgatgagcagttttgaaacacttttcgtacaatctgcaagtggatatttggagccttttgaggccttttgtggaaaaggaaatatcttcacataaaaactacacagaaacattctgagaaacttctttgtcatgtgtgcattcaattcacagagttgaatctttcttttgattgaacagttttgaaacactttttttgtacaatctgcaagtggataattggagccatttgatgtctattgtggaaaagaaaataccttcaatta

SEQ ID NO: 872151 - DNA, 612 bp, Homo sapiens
tcttttgattgagcagttttcaatctctctttttgcagaatgtgcaagtggatatttggagccctttgtggcttgtggtcgaaaaggaaatattttcaaataaaaactacacagaaacattctgagaaacttctttgtgatgtatgcattcatctcacagggttgaacctatcttacggttgagcagtttcgaaacactctttttctagaatctacatgtggatatttggagcactttgaggcctaccgtggaaaagccaataacttcagataaatactacacagaagcattctgagaaacttcgttgtgatgtgtgcattcatctcacagagttgaacctttcttttgatgagcagttttgaaacacttttcgtacaatctgcaagtggatatttggrgccttttgaggccttttgtggaaaaggaaatatcttcacataaaaactacacagaaacattctgagaaacttctttgtcatgtgtgcattcaattcacagagttgaatctttcttttgattgaacagttttgaaacactttttttgtacaatctgcaagtggataattggagccatttgatgtctattgtggaaaagaaaataccttcaatta

SEQ ID NO: 872152 - DNA, 539 bp, Homo sapiens
atcagaaggaaatttcaactatgtgagtagaatgcacacatcacaaagtagtttctgagaatgcttctgtctagtttttatatgaagatatttccttttcgaccttaagcctcaaagtgctgcaattatgcactttcagattcttcaaaaagagggtttcaaaactgctctggcaaaaggaagtttcaacgctgtgagttgaatgcacacatcacaaagaagtttctgagaatgcttctgtctaatttttatgtgaagataatcctgtttcccaagaaggcttcaaagcaccctaatatccgcctccagattctacagaaagagtgtttcaaaactgctctatsaaaaggaaggttcaactctgtgagttgaatgcagacatcataaaggagtttctgagaatgcttctgtcttgttttaatgtgaagatatttccttttcaaccgatagcctaaaagagctccaaatgtccaactgcagattttttaaaaagaatgtttcaaaactgcactatcaaaagaaaggttcagctctgtgag

SEQ ID NO: 872153 - DNA, 529 bp, Homo sapiens
ctacagaaagagtgtttcaaaactgctctatgaaaaggaaggttcaactctgtgagttgaatgcagacatcataaaggagtttctgagaatgcttctgtcttgttttaatgtgaagatatttccttttcaaccgatagcctaaaagagctccaaatgtccaactgcagattttttaaaaagaatgtttcaaaactgcactatcaaaagaaaggttcagctctgtgagttgaatgcacacatctcgaagaagtttctgagaatgsttctgtctagtttttatgtgaagatattcgcgattccaatgaagtcttcaaagcgctccaaatatctaaatgcggattctacaaaaagagtgattcaaaactggtctatgaaaaggaaggttcagctctgtgagttgaacgcacacatcacaaaaagtttcggacaatgcttccatttagtttttaggtgaagatattaccttttcaaccacagtcttcaaaacgctccaaatgtccacttgcagattctacaagaagattgctt

SEQ ID NO: 872154 - DNA, 529 bp, Homo sapiens
ctacagaaagagtgtttcaaaactgctctatgaaaaggaaggttcaactctgtgagttgaatgcagacatcataaaggagtttctgagaatgcttctgtcttgttttaatgtgaagatatttccttttcaaccgatagcctaaaagagctccaaatgtccaactgcagattttttaaaaagaatgtttcaaaactgcactatcaaaagaaaggttcagctctgtgagttgaatgcacacatctcgaagaagtttctgagaatgcttctgtctagtttttatgtgaagatattygcgattccaatgaagtcttcaaagcgctccaaatatctaaatgcggattctacaaaaagagtgattcaaaactggtctatgaaaaggaaggttcagctctgtgagttgaacgcacacatcacaaaaagtttcggacaatgcttccatttagtttttaggtgaagatattaccttttcaaccacagtcttcaaaacgctccaaatgtccacttgcagattctacaagaagattgctt

SEQ ID NO: 872155 - DNA, 593 bp, Homo sapiens
ctgctcattcaaaagataggttccactctgtgagttgattggacatatcacaatgaagtttctcagaatgcttctgtgtagtttttatgtgaagatatttgctgtcccacagctggcctcaaaaggcaccaaatagccacctgcagattctgcaaaaaaagacattcaagactgctcaatcaagagttaggttcaactccgtgaggtgaatgcatacatcataaaggagtttctctgaatgcttctgtgtagtttttatttgaagatrtttccttttccaccatagggggtaaagggcaacaaatatacacctgcagatactacaaaaagtgtatttcaaatgggctcaatcaaaagaaaggttcacgtctgtgatatgaatgcacacatcaaaaagaagattctcagaatgcttctgtgtagttttcgtatgaagctatttgattatacacagtaggcgtcatagctctccacatatccactgtcagattgtacaaaaagagagattcaaaactgctccatcaaaatatatgttcaactctgtgagttgaatgcacatatcatgaagaaatttctgagaatgattatgtgta

SEQ ID NO: 872156 - DNA, 593 bp, Homo sapiens
ctgctcattcaaaagataggttccactctgtgagttgattggacatatcacaatgaagtttctcagaatgcttctgtgtagtttttatgtgaagatatttgctgtcccacagctggcctcaaaaggcaccaaatagccacctgcagattctgcaaaaaaagacattcaagactgctcaatcaagagttaggttcaactccgtgaggtgaatgcatacatcataaaggagtttctctgaatgcttctgtgtagtttttatttgaagatgtttccttttccaccatagggggtaaagggcaacaaatatmcacctgcagatactacaaaaagtgtatttcaaatgggctcaatcaaaagaaaggttcacgtctgtgatatgaatgcacacatcaaaaagaagattctcagaatgcttctgtgtagttttcgtatgaagctatttgattatacacagtaggcgtcatagctctccacatatccactgtcagattgtacaaaaagagagattcaaaactgctccatcaaaatatatgttcaactctgtgagttgaatgcacatatcatgaagaaatttctgagaatgattatgtgta

SEQ ID NO: 872157 - DNA, 625 bp, Homo sapiens
tttaaagaatctgccagttcatatgtgcagtgctttggggcttatggtagaaaaggaaatatcttcatataaaaactagacagaagcattctcagaaacgactttgtgatgtgtgcattctacacacaaagttgaaactttcttttgatagagcagttttgaaacagtctttccgaagaatcttcaagtgggcatttcgagggctttgaggaccattgcggataaggaaatatcttcccataagaagtagacagaagtataatcagaaacttcattttgatgtgtacattcaactcacaaagcagacccttacttttgatagagaagttttgaaacagtctttttgtagaatctgcaattggatrtttggagcgctttcaggcctctggtagaaaaggaaatatcttcacataaaaactagacagaagcattctcagaaacgactttgtgatgtgtgtattctactcccatagttgaacatttcttttgatagagccgcctggaaacaatcttcttgtagaatctgcaagtggacatttggagcgtttcgaaggctgttgttgaaaaggtaatatcttcacctaaaaactaaatggaagcattgtccgaaactttttgtgatgtg

SEQ ID NO: 872158 - DNA, 578 bp, Homo sapiens
acttgcccacacctctgggctaatattgatttctactaaggggagacaaagaatctgtcctggaaccgtaaggatggtggctcccatatgggctagaatatctctagtaaaagactgggatgctcaggcatgattaaaaaggcatgagtaaatagcaattcccccctactacaaccgaggggctatgaaaaatattgggttaaagactttccttagacattcaccatggttgtgatatgggaggagagaaggtcaggactggagaggagaacagagaggctggctctggtgtccagaaggaagtctacctttctcctttctacgtccagaatcaaccagggatcctggatagtaatggcagttcgagttgctggagccaagaaattragccctaggacccattagtcctgctggaccatctgggagactggctctggacctagcaacctatatctccagggacagtttgacttccagttgtctccaccacagggtggacagggttgaggtggcttcttcttgctgtctgggcaaccccttttaagtgccccagtttgccacagtggtagtgattagca

SEQ ID NO: 872159 - DNA, 635 bp, Homo sapiens
agagtgtttgcgtttgttattgttgttgatggtggtggcgatgtgtgtgtgtgtgtgtgtgtgtgtgtgtgtgtagaaagagagagagagaggagtttttaagtactgtatgtattttaaggagattgaataatctaaggtgaggagcatttaaaataatagcagaataaaagttaaatacttagaaacatacagcaatgaaacaaaatgacctctaaagggccttttaagtatgtttccatccagaaagggtctctatagcccctatttttattttttattcccattatcccccagaactttccattcttaggtggcatccaagattctgtccattcctgctcaagcccacctgccacctttatccataacagataaacctcctggtcctaccaagccagacaatctattgtcaggaaaatgttttatgattctcttcttctgyaatcttgctggagctcactttccccatcttactgtctcaggtcaggttccctgggaaacagactctgagatggaggttggtggttaagagatgcttaggaagggttcctgtagaagaatgaggacacaggggagctgggatgcatttgctggggaactctggggctagggagcccttcagtgttgtccca

SEQ ID NO: 872160 - DNA, 557 bp, Homo sapiens
aagaatctgaaggctaggatgaagatggcactgttgtgaaataaaacaggtggtgcacctgagctggatatttgacacaccccatggccacaccctccccatgtgactcttctaaagacccaagccagagagtgagacaagaaggaggcagggagyctgggaaggctgtcacttgcctctaagccagttgccaagttgggagagccactgccaaaatgtgggagggacttcttggtagctggcagctcactccaggctcagcagcctctttcctccctcagcctgaggatggccggacaggaggccagaggacaggcacaagttcagggcaggccagcgtcatcacgaagcccctgcagccacttcccttcttcaccagcagctggttcaacaacttgggatccagcatgttgaccaaatattcctgcaggcagacaaggccatgaagggaggaaccaggagaaaagggactcccacataggcctctgattgagtgtgtgagagatggaagtttggggtaagtctggattcataagtagaaagttacctacatggtg

SEQ ID NO: 872161 - DNA, 591 bp, Homo sapiens
aatcaattattttaaaaaactgtcagtgaagccaagatttcagaccttgatttaatagactttgggcttttcctcaatattaacatagtgtcatataaaagcataaccaaaagtctatatttcatcatataaaattagtacttytgggattgagtcagttataaacaaaaaatagataatcacatttttgcctctaaatctgatatgatgaaattgcagaataacagccttcaacgcaggctgcatattagaattgccaaaggaacataagaaaatgctcaggccccactcattctagatattttgagttagaatattgatgtgggtcccagagtttggattttagccaagctcccaaaataattcccaaacagctagccaggcactagtctagtgtcctcatttacttttgtgaactgctggcatagagtacagcttcttttccagggccatgctttgttgtagttgccttttttaaaaaaaaaaagtggtaaaatatgcataacataaaatttactggccaggcatggtggctcatgcctataatcccagcactttgggaggccgaggcagcaggactgcttgagccca

SEQ ID NO: 872162 - DNA, 618 bp, Homo sapiens
ttactctccctgtcagaattctatgcactcggccggggtgtggtagctcatgcttgtaatcccagcactttgggaggctgaggcaggaggatcatttgaggtcaggagttcaagaccagcctggccaacatagtgaaaccccgtctgtactgaaaatacaaaaactaaccaggcatggtgtcactcacctgtaatcccagctattcgagaggctgaggcaggagaatcgcttgaacctgggaggcagaggtttcagtgagccgagatcgcgccactgcactccagcctggatacttattgagattctgtctcaaaaaaaaaaaaaaaaaaaaggattatgtgcactctgtaatatmtttggttatggtagtccataacaaagttatttcctaataactttgttaatatgccgcggaagattgaaaatttgggcaggtaatttatatgatattacattgtaaattaacagctcttaaggaaaatttgccccaagcttttaagctcgggaagtcactggaatcgttttagaaaagaccacaacaacatggcttttgagattttcattctagtatgttaagaattgtattcaaatacaaatgtttgtgtactgatcctcaa

SEQ ID NO: 872163 - DNA, 537 bp, Homo sapiens
gcataaatgtcttcttttgagaagtgtctgtggcattattcacaatagcaaagacttggaaccaacccaaatgtccaacaatgatagactggattaagaaaatgtggcacatatacaccatggaatactatgcagccataaaaaatgatgagttcatatcctttgtagggacatggatgaaattggaaatcatcattctcagtaaactatcgcaagaaaaaaaaaccaaacaccgtatattctcactcataggtgggaattgaacaatgagatcacatggacacatgaaggggaataccacactctggggactgtggtggggtggggggaggggggagggatagcattgggagatatacctaaggctagatgacgagttagtgggtgcagtgcaccagcrtggcacatgtatacatatgtaactaacctgcacaatgtgcacatgtaccctaaaacttaaagtataataataataaaaaaaaaaaagaaccaaaatgaaacataaaagaaaaaaaagaagggaggaaagaaaacaag

SEQ ID NO: 872164 - DNA, 606 bp, Homo sapiens
gcttagtttactcttctggaaagtgagaaaaatattattactgcctcatgggggtaagtattagctgtgaggataaaaagaattactacatgtaaaggatttataattgtacctacataagttaatctttatatccatgatatctttttcataggcttttcagggtcctttaaaagtagtgaataaggccaagcgtggtggcttacgcttgtaatcccagcacttcaggaggctgaggcagacagatcacttgagctcaagagttcaagatatgtcctgggcaacatgacaaaaccctgtctctacaaataatacaaaaaattagctgagagtggtggtgcgtgcctgtggtcacagttgctcgggaggctgaggtgggaggatcccttgagcctgggaggtcaaggcggcagtgagctgtgattatgccattgctctccaggctgggcaagaragtaagaccttgtctcaaaaaaaaaaaaaaaaaaaaaaaaaaaggaaataaatgtaactaataatcattcaaaaacaaacaaaacttacatatattctgataccatgaatgatttaaatcccttaaaataaaatgaaaaaaattgtactttg

SEQ ID NO: 872165 - DNA, 592 bp, Homo sapiens
tatgagaattacatttcagttagtttgcttgattgattaacaaatctccctttcaaagtatagtagttcatattaagttaaccctaactagggctactcatccttgtccatttgtacttaatagtccagccatacaaatgtaggatttctctgcctaaggagtgtgtrtcttaaattatattgcttctttatacaaacacatctttataatccaaattatattgatttcctgggcatgctctataagtttctcaccttcttgaatatattgagcaaggcaacagttgcatgcatcctagagaaaaggaatagcatgaagttcttaaccactgagaataacagggagttatatcaagccttcttccagcaaaagtccataaggaaagtaaaggttttcctcaagcctttatttcttaggtcacaaaaagttgcaagcctggggcttaaactcattctcctccttttcttggtaaatcctaaatagcactgcatacctttctgattcacttcaccttagtacatatgtttctaaggactgagatccgttaactgatctctgcttttaaccccaccttatgcctgtaacttgtag

SEQ ID NO: 872166 - DNA, 592 bp, Homo sapiens
tatgagaattacatttcagttagtttgcttgattgattaacaaatctccctttcaaagtatagtagttcatattaagttaaccctaactagggctactcatccttgtccatttgtacttaatagtccagccatacaaatgtaggatttctctgcctaaggagtgtgtgtcttaaattatattgcttctttatacaaacacatctttataatccaaattatattgatttcctgggcatgctctataagtttctcaccttcttgaatatattgagcaaggcaacagttgcatgcatccyagagaaaaggaatagcatgaagttcttaaccactgagaataacagggagttatatcaagccttcttccagcaaaagtccataaggaaagtaaaggttttcctcaagcctttatttcttaggtcacaaaaagttgcaagcctggggcttaaactcattctcctccttttcttggtaaatcctaaatagcactgcatacctttctgattcacttcaccttagtacatatgtttctaaggactgagatccgttaactgatctctgcttttaaccccaccttatgcctgtaacttgtag

SEQ ID NO: 872167 - DNA, 624 bp, Homo sapiens
ttctattggtgctaaaagaaaaaataaaaatatttaccttcattagctcaatagattagcccaaggtagctgaaaggagatgttgagagggggctttagaggccctggttctcatcctcactcccccactgattcccagtgggacccaagcaggctgtcatcagactcagtttacccacatcgctcatgagccatcctcttcctaagaccactgtaaggctgaatggatttgcatcctcaagagctgtggctcctaaatctcaagtgccgctcccgcactctctgtgtgctcccttactgtgcaygatgactatggttattgaaataaagaacaaacacatatgttcttggggcttcagctccctccagatgaccatgagctctaatgaatgcacatgtgtccagcctcccagaagccttcctccctaccctctccatggaccctggaacttctgaacgccaactgtttactagggaaggacacctctgggtggattcgctttaatgactgtctcttgacccactatgtcctcaagaagaactttacgatgggctctcttggtcaaaattgaatccctgaaaagctggccggtgtgagacttttccagccctgtttggatgaag

SEQ ID NO: 872168 - DNA, 469 bp, Homo sapiens; identical to SEQ ID NO: 863290

SEQ ID NO: 872169 - DNA, 591 bp, Homo sapiens
catataccttgtccttcataatctcttaatttggctgtctaagtgtatactttgcaataccttctgtaataaactggtatcctgacaaagtaatcaaactcagggagaaggtaatggggatccggatttatagcaaggtggttcagaagtatagctgacaatytattacttgcaactaacatctgaagtgaaaaaagtcctgtgtggctgagcccttaacctgtgggatctgactaactccaggtagatagtgtcagaattgaactgaattataagacacccagttggcatccactggataactcattggatgttggtaaaagaaaatcccacacacaccttgataaccagaagggaaatagtgtctgttatgtgttgactgtgtaagaaaagaaaatgtttatcttacacaacttttaatataatgctgacaaaattcaagctgaaacctataaatgtttccactatatagttctgaatattgctttcttatacataaatatgttatgctttccattaaaacatcaacttacaatttacatatgggccctccatgtgattcagcaattctactcctagagatctacccca

SEQ ID NO: 872170 - DNA, 591 bp, Homo sapiens
catataccttgtccttcataatctcttaatttggctgtctaagtgtatactttgcaataccttctgtaataaactggtatcctgacaaagtaatcaaactcagggagaaggtaatggggatccggatttatagcaaggtggttcagaagtatagctgacaatctattacttgcaactaacatctgaagtgaaaaaagtcctgtgtggctgagcccttaacctgtgggatctgactaactccaggtagatagtgtcagaattgaactgaattataagacacccagttggcatccactggataactcattggatgttggtaaaagaaaaycccacacacaccttgataaccagaagggaaatagtgtctgttatgtgttgactgtgtaagaaaagaaaatgtttatcttacacaacttttaatataatgctgacaaaattcaagctgaaacctataaatgtttccactatatagttctgaatattgctttcttatacataaatatgttatgctttccattaaaacatcaacttacaatttacatatgggccctccatgtgattcagcaattctactcctagagatctacccca

SEQ ID NO: 872171 - DNA, 678 bp, Homo sapiens
aagctgacaaccagaagctgttttcagatcgcactccagagccggacagccagcccttcttttaaaaggttatgctgccataacctgtctaccataatgctaatttccacagatcacatactaaatgccagctattccaactagcttttgacaaatacactattgtcaaataaaatctgttttgcagttattccaacgtatgacgtgatcagagattttaatgtaatagaaaaacaaaatttttattcaagatgtctttcagcaaagaatttcgaccctattggcaatggttagcattttaaagacttaaaaatctgctttccaattatattattttgaaagagatttattgaataagtgcagaagttgttataaaaaatatgtgaacatrttcatcttcaacaaatgtttaattattatacataagagtgctataagacttgtcaaatatcaagtattgtactgtttttattgaagaactggccttgcacattttccagagttccaaaaaatgtctaattgcttcagagttttccctccctgattattatttcctcttgttcccttagttactttcatgggttctatttcaaagctttttcctataatagattgtgcttttgtcattattctctctgagaaatcagatttggctctcccatttttacccctaattaa

SEQ ID NO: 872172 - DNA, 643 bp, Homo sapiens
atcaacccgaggaacagtgtcatatggagggctcagtgttggtctctgctgctggcatattgaacactcaacagtggccatagccaggccagccttggtgagtgggagtccatgttgctgagcccatgtgtaacctccatccctgccaccacggccactttgttcatgggcccattgggtgatgcaggggtggctggggatagaggttgagtggtgtccacagaacaggtcatcccattcccttgattattaaaatcctcctctgctgaggtcacctgttggtgagcactcacatgggatacaaatatacagtttttgaccactcagagaggtctatmcacatacttcttccccaaatttctttgtaccaattttccaaaaatgcttcttccaagtccctgaccatccagccaaaccatgagctacagcccatgaatcagaatataatcgcacatctggccatttctccttccatgcaaagtgcactaccaggtgaactgctcaaagttctgcccacaaggaagatttcccttcacctctgtccttcagggatgtccaaaaaataggctatagtgctgcagctgtccatttttgtctggtatctgcatattgtgcaggaccatctgtgaaccaggccctaatc

SEQ ID NO: 872173 - DNA, 643 bp, Homo sapiens
atcaacccgaggaacagtgtcatatggagggctcagtgttggtctctgctgctggcatattgaacactcaacagtggccatagccaggccagccttggtgagtgggagtccatgttgctgagcccatgtgtaacctccatccctgccaccacggccactttgttcatgggcccattgggtgatgcaggggtggctggggatagaggttgagtggtgtccacagaacaggtcatcccattcccttgattattaaaatcctcctctgctgaggtcacctgttggtgagcactcacatgggatacaaatatacagtttttgaccactcagagaggtctatccacatacttcttccccaaatttctttgtaccaattttccaaaaatgcttcttccaagtccctgaccatccagccaaaccatgagctacagcccatgaatcagaatataatcgcacatctggccatttctccttccatgcaaagtgcacwaccaggtgaactgctcaaagttctgcccacaaggaagatttcccttcacctctgtccttcagggatgtccaaaaaataggctatagtgctgcagctgtccatttttgtctggtatctgcatattgtgcaggaccatctgtgaaccaggccctaatc

SEQ ID NO: 872174 - DNA, 589 bp, Homo sapiens
tttatttaatggatttttatttacatgcattgttaagctaaaacaaacaaagaaaacaagaaagcaacatcctgatttcccaacatgataattagagcatagagaaattcaaagatcctcctttcctctctcttgtcttttttgctgtgtggttattaggcctatagcatagtcaagatgttactctaaagcagacttcatcaggaaataaggaatttgctatattttgcaaaggactatcataagtatttcaaattgtttttctatagtgcacaaatgacagcacatttgatgcttttcttgccagaccatacrtacatatcacaaattatcacatacatcggatatatgcttgtccgagacaaaaataggaatgggaaagagaagtttttactattcctttgatgtaaatcctaaaccagactgacattagttatattggctaaaagcttcctgaatctgctgcaataaaaaaattgtttgctaacataggacttgatgatcaacacagtgattgagtcaaaaactgagtcaaggctgggcacggtggctcacacctgtaatcccagcactttgggaggctgaggca

SEQ ID NO: 872175 - DNA, 438 bp, Homo sapiens
cattgctacttttttaaaaaagtgagatacagtccctaggtgctgaaagtggagtctctaaactggcttggaaaatgataatattattgcttcccaactaattttgtacatctgttaaaatatagttttgacaatcatagactcaaagatcttagcatttagaggattttgagagactctgagattcagaaaagataacataggctcctgtaatctcagcactttgggaggctaaggagggtggatcgcctgagctcaggagttcaagacmagcctggccaacatggctaaaccccaactctaccaaaaatacaaaaaattagccaggcgtggttgtgtgcacctgtggtcccagctacttggaaggctgaggtgggaggattgcttgagcccaggaggtcgagactgctgtgagccaagattgtgccactgcactgc

SEQ ID NO: 872176 - DNA, 596 bp, Homo sapiens
gtttcacaagagtatgctgaataccagccaagatgcataagctgtttcctaggggaataacttgcgggcccatggattgtttatatatttttatgatgttgggtaactgttccataacattaagtttctgtgtttacctgaatacttagaagaatataaaagcttcttagccttaaacaaaatatttctgaaaaagaaatcatttaatcatgcttataaagtgaatgagaaatacaataagtatgattctggcaagtctcaaagcaaaatttctcagaaaaaaagaagtgatagtctcaccattctccctaactagggaagcacttttatccctatcactcataaagcaataacactttattctcacagtattctttttgcaaaagaatgtaagtgttgacaaaaagagtcaaactctgtaaaatmttttaagagatttattctgagtcagatatgagtggccacggcctgtgacacagccctcaggaggtcctgagaacatgtgcccaaggtggctgcggtacagcttggttttatatattttagggaggcatgagacatcaatcaaatagatttaagaaacacattggtttggt

SEQ ID NO: 872177 - DNA, 590 bp, Homo sapiens
gtaatttataaagaaagaggtttaattggctcatgattctgcaggctgtacaagcatggcgccagcattgctgggcttctggggaggcctcaaggagtttttctcatggtcgaaggcaaaataggagcagtcactagacatggcaaaagcgggagcaagagagcgatgttgggggcggcgtgctacacaccttttttttttttttttttgagactgagtcttgctctgtcgcccaggctggagtgcagtggtacaatctcggctcactgcaacttccacctccccggttcaagcaattcccctgcctcagyctcctgagtagctgggattacagtcacacgtcaacatgcctggcaaatttttttgtatttttagtagaagtggggtttcaccatgttggcctgactggtctcgaactcctgacctcaagcaatccgccagcctcagcctcccaaagtgctgggattacaggtgtgagtcaccgtgccctgtcgctacacacttttaaatgaccaaagctcatgagaactatcttttttatttttttgttttttttttgtttgtttgttagtttcaaagagtggagagtt

SEQ ID NO: 872178 - DNA, 673 bp, Homo sapiens
ttgcaaactctttatcaatggtgtttctgacataaaatttctagatttattcaaatgaaaatgaggccaggcgttacagagatcaagcctgtaatcccagcactttgggaggccaaagtgggtggatcacctgaggtcaggggttccagaccagcctgggcaacatggtggaaccctgtttctaccaaaaatacaaaaattagccaggcatgggggtgcatgcctgtaatcccagctacttgggaggctgaagcaggagtatcgcttgaacccgggaggcrgaagttgcagtgagctgagaccacactactgcactccagcctggatgaccaagtgagactccatcttggaaaaaaaaaaaagagttatgctatttctctattagtatcttagtatctctctaccaccctaataatcccacatcttggattgcttgtataaaacagtaaaatgtaacaaaattctaagagctttaaaaaaagcttttaagttgttcataaaacaagataagtgtataaattgtacgttttaaaacaaagtgaattaatatttaattttaaaactgacacaactttttaaagtatgggctgaagttcacgaacccatgggtttcaattatgtgctataatttcccacttcatgctaaatcaggcatcatattgtgatatttaat

SEQ ID NO: 872179 - DNA, 673 bp, Homo sapiens
ttgcaaactctttatcaatggtgtttctgacataaaatttctagatttattcaaatgaaaatgaggccaggcgttacagagatcaagcctgtaatcccagcactttgggaggccaaagtgggtggatcacctgaggtcaggggttccagaccagcctgggcaacatggtggaaccctgtttctaccaaaaatacaaaaattagccaggcatgggggtgcatgcctgtaatcccagctacttgggaggctgaagcaggagtatcgcttgaacccgggaggcagaagttgcagtgagctgagaccacactactgcactccagcctggatgaccaagtgagactccrtcttggaaaaaaaaaaaagagttatgctatttctctattagtatcttagtatctctctaccaccctaataatcccacatcttggattgcttgtataaaacagtaaaatgtaacaaaattctaagagctttaaaaaaagcttttaagttgttcataaaacaagataagtgtataaattgtacgttttaaaacaaagtgaattaatatttaattttaaaactgacacaactttttaaagtatgggctgaagttcacgaacccatgggtttcaattatgtgctataatttcccacttcatgctaaatcaggcatcatattgtgatatttaat

SEQ ID NO: 872180 - DNA, 673 bp, Homo sapiens
ttgcaaactctttatcaatggtgtttctgacataaaatttctagatttattcaaatgaaaatgaggccaggcgttacagagatcaagcctgtaatcccagcactttgggaggccaaagtgggtggatcacctgaggtcaggggttccagaccagcctgggcaacatggtggaaccctgtttctaccaaaaatacaaaaattagccaggcatgggggtgcatgcctgtaatcccagctacttgggaggctgaagcaggagtatcgcttgaacccgggaggcagaagttgcagtgagctgagaccacactactgcactccagcctggatgaccaagtgagactccatcttggaaaaaaaaaaaagagttatgctatttctctattagtatcttagtatctctctaccaccctaataatccyacatcttggattgcttgtataaaacagtaaaatgtaacaaaattctaagagctttaaaaaaagcttttaagttgttcataaaacaagataagtgtataaattgtacgttttaaaacaaagtgaattaatatttaattttaaaactgacacaactttttaaagtatgggctgaagttcacgaacccatgggtttcaattatgtgctataatttcccacttcatgctaaatcaggcatcatattgtgatatttaat

SEQ ID NO: 872181 - DNA, 623 bp, Homo sapiens
tttctcctaatgctatcccttccctagccccccagtccctgacaggccccggtgtgtgatgatccctccctgtgtccatgtgttctcattgttaaactcccacttatgagagagaacatatcattagggtctctgtctcatgtacgttttgctgagaatgatggtttccagcttcatccatgtccctgcaaaggacatgaactcatctttttttacagctgcatagtattccatggtgtatatgtgccacattttctttatccaktctaacattgatgggcattggggttcattccaagtctttgctattgtgaacagtgctgcaataaacatacgtgtgcatgtgtctttatagtagaatgatttataatcctttgggtatatacccagtaatgggattgctgggtcaaatggtatttctagttctagatccgtgaggaatcgccacactgtcttccacaatggttgaactaattaacactctcaccaacagtgtaaaagcgttcctatttctccacatcctctccagcatcagttgtttcctgacattttaatgatcgccattctaactggcatgagatggtatctcattgtggttttgatttgcatttctataatgacca

SEQ ID NO: 872182 - DNA, 702 bp, Homo sapiens
caactgaatttggattggctgaagaatagaggtcttcttaaatgacttattttgtactctcttttgctgtcgggaaaaatgagtactatcttttctctccacactaccatgtgttttaaagggactttctacctatagctacgtgaaaatgtcatcactgtccatatttctggttaagaaaactaaggcccagagaagtaaggtgaaccccaaagtctcagattactatagccacaaagccaagatgtaatcctaggtctcttgacatttgggttaatgtttatttcatcacatatctgtcaatgtttttaaaaagcaaaagaataaaaagcaaagaaatagtaaaaaggatcattctggttgattttttgacaagttgtataccctgtggagttattaagtggaggttcagcatctgggttatttttgatcacctgayggctccagggacaagggtttgagcagctcagaatgaaattggctaggggaacagtatctcttctgacacaaatcacagctttgaacatttccagcatttacctacatcaggcacgcacttgaaagactccaagaagtcatatatgaaagctggtatttttaaagcccctatctgaatatttgtaaaacttgatgacactaaaggacagtgcttttcaaattaaaaaaataatgctgaaaaggagttggaagtgcattttactc

SEQ ID NO: 872183 - DNA, 702 bp, Homo sapiens
caactgaatttggattggctgaagaatagaggtcttcttaaatgacttattttgtactctcttttgctgtcgggaaaaatgagtactatcttttctctccacactaccatgtgttttaaagggactttctacctatagctacgtgaaaatgtcatcactgtccatatttctggttaagaaaactaaggcccagagaagtaaggtgaaccccaaagtctcagattactatagccacaaagccaagatgtaatcctaggtctcttgacatttgggttaatgtttatttcatcacatatctgtcaatgtttttaaaaagcaaaagaataaaaagcaaagaaatagtaaaaaggatcattctggttgattttttgacaagttgtataccctgtggagttattaagtggaggttcagcatctgggttatttttgatcacctgatggctccagggacaagggtttgagcagctcagaatgaaattggctaggggaacagtatctcttctgacacaaatcacarctttgaacatttccagcatttacctacatcaggcacgcacttgaaagactccaagaagtcatatatgaaagctggtatttttaaagcccctatctgaatatttgtaaaacttgatgacactaaaggacagtgcttttcaaattaaaaaaataatgctgaaaaggagttggaagtgcattttactc

SEQ ID NO: 872184 - DNA, 678 bp, Homo sapiens
tgacagctttgaagagagtagtgtttctcccagcatgcagcttgagatctgagaatggacagattgcctcctcaactgggtccctgagcctgagtagcctaactgggaggcatcccccaataggggcagactgacacctcacagggccaggtactcctctgagacaaaacctccagaggaacgatcaggcaacaacatttgctgttcaccaatgtctgctgytcgacagcctccactgctgatagccaggcaaacagggtctggagtggacctctggcaaactccaacagacctgcagctaagggtcctgactgttagaaggaaaactaacaaacaagaaatccacaccaaaacaccatctgtacagcaccatcatcaaagaccaaaggtagataaaaccacaaagatggggaaaaaacagagcagaaaaactggaaactctaaaaatcagagcacctgtccccctccaaaggaatgcagctcctcaccagcaacagaacaaagctggacagagaatgactttgatgagttgagaaaagaaggcttcagatgatcaaactcctccaagctaaaggaggaagtttgaacccatggcagagaagttaaaaaccttcaaaaaacaatagacgaatggctaactagaataaccaatgcagagaagtccttaaaggacctgat

SEQ ID NO: 872185 - DNA, 477 bp, Homo sapiens
ctttgactaggaaagggaattccctgaccccttgcacttcccaggtgaggcaatgcctcaccctgctttggctcatgctcggtgcactggccccactgtccttcacccactttctgacactcctcagtgagatgaacccagtacctccattggaaatgcggaaatctcccaccgtctgcgtcactcatgctgggagctgtagactggagctgttcctatttggccatcttggctccacccccraaaactggtcttttaagttgtctcctgaagtctgggaaggtaaagaactggctccagcttaattttaattgctttttgcttagtatcaattcttgatgcaaatttagctggcattccttggctatttgacacctgactgtagcatgtttctaagtaaaaattcactccagtgttttaccacagagacgtatattttggcttctctatttccacctcctggaagggggcagccct

SEQ ID NO: 872186 - DNA, 470 bp, Homo sapiens
attatgctaagtaaaaagagccaatcccaaaatgtcacatataatatgattccacttatataacatcctcaaaatggcaaaactatagagatacagaacacagattaatagtttatggagtcagaaatggagaatgggagaggcggctgtggttatcaaaaggtaacacaaagactatttgtgggggtcaagatggctgactagaaacagtggtgatcagaggctcctatcgaaaagaaccataattaccatgtgaatacttcaccagcaaccaaggcatccgggttctcttaycagaactgactaagcaggtgtcatgatccatggagagaaaggaagagcagtgtggtgtggcggcccacctgagagccacatggtacaggggagcccccaccccccagccaaaggatacagtgaatcagtgtgctacccagctggggaaacaatgctttttccaaggaaatgtgcaa

SEQ ID NO: 872187 - DNA, 636 bp, Homo sapiens
aaacaaaaccacaatgagatatcatctcacaccaattagaatgatgatcattaaaaagtcaggaaacaacagatgctggagaggatgtggagaaataggaacgcttttacactgttggtgggagtgtaaattagttcaaccattgtggaagacagtgtggcaattcctaagggatctagaagtagaaataccatttgatccagcaatcccattactgggtatatacccaaaggattataaatcattctactataaagacacatgcacacgtatgtttattgtggcactattcacaatagcaaagacttggaaccaactcaaatgcccatcaatgatagactggataaagaaaatgtggcacatatacaccatggactactatgcagccataaaaaasgatgagttcatgtcctttgcagggacatggatgaagctggaaaccatcattctcagcaaactaacacaggaacagaaaaccaaacagcacatgttctcactcataagtgggagttgggagttgaacagtgagaatgcatgggcacatggaggagaacgtcacacactggggcttttcagggaatgggaggctaggggacagatagcattaggagaaatacatcacatagatgacagttt

SEQ ID NO: 872188 - DNA, 683 bp, Homo sapiens
aactcgtcatttaacattaggtatatctcctaatgttatccctctcccctccgccaccccatgacaggccctggtgtgtgatgttccccttcctgtgtccatgtgttctcattgttcaattcccacttatgactgagaacatgtggtgtttggttttttgtccttgcgatagtttgctgagaatgatggtttccagcttcatccatgtccctacgaaggatatgaactcatcattttttatggctgcatagtattccatggtgtatatgtgccacattttcttaatccagcctaycgctgttggacattttggttggttccaagtctttgctattgtgaatagtgccgcaataaacataacgtgtgcatgtgtcttcacagaagtatgttttataatcttttgggtatatacccagcaatgggatggctgtgtcaaatggtatttctagttctagatccctgaggaatcgccacactgacttccacaatggttgaactagtttacagtcccaccaacagtgtaaaagtgttcctgtttctccacatcctctccagcacctgttgtttcccgactttttcatgatcgccattctaactggtgtgagatggtatctcattgtggttttgatttgcatttctctgatggccagtgatgatgagcattttttcatgtgtctttggct

SEQ ID NO: 872189 - DNA, 641 bp, Homo sapiens
gtggcagcaaaagcttttatgtcctaataatgtttatgaacgtagtctggttggtcaaacaagaacaatgagctatcacaacaattttcaattttcataggcatatcttatgtttgtaagtttctaagtttacaatgtagaaggcagctaatgttaataataagtccactgtcgacaagtgtagtaaggcctaggactacctcactcagtgattactgctgtaagatcacagtccctctgaatctcgttggacattcaaaatgtccttaaagtgttagaaacaggcaaatatctttttaagtytactacctcatgtatgcttcatgtgaccataacttaactgaatgaatcctttaaatgagctgttgatgtcctatttgccatttttttcctcctaaagaaattcgtgtttagctgcaaggtaacttccctgtgtgaaatttacaggtttgccagccatagaaaacattaatgcataatacataaacaaaatgtatgctccttttgaaaaaaaaaaaaaaaaaaccaaggaatttagtccttgctttccaaagggagaatacatgaatcttgcatttttatttttgatgcctttttgcctctaaatatatgagatgactattaatgcccatattcacagc

SEQ ID NO: 872190 - DNA, 575 bp, Homo sapiens
tccagaaaaatatttgttttaatgtctccagtttgatagttgaagcaacacacttgtaagccagaagtaaatcataaatcattcgtctgtaagtttacaccacaatctttgatatttgaagagaggttatacatacacatacacacatgcaatcagatgtctttcccagaaaatgttaaaacaaaatttgtcttaccagtctgggaaagttggcttctgtgggcattatgaaagctggaattgctttgatgtgattctgaatccaaatggccttttaatctaagcctctctatcatctccatctatgtgtttgtaataaatacatcaatttatgtgggatacattctttttatactcattatttcttccttttcttgtcaccatcaccccttgaaaatttcttttttttaattgtcaatttactctaaaagcacctgkatctggtcataggaaggttgaattgctctcctactcaagaaacaaagcacacatcctctgatactgatgtatttactatttatatttttttctcttagtgtttctgattttgagagaaagaactatcatcctcctaa

SEQ ID NO: 872191 - DNA, 551 bp, Homo sapiens
aattatctgcattgagaaagaatataattgttgtgtttaaatcaaagattaccgattctatcatacacaagtttccataagctggttaggtccaaaagattgtgaatcctgtaaaatcctcccatatttctatgcactaaactctttgttatttgttttgtgagatttaaaagaatcacattcaaatatttaggaagaaataaaaatartgaccagaaaatcaatctgcttattctcattcagtaaccaaataattgagcacattgtgttataaggtatgtttagaattgtgaataccagttatgtatacattgtagttattgagtagatatatgtttacagttgtttccagctcagtaaatgcccttgattcacttcatgtcagataccagtctatagtttaaacatgagaatatctgctcaagtaatatggcataagaagggtcaacatgctgaagagaaatgggaacagaagcttggggaaaaaagctatattataccagctctggattaaggtctcagtggaggtaggggatagatctgacaatctg

SEQ ID NO: 872192 - DNA, 650 bp, Homo sapiens
acgaggttataaaaaataaagactgagaaattaatgtgtattggaacactaaagggacatgacaaataaatgcaatgtaatattcaggattaaatcttggcacaataataaaaaccctggaagacatcctcagcaataccattcaggacaaggaatgggcaaagatttcataatgaagatggcaaaagcaattaaaatcaaaacaaaacattgacaaataggacctaattaaactaaggaacttctgcacaacaaaagaaactatcaatagagtaaacagacaagttatggaatggaagaaaatttttgcaaactatgtatccaacaaaggtctaatgtccggcatctataaggaactaaaaaaaawaaataaaaagaaaaacacaaacaaccccattaaaaagtgggtaaaggacatgaacggaaacttttcaaaagaagacatacatggagccaacattcatatgaaaacaaactcaacaccagtgatcattagggatatgcaaatcaaaatcaccatgagataccatctcacaccagtcagaatggctattattaaaagtcaaaaaataacagatgctggctaagttgtggagaaaaaggaatactttttactgtttgtgggagtgtaaattagttaaaccattgtg

SEQ ID NO: 872193 - DNA, 678 bp, Homo sapiens
tgggtttgcccacaacacatgggaattatgggagtaaaattcaagatgagatttgggtggggacacagagccaaaccatatcattccacctcagacccctccaaatctaatgccctcacattttaaaaccaatcatgccttcccaacagctccccaaggtcttatctcatttcagcattaacccccaaatccacagtccaaagtctcatctgagacaaggcaagtcccttccatctatcagcctgtaaaaccaaaagcaagttcgttacttccttgatacaatgggggtayaggcattgggtgaatacagcttttccaaatggggaaaaatggccaaaacaaaggggctaccagccctatgcaagtctgaaatccagcagggcagtcaaatcttaaagctccaaactgatctcctttgatgccatgtctcgcatctgggtcatgctgatgcgagaggtgggttcccatggtcttgggcagctcccaccactgtggctctgtagggtacagcctccctcctggctgctttcagggtctggtgttgactatctgtggcttttccaggcacatgatgcaagctgttggtggatctatctttctggggtctagcggatggatggtggctcttttctcacagctccactaggcagtgccctagaagggactctgtatggggct

SEQ ID NO: 872194 - DNA, 678 bp, Homo sapiens
tgggtttgcccacaacacatgggaattatgggagtaaaattcaagatgagatttgggtggggacacagagccaaaccatatcattccacctcagacccctccaaatctaatgccctcacattttaaaaccaatcatgccttcccaacagctccccaaggtcttatctcatttcagcattaacccccaaatccacagtccaaagtctcatctgagacaaggcaagtcccttccatctatcagcctgtaaaaccaaaagcaagttcgttacttccttgatacaatgggggtataggcattgggtgaatacagcttttccaaatggggaaaaatggccaaaacaaaggggctaccagccctatgcaagtctgaaatccagcagggcagtcaaatcttaaagctccaaactratctcctttgatgccatgtctcgcatctgggtcatgctgatgcgagaggtgggttcccatggtcttgggcagctcccaccactgtggctctgtagggtacagcctccctcctggctgctttcagggtctggtgttgactatctgtggcttttccaggcacatgatgcaagctgttggtggatctatctttctggggtctagcggatggatggtggctcttttctcacagctccactaggcagtgccctagaagggactctgtatggggct

SEQ ID NO: 872195 - DNA, 642 bp, Homo sapiens
cagaagaaaacagaaagatatgggaaagttcggaactccttagagacttgttgaatggctttgaccaaaatgttgatactgatatggacaatgaagtccaggctgaggtcgtctcagacaaagatggggaacttgttcggaactggagtaaaggttacccttgctttgctttagcaaaaagcctgacagcattttgcccctaccttagagacctgtggaactttgaacttgagagagataattttggatatctagcagaagaaatttctaagcagaaaagcattcaagaaatgacagagcataaaaatttggaaaatatgcagtctgataatgcagtagaaaaggaaaacccattttctggggagaaattcaagcctgctayagaaatttgcataagtgatgaggaccagaatgttaattaccaagacaataaggaaaatgtcttcaggacatgacagagacctttgtggcagcccctaccatcactggcccagagccctaggagaaaaaaaaaaatgcttttgtgggcaaggtccaggtcccgtctgctgtgtgcagcctagggacttggtgccctgcatcctagccactctagccctggctaaaagggaccaaggtacagctcagaccatggcttcagag

SEQ ID NO: 872196 - DNA, 625 bp, Homo sapiens
gcagttaagaagaaatcacgtaggcagttagcaagggtatgagagtccctggtaaagcttttctttttgatgaaaagcagccccagatcattttctaacaaagaccagcctgtaaagttgagctgcagacatagacaagcaagctggagcttgcgtgagtgaatgccagcaggaactaagaactagacattttcaagagggcagctccatcttcctgtctctgccagccasatgtactgtaaggagcagacaagatggcgcagatcaactagaaagtctatttgcatagtaagactaagttgggacaaccagctttcccagcacgctacataaatttcataccttacctgatgtgaccaatctatgagccctctgcaaatcagacactgcctcctcaaagtggactataaaattcggtgcattcaccactagccggtcctttcccttggagacccctctctctacggagagagccgtctctttttcttctcttctgtttattaaacctctgatcctaaacttctcgcttgtgtctgtgtcctaaattttcttggcatgcaacaattacccagacaacgtagccactccattactataattaattatttaattaaaactttcatat

SEQ ID NO: 872197 - DNA, 640 bp, Homo sapiens
ttgttcacaaagaaacaggagaaaatctttgtgaccttgagataggcaaagatttcttacgtagtacaccaaaatcacaaattataaatgaaaaaatgataaattagacatcatcaaaatttaaaattattattcttcaaaaatcactattaaggaaacaaaaaggcaaatcactaaacagaaaaaatatttgcatacatgtatagcaaggtgtctaaatctggaaaatagaaagaactaataactcgataataaaaaggcaaacaaattaaaaatgagcaatggatttgaataataatttcttaaaagaaggtgtatgaatggccagtaagcacatgaaaaagtgttcaactttgagtaatgaattgtacaccttaaatgggtgaattggatggtatgtgaatgatatcttgataacacttacgtaaaaaatgaaacaatgaagcyaggagtggaggaaggagtaaattgcaaagacacgtgatacagaaaaagtggcagataggaggcaggactaacttgcagatcccacctggacagacacagcagtgtgtggagagtcacattgtgaacttttgctccaagaactcctacaggaacatacagggaaagccgagagaatctacaaagcctgtgaaag

SEQ ID NO: 872198 - DNA, 556 bp, Homo sapiens
atagtctacccaaaaaagaaggaaccagaaaaacaattctggtaatatgacaaaacaagattatttaatacccccaaaagattatactagctcaccagcaaagataaaatctctgaattgccaggagaagaattcagaaggtcgattattaagctaatcaaggaggcaccagagaaatacgaagttcagcttaaagaaataaaaacaatgatacaggatatgaatggaaaaatctccagtgaaatagataacataaacaaaagacaatcacaaattctggaaatgaaggacacacttagagaaatgcaaaatgcactggaaagtctcagcaatagaattgaacaagtagaagaaraaacttcagagctcaaagacaaggctttagaattaacccaatccaacaaaaacaaagaaaaaaaatttttttaatgaacaaatcctccaagaagtttgagattttgttaaacaaccacacctaataataattggcattcccgaggaaaaagagaactctacaagtttggaaaacatatttgagggaataaccaaggaaaac

SEQ ID NO: 872199 - DNA, 556 bp, Homo sapiens
atagtctacccaaaaaagaaggaaccagaaaaacaattctggtaatatgacaaaacaagattatttaatacccccaaaagattatactagctcaccagcaaagataaaatctctgaattgccaggagaagaattcagaaggtcgattattaagctaatcaaggaggcaccagagaaatacgaagttcagcttaaagaaataaaaacaatgatacaggatatgaatggaaaaatctccagtgaaatagataacataaacaaaagacaatcacaaattctggaaatgaaggacacacttagagaaatgcaaaatgcactggaaagtctcagcaatagaattgaacaagtagaagaaaaaacttcagagctcaaagacaaggctttagaattaacccaatccaacaaaaacaaagaaaaaaaawttttttaatgaacaaatcctccaagaagtttgagattttgttaaacaaccacacctaataataattggcattcccgaggaaaaagagaactctacaagtttggaaaacatatttgagggaataaccaaggaaaac

SEQ ID NO: 872200 - DNA, 632 bp, Homo sapiens
aaaaattaatcaaattgtacactttaactgaattcagcttatcgtatgtaagcaatcaggttgcttttataagatgtgtaaactgaaaagtctccagcatttatttcccatccccagatgcaattaacattgttatacacttgtatattctgtagacattttatgcatgtggaaataaatacttttttttttttttcgagacaaggttcgctcttgttgcccaggctggagtgcaatggtgcaatcttggctcactgcaacctcygcctccctggttcagcgattctcctgcctcagcctcccaagtagatgggattacaggcatgcgccaccacgcctggctaattttttgtatttttagtagagacggggtttctccatgttggtaaggctggtctcgaactcccgacctcaggtgatccacctgcttctgcctcccaaagtggtgggattacaggggtgagccaccacacccagcccttggaaatacattcttatatacattgttttccctttcttaaaacaaatggtaccatactatgcacacttttatacatcttgtgtttttttcactaaatatattttgaagataattctctatcagaatataagaaactccattatcctttttt

SEQ ID NO: 872201 - DNA, 632 bp, Homo sapiens
aaaaattaatcaaattgtacactttaactgaattcagcttatcgtatgtaagcaatcaggttgcttttataagatgtgtaaactgaaaagtctccagcatttatttcccatccccagatgcaattaacattgttatacacttgtatattctgtagacattttatgcatgtggaaataaatacttttttttttttttcgagacaaggttcgctcttgttgcccaggctggagtgcaatggtgcaatcttggctcactgcaacctctgcctccctggttcagcgattctcctgcctcagcctcccaagtagatgggattacaggcatgcgccaccacgcctggctaattttttgtatttttagtagagacggggtttctccatgttggtmaggctggtctcgaactcccgacctcaggtgatccacctgcttctgcctcccaaagtggtgggattacaggggtgagccaccacacccagcccttggaaatacattcttatatacattgttttccctttcttaaaacaaatggtaccatactatgcacacttttatacatcttgtgtttttttcactaaatatattttgaagataattctctatcagaatataagaaactccattatcctttttt

SEQ ID NO: 872202 - DNA, 646 bp, Homo sapiens
taagatgagtaattattgggtcagctgttcatagtcagtttgttttaaggaatggcttataaccttgttccaaggtaaataattctcacaaaacagggctgtgtatatgaatgtgattgttgaatcattacttcatctcagctaacaaaaaaatyacactgtattacttaccaagtaaaccaagaatggcttctttccagtctcaacaatagaccagttatagtcaatatgagctatttgtttaattccttttcaatctggacttctcagcttctcaatatctcattccacatgtaatcaggaaatctttatctgccagctcctcaccctattgccattgttacagataaagaattattggtttacgcctcaggctgtaccacttattttaaagatgtgtgctttgctagctttttctgaaatacacagctcaaagcatcttttctctgtgtcttcttgaactcctgtttgaccttcactgtttttggcagggcttcctcttattttatggttttgggtttcagatgctttttatttcatggcaatggagcatttgtttttgttgttcatgatctttgttgcttttagatgattcccaaaaaataaaagagaagttctgattttgctccatactttaaaagtatat

SEQ ID NO: 872203 - DNA, 648 bp, Homo sapiens
ctacatttattactaaatattttatttttgattgtgttataaattgtacttttttccattataccttctaaataattattgttcacatatagagacattactgattttattatactaattttatactcagacatctttctaaattctgttaagttttacrataatttttcagttgaactttttggatttttttctcttgttcatttgcatcaatttgtacttctggaacagtgagcattgaattattaaagtgatagggaatttccttgtttttttaataactttgatggggaatgttacttaagtttcagcaaaaaaaaagtcattttaatgagctttcagaacaaagaactttgtaatactttgaagatacatggtcagaatatgatagatcaagcatttacaaactaaattcacaggccaaatccagcttatgtctgtttttataaataaagttttattgaaatgcagccacacatgtatgtttatgtactgtccatggctgctttcactgaaaatatttactatctggttatttaccaaaaaatattatcctccccagtgtgagagactatgcttcagtaacaattccaaaatattggttgctaaacacaacaaaagtttatgtcttgcttaaactacctatcc

SEQ ID NO: 872204 - DNA, 669 bp, Homo sapiens
actggactttatgctaaaagatttataaataggtaaacattaaaaacaaaaccatttaagttattttatccttatttctacagatcacaaatctgagacataaaagagttcccacattaagtgacagagctgaagtttaaacacaggttgtctagctccagaatcagtgcatataactacattaaagagcttcaagtggaaatgtagggcaaaattctctagctttagagaatggaatcaactaaagacaaggatgtgaaatagcaagatatgtgtggggaacactaagcatctttgtgtatkaactatttttcatttgtaaacctttccttacatggagtagagctcctccataaatggctaggaatatcttgataagttacaattgttcttaactagcctccctgcctctaatattttacccttctaagatgtcttgcacattaacgccaaataaatattcctggctgggcagttatttgcccacttaaatatatcaatgaatccccataatgtgtagaatcatttccaaactctttaatatgtggatcaaattactgtagtatctgagcccaacagatttagtaagttcccaccatcctttatactacaaataggaagttccaggtttattttttaagccacattcgttaagggttatatttattt

SEQ ID NO: 872205 - DNA, 626 bp, Homo sapiens
taaagacccttcacttaatcagagctgcagagtctatttggccatctaagtgttgcaggaagtcagggaccccaaatggagggaccggctgaagccatggcagaagaacgtggattgtgaagatttcatggacatttattagttccccaaattaatacttttataatttcttatgcctgtctttgctgcaatctctaaacataaattgtaaatattccatrgacacttatcactttcccaatcaataccgttgtgatttcctatgcctgtctttactgtaatctctcaatcctgtcagctgaggaggatgtatgtcacctcaggaccatgtgataattgcattaactgcacaaattgtagagcatgtgtgtttaaacaatatgaaatctgggcaccttgaaaaaagaacaagataacagcaattgttcagggaataagagagataaccttaaactctgaccgccagtgagccgggcggaacaaagtcatatttctcttctttcaaaagcaaatgggagaaatatcctgaattctttttttcagcaaggaacatccctgagaaagagaatgcatgcctgggggtggggctctgaactggccccccctgggcgtggccatctcttatg

SEQ ID NO: 872206 - DNA, 626 bp, Homo sapiens
taaagacccttcacttaatcagagctgcagagtctatttggccatctaagtgttgcaggaagtcagggaccccaaatggagggaccggctgaagccatggcagaagaacgtggattgtgaagatttcatggacatttattagttccccaaattaatacttttataatttcttatgcctgtctttgctgcaatctctaaacataaattgtaaatattccatagacacttatcactttcccaatcaataccgttgtgatttcctatgcctgtctttactgtaatctctcaatcctgtcagctgaggaggatgtatgtcacctcaggaccatgtgataattgcattaactgcacaaattgtagagcatgtgtgtttaaacaatatgaaatctgggcaccttgaaaaaagaacaagataacagcaattgttcagggaataagagagataaccttaaactctgaccgccagtgagccgggyggaacaaagtcatatttctcttctttcaaaagcaaatgggagaaatatcctgaattctttttttcagcaaggaacatccctgagaaagagaatgcatgcctgggggtggggctctgaactggccccccctgggcgtggccatctcttatg

SEQ ID NO: 872207 - DNA, 576 bp, Homo sapiens
cggaacaaaatagagaatccagaattaaatttatgcttttacagcaaaccgattttcaacaaagttaccaagaatataccttggggaaacgatggtctctttaataaatagtactggggaaattaggtatccatatgcaggagaatgaaactggacccctttctctcaccatatacaaaattcagctcaaaatggagtaaagacttaaacataagacccaaaactataaaactactacaagaaaacatagggtaaatgcttcaagacattggtctaagcraagattttatggctaagactttaaaagcacaggtaaccaaaacagaaatagacaaatgggactatattaaactaaaaagcttctgcacagcaaacgaaacaatccacagagtgaagagacaagttgttgaattggagaaaatatttgcaaattattcagttgacaaggaactaatgtctagaatatgcaaggaactgaaacaactcaacagctgttcgaaacaaataatcccatttttaatggtcaaaggatatcaatagacatttctcaaaaaaagacattcaagtggccaacag

SEQ ID NO: 872208 - DNA, 538 bp, Homo sapiens
cttcagtcaactacaaatgcttgagccccaacctgacaattggctgcttctgagcacagaacagacaatctgcaccccacagcatgcagaaagccagagagtgagcactctgactgaatccaaaccaaactatcaggacacaaaatgagacagaaaggatacaggagctatccytgggaaggaaaagatctattttaaaaagtattcaaaccaagtcacaatacagtaagtataagttctgagtgttttctcccggaaatctaaatcttgggaagaaaagacagaaagatggtcttaccatcctcacttgacgggattctgagcagaaatctgggaacctggctgctaagaaatttatctttgtcagcatagtcagagatcctgacatcttagctgcactttctggaggagcagagagtcccagccatcccatcctcatcaccaaaattattgggagaaaacttttcctcatccaatttagttccagtggttgaaggcccatgagttaactgacaatagacagattaacaggagaaaa

SEQ ID NO: 872209 - DNA, 558 bp, Homo sapiens
agtgggctccaaagtcgatggttctactgcagcatgttaccacctacatgtctatttctcaaaacagcaacaaacagaaaaaccctaagataacacatcaaacatcctagtcatggttttacagagtctgggtccatatgcagtatttgaacagataaactggtttctagtatgttggcaaggaaggggcaatcttgcaaggtggatagatctaatctgattgtaaggtgactgaaataaccagacaccagcctcagggagcctcattgccagtccagttgtttgcctaattttaaccagtgaatgaagtagatccaatccattggttgacacttaactgctgttgatggggctgagaggaagaaaaacaagtccgtcccctctcttatataccatcctgtcccccagtgcaatctgagtgcygtgtaaatttggcaaagggatgtttagacagcaaaggttatcaacaaaatggttatgggccaagggaatttcactgaataaccctgtggctgggagtgacactggaattaattgtctcctagtgtcctgaagagt

SEQ ID NO: 872210 - DNA, 673 bp, Homo sapiens
tgaataaatgaagcaagaagctatattaggcctctctcatactactgtccagaacacaggaatagccttccctttggggcacttatttgaattgtagatttgagcctatgaacttgagagaggtctctgttaggggtgagagggagctgcatctttaaggatgctgtaagttactaccatggtgtgaactgaagacttttattccccttctttccatgggaaagaaaagatggagccaactgatggataaatatttctctaggtagcaaggggaaaaacctactcttatggttgaaacttccttttattacctcctaaccagaatttttagcttccaacaatactaggtttcctagtgagaaaatgttattgtctctttaagaaagaytgtggtcacggtagtagtagtgctaataatgaccatagcaacaataataacatgtaacattaactaggtatttacatgttccagacatctttaagtgctttacatatattaacttacataattctcacaataatcattatctagatgttactattattttattagcaaatgagaaaactgagacacagagaaataaagtgtcttccccaaggtcacacaattggtggagttgggatttgaacccaggaagtacagttatatagctctttgtgtaatattacttac

SEQ ID NO: 872211 - DNA, 582 bp, Homo sapiens
acaattcattctgatcatttacttacagcttgactaaagttaagtgcatagtgccaactttattcccataggaaatgtaagttttctctgcacctgagaagactgtgtcacaaatggaatttcaggggtaatgcgacttttgcaggggcaagccccaaataataggggaaaggtctgaccatcctgatgagaccattgcattggttgtcttgaggacacaggagaatttggaagaaagaaggaaagtgacacctgaatgtggtgtgactactcatctgaagagaaaatatctgtcagaaatatacagaataaacataggcttctrtcaatgtgacttggctatcaccagggtgacataaatgcaataatggcttgctcttctccagggtaacccaatcagctgagtttaccccatttttaaaaaccacttaactttaaactgtgtactaggtgaaaacctttctcatcaattagtcacttactatttcaatgatgtgtctttctgcccctatttatccatggtagtgctgtcttaaatataagagcctaaaggacgtagacaagctctctgggattattatt

SEQ ID NO: 872212 - DNA, 649 bp, Homo sapiens
gacttgatcatggtggataagttttgggatgtgctgctagattccgtttgccagtattttattgaggatttgctaatcgatattcatcagggatattggcctgaagtttcctttttttgttgtgtctcttcctggttttggtatcaggatgatgctggcttcataaaatgagttagggaggagttccttcttttyaattgtttggaatagtttcacaaggaatggtaccagctcctctttgtacctctggtagaattcggctgtgaatccgtctggtcctgagctttttttggttggtaggctattaattactgcctcaatttcagaacttgttattggtctattcaaggatttgacttcttcctggtttagtcttgggaaggtatatatgtccaggactttatccaattcttctagattttctagtttatttgcctagaagtgtttatagtattctctgatgatagtttgtatttcctgtggggttagtggtgatatccccttcatcatttttattgtgtctatttggtttttttctctttttttctttattagtctagctagcggtctattttgttaattttttcaaagaaacaattcctggattcattgattttttggagggtttttttgtgtctccatctccttc

SEQ ID NO: 872213 - DNA, 649 bp, Homo sapiens
gacttgatcatggtggataagttttgggatgtgctgctagattccgtttgccagtattttattgaggatttgctaatcgatattcatcagggatattggcctgaagtttcctttttttgttgtgtctcttcctggttttggtatcaggatgatgctggcttcataaaatgagttagggaggagttccttcttttcaattgtttggaatagtttcacaaggaatggtaccagctcctctttgtacctctggtagaattcggctgtgaatccrtctggtcctgagctttttttggttggtaggctattaattactgcctcaatttcagaacttgttattggtctattcaaggatttgacttcttcctggtttagtcttgggaaggtatatatgtccaggactttatccaattcttctagattttctagtttatttgcctagaagtgtttatagtattctctgatgatagtttgtatttcctgtggggttagtggtgatatccccttcatcatttttattgtgtctatttggtttttttctctttttttctttattagtctagctagcggtctattttgttaattttttcaaagaaacaattcctggattcattgattttttggagggtttttttgtgtctccatctccttc

SEQ ID NO: 872214 - DNA, 649 bp, Homo sapiens
gacttgatcatggtggataagttttgggatgtgctgctagattccgtttgccagtattttattgaggatttgctaatcgatattcatcagggatattggcctgaagtttcctttttttgttgtgtctcttcctggttttggtatcaggatgatgctggcttcataaaatgagttagggaggagttccttcttttcaattgtttggaatagtttcacaaggaatggtaccagctcctctttgtacctctggtagaattcggctgtgaatccgtctggtcctgagctttttttggttggtaggctattaattactgcctcaatttcagaacttgttattggtctattcaaggatttgacttcttcctggtttagtcttgggaaggtatatatgtccaggactttatccaattcttctagattttctagtttatttgcctagaagtgtttatagtattctctgatgrtagtttgtatttcctgtggggttagtggtgatatccccttcatcatttttattgtgtctatttggtttttttctctttttttctttattagtctagctagcggtctattttgttaattttttcaaagaaacaattcctggattcattgattttttggagggtttttttgtgtctccatctccttc

SEQ ID NO: 872215 - DNA, 568 bp, Homo sapiens
atttttctgaaacaattttctgagacgattctgatgattcagacattctgatgttagttctgtttagaaataactccaagaacagtttttatattatattttcacactgaaaatcagtcagatttgcttcagcctcaaagagtgtgttttatgtaagattaaatgattgctggcgatgagctgcacttttttttctgtacaggaaaagcattaagtattctgaatttgattgtgtacttacttttaccgtggagttatatactttcagatgtttttgtgttactcattagtgttytcttctttcagcttgaagaactccctatagcatttcttgtaaaactgtcacaatgataataaaatcacttagctttgtgtatctgagaaagtttttttgtttgtttttgtttttgttttgttttgttttgttttgttttattttattttaaattctgggttatatgtgcaggatgtgcaggtttgttacataggtaaatgtgtgccatggtggtttgctgcacctatcaacccatcacctaggtattaagtccagcatgcattagctatttgt

SEQ ID NO: 872216 - DNA, 641 bp, Homo sapiens
acaggttgtgtcattattgtcattcagttcaaagaattttttaatttccaccttgattttgtttttgacccagtgctcattcagaagcaggttatttaatttccatgtattttcatggttctgaaggttccttttggagttggtttccagttttattccactgtggtacttgatataatttcaattttcttaaatttgttgatgcttgttttatggcctatcatgtggtctatcttggaaaaagtttcatatactgttgaatggaatgtgtattctattattgttggatgaattgttccgtatgtatctgttaagtccatttgttccaaggtatastttaaactcattgttgctttgttaactttctgtcttgataacctgtctagtgctctcagtagagtactgaggtccaccattattattgtattgctgtctatctcatttcttaggtctattagtaattgctttataaatttgggagctccactgttaggtgcatatatgtttaggattgtgatattttcgtgttggacaaggccttttaccattatgtaatgtccctctttgtctctcttaactgctgttgctttaaagtttgttttgtctgacataagaatagctacccctgcttgtttttttgt

SEQ ID NO: 872217 - DNA, 652 bp, Homo sapiens
ccagttttgctgcagtaatgtcagcaaaagagtctctctctttctgactctatagacttaagtaagggtttacaggctttcattttaaggtatgactgatatttagagaacaagactaaaccaaggtcaaggggaaaacagttagactgtgaacctgcagaccactccactgcacccagtgtggccgtacacctgtgctgaacggccagagacttcctggtcaatactcccacagataaaagactgcaggatctgcttatacacaaatccatctttcgctgggaacccacaactcataacaactctcctaatgccaagtcatcaaggcctcttgaaagagaatcataaaaaacaaagaatttcaaacttggaaggaaacctaaagtttactggtgaggagcttgaactgagtagaagcaaagaatcatactccagatgagaaacgccccatgmactgagctgagactggaactctcctcttcttactctcagtccagtaagtttgactacagagcactcattatcattgtgattattatgttcccgcatattttgtcgttcttagttaggcatactcctttaacactattgtaataaaagcaaaatctggaagatctttaagagtgtagcagttgcttccaagggaggctga

SEQ ID NO: 872218 - DNA, 637 bp, Homo sapiens
ctgggtgtcataattttaaagtagtgatgagcataaagaatatttcaaaatgtatccatcaactatatgtgataggagtatgtctgtgatttctattggtgacaaagtcacagttactgctcataactactctggcttattatctacattcataatttaagaaaatgctaaattgcaatcagaggtttgtataaagatgtaatttttttctcatccagtaatcacaggtttcctgaattctgctcacagacatcaaggatctgtggatcccgggttaagagccccgactgagttgatgtggcatgtctctgctttcctcgcracatgctgatttcttagtgtatctctcacatcacagtttctaagttcttgggcaagtcattccatttcataaatactacctatcattattaggtatattctccatctttgcaagaacattgttttttacatttgaaaatgtatgagacgatcaccaaaaactggaaacaactgaaatgtttgctaagtggtgaactgataaattgcagtatatctactccattgaatactactagtaaattaaagaaaaaattaataaaaacatgcaacaacatagaggaatgttaaaaggaattatgccaacttcaagaagcca

SEQ ID NO: 872219 - DNA, 681 bp, Homo sapiens
ttcctctaaggaggaatatcttcttatgtttcatcagcttatgtatttctatttttggcagagcctttacatattcttcttaacctctttgttctttcctcagtttttaagaatttttgctgagtaggccaggcgygatggctcacgcctgtaatcccatcactttgggaggccgaggcaggcagatcacgaggtcaggagattgagaccatcttggctaacacggtgaaaccctgtctctactaaaaatacaaaaaattagccgggcgtggtggcaggcacctgtagtcccagctacttgggaggctgaagcaggagaatggtgttaacccgggaggcggagcttgcagtgagccgagaccacgccactgcactccaacctgggcgacagagcgagactctgtctcaaaaaaaaaaaaaaagaattttactttctctgtcttcttttcatctgttacgccaaacatgaccctgatcttaggtgataactcagtttgtgctgtttcgattcaaaggacggggaaatcagtcataccatgcctcagcgcagaggggatatctgagctgagtctcaaggataagtatctgtgattgaattcccaggttcagggagctgtgctattcactccttcccctcacaccccattttcaaaactcaattctgattttgtcttcacagag

SEQ ID NO: 872220 - DNA, 558 bp, Homo sapiens
tggtattatattctgaagtagtatagagcatctgaaacactaaatttttagaaaatcttcgtgtcgtggactaaacctttgattttaggcctgtgccccattgtaccattggagaactgagatgaaacaggagcgagagcctgttggaacatgctttcttcaagatggaacaaagactgttgagtatgctccatgtagatcacgtatgtataggatattgtaccagcttttaagaagaggggtgggaagcctagtttgtkaaaaatatgtgtgtgtgggtgtgtgtgtgtgtgtgagagagagagatattaaaagatatagacatattatgatgataacaaaatgaaaacaatcctactaatgtaaagatattacaaatgtgaagtaaacaggtttactttttctaagaactcattttcatcttccttcgttagtataataatagttactacctgattttaagaatctgtatttttgatgactaacagtcaaaagatgcttagttgaacttctcttaacagagaagatgtagaccccacaactaaagattctgattca

SEQ ID NO: 872221 - DNA, 659 bp, Homo sapiens
aataatttcttaactattcattttaggaatcaacaatcagccattaagttagtatttaaaggctaaagttactcttcctcttatatccatttcgtggagggaatcttagtttttggactttgccaactcggttgcaggtactttcttttctagcatagcacgaggattttccactaatcctttggggcataatgctgccagtcactcagaaccaaaactgtgacttattatgtccagtctgctcttttatttatttatttattttctcttttttgagacacagtctcactctgttgtccaggctggagtgcaatggcatgatcttggctcactgcaacctccgtttcccaggttcaagcaatcctcctgcctcagccaccctagtaaccaggattacaggygcgtgccaccatgcctggctaatttctgtatttttagtagagatggggttttgccatgttggccaggctggtcttgaactcctgaccttaggtgatccacccaccttggcctcccaaagtgctgggattacaggcgtgagccactgcatcaggcagctagctatttattatctttaaaattagtatgggcaagctgatcatctgacttgctcgggtgaccagccacctaagtctgctcttatgtccccaaagtcctcc

SEQ ID NO: 872222 - DNA, 615 bp, Homo sapiens
gacaacaactctcatcataggcccagaggtctacgagggaagaatggtttttgggtccaggaccagggcctcattgccctgtgcagcctcaggatactgctctccacatctaggctgctctggttccagctggggctcaaaggggccaaggtacaccttgggccaccactccagaaggcacaggccaaaagtgttggtggcttccatttggtgttaagctggcagkaacacagtacaagagtgaaagaggcttggcaacctccacctagatttcagaagctgtacaagaaaacctgggtacccaggcagcatcctgctgcaggggtagaaccctcacagagaacctctactagggaagtgctgaaggaaaatgtggggttggaggccccatacagagtcctcactggggaattccctaatggagctgtcggaagggagccaccatctaccagaccccagaaggatagatccaccagcatcctgcatcccacacctggaaaagcacagaaacagaactgcccaaagccttgggagcctgcccctcacaccaatgaaccctggatgtgggacatggcatcaaaagagattattttggagctttaagatttaatgact

SEQ ID NO: 872223 - DNA, 615 bp, Homo sapiens
gacaacaactctcatcataggcccagaggtctacgagggaagaatggtttttgggtccaggaccagggcctcattgccctgtgcagcctcaggatactgctctccacatctaggctgctctggttccagctggggctcaaaggggccaaggtacaccttgggccaccactccagaaggcacaggccaaaagtgttggtggcttccatttggtgttaagctggcaggaacacagtayaagagtgaaagaggcttggcaacctccacctagatttcagaagctgtacaagaaaacctgggtacccaggcagcatcctgctgcaggggtagaaccctcacagagaacctctactagggaagtgctgaaggaaaatgtggggttggaggccccatacagagtcctcactggggaattccctaatggagctgtcggaagggagccaccatctaccagaccccagaaggatagatccaccagcatcctgcatcccacacctggaaaagcacagaaacagaactgcccaaagccttgggagcctgcccctcacaccaatgaaccctggatgtgggacatggcatcaaaagagattattttggagctttaagatttaatgact

SEQ ID NO: 872224 - DNA, 615 bp, Homo sapiens
gacaacaactctcatcataggcccagaggtctacgagggaagaatggtttttgggtccaggaccagggcctcattgccctgtgcagcctcaggatactgctctccacatctaggctgctctggttccagctggggctcaaaggggccaaggtacaccttgggccaccactccagaaggcacaggccaaaagtgttggtggcttccatttggtgttaagctggcaggaacacagtacaagagtgaaagaggcttggcaacctccacctagatttcagaagctgtacaagaaaacctgggtacccaggcagcatcctgctgcaggggtagaaccctcacagagaacctctactagggaagtgctgaaggaaaatgtggggttggagkccccatacagagtcctcactggggaattccctaatggagctgtcggaagggagccaccatctaccagaccccagaaggatagatccaccagcatcctgcatcccacacctggaaaagcacagaaacagaactgcccaaagccttgggagcctgcccctcacaccaatgaaccctggatgtgggacatggcatcaaaagagattattttggagctttaagatttaatgact

SEQ ID NO: 872225 - DNA, 615 bp, Homo sapiens
gacaacaactctcatcataggcccagaggtctacgagggaagaatggtttttgggtccaggaccagggcctcattgccctgtgcagcctcaggatactgctctccacatctaggctgctctggttccagctggggctcaaaggggccaaggtacaccttgggccaccactccagaaggcacaggccaaaagtgttggtggcttccatttggtgttaagctggcaggaacacagtacaagagtgaaagaggcttggcaacctccacctagatttcagaagctgtacaagaaaacctgggtacccaggcagcatcctgctgcaggggtagaaccctcacagagaacctctactagggaagtgctgaaggaaaatgtggggttggaggccccatacagagtcctcactggggaattccctaatggagctgtcggaagggagccaccatctaccagaccccagaaggatagatccacyagcatcctgcatcccacacctggaaaagcacagaaacagaactgcccaaagccttgggagcctgcccctcacaccaatgaaccctggatgtgggacatggcatcaaaagagattattttggagctttaagatttaatgact

SEQ ID NO: 872226 - DNA, 484 bp, Homo sapiens
cccccaaaattttgtaccagctcaccagcaatatatccaagccaagacaaaaacctctgaatttccagaaaaagaattcagaaggtcaattattgagctaatccaggaggcaccagagaaaggtgaagtcaaatataaagaaattaaaaacatgatacaagatataaaaagaaaattctgtgaaatagaaagcataaattaaaaaaaaatcataatgtctggaaatcaaggacacacttagaaaaacgcaaaatgcaccagaaagtctcagcaatagactcgaagaagcggaagaaagaacttcagaacttgaagacaaggcttttgaattaacccagtccatcaaagacaaagaaaatagaattttaaaaaratgaacaaagcctccaagaagtttgggactgtgttaaaattccaaacctaagaataatcagtgttcctgagtaagaagagaaatctaaaagtttggaaaacatatttgaag

SEQ ID NO: 872227 - DNA, 552 bp, Homo sapiens
tgaaaattctactgactaaatgtgggaatattttaactgcttgcagtagatgacattggtttaagatattttgcttcaaatatagaagtagatggtttaatcactgagagataaacatagtatcaaagtgaagattagacatcagttaaacaatggggttattatcagttaaacaatgaaaaagwaaggttattaaaaatgatagtattaaccatgagtgtaaaaatttcacattatataatattatgttaatttttgcttactaaaaaatagagtatattgatatatcatatcaaatagcatatgtgctatattattaaaacttatcaatatagatattaattatactatagctacaaaatggaattcaaattaactcgatgcaattttctcaatagagaggaagtataatttttaacacaaaatattaataaaaattaaaatagatgaaaaattacatatagaaaactaggacaaatagaaataataaatgttaattttgctctaatacattttgtaaaaattaccattgacttatacatttctttctca

SEQ ID NO: 872228 - DNA, 552 bp, Homo sapiens
tgaaaattctactgactaaatgtgggaatattttaactgcttgcagtagatgacattggtttaagatattttgcttcaaatatagaagtagatggtttaatcactgagagataaacatagtatcaaagtgaagattagacatcagttaaacaatggggttattatcagttaaacaatgaaaaagaaagsttattaaaaatgatagtattaaccatgagtgtaaaaatttcacattatataatattatgttaatttttgcttactaaaaaatagagtatattgatatatcatatcaaatagcatatgtgctatattattaaaacttatcaatatagatattaattatactatagctacaaaatggaattcaaattaactcgatgcaattttctcaatagagaggaagtataatttttaacacaaaatattaataaaaattaaaatagatgaaaaattacatatagaaaactaggacaaatagaaataataaatgttaattttgctctaatacattttgtaaaaattaccattgacttatacatttctttctca

SEQ ID NO: 872229 - DNA, 552 bp, Homo sapiens
tgaaaattctactgactaaatgtgggaatattttaactgcttgcagtagatgacattggtttaagatattttgcttcaaatatagaagtagatggtttaatcactgagagataaacatagtatcaaagtgaagattagacatcagttaaacaatggggttattatcagttaaacaatgaaaaagaaaggttattaaaaatgatagtattaaccatgagtgtaaaamtttcacattatataatattatgttaatttttgcttactaaaaaatagagtatattgatatatcatatcaaatagcatatgtgctatattattaaaacttatcaatatagatattaattatactatagctacaaaatggaattcaaattaactcgatgcaattttctcaatagagaggaagtataatttttaacacaaaatattaataaaaattaaaatagatgaaaaattacatatagaaaactaggacaaatagaaataataaatgttaattttgctctaatacattttgtaaaaattaccattgacttatacatttctttctca

SEQ ID NO: 872230 - DNA, 591 bp, Homo sapiens
tggtgaaaccctgtctctactaaaaacacaaacaaagtagccggtcatggtggcaggtgcctgtagtcccagctactcgggaggctgaggcagaaaaatagcatgaacccaggaggcacagcttgcagtaagccgagatcactccactacactccagtctgggagacagagcaagattccatctcaaaaaaacaaaacaaaacaaaacaaaaacctgatacaaaatttaattttaaatattaaagagagcaagttattttctaacactaataaagtatttctgacattctcccttcaaacaaacatgtttcccaggagaacttaaacattttctgccaaggactttttgtcatttctgttaacttaatggatgctcttcccagaatgtttttaaatatgtaaaataaattcaaattacaaaaattatcttaaaatgcaatcatctatstatctagctttctagctcttctctattaacatagtgtcataggacattcttgcactgctttaaagaaatacctgatactgggtaatttataaagaaaaagggtttaattgtttcactgttctgcaggctatacaggaagcata

SEQ ID NO: 872231 - DNA, 662 bp, Homo sapiens
acaaaatgaagactgttacatggagcagcacgattctaaacattccctgaggtgcccttttttagggtatctctattataggtctacaaccaaatatgatgtcctgcaggaatattgcctaaaaatgcttcaggatgatcactgagmgggtctaaccaggtagaatattgcatagcaatagatattggggatgattagttgagacaattgcctgattacaatgggaaaaatctagctgcctcctatgtaaactgccatagcttggcctgctaaataactaccagccctgtgcttgcgctggatgcccccatccatcaccaagcacactgacaccacccttaaagaattatttatgggagtcaattggtggacagaggtccctgatggcataaattccacactaagaccaggatgcctctaggaagccttatggaatgcccagacaagagtatacttagaggtaacatcccctcacctaacaattgtttgggatacccagcagctctggattgactctatttatcaaattgtgcaaatgccattagtgtacaacggcaacagtattcccaatggatatgccaaaattggccacacaaaaaactaaagcgtgacctcgctggaggagttggagctgggctaggcatattgaagcaatctgagtt

SEQ ID NO: 872232 - DNA, 639 bp, Homo sapiens
agtttatgataattgttactgtcaaaaacccatggtgacaggtacatcgtgacttgaaaaaacactgtaatatttagggagaaatgtgttacattgaggtagaagtatttatctatgcattcaataaaattaataggtacatacttcggtactctaacagggtgtaattgttgaaatagtctttactacatagtcawctgtgaattctttctttgaaaatacctttttcatcccccacagtttggaatattgttcaaaagctctgatgagtaactcttctgtgtcagacactgttcttgctgcaaaaggataaagttacttaactgactccctcctttgcttcttgcactaactcagttgttctcaaccagggcaattttggcctccagcagatatttggcaaggtttggagatatttccggttctcacaattggtggaggaatgctactgctctctagtgggtagaggccagggatgtgataaagcttcttcaatacacaggatatctcctgcataacgaggaattttctaatcctaaatggcagtactggcacagttgagaaactctgtcctagccttgtatagagaatgctgtttttgctttgtacagatctccaaggcgcacccatctcctagca

SEQ ID NO: 872233 - DNA, 639 bp, Homo sapiens
agtttatgataattgttactgtcaaaaacccatggtgacaggtacatcgtgacttgaaaaaacactgtaatatttagggagaaatgtgttacattgaggtagaagtatttatctatgcattcaataaaattaataggtacatacttcggtactctaacagggtgtaattgttgaaatagtctttactacatagtcatctgtgaattctttctttgaaaatamctttttcatcccccacagtttggaatattgttcaaaagctctgatgagtaactcttctgtgtcagacactgttcttgctgcaaaaggataaagttacttaactgactccctcctttgcttcttgcactaactcagttgttctcaaccagggcaattttggcctccagcagatatttggcaaggtttggagatatttccggttctcacaattggtggaggaatgctactgctctctagtgggtagaggccagggatgtgataaagcttcttcaatacacaggatatctcctgcataacgaggaattttctaatcctaaatggcagtactggcacagttgagaaactctgtcctagccttgtatagagaatgctgtttttgctttgtacagatctccaaggcgcacccatctcctagca

SEQ ID NO: 872234 - DNA, 639 bp, Homo sapiens
agtttatgataattgttactgtcaaaaacccatggtgacaggtacatcgtgacttgaaaaaacactgtaatatttagggagaaatgtgttacattgaggtagaagtatttatctatgcattcaataaaattaataggtacatacttcggtactctaacagggtgtaattgttgaaatagtctttactacatagtcatctgtgaattctttctttgaaaatacmtttttcatcccccacagtttggaatattgttcaaaagctctgatgagtaactcttctgtgtcagacactgttcttgctgcaaaaggataaagttacttaactgactccctcctttgcttcttgcactaactcagttgttctcaaccagggcaattttggcctccagcagatatttggcaaggtttggagatatttccggttctcacaattggtggaggaatgctactgctctctagtgggtagaggccagggatgtgataaagcttcttcaatacacaggatatctcctgcataacgaggaattttctaatcctaaatggcagtactggcacagttgagaaactctgtcctagccttgtatagagaatgctgtttttgctttgtacagatctccaaggcgcacccatctcctagca

SEQ ID NO: 872235 - DNA, 662 bp, Homo sapiens
ttttttaaggaagttatctaaaaatataacctagcttatttttaaatcagcttggattgaatcttggcaattacatggcagcacagatgaaacatggatagagaaccttaagggaccagtagggcttataagaatcatttttatttatctataagaagacaaagaccaaaggtatgttaaagtaaatcaagcaggcagtggaaaaaacagactattatgacttgatgacaaagaggcattttcttgcttggatattcagataacagattatgaggtctcatgaaaacaggattcatgaatcaaagcttctcagtttaactgtagtcactaagctgtttggatttagtagattctgagatatattgctatacatctctccaagattttgttgctagagatatacagaaattcaagamtagtccaagaattttaaaatctgcgaaaaaaatctctgtatctttcatcagttttcattctgatgaaatctaagagtctgcccagaagatagattggtccacaagtgcatgatatcacaaacagcagtagtgttgataggaaatagagcagatctgaaaacttctttaaaagacatctcatctctgggcaggagggctaccttcagaagggtgatttaagggaagttttctgggccagaactcaga

SEQ ID NO: 872236 - DNA, 682 bp, Homo sapiens
ttgtaatcaacattttcattcactgtacattgttttctattatcagtaatgatttaaggagtaaaaaaaattatatttctagccaaacgataaatatttatgtatttttttttactaaaatgtaagttttatttaggttttgagagaagttatttttcttttaaaagtcaacactatcagccagacacagcagctcatgcctgtcaccccagcaatttgagaggccaaggtgggcggatcacttgaagccaggaattcaagactagcctggccaacatggtgaaactccatctctactaaagaaaaaaaatgcaaaaattagccggacgtggtggtgcatgcctctaattccagctgctcgggaggctgaggcgtgagaatcacctgaaccccagaggcagaggttgcagtgagctgagatctggccactgcaccccagcctgggtgatggagtgaaactgtgtctaaaaaaaaaaaawatatatatatatatatatatatatatatatatatatatatatatatactcaacattattttataaaattcaaacataaatttcaaaggtaaatacaaactacagttaataaatatcaagtacttaaataaaaattgaatatagctaaagttaaaatatttttgaatatgtaattacatcttattagaattttacagaaatgaa

SEQ ID NO: 872237 - DNA, 611 bp, Homo sapiens
aatgtgtcctccaaagttcaggtgttggaaacttagtccctgtattaggccattcttggatcgttataaagaaatacatgagattgacttttttaaaattatttttaattttttttgagatggagtcttgctctgtcactcaggctggagtgcagtgaagcgatcttggctcactgcaacctctgcctcccgggttcaagcgattctcctgccttgtcctcctgtgtagctgggattataggtgcccaccaccacacctggctaattcttatgtttttagtagagatggggttttaacacattggccaggctgggtcaggcacagtggctcatgcctgtaatcctagcactttgaaaggccaaggtgagtggatcacttgagatcaggagttctagactgggtaatttataaagacaagaagtttaattggctcaaggttctgcagactttatagcaagcayggcactggcatctgctcggcttctggggaggacttgggaagcttctgactatggtggaagggaaagggggagcagacacatcacatggcataaagcaggagtaggatggagggcaggtgccatacactttaaacaactggatttcccga

SEQ ID NO: 872238 - DNA, 522 bp, Homo sapiens
atgtgtgtgaataatataaacggatgccaagcattttagagcagaatgaatgctggattccatcttttctcaatgctccatttcactaagattcagaaagggtgggatgtgaataagattacaaagcattttaaattcccagggatttcactcctggtttagtggtctttccatttaacaggctgtaatctcaaatactgttcttaagcataagactattttaaaatgtgtttaaaattaagtawaattatatgtgtatacataatttgggaggacttactttattttctttaaagcagcccagatataattttttaaattatttttcacttgtatataagttaaaaaaaatttaaatactatattgttatagaaaaaataactgctttaccaagagttaagtttgtcaagaagatccacaccctcttctccctctggggaagagaaaaaatacaaaacaaaacacctggtgcagcaagatttcgtgcatgcactgcctgaagctacgaataaatttattag

SEQ ID NO: 872239 - DNA, 591 bp, Homo sapiens
aattacagtccagtaaacgataaaatggcataattcctcaagaacaaagaaaacaggaaacagggcaaatgcaatgtaacatttgaaatctggaaagtaaatggacaagtgtaaaaggctaagagtatcagagaccgtcayatttgaaatcatcattgggaaaaacccagctacaacctgatttgtacctaaggaccatggaagacccaaaaatcgatactgccagggagctcctcacagctagctgttatttgccccctgtgccaaattcacatttccatatgttttctagtccatataatttctctatatgaggaatctgatctcattctcactttcataatccttggaccatataaattagggaattctgcctcacaaaatacagcagcaatattcattattagatattgcaagtgcatatttttatacaacccttgtagttgcatacatctctattcatctattctaaattgttctttaaactatttttgataaataggacttgtaaagacaggctcaatacctgttagagatacttaaaacttggacagttcaagagcagtgtaaggaagaaatgttgacagatgg

SEQ ID NO: 872240 - DNA, 701 bp, Homo sapiens
atgttcgccttccctgtacatcttccatatgttacgttctcaaattccatttgcattttttaccactgaatgatggtgaacagacagaatcactttataaacaaaaagaaatatcatttataaagaagttaaatgtatgacaaatccccacactctccttctccttttttaaacaaatgtatcataaacgtactgagcagtccagtggaaaataagaacatttcagttaatagcaaaggccgcttcacgctgcatctagacacagtgctaccgtgagaygtgtgtgactatcaaatttttgtttatttaacactaggcaaaggctgtgctctaattctgtttctaaattattgaccatcatgggttcactcccgttaggcactcctacacaattatccaaataattatacaaaaaagagaaaatatcccctcaaatgaagaattgctctctctacttcatagagtgtagctttattctgactattgtttctgtcttattttttaaaaatatggaagaaatcaagttagccaacataaaactactttatatttacagccagaccacagataagactatcatttctcctgatgttactaactcactctatggaatacaagtttaaatactctaattatgcaccttagaaaaggacatatttactacagtttgatcacaaatgtggaacgtctagatataacgg

SEQ ID NO: 872241 - DNA, 617 bp, Homo sapiens
caagaaaatcaaatgtttttcagtaggtgacaaaaaataatgccatataataatatatccatgataagagtatgcattatagattcattaggttatatgttcacattcttgtgccatatagtccttgtcacattcctgagacactgctacgttatgttttcaggtttacagatgagggaacaaaagctctgggaggttaagtgacctgcctgatatcactctgttaataagtggcaaagctgagcattagaccaattttccgagtttaaatccagagttctcattcatttacaaatgcaaagrcttcctctatgaagcactgtggaggaatttgaggttggggagacaggagagagaacactgcttagaaaagtactggaataataattcagtaactcaggctactagggtgcttcccacaaaagatatgcaaaagagggtcaaattagatattgtaaatgaaaaatagcaggttgtgaggactatttggacagaggatgggggaggagaattaaaagatgtttagatggttgagcaaacagacataccactgaaagaaatggggatgatagaagaatcacatctgatacaggcacttaattactatgagaattaaa

SEQ ID NO: 872242 - DNA, 637 bp, Homo sapiens
agggcatcttcttgggaggtgttgggtctgtcctcaactaatcaaagaagactgtgatagctcagtgttatttgtagtggtagagacaagacagttgaactgtaggggccaggttgtttctttgccagagtggccagcagttcacaacttcgctactttaaacagtctcaaccaggcgtagtggctatgcctgtaatcccagcactttgggaggctgagacgggtggatcacttgaggtcaggagttcaagaccagcctggccagcatggtgaaaccccgtcttctacaaaaagtacaaaaattagtcggcatggtggcgggtgcctgtaatcccacctacttgggaggctgaggcacgagaatcatttgaacccgggrggcggaaattgcggcgagctgggagcacaccactgcactccaacctgggttacagagtgagactctgtctcaaaaaaaaacaaacaaatgaaaacccccaaaagctccatggagatctctaaaaatacagttgctcaagtaccatctctagagtttttttccccaaagttcaactttgctctctatctctaactgtatctgtaagataagctcccccaggacaaaaggagaagaatcttgcaataattgtctggttaa

SEQ ID NO: 872243 - DNA, 533 bp, Homo sapiens
gttaaccattcatctagacttttttcaaggtttttagcttccttgtgccttggagaaatttgttattaccaaccttctgaaacctacttctgtcaactcgtcaaactcattctccatccagttttgttccattgctggtgaggagctgtggacctttggrggagaagaggctctcagttttggaattttcagcttttctgctctggtttctccccatctttgtggttttatctacctttgttctttgatgttggtgacctacaggtggggttttggtgtggtgtcttttttgttgatgttgatgccatttcttttggtttgttagttttccttctaacagtcaggcccctcagctgcaggtctgttggagtttgctggaggtccactccagaccctgtttgcctgggtatcaccagcagaggctgcagaacagcaaatattgctgcctgatccttattctggaagcttcgtcccagagaggcatccacctgtttgaggtgtttgttggcccctactggaggtgtctcccagtc

SEQ ID NO: 872244 - DNA, 679 bp, Homo sapiens
ttagtacatcttctttttgctgcttttgcccaccaacaatcctcctgttaaactcatcctttaaaactgaaaataagctaattgtagtaatgcccaccatcaaaccaatcaatggtttataattaggtcccagcccatgtctgcagaactacctcatgttctacccttccctgcactgagctcaggctcacagatcttactcaggcaccttggacatactgagatgggagtctggtataaatgggcttctcagaaaatactgtccaaccatgcctaaagagcctgcctcattagtttttagctcaagyaacagtttatatctttcatagtatacgatcacaatctctaatgactatttttatttatgtttaatcatttacgtctttcacagaactgtaaggtttttgtgaccatagtcacccttgaactcttctatccttttaacctggtgcctggcatgagtaggtgcctagtaaataatcattgaagaaatagatgcaatgcagagtgctcacaataacaggaattttttccacactgcacatatgatattgggctgctaattgcgcttctaaatatagagcaaataaattgtgtaaaataagccatgtgagaaaatgaatatttcttggagaatgtgaactttgcattcatttagcttctaggtcccaatttagga

SEQ ID NO: 872245 - DNA, 450 bp, Homo sapiens
tcattatccgaggggtcctaggacagccagtcactagatacttctcccagccactaagttgtgactggggaactttactcttttcacatgcttttctaattatgcctgaaagccccactcccttgttagggagagacatcctagcmaaagcaggggccgttatacacctgaacataggagaaggaacacctgtttgttgtcccctgcttgaggaaggaattaatcctgaagtctgggcaacagaaggacaatatggatgagcaaagaatgcccatcctgttcaagttaaactaaaggattccacctcctttccctaccaaaagcagtaccccttagacccgaggcccaacaaggactccaaaatattgttaaggacctaaaagcccaaggcctagtaaaaccatgcaatagaccctgcaatactccaattttaggagtatagaaacccaa

SEQ ID NO: 872246 - DNA, 450 bp, Homo sapiens
tcattatccgaggggtcctaggacagccagtcactagatacttctcccagccactaagttgtgactggggaactttactcttttcacatgcttttctaattatgcctgaaagccccactcccttgttagggagagacatcctagccaaagcaggggccrttatacacctgaacataggagaaggaacacctgtttgttgtcccctgcttgaggaaggaattaatcctgaagtctgggcaacagaaggacaatatggatgagcaaagaatgcccatcctgttcaagttaaactaaaggattccacctcctttccctaccaaaagcagtaccccttagacccgaggcccaacaaggactccaaaatattgttaaggacctaaaagcccaaggcctagtaaaaccatgcaatagaccctgcaatactccaattttaggagtatagaaacccaa

SEQ ID NO: 872247 - DNA, 605 bp, Homo sapiens
ctcaccaccctcccaggcaacctgtgttaacaacctagttgttaaactgaatttgaatatgatatgattttctccatgccaatgtatcatatgcaaaaatactatgcattagatatacatatcagccagccttcttaggaagcagcagaaaccaactctggctggtttaaacagaaaagcagtgccttaaaaatactgagtaattcacaaattctctgtatgggttrgagaagtagccaagaaggccactgatggccttttctgaacctgcgcaggagtgtgggtagcagggcagagatgagaagggattgggaggtgttgacaggcagacttaatgaaggaaatttcaggcagccacaattagaagaggaaaatcttggcaggagaagacatttcattttgtttgttagaccacttgggggtcatctggaataataattcctggagaggggtatttctatggaaagaatgtgtaacgagtaagtccaggcttctcacagtatgttcaggaacacagaggaatctcgttaggtcctccagaaggcaaacatcaagatagagttagtagtgccatcctgtgctgccacttaacaaaagagatatgt

SEQ ID NO: 872248 - DNA, 665 bp, Homo sapiens
gaaaagtcactcctacaatgatgtaataactctaccaatggccctcggtttctgaagatttgcttcccttaattctcctcactggaattgggggattagatctctgaaagcagagatgatataaaaacatatataacatatataaaaacaaacaagcaaacaaatagcccaatagggccatgagtcttggtagggatgtaccagtaagaaagagttctggtttccctaagccatggtgccagtcctggctctttgtttcaaaaggatcttcagagccacctggcacagakggctttctcttggagtcgttccttttgcacctctgcatccttggcaacatttcaggggagctcccgggtagggcaacatcttaactgtcaagacagtgcagcatcagagagtcacagaggcaggctctggaatccctagagaccaaggccaagaccaagaacaggacatatgtaccaggattggcattgcagtgatggctatagtcacaaacaatttgaaacatccaagctgttgagccataggggaccacttaaacagatgctggtatattcataccaaggaacactatgcactcattagaaaaaaaatagatttctgtaaataaaagggaatatgaatatgttcataatatattttaagtaaaaaaggcttaa

SEQ ID NO: 872249 - DNA, 576 bp, Homo sapiens
gactgccccactggattttgaactttcatggggtctgtagtccctttggtttggctaatttctcccatttggaataagtatatttatccaattcctgtactcacattgtatctaggaagtaactaacttgcctttgattttacaggctcataggtggaaggaatttcccttgtctctgatgagactttggatttggacttttgggttaacgctggaatgagctaagactttggasgactgttggaaaggcatgattgtgttttgaaaggtaaggacatgagatttgggaggggccggggtgaaataatatggtttgggtatgtccccacccaaatctcatcttgaattgtagttcccataatcccatgttgcaggaaggatctggtgggagacaattgaatcatggggcagttcctctatgctgttcttgtgatagtgagttctcaggagatctgatggttttataaggggcttttcccactttgcttggcacttctccttgctgctgccatgtgaataaggatgtgtttgcttccccttccaccacgattgtaagtttcctgaggcctcccgagc

SEQ ID NO: 872250 - DNA, 599 bp, Homo sapiens
tcagcaaaagctaacacatacaacatgagagagtgatgtcaagatggctgatcttgaggaaaagagcttagcacagcccagacttacttagactgttggtaagaatatgcaggtgcatgttcgttggatgtgtccactgctatctgttgctgctgaccactggtgtcctgggatgaaggtgccactgtctggggagaggtatcagcaacaacaccctaaggaggcaaataagaacataaaagccttacttgcttcagygaagggccctctctagataggctgtaagtacccctcttctatttggcttaagtagagataccctcagctacatgaagtcacaataagtactcagaggaaacccagagagcacatttagataagggctaagtaattcatcctaatgtgacaccaagaagccttgccattagaagttgttggagtagttaagtggtcagaaaataattttgcctatacttggaacttttaaaccaggtttgcacatttatccacaataaatgccaatttatcctcattcaggattcctatacaaacttgtatgtccaaacattttcctggcatatttcactgtatcatgtcta

SEQ ID NO: 872251 - DNA, 584 bp, Homo sapiens
ctaataggaagatttgaccaattaagtaagttcaggaaacacttccctaaggaagtggcaaaggagaagaaatcagaaagaagagtaaggttcaattagatggagtgagttgtcacataaggcaatccaggcattaactaagggaaaataatattatgtaatattagtgtggctgaagcagagggcattaggggagtaagagccagatcttacatggcatcacaggccatgtaagggattttgttatttagcctaaggacagggtttaaagcaaataggaatggaaagtttgggtgtgtttgaggttaytgcacttgcattttgtagtgctctccttggttgcagtgtatggaacacactgaagaatggccaccagagaaagcagagggagaccagtaaattatctgttgcagtggtccaaatggccagtgattgtatatggcttgaattcagacagatgtatgggatatgtagaaaacaaaattgacaaaccctggaagaaaactggatgtgagaaataaggaaagaaaatccagcttcgaggataacagtccagcttgcacatcctcatggatagaggtgtt

SEQ ID NO: 872252 - DNA, 717 bp, Homo sapiens
acttaacttctaattctttaaactccatcctgttatcttctttaggggctgaatgggctgaatgggagaagggtgtgtgatttccttgtgtattggtgaggtgcaaagaatggaaacaaactctatctgatttaagcaggaaaaaaatgacatgaaaggatattggaatttcacattccttgggaagttaaacaagcaggaacaaaggaaagctctgcagccatggccacagccagagatgcagcacagagcctccaggtgaggacacgctgcccctaccctgacacgtgcacccagcaccggacccaccaccagagggcactcctgctgctgccctccaggaactcctccctatttatgcctcsgcagcttctttaactccagatttaaaaattccaggcactacattagatagacctaattccatgggagctacaaaagcaatttctgagaattttctgtttctacggtggtaaggaatcttctgtgtctatagggggtggactctgcttcccaccaagacttttatggcagggaatttccaaaatagagaaaaggaggtaaaatgctggagacttttgcttttgcttttgtttttttaatgacaagcagtccctcttccacaaatttctcaggtaattgttcagaaaatgtcttgtggacatattctcctttcctcattcccatctaagggaattggatttttatggtcatccc

SEQ ID NO: 872253 - DNA, 717 bp, Homo sapiens
acttaacttctaattctttaaactccatcctgttatcttctttaggggctgaatgggctgaatgggagaagggtgtgtgatttccttgtgtattggtgaggtgcaaagaatggaaacaaactctatctgatttaagcaggaaaaaaatgacatgaaaggatattggaatttcacattccttgggaagttaaacaagcaggaacaaaggaaagctctgcagccatggccacagccagagatgcagcacagagcctccaggtgaggacacgctgcccctaccctgacacgtgcacccagcaccggacccaccaccagagggcactcctgctgctgccctccaggaactcctccctatttatgcctcggcagcttctttaactccagattwaaaaattccaggcactacattagatagacctaattccatgggagctacaaaagcaatttctgagaattttctgtttctacggtggtaaggaatcttctgtgtctatagggggtggactctgcttcccaccaagacttttatggcagggaatttccaaaatagagaaaaggaggtaaaatgctggagacttttgcttttgcttttgtttttttaatgacaagcagtccctcttccacaaatttctcaggtaattgttcagaaaatgtcttgtggacatattctcctttcctcattcccatctaagggaattggatttttatggtcatccc

SEQ ID NO: 872254 - DNA, 727 bp, Homo sapiens
attctgataacaaaatgcactatcctatcaagaggaaccccactggtctcattaacattatttagacaaaaatctaaagccatttataagcctcgtctactaaactatcaaagtgaggccactatgttagaaaaacacagctgaattatttatctaacatttcctggtattttacttaatgagtaaactgtatgttgatctaataagaacagggagtggaatggggcgtatcatttcttgactcagacattttttacagctagcaggaaactagatgtcatttactccggaggtctcaacctggcagcctgttctgcaattgtgttttctttgtttggcagtgttttgatttaatccgttgcttatattaaacagtatacttcatataaaaatgtccagwctttcacttctttttaaaaattagaatatctggccccatttctcatatttatataaggtaagcatcttcttatatgtaaaagtcatcagctaatccactttactcatttaaattatctgcatgagttttaattttgaggagtactgacagaatctccaccattactcctccatcctgcattctaaacaaataagcatcctaaacaaggtgttaaaaaatcagccaaccaaccactatgaaaaggaatcattgttcttgttttaattaggactcaacaccaatttgataaaaaaaaaaaaagttctactcagtattgcttctcaatgt

SEQ ID NO: 872255 - DNA, 609 bp, Homo sapiens
cttatttcacgtagcataatgtccttgagttcatccatgttgtcatgaatggcattattcttattcctttttgaggctgaatattattccattgtgtgtgtgtgtgtttgtgtgtgtgtacgtgggtgtatgtgccacattttctttttccatttatttgttgacagacacttaggttgtttccatatcttggctattgtgaatagcgctgcagtgaacttgggaaggcagttatctctttgagatactgatttcatttcctktggatgtatatccagatgtgggatttctggattgtatggaagttctacttttaattttttgaggaacctcatactgttttccataatggctgtaccaatttacattcctcacaacagtgcacaaaggtccaggaagggagattattaagacaatgagctgagagcctaaaagtccaagttggaacggttgaagttacaatggtgagaccaaatgattcccaaacttgtctgaacattggcatcccctgggaactttcagaaatactgatgcctgtaatcaacccccagagattgtggcaaaatttgcctggaatgcagcccaagttttggaagcattaaaagatcc

SEQ ID NO: 872256 - DNA, 621 bp, Homo sapiens
attaaaaagagataaatggttaatctaatgtgaagtatagccataggaatccatacttgtcactggtgactataaaaataggtgcaccatgcatgagcgtatgagatgcttaagtcaattctgtattttctttttactttaaggatcatgccattttagaattccagtttctctaatgaagaagcttggaaaggagttaagaggcttgtccaaagccaagagttttcagaggtatatcataaatatgttttcttaaaaataccgtaactcctgatattcacattgggttcagctttttgaaaaacattagaaagaaagtttagaaaaacaagttcatgtatatgctggtttttacaaatcaacggtgctcatcaatttactttaaaaactaatgcaayagaaaaggcaagcctgctgagggaaaaatatctggtgaacagcagaaaagtctttcttcccccaagagtcaaggaaagggggaagagaagaaaaaggagagaagagaaaatgaaccaaaaatcacatttttaaaagtgtgacaagctcaaagacagtaatttcaaagacgaactcaaaagaaaatcttcttgacagttttaataacccaaacaaacatttcaa

SEQ ID NO: 872257 - DNA, 670 bp, Homo sapiens
ataggattatatgaggctaaaaagctcccatatagcaaaggaaacaatcaacagtgaagagacaacccacagaatgggagaaaatatttgcaaattacccccctgacaaggaattagcatcctgattataaaaggagcacagatatctcaatagcacgtgcacacacacacacacacacccctattaaaaatgggcaaaagtttgctgagsatgatggcttccagcttcatccatgtccctgaaaaggacatgatctcattcttttttatggtggcatagtattccacggtgtatatgtaccacattttctttatccagactatcattgatgggcatttgggttggttccatgtctttgctattgtaaatagtgctgcaataaacatacgtgtgcatgtgtctttatagtagaatgatttatattcctttgggtatatactcagtaatgggattgctgggtcaaatggtatttcgggttctagatctttgagaaattgccacactgtcttccatgttggttgctctaatttatatttccagcaacagtataaaagcattcctatttctccatagcctcaccagcctctattgtttcttgactttttaacaattgccattatgagatggtgtgagatggtatctccttgtggttttgatttgcatttctct

SEQ ID NO: 872258 - DNA, 746 bp, Homo sapiens
agccaggagaagaggtttgggtcttaggtgaaagaaaaccatagaaagttatgttaacaaatagttaataaagaagtacaagtgagaggaactggaagcaacaggaaagagctgggcggtggacagagaggtacaactgaggaagctattgcagcgccaactttctgattattgctcaatcagtttcagtgttactttgtatctatcagttgactgattctacatgtcctttacaaccatgaatgctgggcagtttggtttgaaatttttgattaggttatcacatcgagcactgctatgactgaggatggtggggcacaggagcttaagactggtattggtagatggagttgaagattgctgtgtggatggaagtaaagatgaagatagagatgaagattggtttgggctgaagatgagaagtgggggcggagatgargatggcgtggtgaaccctgtcaacattagctatgggaaaacaggattaggcagatctttgattgaaagaattgaaccacagccaagaatataggacagattctgaccaaaatagaagattctagaatgagctagtcagaatattggcacaaaataaatgaattgttgctcagagcagaactccatacctactaggacgaaaagcctaagtcacattgctgctggctgggcaccaaatgctaactaacttcatcttccagggactggacctattgctgcacaattttctcagcctccactagctgaaa

SEQ ID NO: 872259 - DNA, 633 bp, Homo sapiens
tttaatgaagttttttttttttcttgttaatttgcttgggttcctctcccttgtccactttttaatgaagttgctttttttttttttttcttgttaatttgcttaggtttcttatagatgctggatattagaccttggtcagatgcaatgtttacaaaaattttctctcattttgtaggttgtccattcattctgtttctagtttcctttgctgtacagaatctctttagtttaattagattggttttgtcatttttttaattttgttccaatcgcttttggtgcctttgtctattcctgtgaaatatttgcccattccaatgcccaraattgtattgcctaggttgtcttccagagtttttatacttttgggctttacatttaagtctttcattcatcttgagtaaactttagtatatgatgtaaggaagagatccaatttcaatattctacatctggctagccagttattccagtaccaattattaaatagggaattattttcccattgcttgcttttgtcagttttgtcaaaaatcagatagtcatagatttgtgactttatttctgggttctcagccaaaaatgacaagagggatattaccactgacaacacatgtattagtccgttct

SEQ ID NO: 872260 - DNA, 587 bp, Homo sapiens
cgttgcaaattccagtattcagttctcagtcactgtggaactatcattagtatttgcgtattttcctctcccttctactaaaaataaagtaaaaattatcttagatcccaggacaccataccctctgatgctttgcattttctttttctgttctgttttttaattttttttttagatggagtctcactctgtcaccaggctggggtgcagtggtgcgatctcggctcactgcaacctccgcctcccgggttcaagcgactctcctgccttagcctctcaagtagctgggactacaggtgtgtgccaccatgcccagctaatttttrtatttttagtagagacggagtttcaccatatcggccaggatggtcttgatgtcttgaccttgtgatccgcccatctttgtctcccaaagaattttcttttactaagaagaaagaaaaaaggtactggaaagctcctatttattatcttttaaactttagaggttcttagtagaaagataaactcaagtttagtaatttagtgtggagtttaaatgaaagagttttttttcatatgcaggaagtattgactattaattccca

SEQ ID NO: 872261 - DNA, 464 bp, Homo sapiens
tttgagaaaaaaaatcatagaggagcaatttcataaaatgtgaaaaactttaaggaaaactaacatatgttgaaaactgactatgtgctatatactctgtcaagttattttcatatgctatttattttgtttattcattttttgaagatacaagctcagaaaaattatgtaaatttttcaaggtcacatggtatttgagtcaaatattgaaccatgacataaaactgcatccatcttaccccagggacaaatctctcacctattatattacaytagttgtcatattgagaatgtgtttttacaaactaaatatctacataggcactatcctagtgaactcagcagcactgcatatgaaattagaagattctcttaatgtgtttctcttctgtttcatcatcattaccaattaggattctaagtgaagagagaggcaagaggaagaaatgacatgtcactcttca

SEQ ID NO: 872262 - DNA, 464 bp, Homo sapiens
tttgagaaaaaaaatcatagaggagcaatttcataaaatgtgaaaaactttaaggaaaactaacatatgttgaaaactgactatgtgctatatactctgtcaagttattttcatatgctatttattttgtttattcattttttgaagatacaagctcagaaaaattatgtaaatttttcaaggtcacatggtatttgagtcaaatattgaaccatgacataaaactgcatccatcttaccccagggacaaatctctcacctattatattacattagytgtcatattgagaatgtgtttttacaaactaaatatctacataggcactatcctagtgaactcagcagcactgcatatgaaattagaagattctcttaatgtgtttctcttctgtttcatcatcattaccaattaggattctaagtgaagagagaggcaagaggaagaaatgacatgtcactcttca

SEQ ID NO: 872263 - DNA, 571 bp, Homo sapiens
tgtgatgtaagaatgtggtcttacagaagaagaaattagggcccaataggattaaatggcatagctgagattcttactcatcctctaaccaaaagtgcagagcctccttttactgtagcagacttctgactacctgtcaaatcatattattttagtgtaatgtggtcatttgaaaggctttgatgaacattcctttatgatacagggatatcacaggtccagcgtattatcccaacctattccaatataaaaaagcattaggtttagcattggaagacctacacaccagtctcacctgcacatgytatgttagttctcatttctttttcatagttactccaacaataggagttgtgtgtttttacttttccttgtgtacctcacaggattgtttatgaatctgaattgatatttgaaaaaaaatccctaagtacgctaaaacgttttacatattatcatcagtttcagaggcacaaaaggattaaataagctagggtcttaccagtcatgtcctgtatgcatgtcacaagtcttaaagggaacaaagccagaaaatgtcaattaagatgta

SEQ ID NO: 872264 - DNA, 687 bp, Homo sapiens
tttctgttttctgcatatggctagccagttttcccagcactacatattaaatagggaatcctttccccattgcttgtttttgtcaggtttgtcgaagatcagatggttgtagatgtgtggtgttatttctgaggcctctgttctgttccattggtctatatatctgttttgttaccagtaccttgctgttttggttactctagccttgtagtatagtttgaagtcaggtagcatgatgcctccagctttgttctttttacttaggattgtcttggctatacgggctcttttttggttccatatgaaatttaaagtagttttttctagttttgtgaataaagtcaatggtagcttgatgggaataacattgaatctataaattactttggacagtttggccattttcacgttattatgagcatggaatgtttttccattcgtttgtgttctctcttatttccttgagcagtggtttgtaattctccttgaagagatccttcacgtccctygtatgttgtattcctaggtattttattttctttgtagcagttgtgaatggaagttcactcataatttggctctctgtctattattggtgtataggaatgcttgcaatttttgcacactgattacaaaagataaacaggggaagagctaatcacctgatctacacatgaacataactca

SEQ ID NO: 872265 - DNA, 687 bp, Homo sapiens
tttctgttttctgcatatggctagccagttttcccagcactacatattaaatagggaatcctttccccattgcttgtttttgtcaggtttgtcgaagatcagatggttgtagatgtgtggtgttatttctgaggcctctgttctgttccattggtctatatatctgttttgttaccagtaccttgctgttttggttactctagccttgtagtatagtttgaagtcaggtagcatgatgcctccagctttgttctttttacttaggattgtcttggctatacgggctcttttttggttccatatgaaatttaaagtagttttttctagttttgtgaataaagtcaatggtagcttgatgggaataacattgaatctataaattactttggacagtttggccattttcacgttattatgagcatggaatgtttttccattcgtttgtgttctctcttatttccttgagcagtggtttgtaattctccttgaagagatccttcacgtccctcgtaygttgtattcctaggtattttattttctttgtagcagttgtgaatggaagttcactcataatttggctctctgtctattattggtgtataggaatgcttgcaatttttgcacactgattacaaaagataaacaggggaagagctaatcacctgatctacacatgaacataactca

SEQ ID NO: 872266 - DNA, 635 bp, Homo sapiens
tagattaacaaatataacggggatggattttccccaaatacagtttggcttggctgttctcacttaagcaccatttgacacctctccaccccttgccccatcctggcccaccaaagagatgcttctcccaaacacagcagaagctgactgcattcagggcccctgaggccctgctccctgctctcctgaggtcygaggcaggctgctatctgactgctggcccactctaagcttccaccatcctcctgccttaccccatcccgcccccagcacagaagggctgatgggcctcttggagtccagggttatgtgtttgtagcccctcaggtctctttggcttcagacacttcaaggaggtgattaactttccattgggatttttctggtgagggtcagagaggctgtcagccttcccagtggtttccttcaatttccttcctgaactgctatagcgcattcaagtctgcagactaaagtgactgtggttgtctaaatgaccagtggtcagggcccagagatgctcacgagttcttgctttaatgaaacacagagatctgtggattgcatggacttggctctggagtccatccacaggaaagagaatgtgtatttttgaaggatatcgacacacaccc

SEQ ID NO: 872267 - DNA, 385 bp, Homo sapiens
ggaagacaggaacttcctagcatgcatttttgtaacctccagaatgcctagccctacggcctcttcagagtaattgcaaaactatattgagttaaataattggaagacagatcattcctagatgatctttttgatcaacaacttttccacttgcatcatttatttacaatctcatctagaggcagaaatctagactacctgtccactccctaccccttccagatctatctttccacacygaaagatctagtatcaacacaggaaatcacactttcctttgtactaaagcaaagtggccagagagttccagaagtgagcagtgtttacaaataaacatctacacctgttctttaataaacatccgattttatttacaaagcattaa

SEQ ID NO: 872268 - DNA, 593 bp, Homo sapiens
taaagaatccccaattagctttccaatatacaccagtggactgacatcctcagccagtgctgcagatcacaagttctgtatgtgtgctcaggcactgcatgaacattggttaatagttgtggattgagatgtaaaacatcctggatcagcaggtctagtcacagatgcaaaatgttgatgcacartgatctgaaacaacctcttttttaagatgatgccttagttcatcaatagctaagaagacaggcaaggcaattatgttaaagaccaattcctttttgttttagattatacagtgtgttagggcatctgttgcaggtgctatatactctaagggatggcctaggcatcctgactttgttctttttctctgtcctgcctatccaagcctcatattatcatgcatagacagaggtgtctaaggtgggcctgggcataatgtagagatcatgaacctgaaagcatgctcaaagtctcacttttcccttaatagtttctttatggaaaagcagagataacatttaatccttaagttgatataagagttccatataagaatatcaccattctactctctgtatttaatgaatttg

SEQ ID NO: 872269 - DNA, 644 bp, Homo sapiens
taaggaacttaatgaataaaacaagtttcttgatttataaaatcagacaatcagggcctttaaagagagtaagacattatttatcaatattatttttgtgccttgacactatttacaaggtatcaaaaacaaatatggttyagaagtatcatatgcccagatactttcaacatgaacttttattcttaagcaattatgggaactgctcaatatattcaaatcaagttttgtcagtctttttccaaacctaaagtcattatgttcaataagtattggaaagtattagctctatctaaaagatggaagcattacctgaaaaaaagctgagtttaaaaacaaattcaataaatattagaaagtattagctctatctaaaagatggaagcattacctgaccaaaaaaaaaaaaaagctgagtttaaaaacactaacagtaccagatattcctctaaaaaatccatttattgagagtttatttgtattattattatcttcacttcctggatgataacagatcatgaaattaaatgtacaattatttccccccatttttcaatataaaactaatttagagtaattaatcaccatgaatttgcaattgatggagtcgtgttcctcatcttaattgttttctagacagatgg

SEQ ID NO: 872270 - DNA, 638 bp, Homo sapiens
cccaaaggaaagaaaattccatatcttttctccaaaagttaaaataatctgagtttaaaagaccataattatttagggtttgatttcttgagttaacatgttactatatttattttagagaaatgtgaaatctggaggcaaacttgttttgtcgggatggtctaaaccagtttttattctgatttttgtcattgtgtttgtttttgacmaggacaagctaattactgagaaaaaaaaatcaggtcttctaattcttaaactttaataaatatttctaaagcaaattttaatgacactttgtaaagtgattatccacctttatttgtttttggtaagagaaaacatgttaaaaatagtctaaaatcccatctttccaactttagaactcaatcaaaaacatcagcactgtgggaagaccagatgtctcccttggaaagcaaaccagtatataacaaggggtccagtctttctatgttttaaaacagaaatttttgaaaaaaaaagtagccctctataaaactttcaagcaatttcaaaaactgtatatttaaccaaacctttcagctttttgccaacttcctgcatgttgatggcagttggctgccagagaccagccttctgctttcaggttacagaat

SEQ ID NO: 872271 - DNA, 652 bp, Homo sapiens
atgaatcacatttattgatttgcatatgctgagtcaccttgcatcctggggataaagcctacttgatcgtggtggataagctttttgatgtactgctggattcagtttgccagtattttgttgaggatttttgcattgatattcatcaaggatattggcctgaagttttctttttttgttgtatctctgccagggttttatatcaggatgatgcaggcctcatagaatgagttagggaggagttcctcctcctcartttttgggaatagtttcagtaggaatggtactagctcttctttgtgcacctggtagagttcagctgtgaatctgtctagtcttgggctttttttggttggtaggctgtttactgcctcagtttgagagctcattattggtctgttcagggactcaatttcttcctggttcagtcttggaagggtatatgtgtccaggaatgtaacaatttcttccatattttctagtttatatgcaaaaaggtgttcataatattttctgatggtggtttgtattgctgtgggatcagtgctaatatctcccttctcccttgttgtttctgattgtgtttatttggatcttctctctcttcttctttattagtctaactagtagtatattttattatttttttaaa

SEQ ID NO: 872272 - DNA, 652 bp, Homo sapiens
atgaatcacatttattgatttgcatatgctgagtcaccttgcatcctggggataaagcctacttgatcgtggtggataagctttttgatgtactgctggattcagtttgccagtattttgttgaggatttttgcattgatattcatcaaggatattggcctgaagttttctttttttgttgtatctctgccagggttttatatcaggatgatgcaggcctcatagaatgagttagggaggagttcctcctcctcagtttttgggaatagtttcagtaggaatggtactagctcttctttgtgcacctggtagagttcagctgtgaatctgtctagtcttgggctttttttggttggtaggctgtttactgcctcagtttgagagctcattaytggtctgttcagggactcaatttcttcctggttcagtcttggaagggtatatgtgtccaggaatgtaacaatttcttccatattttctagtttatatgcaaaaaggtgttcataatattttctgatggtggtttgtattgctgtgggatcagtgctaatatctcccttctcccttgttgtttctgattgtgtttatttggatcttctctctcttcttctttattagtctaactagtagtatattttattatttttttaaa

SEQ ID NO: 872273 - DNA, 573 bp, Homo sapiens
gttcataatattttctgatggtggtttgtattgctgtgggatcagtgctaatatctcccttctcccttgttgtttctgattgtgtttatttggatcttctctctcttcttctttattagtctaactagtagtatattttattatttttytaaaaaaaccctagctcctggattcattgatctttttaatggcttttcatgcttcaatgttcttcagttcagttctgattttggttatttcttgtcttctgctagctttggaatttgtttgctctgggttctccagttattttagttgtgatgttaagttgttaacttgagatctttctaactgtttgatatgggcatttagtgccataaatttccctcttaacactaccttagctgtgtcccagagattctgatatgtagtatctttgctctcattagtttcaaaaaacttcttgatttctgccttaacttcattattcaaaagtcgttcaggagcaggttattcaatttccatgtaattgcatagttttgggtgaatttcttagtcttgatttctaatttgattctgctgtagtccaagaaa

SEQ ID NO: 872274 - DNA, 654 bp, Homo sapiens
catcttaaattgaagcttgccacattgattgactcttcctttcatgaaaaatttctctatagaatgtgatgctatttgataacactttactcagagtagatcttctttcaaaattgaagccaatcctttcaaaccatgttgctgctttttcaactaagttaatgtaatattctaattcctttgttgtcatatcaacaatgtttacagcatcttcaccaggagtagattccatctcaataaaccactttctttgctcatccataagaagtaactcctcatccattcaagttgcatcatgagaatgcagcaattcaatcacacatttaggttccacttctaattctagttctcttgctattgttttgttttgttttttttttaccatatctgcagttacttcctcccctgaagtcttgaacccctcaaagcatccttgagggttggaatcaacttcctccaaacttctgttactgttgatattttgaccttttcayacagatgaatgttcttaatgacatctagaatgatgaattctttccagaatgtttgcaattcattttactcagttacatcagataaatcactatctgtggcagctatagccttttgaaatgtatttcttaaataataagatttaaaagtcaaaattactcc

SEQ ID NO: 872275 - DNA, 626 bp, Homo sapiens
attaaaaaggggaggggactgggtgatgaaaacattactttttaagccaaagaagtgttattcagacactgttactaaagacatcgtttcccttgtagagaataaaaatcactagaataggctctcaagttataaaaatggtaagcaaataaccaacgattatctttggggtgaataataaagtccttattaacttgaatacagaaattcagatgagatgtaagtttgtcctgcttcttaacatattcaacatgcttctttcctaggcttgaccttaagtcaagcacatcaggagagatggtcaaactaaccttggcagctcacactggagaaagattctgaatgcattattgtctctagaccaggcaaccagtgtccttgctggtggccccatgccataaagggcccctctttcaccttccttcaacaatcactctcagtgcagcagcataatrtggtacaaaggggccaaaagggcagcaaatgttggttctggcataaactggttgtatgaccacaaattggttactttatattacttagcttcagttcctgtatttttaaattaatgtgttaaaattcctctgagtttaaaaataatgtatcttttaacataaaaaatactc

SEQ ID NO: 872276 - DNA, 626 bp, Homo sapiens
aggagtggtgagagagggcatccctgtcttgtgccagtttgcaaagggagtgcttccagtttctgcccattcagtatgatattggctatgggtttgtcataactagctcctattattttgagatacatcccatcaatacctartttattgagagtttttagcatgaagggctgttgaattttgtcaaaggccttttttgcatctattgagataatcatgtgggttttgtctttggttctgtttataagatggattacatttatcgatttgtgtatattgaaccagcttgcatcccagggatgaagccaacttgatcgtggtggataagctttttgatgtgctgctggattcagtttgccagtatgttaatgaaggtttttgcatggttgttcatcagggatattggtctaaaattctatttttttattgtgtctctgtcaggctttgatatcaggataatgctggcctcataaaatgagttagggagggttccctctttttgtattgattggaaaattttcagaaggaatggtaccagctcccctttgtacctctggtagaatttggctatgaatccttctggtcctggactttttttggttggtaggctattaattattgcctca

SEQ ID NO: 872277 - DNA, 632 bp, Homo sapiens
  misc_feature 3, 34: n = A,T,C or G
gtntaagagattctgctatgttgtgtcttatttntcattggtttcaaagaacatctttatttctgccttcattttgttacatacacagtagtcattcaggagcaggttgttcagtttccatgtagttgagtggttttgagtgagtttcttaatcctgagttctagtttgattgcactgtggtctgagagatagtttgttataatttatgttctttcacatttgctaaggagtgctttacttccaactatgtggtcaattttggaataagtgcgatgtggtgctgagaagaatgtatattctgttgatttggcrtggagagttctgtagatgtctattaggtccacttggtgcagagttgagttcaaaagcacagtattagggtgggagtgtcccgattttccaggtaccgtctgtcatggcttcccttgactaggaaagggaatttcctgaccccttgcacttcctgggtgaggcaatgccccgctctgctttggctcacactccgtgggctgcacccactgtccgacaagccccagtgagatgaaactggtacctcagttggaaatgcagaaatcacccatcttctgcatcactcacgctgggagctgtagctttgagctgttcctatttg

SEQ ID NO: 872278 - DNA, 600 bp, Homo sapiens
ggaatgctttcaacttttccccatttggtattatgttggctgtgggtttgtcatagatggcttttattacattgaggtattatgttccttgtatgccaattttgctgagagttttaatcataaagtatgctagattttgtcaaatgctttttctgcatctactgagatgatcatgtgattttggtttttaattctgtttatgtggtgtatcacatttattgacttgygtatgttaaaccatccctgcatccctggtattaaactcacttgatcgtggtggattatctttttgatatgttgttggattcggttagctagtattttgttaaggattttagcgtctatgttcatcagggatatcagtctgtagtttccttgattggttatgtcctttcctgatttgggtattagggtgatgctggcttcatagaatgaattagagagggttccctctttctctatcttgtggaatagtgtcaacagcattggtaccaattcttctttgaatgtctggtagaattctgctgtgaatctgcctggtcctggactttcttttggttggcaattatttagttacaatttcaatctcactgcttgtta

SEQ ID NO: 872279 - DNA, 646 bp, Homo sapiens
aaaacaggaacataacaggatctatcactcacaatagctaataatacagaaaaccaaattatcaggatgagatattttcctaggtctgaaatctgagaagtaacattgcatgagtctattttggggaatttttggaatcacatataatattgtaattaggccytgaaggaaagaaaaaaaagaagatagtaacttggtgtaaataatgaattcaggctgggtgcagtggctcacacctgtaatcctagcactttgggaggccaaggcaggtggataacctgaggtcaggggttccagagaccagcctggtcaacatgatgaaaccctgtctctactaaaaatacaaaaagtagccaggtgtggtggcacatgcctgtaatcccaactacttgggaggctgaggcagaattgcttgaacctaggagatggaggttgctgtgagctgagatcatatcactgcactcctgcctgggagacagagcaagactgcatctcaaaaaataataataaattaattaattaatacattaattcataaagataaaatagaaaaaatcaccgatgcaggtgaagacaagatctagaagactgaaggaaatatcgaatgtgcaccactggtgtggtcaccaatcaggcatactgcccc

SEQ ID NO: 872280 - DNA, 583 bp, Homo sapiens
tatgagataataaatatcttttgtcttaaatctctctgtttgggggtaatttgctatgcagaagtagataaataataccctgtttaattggtaaacagcaaagacattcttttgacagctggtagactgctgtagaggacctcacttctggaagggtagcagcaaaagagattttcttgagttccttcacatattttttcctttggcttagctcagttcctgcccaaaaaggatgggactgcgaaatgtaattttcctctcttattctgcccttgtagctcttagaatatttaaattgtgcctggtcatcctttatcctttaccatgataacacacttaacacttcctagtggataatcctttttcaatagctttaagaagtactttttaataaaattcttactacttaagtaaaactcgtattcwtcatagaaaatttagaaaaaacagggacgtaagaaaggaaactaaaaattacctgtaattttgctacccagaaatccatcactgcggatgtacatccttcaaacaaatatattataattatttaggtactctggttttaaagaatttaacaataata

SEQ ID NO: 872281 - DNA, 600 bp, Homo sapiens
cattttaggttaggtttctgacatattttttccccaacgaacttccttaaacattgaatagatactgtggcattaaatcctcccagattttctagatctggaaaagctttaacttctttttatcattgaaggtggttttactgaatattaaattttggttggaaagttgttttactttaagcactttaaatatgtcattgcattgttttttatgattgcatgctttttttctcttttcttttcccttttttagaggcagggtcttgctctgtcaaccaggctggagtgcagtggygggattgtaccttactgcagtctccaactcctggactaaagtgatcctctcacctcagcctcctgagtagctgaaactataggctcttgccacctcagctggctaatttcttaaagatttcttttagacacgtggtctcactatgttgcccagactgatctcaaagtcctggcctcaagtgatcttcccacctcagcttctcaaagaattgggattacaggcatgaaccactgcatccagcctattttttgggtttctgaaaataattctgctatatttgttattctagtccctctacaggtaat

SEQ ID NO: 872282 - DNA, 600 bp, Homo sapiens
cattttaggttaggtttctgacatattttttccccaacgaacttccttaaacattgaatagatactgtggcattaaatcctcccagattttctagatctggaaaagctttaacttctttttatcattgaaggtggttttactgaatattaaattttggttggaaagttgttttactttaagcactttaaatatgtcattgcattgttttttatgattgcatgctttttttctcttttcttttcccttttttagaggcagggtcttgctctgtcaaccaggctggagtgcagtggtrggattgtaccttactgcagtctccaactcctggactaaagtgatcctctcacctcagcctcctgagtagctgaaactataggctcttgccacctcagctggctaatttcttaaagatttcttttagacacgtggtctcactatgttgcccagactgatctcaaagtcctggcctcaagtgatcttcccacctcagcttctcaaagaattgggattacaggcatgaaccactgcatccagcctattttttgggtttctgaaaataattctgctatatttgttattctagtccctctacaggtaat

SEQ ID NO: 872283 - DNA, 625 bp, Homo sapiens
atcagggaatagggtaaagaaacgattctctatgtctggactcagcatagatagctttgaaaaagaagaaagcctactttttataaatactttatacagaatagctttttttttttgtcattgggtagtaacagccaaatgtttagtggatgtagtttttcttattaattaatcacttgagatttttatttgtctttcataaagtcttttaaaaaaataaagaataaaaatattaaaatctttttagaagcttttctacatcaataggcattccttcatgggcctaattcargagccctcatttaaaaatgtacttttacaagtacagtgttcatttggaatgttctactgtaattttaaattactttagtaagctttttcaatttctataagcatttgctgcttttgaggcctaatatgcatgtaaacataggtgtagctggtaggtagagtgggtagagttctttagaaataaggttatttgctttggttctcagatctccttgatctacttagtcaatgattttttccccacctaaacatgcaaggaaaagaaacaaaggggatagaacacgaaaaacatgaatttctgaaagccagagttggcacattctgcagcatttct

SEQ ID NO: 872284 - DNA, 625 bp, Homo sapiens
atcagggaatagggtaaagaaacgattctctatgtctggactcagcatagatagctttgaaaaagaagaaagcctactttttataaatactttatacagaatagctttttttttttgtcattgggtagtaacagccaaatgtttagtggatgtagtttttcttattaattaatcacttgagatttttatttgtctttcataaagtcttttaaaaaaataaagaataaaaatattaaaatctttttagaagcttttctacatcaataggcattccttcatgggcctaattcaggagccctcatttaaaaatgtacttttacaagtacagtgttcatttggaatgttctactgtaattttaaattactttagtaagctttttcaatttctataagcatttgctgcttttgaggcctaatatgcatgtaaacataggtgtagctggtaggtagagtgggtagagttctttagaaataargttatttgctttggttctcagatctccttgatctacttagtcaatgattttttccccacctaaacatgcaaggaaaagaaacaaaggggatagaacacgaaaaacatgaatttctgaaagccagagttggcacattctgcagcatttct

SEQ ID NO: 872285 - DNA, 666 bp, Homo sapiens
cctaacagacagctacagaatactccacccaacaaccacagaatacacattcttctcatccacatagggaacatattctaagatcagccacatgcttggtcataaaacaagtctcaataaattcaaaaaaattaaaatcatatcaaacacacactttgaccacagtgcaataaaaatagaaatcaataccaagaaaatttttcarcactaaactaaaacatggaaactgaacaacttgttcatgagtaactctcgggtaaacaatggaattaagacagaaattttaaaaaatcaaaattaatgaaaatagagatacaactaaccaatatctttgcaatgcagctaaagtagtgttaagaggaaggtttataacactaaatacatctagaacttagaaagatctcagattaacaacctaacatcacacctagaggaactgtaaaaaaaaaaaaaagaaaacaaaccaatctcaaagctagcaggagaaaagaattaaaatcatggaagaactgaatgaaattgggaagtaaaaatccattaaagaaaacaataaaaccaagagttggttctgcaaaataataagcaagatggatagactaccagctagaaaaacaaagaaaaaaaagatttaaataagcgcaatcagaaatgacaaagttgatatta

SEQ ID NO: 872286 - DNA, 629 bp, Homo sapiens
ttcatctctagataagttattaagaaaaaaataagattctctacagtgaagctataggtcatgcaatacaatactaccaaaattaatttaaatatttctgaaacatgcatggattgagttcatggaatttttttatgagcttggttttgaaaagactcataaacacttatatgtaataatgcaaaacactactctacaatattcacaataaaagktcacctaaagactgtttgctcatatccaatgacagagaactcaccacatcaggaggcatttatttcaaatttgataagttatatccgacctaatcaaagaaaggagccgtgtttctgtgttataaaatgaagtcttactctttatggtatttataggcagacattaaataatgaagtgagttatcaatagtcaaactcaaatgaaattgttcaaattgaaacaatcatttctcaagaaataccgttaaattctcagcagtattcataagactattataaatgcaccaataatattttatccagaaaaaatataaattatttctcctagttcttttttaatattgatttgttttctatatttcctataatgaatccacaacatactcaattgggtctttattctcttgatcagaa

SEQ ID NO: 872287 - DNA, 378 bp, Homo sapiens
gttttgcacattgattttgtattctgagactttgctgaagttgcctatcagcttaaggagattttgggctgagatgatggggttttctgcatatacaatcatgtcatctgcaaacagggacaatttgacttcctcttttcctamttgaataccctttatttctttctccagcctgattgccctggccagaacttccaatactatgttgaataggagtggtgagagagggcatccctgtcttgtgccagttttcaaagggaatgcttccagtttttcccattcagtatgatattggctgtgggtttgtcatagatagctcttattattttgagatatgtcccatcaatacctaatttattgagtgtttttagcatgaag

SEQ ID NO: 872288 - DNA, 588 bp, Homo sapiens
caggttgccttccttatcactacctacaaaaattaactgcagatggattaaagacttaaatgtaaaacccaaaactataaaaaaagaaaaaaaaaaaaaccctgggagacagccttgacaataccattctggacataggaatgggcaatgatttcccatgacgaagatgccaaaagcagttgcaacaaaaacaaaaattgacaaaaggaatctaattaaactaaagagcttctgtgcagcaaaagaaactatcaacagagtaaacaggcaacctacagaatgagagrccatttttgcaaactatgcatctgacacaggtctaatatccagcatctgtaagaaactcaaacacatttacaaacaaaacaaccccattaaaaagtgagtggacatcaacagtcacttttcaaaagaagacatacatgcagccaacaggcatatgaaaaaaagctcaacatcacttatcattaaagaaatgcaaatcaaaaccacaatgagatagcatataagaccagtcagaatggtgattattaaaaagtcaaaaaataacaggtgctggtgaagttatggaaaaaaaggaacacatac

SEQ ID NO: 872289 - DNA, 619 bp, Homo sapiens
gtgccacagtcttttgctgcacccatcaacccgtcatctacattaggtattcctcctaatgctatccctcccctagcccccaacccccgacaggccctggtgtgtgatattcccctccctgtgtccatgtgctctcattgttcaactcccacttatcagtgagaacatacggtgtttggttttctgttcttgtgttagtttgctgagaatgatggtttccagcttcatccatgtccctgcaaaggacatgaactcatttatgtctgcatagtattccgtggtrtatatgtgccacatttcctttatccagtctatcactgatggacatgtgggttggttccaagtctttgctattgtgaacagtgctacaataaacatatatgtgcatatgtctttgtagtagaatgatttataatcctttgggtatatacccagtaatgggattactgggtcaaatggtatttctggttctagatccttgaggaatcgccacactgtctcccacaatgactgaactaatttacactcccaccaacagtgtaaaagcattccttggccaggtgcagttgctcacacctgtaatcccagcactttgggaggctgaggcaggtggatcatg

SEQ ID NO: 872290 - DNA, 643 bp, Homo sapiens
ttaatgaagttttgggaaaagatgtcagtctgtttgtagtagcagtgttttcattatttggctttgattgtttctgctttatttttggaaaacaaaatcaacctaacagcatggcctcttgtaatgttatcttagggcctcatatacttccatccctagcgcctccttctgaaagacaatctcttggtgacaaggggcttgaatttaacgtcatgagtaagttctcaaaaatctgtcactggcctaacatctaggcttaccattagtggaagtcagtgatatgagtttggggagtcttttctgtttgctaaattctaaaatgtgcctatatgcawgatcagatgctgtatgtagggaacacagtttctctatcccacagccagaataaaggttgaaatgaactttaatgttcattgatttctgggttttggtctcactgacaactaaatttttttaaatgttggaatgctagagggtggagaacagaaaaagttgctaatttttaattttgccaattaataacattcaacaaaactgaacaaagaatccccactctctaaacattcatagttctcttttcactttttaaaaaggataatttaacacagaaggacataataacatagtcttagaatagtttccc

SEQ ID NO: 872291 - DNA, 595 bp, Homo sapiens
ttcacagtagtctgtgatgatcttttgtatctctatgttatcaattgtaatatcacctttatcatttccggttgtacttatttgaattttctctttcttgttggttaatttagccagcagtctgtcatttttgtgtaacctttcaaataaccaactttttgtttcactgatcctttatatctttttttgtctcaatttcatttacttctgctttaatccttgttatttctttttttgtgctagctttgggttccaattggtcttatttttctagttccttgargtgtgacatcaggttgtaaatttaagatctttctatctttttggtgtagacatttaaagttataaactttcctcttagttctacttttgctgtatccctgaggttttgatatgttgcctattttcatttgttttgaaaatttttttgatttcttaatttcactgtttacccaaaggtcactcaggagcaaggtgtttagtttccatgtagtgtgtgtttatgagagttcctcttggtcttgatttctaattttactccactgtggtccgagaagatacttgatatgattttgattttttggaatttattggg

SEQ ID NO: 872292 - DNA, 595 bp, Homo sapiens
ttcacagtagtctgtgatgatcttttgtatctctatgttatcaattgtaatatcacctttatcatttccggttgtacttatttgaattttctctttcttgttggttaatttagccagcagtctgtcatttttgtgtaacctttcaaataaccaactttttgtttcactgatcctttatatctttttttgtctcaatttcatttacttctgctttaatccttgttatttctttttttgtgctagctttgggttccaattggtcttatttttctagttccttgaggtgtgacatcaggttgtaaatttaagatctttctatctttttggtgtagacatttaaagttataaactttcctcttagttctacttttgctgtatccytgaggttttgatatgttgcctattttcatttgttttgaaaatttttttgatttcttaatttcactgtttacccaaaggtcactcaggagcaaggtgtttagtttccatgtagtgtgtgtttatgagagttcctcttggtcttgatttctaattttactccactgtggtccgagaagatacttgatatgattttgattttttggaatttattggg

SEQ ID NO: 872293 - DNA, 595 bp, Homo sapiens
ttcacagtagtctgtgatgatcttttgtatctctatgttatcaattgtaatatcacctttatcatttccggttgtacttatttgaattttctctttcttgttggttaatttagccagcagtctgtcatttttgtgtaacctttcaaataaccaactttttgtttcactgatcctttatatctttttttgtctcaatttcatttacttctgctttaatccttgttatttctttttttgtgctagctttgggttccaattggtcttatttttctagttccttgaggtgtgacatcaggttgtaaatttaagatctttctatctttttggtgtagacatttaaagttataaactttcctcttagttctacttttgctgtatccctgargttttgatatgttgcctattttcatttgttttgaaaatttttttgatttcttaatttcactgtttacccaaaggtcactcaggagcaaggtgtttagtttccatgtagtgtgtgtttatgagagttcctcttggtcttgatttctaattttactccactgtggtccgagaagatacttgatatgattttgattttttggaatttattggg

SEQ ID NO: 872294 - DNA, 595 bp, Homo sapiens
ttcacagtagtctgtgatgatcttttgtatctctatgttatcaattgtaatatcacctttatcatttccggttgtacttatttgaattttctctttcttgttggttaatttagccagcagtctgtcatttttgtgtaacctttcaaataaccaactttttgtttcactgatcctttatatctttttttgtctcaatttcatttacttctgctttaatccttgttatttctttttttgtgctagctttgggttccaattggtcttatttttctagttccttgaggtgtgacatcaggttgtaaatttaagatctttctatctttttggtgtagacatttaaagttataaactttcctcttagttctacttttgctgtatccctgaggttttgatatgttgcctattttcatttgttttgaaaatttttttgatttcttaatttcactgtttacccaaagktcactcaggagcaaggtgtttagtttccatgtagtgtgtgtttatgagagttcctcttggtcttgatttctaattttactccactgtggtccgagaagatacttgatatgattttgattttttggaatttattggg

SEQ ID NO: 872295 - DNA, 626 bp, Homo sapiens
agcattttgtaacagggatactcaacctgtacactgaagaatacacaggaaggcaactcagagtgagtgagaccattaggaagttacggcagtagtcttaggtaagagatgttgcgcacccaagttggcagcgagaaagggataggaaagacaacagaaaacataaaagagattgttaaaattaatacattgatttactgggggtggggtggggtgagctggagatgaaatagaccaagaaaaagaaaatgtggcacatatacaccatggaatactatgcagccataaaaaatgatgagttcatgtcctttgtagggacatggaggaagctggaaaccatcattctcatcagactatcgcaaggacaaaaaaccaaacaccgcatgttctcactcataggtgggaactgaacaatgagaacacatggaygcaggaaggggaacatcacacactggggactgttgcggggtgggaggagtggggagggatagcattaggagatatacctaatgttaaatgacaagttaatgggtgcagcacaccaacatggcacatgaatacatatgtaactaacctgcacgttgtgcacatgtaccctaaaacttagggtataataataataaaaa

SEQ ID NO: 872296 - DNA, 591 bp, Homo sapiens
aattatgatgcaccaaactattatacagcagttgctcatggaaaaaatgtttgaggataaatattttatacatcctaaaaatgactagtcaagtctgttattacacagtcagtttctcaaacaccttcattcattcaaggtcagagctactggaaattcagtgtaatattctttttgatgcattagtaaacaccctagagccaagtagagccaaagacttactcctggagagttaattgtgcaggcaatgttcttggcatagagaaataaaatttatggaaattgctgctgtcaatgtsagtcataaacacaggatccaaccctatagctgcacaactcatctcaccttaccctcaaacctgtcctatctttatttaaaatttcaacattttttatcataggtttttggtatgaattttgattttttaaaatattacattgaaatattaccttcactgctgaaatttttggcatatttttgagtcatgtgccctaatctcccagtgccagccctaactatgacttccccaggggtagtcctaagtttctctgccagagggaaggattatatttaattttgatggcccttta

SEQ ID NO: 872297 - DNA, 528 bp, Homo sapiens
gttcttttggcttaggactgtcttggcaatgtgggctcttttttggttccatacgaacttttaagtagttttttctaactctgtgaagaaagtcattggtagcttgatggggatggcattgaatctataaattaccttgggcagtatggccattttcatgatattgattcttcctatccatgagcatggaacattcttccatttgtttgtgtcctcctttatttcgttgagcagtggtttgtagttctccttgaagaggtccttcacatcccttgtaagttggattcctaggtattttattttctttgtagcagttgtgcatgggagttcacttatgatttrgctctctgtttgtcttttattggtgtatattaatgcttgtgagtttttttttttttttttttttttttggatggagtctcgctctgttgcctaggctggagtgcaatggtgtgatctcggcttgctgcaagctccacctcccgggctcatgccattctcctgcctcagcctcccgagtagctggga

SEQ ID NO: 872298 - DNA, 601 bp, Homo sapiens
acaacctaagttttgtcttaaatttttttggctctcccatgatagaagaaggacttcttttctgctatgaaggaggcactctgccctttacacttggatttcaattgtttattaagggccattaagttttcattaggaagagcattgttatgacttaatgacagcaagccagttccactctctatgcattgtttctgtacttttagaaacaccaaagtgtttccttctataagaatagtttcccaagtggctactagtgaatggctagaaatgactctgcctccttgtgccagagactgactattcatgactcacgtaccacatggaatgatgtcttcattatcagwggagtggccagcaattcagtcctggaaccgcatctttactgcctaatttctcagactactattggtgtcggttgtgttctctgggaaacagatactgggccagggataaaaaactgaaaaaggatttttgtgaaaggaaaaggaaggaagcaggattgtgtggaaggaactgttagcctatgaggcagataggacaaaatgtttgccagaccaatgaggagctccagggcaaggtcgacctgttagagaggttc

SEQ ID NO: 872299 - DNA, 431 bp, Homo sapiens
gtaatgagtgtggatagaagaggagggtggggaatgagcctaataaatcagcatttataagttagcaagataaggagaagctgcaaaggagagagagagaggaaggggtaaggtaagagctttgaaaaagtggaccgcatgttctcactcataggtgggaattgaacartgagaacacttggacacaggaaggggaacatcacacaccagggcctgtcgtggagttgggggagcggggagggatagcattaggagatgtatctaatgtaaatgatgagttaatgggtgcagcacaccaacatggcacatgtatacatgtgtaacaaacctgcgtgttgtgcacaagtaccctagaacttaaagttaaaaaaaaaaaaaaaaaaaagaaagaaaaagtgaagtgcttctctagagctcaacagaagaaagag

SEQ ID NO: 872300 - DNA, 624 bp, Homo sapiens
tatttgccacacattttttgctcctacaagcagtatcagaaaattgtatccagtttatctgaatcctagtaacactgaaatctaaaaacttttaagcctaaagataaaccttgttcaagaaaactgatgccattaataattttaatttatttttaattttagttgctttattgaagtataattgaaatacacagaactagacatatttagtgcatacatctaatgagtttgaacatgtgccaaactcatgatgccatcaccaccgttgaggcaatacacatatcactacaaagagaataatatacctaggaagacaacttacaagggatgtgaaggaccttttcaaagagaactacaaacaactgctcaaggaaataagagaggacacaaamaaatgggaaaacactcacgctcatggataggaagaatcaatattgtgaaaatggccatactgcccaaagtaatttatagattcaatgctctccccaccaagctaccattgactttcttcacagaattagaaaaagactactttaaatttcatatggaaccaaaaaagagcccatatagccaagataatcctaagcaaaaagaacaaagctggaggcgttacgctacctaact

SEQ ID NO: 872301 - DNA, 640 bp, Homo sapiens
acaggactggaaaggactttgggaggtcatatagacatcagcttgctgctctgaacaagactaaatccaaaccttgaaaacaaatgatgtttaaagacttatagaaaatgctttgtgatacagtttttcattttataaaaatgttatttggtggacgtcatggtgttccwtaaaatacatacatcttacatttttggtccattaaagggatatttatcactgaaataaattatttgctaggctccaatggtccagaattggggcaagggaagtactaagcatgtataacattagcattgctttattgatggcagtacaaatgctacagatgttgttgattccattcagtttggtctttacttttaatctagtttactcacttctacatataaatgagaattaatattttccaggttaatttttcataaaacaaccctccaaacctgcagaactgggctcacttactagctacatgatcttgaacagattaatctctctattcgcagtttcctttcctattaaactactatgatgtatggaatgcgcaagatttgggaagagcaaagcacagaatgtaggtaaactgttaagcagaatttctggcgcacagaacttgctcaataacggcaggatgcctcct

SEQ ID NO: 872302 - DNA, 588 bp, Homo sapiens
tcatatgttcattgcagtactattcacaatagcaaagacatggaatcaacttaggagcccatcactggtggactggagaaagaaaatctggtacacatacaccatgtaatactatgcagccatacaaaaaaaaaaaagatgagattatgtcctttgcaccaacatagagctgtaggccattatctgaagcgaattaatgcaggaaaagaagaccaaatactgcatgttctcacttataagtgggagataaacattgagtacacatggacacaaagaagggaacaaaagacactgaggtttaattcagggtgtaggctgggaggagagtaaagatcaaaaaccacctatcagatactatgcttactacctgtgtcataagcatartgtctgtaacctactgggtacaccaaagccccgtgacatgcaatttacctctataacaaacctgcacttgtacccttgaatctaaaataaaagttaaaaaagtaaaatttaaaaagagaaggctataaaaactaggaaaacaatttaggaaatgcaaaatctgacttacagccattccagaaagaatgaaaaaaatgatcaaga

SEQ ID NO: 872303 - DNA, 587 bp, Homo sapiens
aattacttttaaaaatttatacactgaataaaatctaaaaaatatataaacagccagagagaataaatattatctttttgggccaggtgcggtggctcatgcctgtaatcccagcactttgggaggccaaggtgggtggatcaccagaggtcaggagttcgagaccagcctgaccaayatgatgaaactctgtctatattaaaaatataaaaattagctgggcatggtggcaggtgcctgtaatcccagctacttgggaggctgaggcaggagaatcacctgaaccgaggaggtggaggttgtagtgagccgagatcatgccactgcactccagcctgggcaacagagggagactctgtctcaaaaaaaaaaaaaaaaaaaaaaaaggttatctttttggtgatttttatttgtaaaaatgtgataattctcaatacaattttgaacacagcatttttaaaaattattcaatagcatcaatatattttaaatgcattattttaatggttgcagaataatttctgtctgtggtataatttatttataaatgtccttatatatattttcatattaataatgctgagata

SEQ ID NO: 872304 - DNA, 587 bp, Homo sapiens
aattacttttaaaaatttatacactgaataaaatctaaaaaatatataaacagccagagagaataaatattatctttttgggccaggtgcggtggctcatgcctgtaatcccagcactttgggaggccaaggtgggtggatcaccagaggtcaggagttcgagaccagcctgaccaacrtgatgaaactctgtctatattaaaaatataaaaattagctgggcatggtggcaggtgcctgtaatcccagctacttgggaggctgaggcaggagaatcacctgaaccgaggaggtggaggttgtagtgagccgagatcatgccactgcactccagcctgggcaacagagggagactctgtctcaaaaaaaaaaaaaaaaaaaaaaaaggttatctttttggtgatttttatttgtaaaaatgtgataattctcaatacaattttgaacacagcatttttaaaaattattcaatagcatcaatatattttaaatgcattattttaatggttgcagaataatttctgtctgtggtataatttatttataaatgtccttatatatattttcatattaataatgctgagata

SEQ ID NO: 872305 - DNA, 601 bp, Homo sapiens
gactgcattttgactcaatataccaaaatgataatttcctggcataggataaagaacgttcagaaagatctgaaataatttgttttgcaaaatataatactttcaaacaaataaaatgactttgaatcatttcttatttattattttaaaaatctcaaaatagatgacagtcaggagcaaacaaaaatataatttaagtagatttaaaagacartgttttgggccaaatggtatttccagttctagatccctgaggaatcgccacactgacttccacaatggttgaactagtttacagtcccaccaacagtgtaaaagtgttcctatttctccacatcctctccagcacctgttgtttcctgactttttaatgattgccattctaactggtgtgagatggtatctcattgtggttttgatttgcatttctctgatggccagtgatgatgagcattttttcatgtgttttttggctgcataaatgtcttcttttgagaagtgtctgttcatgtccttcgcccactttttgatggggttgtttgtttttttcttgtaaatttgttggagttcattgtagattgtggatattagccctttgtca

SEQ ID NO: 872306 - DNA, 601 bp, Homo sapiens
gactgcattttgactcaatataccaaaatgataatttcctggcataggataaagaacgttcagaaagatctgaaataatttgttttgcaaaatataatactttcaaacaaataaaatgactttgaatcatttcttatttattattttaaaaatctcaaaatagatgacagtcaggagcaaacaaaaatataatttaagtagatttaaaagacaatgttttgggycaaatggtatttccagttctagatccctgaggaatcgccacactgacttccacaatggttgaactagtttacagtcccaccaacagtgtaaaagtgttcctatttctccacatcctctccagcacctgttgtttcctgactttttaatgattgccattctaactggtgtgagatggtatctcattgtggttttgatttgcatttctctgatggccagtgatgatgagcattttttcatgtgttttttggctgcataaatgtcttcttttgagaagtgtctgttcatgtccttcgcccactttttgatggggttgtttgtttttttcttgtaaatttgttggagttcattgtagattgtggatattagccctttgtca

SEQ ID NO: 872307 - DNA, 596 bp, Homo sapiens
catacgtatctaaagttaaatttatagattaagcacaataagaaattcacaagtaataacaaaataaaacaattataacaataatcaaagttatgtgaacgcgggacttcctgtctctcactcacacacacaatgtcttatcgtgctgtactcacctattttcagaacttagttgaacatgggtcagtaaaactgcagaaagmaaaattgcagataataagggactactgtataggtatgtatatctttgggtgtgtatagagagagatcttcatatatatatgccttctgtatatgtgtgagtatatttaggtgtgtgtgtatatatatatgtatacttatgtgaagatatatgtatatgaagatacagacacacacacagagatacacacacatatacagtagtccctcatacacaaagatacatatatatctttgtatatatgtgtatatacaaagatgtatatatgtatatataaggatgtatatatgtgtacatgcaaagatgtatatatgtatatacaaagatatatttgtatatatgtgtatcattgtacatatatatacacacacacaaagttacacacacatacaca

SEQ ID NO: 872308 - DNA, 651 bp, Homo sapiens
ggggagagagccagaccatatcattccacccctggtctctcccaaatctcatgccctcacatttcaaaaccaatcataccaccccaacagtcccccaaagtcttaactcatttcatcactaactcaaaagtccacaattcaaagtctcatccaagacagggcaagtctattttgcctatgagcacgtaaaatcaaaagcaagttagttacttcctagattcaatggtggtataggcattgrgtaaatatagccatttcaaatgtgagaaattggccaaaacaaagggattacaggccccaagcaagtctgaaatccagcagggcaggcaaatcttaaagaacaaatgatttccttttattgcatgtctcacatttgggtcatgctgatgcaagtggtgggttcccattgtcttgggcagctccacctctgtgactttgaaggatatagcccctcctggctgatttcacaagctggcatggagtgtctgtggcttttccaggtgcacggtgcaagctgttggtggatctgccgtattctgggagctggaaaatggtggccctcttctcacagctccactagtcagtgtcccagtagggactctgcatgggggcttcaaccccacatttccctttaacactccctaacaaagg

SEQ ID NO: 872309 - DNA, 660 bp, Homo sapiens
atgtgtaaacgcaaaggaaaagtttatgaaggatattagaattgttactccagtgaacacatgaatgataagaaagctaaacagctttattgttgatatttgagaaatgtgagaaatctggatacaagatcaaaccagccacaacattcccttaagtcaaaccctattccagagcaaggccctaactctcttcaattctctgaaggctgagygaggtgaagaagctgcagaagaaaagtttgaagccagcagagaagatttaaggaaataagtcatcttcataacataaaagtgtaaggtgaagcatcaagtgctgatggagaagctgcagcaagttatacagaagatatacctaaggtaattgataaaggtagattcatcaaacaatagattttcagtcttctattttccaattttctgttggaagaagatgtcatctaggactttcacagctaaagaggagaaatcaatgcttggcttcaaagcttcaaagcacaggctgactcttgttaggacttaatgagctggtgactttaagttgaagctaattctcatttcccatttcaaaaaccctagagcccttaagaattttgcaaaatctactctaaatctactctatgctaaatctgctctgtaaatggaacaacaaagcctggatga

SEQ ID NO: 872310 - DNA, 660 bp, Homo sapiens
atgtgtaaacgcaaaggaaaagtttatgaaggatattagaattgttactccagtgaacacatgaatgataagaaagctaaacagctttattgttgatatttgagaaatgtgagaaatctggatacaagatcaaaccagccacaacattcccttaagtcaaaccctattccagagcaaggccctaactctcttcaattctctgaaggctgagcgaggtgaagaagctgcagaagaaaagtttgaagccagcagagaagatttaaggaaataagtcatcttcataacataaaagtgtaaggtgaagcatcaagtgctgatggagaagctgcagcaagttatacagaagatatacctaaggtaattgataaaggtagattcatcaaacaatagattttcagtcttctattttccaattttctgttggaagaagatgtcatctaggactttcacagctaaagaggagaaatcaatgcttggcttcaaagcttcaaagcacargctgactcttgttaggacttaatgagctggtgactttaagttgaagctaattctcatttcccatttcaaaaaccctagagcccttaagaattttgcaaaatctactctaaatctactctatgctaaatctgctctgtaaatggaacaacaaagcctggatga

SEQ ID NO: 872311 - DNA, 653 bp, Homo sapiens
tggtggtgcatgcctgtagtcccagctacctgggaggctgaggcaggagaaccactggaacccgggaggcgaaggttgcagtgagtggagatcatgccactgccctccagtctgggctacaatgtgagaccctgtctcaaaaaaaaaaaaaaaaaaagtagtagtgacactgaaatatactaccttattgtatacttacctatgatcctcacattaaaaatgttataacccaaaagcgatttaaaaactaacatatatgcttttttaaaaaatgcattaaatggtattttatctgtaagataatacacaaagagctatttgaccccaaatgtagctaaaactaattaatttatatttttgttctagtttattttcattgtattataaaggtaatgttttccacctgattcatttgtttcttattccagtgtttttattttccagttaaaaaggcttttgtgacatcttaaattatttagcagagrggcatggccataggattggcaatatatcttctctttttaacttctcccctatcttatggagatggaaattttgggttctaagtaataaggaacaaacagttgagagagaacttcaaattttaaaactatgggaattcatttccaaatgcacattgattaaatagtgga

SEQ ID NO: 872312 - DNA, 552 bp, Homo sapiens
aactcccaatttctctgataaagcaaacaagtgtagttctacattttcattctaaaccataaatgctctctatgcatactctttctgctgaaaatattcatattgttttcccagattctataaaacctcatcagtaacctttacaaataaaaaagaagattaattattgagctgactatatcaacgatttcagtttccctgtaacgctgggagactgaaggaatatttctaatattcatgattcatgctcaatagagagaaaggaatgatgcccttcagagaaagcaagtcactggaatgacatctcttcacatgatagctttttgtatacttayagtatcaaggtaaagcaactcactggtctattacatttttgccagcctttcctgaaagtatcagtatgaaatcaagtgaacaagagatgcctgaaggaatgtagtaatctactgtaactgagatgtaaaattcttgaaaaaaattaagtaacattccaggtttaattcaacaaccaactactagtaccttcctatttttttctctgtgcaaattctt

SEQ ID NO: 872313 - DNA, 630 bp, Homo sapiens
tttttccaacaaattttgaaacatttggtctattaattgattaactatttttgttctattatcacttttatttttttggaacttcaattttatgtatgctagactgcttaacattattcacacaggttactgaagatgtgttaatcttttttcagtcttttwctatctgttctttagcttgtatactttttattgctctgtcttcaagttaactaattctttctgtgctgtgtctcatttgttaataattcatccagtgacttttaagtttctggtatagtttttaagtgttagaatttctatattttaagggtctcaatttctcttctgagatttcccattcatccttttgttttaattatgactaccccccactttaaagttattcaatgtattttgtcattttttctgctaaattaaaaaaaaaaaaaactaagtaatcccagggtctatttcaatagattttttttcctcttgactatgcatcccagttttctgggttttaaatatgtgtcttataattttaatgaacacagtagatgatactttacagagataatatgttctgttatgctcctctgtagaattatttttgttatagaaggttgattatcttgaacttgtggtatt
